United States Patent Application Publication US 2004/0234960 A1 - sequence listing, part 4

SEQ ID NO: 10035 - DNA, 580 bp, Artificial Sequence
  chemically treated genomic DNA (Homo sapiens) CpG-island No: 10035
agatggtagtttagaagcggcgttaagtgagtttattaaggttagggattgggtgtaatttttttatttttattttcgtattcgttgatgtagcgttagtgacggtttttcggaaaatagttgttggtaattcgtggtaaattgttttagatgttagaatttttattgtatggcggcgttttttatcgttatattttgcgattacggatttattagttcgcggcgtacggcgtttaggcgaatgcgttttagttacgcgttcgggttaatgtttaaaatagcgtgaaacgcgttttgtagcgtgcggcggttgatatgtagttgattatataaatttagtatcgttatcggttcggatatgttttttagtatatatttacgggcgcgggaaagtaatcgacggtaattttgatgattgatgtttttcgtcgttattattggttgcgttttttttagtatggtttttatcgttattagtaaattattttttagtatttttcgtattgtaggttgatggagatttttcggattttcgtaaaacgtcgttagcgtttgttggataaagttttatagcgcggtt

SEQ ID NO: 10036 - DNA, 580 bp, Artificial Sequence
  chemically treated genomic DNA (Homo sapiens) CpG-island No: 10036
aaccgcgctataaaactttatccaacaaacgctaacgacgttttacgaaaatccgaaaaatctccatcaacctacaatacgaaaaatactaaaaaataatttactaataacgataaaaaccatactaaaaaaaacgcaaccaataataacgacgaaaaacatcaatcatcaaaattaccgtcgattactttcccgcgcccgtaaatatatactaaaaaacatatccgaaccgataacgatactaaatttatataatcaactacatatcaaccgccgcacgctacaaaacgcgtttcacgctattttaaacattaacccgaacgcgtaactaaaacgcattcgcctaaacgccgtacgccgcgaactaataaatccgtaatcgcaaaatataacgataaaaaacgccgccatacaataaaaattctaacatctaaaacaatttaccacgaattaccaacaactattttccgaaaaaccgtcactaacgctacatcaacgaatacgaaaataaaaataaaaaaattacacccaatccctaaccttaataaactcacttaacgccgcttctaaactaccatct

SEQ ID NO: 10037 - DNA, 552 bp, Artificial Sequence
  chemically treated genomic DNA (Homo sapiens) CpG-island No: 10037
ttagagacgtatcgttagtacggtttgtaattaatgtcgcgtttgagagtgatgttgaatgaaaaagaatttgcgtcgtagttttgttattattgtgaagatgtattttgcgcggtggtttgttcggttaacgttattattcgcgtcgatggggtcgtgtagttgaatgaaagtttgtgcgtaagttgtaagttgtgcggtatcgtttgttcgtttggcgtaattgaatttttcggtagtcgttcgttggatatttcggtaaacgttaatatttcgaaagcgttatcggtatcgtttgtttcggcgcgtgttagtatattgtttgattgggtgttaggtattcgcgcgatcgtcgttaaatgtgatttttgtagttttgatgaataaggttcggtttgcgtgcggatgtgttcgattaaagttttgtatttggtggataatatcgatatcgttcgcgttagtaaacgtaagcgtgagttggattttaatacggattttggcgattttattttgttttagtaggtttaaagtggagaggttaaatgagcgtaa

SEQ ID NO: 10038 - DNA, 552 bp, Artificial Sequence
  chemically treated genomic DNA (Homo sapiens) CpG-island No: 10038
ttacgctcatttaacctctccactttaaacctactaaaacaaaataaaatcgccaaaatccgtattaaaatccaactcacgcttacgtttactaacgcgaacgatatcgatattatccaccaaatacaaaactttaatcgaacacatccgcacgcaaaccgaaccttattcatcaaaactacaaaaatcacatttaacgacgatcgcgcgaatacctaacacccaatcaaacaatatactaacacgcgccgaaacaaacgataccgataacgctttcgaaatattaacgtttaccgaaatatccaacgaacgactaccgaaaaattcaattacgccaaacgaacaaacgataccgcacaacttacaacttacgcacaaactttcattcaactacacgaccccatcgacgcgaataataacgttaaccgaacaaaccaccgcgcaaaatacatcttcacaataataacaaaactacgacgcaaattctttttcattcaacatcactctcaaacgcgacattaattacaaaccgtactaacgatacgtctctaa

SEQ ID NO: 10039 - DNA, 552 bp, Artificial Sequence
  chemically treated genomic DNA (Homo sapiens) CpG-island No: 10039
ttgcgtttatttagtttttttattttgagtttgttgaaataaggtgagatcgttaaagttcgtgttaaagtttagtttacgtttacgtttgttgacgcgggcgatatcggtgttatttattagatgtagggttttagtcgggtatattcgtacgtaggtcggattttgtttattaaagttataaaggttatatttgacggcgatcgcgcgaatatttggtatttagttaagtaatgtgttgatacgcgtcggagtaggcggtgtcggtggcgttttcggggtattggcgtttgtcggaatatttagcggacggttgtcggaaaatttaattgcgttaaacgggtaggcgatgtcgtatagtttgtagtttacgtataggtttttatttaattgtacggttttatcgacgcgggtgatggcgttaatcgggtagattatcgcgtagggtgtatttttatagtggtgatagagttgcggcgtagatttttttttatttagtattatttttaggcgcggtattgattgtaggtcgtgttggcgatgcgtttttga

SEQ ID NO: 10040 - DNA, 552 bp, Artificial Sequence
  chemically treated genomic DNA (Homo sapiens) CpG-island No: 10040
tcaaaaacgcatcgccaacacgacctacaatcaataccgcgcctaaaaataatactaaataaaaaaaaatctacgccgcaactctatcaccactataaaaatacaccctacgcgataatctacccgattaacgccatcacccgcgtcgataaaaccgtacaattaaataaaaacctatacgtaaactacaaactatacgacatcgcctacccgtttaacgcaattaaattttccgacaaccgtccgctaaatattccgacaaacgccaataccccgaaaacgccaccgacaccgcctactccgacgcgtatcaacacattacttaactaaataccaaatattcgcgcgatcgccgtcaaatataacctttataactttaataaacaaaatccgacctacgtacgaatatacccgactaaaaccctacatctaataaataacaccgatatcgcccgcgtcaacaaacgtaaacgtaaactaaactttaacacgaactttaacgatctcaccttatttcaacaaactcaaaataaaaaaactaaataaacgcaa

SEQ ID NO: 10041 - DNA, 502 bp, Artificial Sequence
  chemically treated genomic DNA (Homo sapiens) CpG-island No: 10041
ttggacgtcgggttttttatcggattttaaacgcgttatgttaattttatgtagagttcgttttagagatttttttgtattgtttatacggttgcgtagcggtgagttaggacgataaattaggttaatagtgcggcgtggtttcggtttaatgtacggtagataaataattttatcgcgtttgcgtttcggcggtatagttagcgttggtagtaaagtgatttcgttatttgtcgttattatgttgcgtagagtttttaggttggtcgcgcggaagtgtgtatttttattcgtttcggttttaaaatagaaatttattgtttgatcgcgtaaatagtgattattttttagtattagtagttttttttttgttagatcggttatcggtacgtattcgcggttcgtttacgggtgatttttatagatagttagtaatattggtttattaaataacggtattttaatgaatgtttcgtttttttttattagcgcgaggattacg

SEQ ID NO: 10042 - DNA, 502 bp, Artificial Sequence
  chemically treated genomic DNA (Homo sapiens) CpG-island No: 10042
cgtaatcctcgcgctaataaaaaaaaacgaaacattcattaaaataccgttatttaataaaccaatattactaactatctataaaaatcacccgtaaacgaaccgcgaatacgtaccgataaccgatctaacaaaaaaaaaactactaatactaaaaaataatcactatttacgcgatcaaacaataaatttctattttaaaaccgaaacgaataaaaatacacacttccgcgcgaccaacctaaaaactctacgcaacataataacgacaaataacgaaatcactttactaccaacgctaactataccgccgaaacgcaaacgcgataaaattatttatctaccgtacattaaaccgaaaccacgccgcactattaacctaatttatcgtcctaactcaccgctacgcaaccgtataaacaatacaaaaaaatctctaaaacgaactctacataaaattaacataacgcgtttaaaatccgataaaaaacccgacgtccaa

SEQ ID NO: 10043 - DNA, 502 bp, Artificial Sequence
  chemically treated genomic DNA (Homo sapiens) CpG-island No: 10043
cgtgattttcgcgttggtgaaagagagcgaagtatttattgaagtgtcgttgtttgatgagttaatgttgttggttatttatgaagattattcgtgggcgaatcgcgaatgcgtatcgatggtcgatttggtaggggaaaaattgttgatgttggaagatggttattgtttgcgcgattaggtaatgggtttttgttttgaagtcggggcggatgaagatatatattttcgcgcgattagtttggaaattttgcgtaatatggtggcggtaggtagcgggattattttattgttagcgttggttgtgtcgtcggagcgtaaacgcgatggggttgtttatttgtcgtgtattaagtcggaattacgtcgtattattggtttggtttatcgttttggtttatcgttgcgtagtcgtatgagtagtgtaaagggatttttgaagcgagttttgtatgaagttggtatggcgcgtttaaagttcgatgggaaattcggcgtttag

SEQ ID NO: 10044 - DNA, 502 bp, Artificial Sequence
  chemically treated genomic DNA (Homo sapiens) CpG-island No: 10044
ctaaacgccgaatttcccatcgaactttaaacgcgccataccaacttcatacaaaactcgcttcaaaaatccctttacactactcatacgactacgcaacgataaaccaaaacgataaaccaaaccaataatacgacgtaattccgacttaatacacgacaaataaacaaccccatcgcgtttacgctccgacgacacaaccaacgctaacaataaaataatcccgctacctaccgccaccatattacgcaaaatttccaaactaatcgcgcgaaaatatatatcttcatccgccccgacttcaaaacaaaaacccattacctaatcgcgcaaacaataaccatcttccaacatcaacaatttttcccctaccaaatcgaccatcgatacgcattcgcgattcgcccacgaataatcttcataaataaccaacaacattaactcatcaaacaacgacacttcaataaatacttcgctctctttcaccaacgcgaaaatcacg

SEQ ID NO: 10045 - DNA, 588 bp, Artificial Sequence
  chemically treated genomic DNA (Homo sapiens) CpG-island No: 10045
gaaagtcgttagtcgggagtgcgtgcgtttatagaattttttgtcggtggtgaagtgaaaacgtcggagtaattgatattagaataacgttagttttttgaataaatgtaggttgatatgcgttagtagttaacgtagttggttgaagtttcgtggaatgaatagacgtcggaatagcgttagtaaacgttatagcgttaacgttaggcgtagtaattagcggaatagtaacgtttggtttagtagtcgcgtacgattgaataaagttggtagtagtagacgcgtacgtcgtaagtcgtatcggtataggcgtaatcgcgttagtttaaatcggtttttttttagtagtcgtattaggatttgttggaaatttttgcgtatacgattgcgtagtcgaaggtcggagtaagttgcgttaggtgttcgtggcggtgaagcgttaaaaacgaagggggagatataagataacgcggtggatggtgcgcggcggtcgataaagggcggataggtaaaagggagtggttattgggtttaaggttgatcgaaatatttttatgtgggaatgttgtttgttcgaaatagaaagag

SEQ ID NO: 10046 - DNA, 588 bp, Artificial Sequence
  chemically treated genomic DNA (Homo sapiens) CpG-island No: 10046
ctctttctatttcgaacaaacaacattcccacataaaaatatttcgatcaaccttaaacccaataaccactcccttttacctatccgccctttatcgaccgccgcgcaccatccaccgcgttatcttatatctcccccttcgtttttaacgcttcaccgccacgaacacctaacgcaacttactccgaccttcgactacgcaatcgtatacgcaaaaatttccaacaaatcctaatacgactactaaaaaaaaaccgatttaaactaacgcgattacgcctataccgatacgacttacgacgtacgcgtctactactaccaactttattcaatcgtacgcgactactaaaccaaacgttactattccgctaattactacgcctaacgttaacgctataacgtttactaacgctattccgacgtctattcattccacgaaacttcaaccaactacgttaactactaacgcatatcaacctacatttattcaaaaaactaacgttattctaatatcaattactccgacgttttcacttcaccaccgacaaaaaattctataaacgcacgcactcccgactaacgactttc

SEQ ID NO: 10047 - DNA, 588 bp, Artificial Sequence
  chemically treated genomic DNA (Homo sapiens) CpG-island No: 10047
ttttttttatttcgggtaaataatatttttatatgggggtatttcgattaattttgaatttagtggttatttttttttgtttgttcgttttttgtcgatcgtcgcgtattatttatcgcgttgttttgtgttttttttttcgtttttggcgttttatcgttacgagtatttggcgtagtttgtttcggttttcgattgcgtagtcgtgtgcgtaggagtttttagtagattttggtacggttgttgagaagaagtcggtttagattggcgcggttgcgtttgtatcggtgcggtttgcgacgtacgcgtttgttgttgttagttttgtttagtcgtacgcgattgttgagttaggcgttgttgtttcgttaattgttgcgtttgacgttggcgttgtagcgtttgttgacgttgtttcggcgtttgtttattttacggaattttaattagttgcgttggttgttggcgtatattagtttgtatttgtttaagaagttgacgttgttttggtgttagttgtttcggcgtttttattttattatcggtagaaggttttgtgggcgtacgtattttcggttggcgattttt

SEQ ID NO: 10048 - DNA, 588 bp, Artificial Sequence
  chemically treated genomic DNA (Homo sapiens) CpG-island No: 10048
aaaaatcgccaaccgaaaatacgtacgcccacaaaaccttctaccgataataaaataaaaacgccgaaacaactaacaccaaaacaacgtcaacttcttaaacaaatacaaactaatatacgccaacaaccaacgcaactaattaaaattccgtaaaataaacaaacgccgaaacaacgtcaacaaacgctacaacgccaacgtcaaacgcaacaattaacgaaacaacaacgcctaactcaacaatcgcgtacgactaaacaaaactaacaacaacaaacgcgtacgtcgcaaaccgcaccgatacaaacgcaaccgcgccaatctaaaccgacttcttctcaacaaccgtaccaaaatctactaaaaactcctacgcacacgactacgcaatcgaaaaccgaaacaaactacgccaaatactcgtaacgataaaacgccaaaaacgaaaaaaaaaacacaaaacaacgcgataaataatacgcgacgatcgacaaaaaacgaacaaacaaaaaaaaataaccactaaattcaaaattaatcgaaatacccccatataaaaatattatttacccgaaataaaaaaaa

SEQ ID NO: 10049 - DNA, 748 bp, Artificial Sequence
  chemically treated genomic DNA (Homo sapiens) CpG-island No: 10049
ggtcgtcgttggacgtttagtttcgatttttttatcggtttgcgtttcggcgtaatgagtatcgttaataataatgtcggcggcgtagcgttagggaaaagttatcgtagttacggataattggaagtcgagtatcgtatcggacgtaatatgttgttggaaggcgatttgtttttagtttatagtcgcgtttttgtcgatatcggagaaaacggggtgatgatgtcggtgaaaaattcgatgttcggtatcggtttgcgttggaagtcgttgcgcgattagattttttttatcgtcgtcgaatagtagttgtcgttgaacggttaaaatggcgtattcgatattatgttgcgcgttagcgttttattttttaatggcggtaaatatagcgacgaatggtattcgaacggtttaggttggtttgtttaaaatttgtatttcgatgcggcgtaatatattcgttaggatatttaggcgtggacggtagattatcgcgttagttggtattagaaggtagttaacggatagattattgagttttacgtttacgtttaggataacggttatcgtgataaaggtatttagggcgcgtagtttggcggagtcggggttcgttggaatatttggatcggcgagacgtattacgacgtttggtcgtataaagttagtttcggcgtcgagtattaatatatttttaaggcgattaattaacgtaacggagagcgtaataacgcgttttttattattg

SEQ ID NO: 10050 - DNA, 748 bp, Artificial Sequence
  chemically treated genomic DNA (Homo sapiens) CpG-island No: 10050
caataataaaaaacgcgttattacgctctccgttacgttaattaatcgccttaaaaatatattaatactcgacgccgaaactaactttatacgaccaaacgtcgtaatacgtctcgccgatccaaatattccaacgaaccccgactccgccaaactacgcgccctaaatacctttatcacgataaccgttatcctaaacgtaaacgtaaaactcaataatctatccgttaactaccttctaataccaactaacgcgataatctaccgtccacgcctaaatatcctaacgaatatattacgccgcatcgaaatacaaattttaaacaaaccaacctaaaccgttcgaataccattcgtcgctatatttaccgccattaaaaaataaaacgctaacgcgcaacataatatcgaatacgccattttaaccgttcaacgacaactactattcgacgacgataaaaaaaatctaatcgcgcaacgacttccaacgcaaaccgataccgaacatcgaatttttcaccgacatcatcaccccgttttctccgatatcgacaaaaacgcgactataaactaaaaacaaatcgccttccaacaacatattacgtccgatacgatactcgacttccaattatccgtaactacgataacttttccctaacgctacgccgccgacattattattaacgatactcattacgccgaaacgcaaaccgataaaaaaatcgaaactaaacgtccaacgacgacc

SEQ ID NO: 10051 - DNA, 748 bp, Artificial Sequence
  chemically treated genomic DNA (Homo sapiens) CpG-island No: 10051
taatggtgagaaacgcgttgttgcgtttttcgttacgttgattaatcgttttaaaggtatgttgatattcgacgtcgagattgattttgtgcggttaggcgtcgtagtgcgtttcgtcggtttagatattttagcggatttcgatttcgttaagttgcgcgttttgagtgtttttattacgatagtcgttgttttgaacgtgagcgtaaggtttaatagtttgttcgttagttattttttgatgttagttgacgcgataatttgtcgtttacgtttgaatattttggcggatatattgcgtcgtatcgaggtataggttttgggtaaattagtttgaatcgttcgggtgttattcgtcgttgtatttgtcgttattaaagaatgaggcgttggcgcgtagtatggtatcggatgcgttattttggtcgtttagcggtaattgttgttcgacggcgatgaaaaagatttgatcgcgtagcggtttttagcgtagatcggtgtcggatatcggattttttatcggtattattatttcgtttttttcggtatcggtaaagacgcggttataaattgagagtaggtcgttttttagtagtatattgcgttcgatgcggtattcggtttttagttgttcgtagttacgatagtttttttttggcgttgcgtcgtcgatattattgttagcggtatttattgcgtcggaacgtaagtcgatggaagaatcgaaattgaacgtttagcggcgatt

SEQ ID NO: 10052 - DNA, 748 bp, Artificial Sequence
  chemically treated genomic DNA (Homo sapiens) CpG-island No: 10052
aatcgccgctaaacgttcaatttcgattcttccatcgacttacgttccgacgcaataaataccgctaacaataatatcgacgacgcaacgccaaaaaaaaactatcgtaactacgaacaactaaaaaccgaataccgcatcgaacgcaatatactactaaaaaacgacctactctcaatttataaccgcgtctttaccgataccgaaaaaaacgaaataataataccgataaaaaatccgatatccgacaccgatctacgctaaaaaccgctacgcgatcaaatctttttcatcgccgtcgaacaacaattaccgctaaacgaccaaaataacgcatccgataccatactacgcgccaacgcctcattctttaataacgacaaatacaacgacgaataacacccgaacgattcaaactaatttacccaaaacctatacctcgatacgacgcaatatatccgccaaaatattcaaacgtaaacgacaaattatcgcgtcaactaacatcaaaaaataactaacgaacaaactattaaaccttacgctcacgttcaaaacaacgactatcgtaataaaaacactcaaaacgcgcaacttaacgaaatcgaaatccgctaaaatatctaaaccgacgaaacgcactacgacgcctaaccgcacaaaatcaatctcgacgtcgaatatcaacatacctttaaaacgattaatcaacgtaacgaaaaacgcaacaacgcgtttctcaccatta

SEQ ID NO: 10053 - DNA, 1222 bp, Artificial Sequence
  chemically treated genomic DNA (Homo sapiens) CpG-island No: 10053
cggtgtggtagtttagcgcgattgggcgtcgttttcggcgcggatgtcgttttgagtgtcgataattagtatttttttgtcggtgagtttgttggcgttttagtttatttcggcgttttgcgttatgtcgaataggttgtcgttgggagattttattagtatttgcggggttagcggtagagcgttttgcggtttcgtcgcgtgggtgattatcgtataaaacgcgtcgttttgcggggtgaaaatttttttaatggttatcgttatcgttcggtttagtaaagtttgagttgttgtagtagggtttttagttgcgttttgcgcggttcgtttagcggcgaggcgggcggtagtacgtgcgtggagataggacgatcgtagagtacgatcgtttttttaattacgtttataaacggcgtatttagttgatatatttgcggaatttgtagtaaggtttgatgatattcggtcgttttcgttacgttttcgtcgcgttaggtttttagaagatttatcgatatttgcggggtaaaagttgttcgttcgatcgattcgtttcgtcgtcgtcgagatagtaggttattgaatagatatcgtcgtagtcgtagagtacggtgaagtgcggatgggtatttttgacggtatggattatgttgcgtaggtgggcgacggagtcgatggtgtttttgatgtcgataatattgttgcgcgagtcggtcgagggtttttattagcgtcggagattagattttgttcggttagcgtcgggaagttatagagtattatcggtagcgtgacgttgtcggttatttgttcgaaatagcggattaggttcgttttcgatattttttagtagtaggggttgattattacgatgtcgttcgcgttcgatttgttgcgcgtgttggttgagttcgatggtttttcgggacgttggtgtcgtcggtgtcgattagtatcggtacgcgacgatcgatatgatcgatagtaaagcgggtaatggttttacgtttttcggcgatcgagttgggagaattcgttatcgttgtttaggaagaataggtcgttaacgtttgttttgattacgatcgtcgattagacgcggcggtgatcggtttatcgagttggacgatcggcggtaataatggtggagataggggaatgattttcgtgaataacgtagattgcggtatgagatttttttgttgaattatatagttta

SEQ ID NO: 10054 - DNA, 1222 bp, Artificial Sequence
  chemically treated genomic DNA (Homo sapiens) CpG-island No: 10054
taaactatataattcaacaaaaaaatctcataccgcaatctacgttattcacgaaaatcattcccctatctccaccattattaccgccgatcgtccaactcgataaaccgatcaccgccgcgtctaatcgacgatcgtaatcaaaacaaacgttaacgacctattcttcctaaacaacgataacgaattctcccaactcgatcgccgaaaaacgtaaaaccattacccgctttactatcgatcatatcgatcgtcgcgtaccgatactaatcgacaccgacgacaccaacgtcccgaaaaaccatcgaactcaaccaacacgcgcaacaaatcgaacgcgaacgacatcgtaataatcaacccctactactaaaaaatatcgaaaacgaacctaatccgctatttcgaacaaataaccgacaacgtcacgctaccgataatactctataacttcccgacgctaaccgaacaaaatctaatctccgacgctaataaaaaccctcgaccgactcgcgcaacaatattatcgacatcaaaaacaccatcgactccgtcgcccacctacgcaacataatccataccgtcaaaaatacccatccgcacttcaccgtactctacgactacgacgatatctattcaataacctactatctcgacgacgacgaaacgaatcgatcgaacgaacaacttttaccccgcaaatatcgataaatcttctaaaaacctaacgcgacgaaaacgtaacgaaaacgaccgaatatcatcaaaccttactacaaattccgcaaatatatcaactaaatacgccgtttataaacgtaattaaaaaaacgatcgtactctacgatcgtcctatctccacgcacgtactaccgcccgcctcgccgctaaacgaaccgcgcaaaacgcaactaaaaaccctactacaacaactcaaactttactaaaccgaacgataacgataaccattaaaaaaattttcaccccgcaaaacgacgcgttttatacgataatcacccacgcgacgaaaccgcaaaacgctctaccgctaaccccgcaaatactaataaaatctcccaacgacaacctattcgacataacgcaaaacgccgaaataaactaaaacgccaacaaactcaccgacaaaaaaatactaattatcgacactcaaaacgacatccgcgccgaaaacgacgcccaatcgcgctaaactaccacaccg

SEQ ID NO: 10055 - DNA, 1222 bp, Artificial Sequence
  chemically treated genomic DNA (Homo sapiens) CpG-island No: 10055
tagattatatgatttagtaaggagattttatgtcgtagtttgcgttgtttacgggaattatttttttgtttttattattgttatcgtcgatcgtttagttcgataagtcggttatcgtcgcgtttgatcgacgatcgtgattaaagtaggcgttgacggtttgttttttttgggtagcggtggcgagtttttttagttcggtcgtcgaagagcgtaaagttattgttcgttttgttatcgattatgtcgatcgtcgcgtgtcggtgttgatcggtatcggcggtattaacgtttcgggaaattatcgaatttagttagtacgcgtagtaggtcgggcgcggacggtatcgtggtgattaatttttattattggaaagtgtcggaagcgaatttgattcgttatttcgagtaggtggtcgatagcgttacgttgtcggtgatgttttataatttttcggcgttgatcgggtaggatttgattttcggcgttggtgaaaattttcggtcgattcgcgtagtaatattatcggtattaaagatattatcgatttcgtcgtttatttgcgtagtatgatttatatcgttaaaggtgtttattcgtattttatcgtgttttgcggttacgacgatatttgtttaatagtttgttgtttcggcggcgacggggcgaatcggtcgagcgggtaatttttgtttcgtaggtgtcggtgaattttttgaaagtttggcgcgacggggacgtggcgaaagcggtcgggtattattagattttgttgtaaatttcgtagatgtattagttggatacgtcgtttgtgaacgtgattaaagaggcgatcgtgttttgcggtcgttttgtttttacgtacgtgttgtcgttcgtttcgtcgttggacgagtcgcgtaaggcgtagttgaaaattttgttgtaatagtttaagttttgttgagtcggacgataacgatgattattgagaaaatttttatttcgtaggacgacgcgttttatgcggtgattatttacgcggcggggtcgtagggcgttttgtcgttgatttcgtagatgttgatggaattttttagcggtaatttgttcggtatgacgtagaacgtcgggatgggttgggacgttaataagtttatcggtaaagaggtgttgattatcggtatttagggcggtattcgcgtcggagacgacgtttaatcgcgttgggttattatatcg

SEQ ID NO: 10056 - DNA, 1222 bp, Artificial Sequence
  chemically treated genomic DNA (Homo sapiens) CpG-island No: 10056
cgatataataacccaacgcgattaaacgtcgtctccgacgcgaataccgccctaaataccgataatcaacacctctttaccgataaacttattaacgtcccaacccatcccgacgttctacgtcataccgaacaaattaccgctaaaaaattccatcaacatctacgaaatcaacgacaaaacgccctacgaccccgccgcgtaaataatcaccgcataaaacgcgtcgtcctacgaaataaaaattttctcaataatcatcgttatcgtccgactcaacaaaacttaaactattacaacaaaattttcaactacgccttacgcgactcgtccaacgacgaaacgaacgacaacacgtacgtaaaaacaaaacgaccgcaaaacacgatcgcctctttaatcacgttcacaaacgacgtatccaactaatacatctacgaaatttacaacaaaatctaataatacccgaccgctttcgccacgtccccgtcgcgccaaactttcaaaaaattcaccgacacctacgaaacaaaaattacccgctcgaccgattcgccccgtcgccgccgaaacaacaaactattaaacaaatatcgtcgtaaccgcaaaacacgataaaatacgaataaacacctttaacgatataaatcatactacgcaaataaacgacgaaatcgataatatctttaataccgataatattactacgcgaatcgaccgaaaattttcaccaacgccgaaaatcaaatcctacccgatcaacgccgaaaaattataaaacatcaccgacaacgtaacgctatcgaccacctactcgaaataacgaatcaaattcgcttccgacactttccaataataaaaattaatcaccacgataccgtccgcgcccgacctactacgcgtactaactaaattcgataatttcccgaaacgttaataccgccgataccgatcaacaccgacacgcgacgatcgacataatcgataacaaaacgaacaataactttacgctcttcgacgaccgaactaaaaaaactcgccaccgctacccaaaaaaaacaaaccgtcaacgcctactttaatcacgatcgtcgatcaaacgcgacgataaccgacttatcgaactaaacgatcgacgataacaataataaaaacaaaaaaataattcccgtaaacaacgcaaactacgacataaaatctccttactaaatcatataatcta

SEQ ID NO: 10057 - DNA, 627 bp, Artificial Sequence
  chemically treated genomic DNA (Homo sapiens) CpG-island No: 10057
tcgttagtaggttttgtaataggcgttagtcgaagaagaaaaagcgtaattttaattggcggcgtttagtttggtataatcggtacgaaattttcgtttatattgggaacgtatcgtagaatatagcgcggcgttggcgtatattcgttagtagattgaagaagtaaatattcgtttatagagtataatggcgtttcgcgcgagtattcgttattacgcggcgaagtagttagtagaattatagtagtagtaataaagtttgaatatttggttataggaatacgatcgttttcgttagtggaataacgaatcggcgggttggcgtgcgtagtttttttaataaattagcgatcgcgagtatttgcggtaatggtagtaatagttaatttatgttgagtaaaaatttaatgcgtttgcggcgattacgttgacgttaatcgtcgatgaggttgttatcgatttggcgtaatatgttgagtaacgtttattgcgttagtatttggtcgcgttgtatggatagattgttttttaataaaacgtttggcgtagttataggtcgttatttagaatgttacgtaagaatagacgtaacgtaacgtcgtatttaacgaaatgcgttagcgttat

SEQ ID NO: 10058 - DNA, 627 bp, Artificial Sequence
  chemically treated genomic DNA (Homo sapiens) CpG-island No: 10058
ataacgctaacgcatttcgttaaatacgacgttacgttacgtctattcttacgtaacattctaaataacgacctataactacgccaaacgttttattaaaaaacaatctatccatacaacgcgaccaaatactaacgcaataaacgttactcaacatattacgccaaatcgataacaacctcatcgacgattaacgtcaacgtaatcgccgcaaacgcattaaatttttactcaacataaattaactattactaccattaccgcaaatactcgcgatcgctaatttattaaaaaaactacgcacgccaacccgccgattcgttattccactaacgaaaacgatcgtattcctataaccaaatattcaaactttattactactactataattctactaactacttcgccgcgtaataacgaatactcgcgcgaaacgccattatactctataaacgaatatttacttcttcaatctactaacgaatatacgccaacgccgcgctatattctacgatacgttcccaatataaacgaaaatttcgtaccgattataccaaactaaacgccgccaattaaaattacgctttttcttcttcgactaacgcctattacaaaacctactaacga

SEQ ID NO: 10059 - DNA, 627 bp, Artificial Sequence
  chemically treated genomic DNA (Homo sapiens) CpG-island No: 10059
ataacgttggcgtatttcgttaagtgcggcgttacgttgcgtttgtttttgcgtgatattttggatagcgatttgtaattgcgttagacgttttgttggggaataatttgtttatgtagcgcgattaggtgttgacgtagtgggcgttgtttagtatgttgcgttaggtcggtagtaattttatcggcggttaacgttaacgtgatcgtcgtaagcgtattaagtttttgtttagtatgggttaattgttgttgttattgtcgtagatgttcgcgatcgttggtttgttgggagaattgcgtacgttaattcgtcggttcgttgttttattgacggaagcggtcgtgtttttgtaattaggtatttaggttttgttgttgttgttgtaattttgttgattgtttcgtcgcgtggtggcgaatgttcgcgcgaagcgttattgtgttttgtaagcgagtatttatttttttaatttgttggcgaatatgcgttagcgtcgcgttgtgttttgcgatgcgtttttagtgtggacgaagatttcgtgtcggttgtgttagattaagcgtcgttagttgaggttgcgttttttttttttcggttaacgtttgttgtaaggtttgttgacgg

SEQ ID NO: 10060 - DNA, 627 bp, Artificial Sequence
  chemically treated genomic DNA (Homo sapiens) CpG-island No: 10060
ccgtcaacaaaccttacaacaaacgttaaccgaaaaaaaaaaaacgcaacctcaactaacgacgcttaatctaacacaaccgacacgaaatcttcgtccacactaaaaacgcatcgcaaaacacaacgcgacgctaacgcatattcgccaacaaattaaaaaaataaatactcgcttacaaaacacaataacgcttcgcgcgaacattcgccaccacgcgacgaaacaatcaacaaaattacaacaacaacaacaaaacctaaatacctaattacaaaaacacgaccgcttccgtcaataaaacaacgaaccgacgaattaacgtacgcaattctcccaacaaaccaacgatcgcgaacatctacgacaataacaacaacaattaacccatactaaacaaaaacttaatacgcttacgacgatcacgttaacgttaaccgccgataaaattactaccgacctaacgcaacatactaaacaacgcccactacgtcaacacctaatcgcgctacataaacaaattattccccaacaaaacgtctaacgcaattacaaatcgctatccaaaatatcacgcaaaaacaaacgcaacgtaacgccgcacttaacgaaatacgccaacgttat

SEQ ID NO: 10061 - DNA, 681 bp, Artificial Sequence
  chemically treated genomic DNA (Homo sapiens) CpG-island No: 10061
gcgtaaagttgcgtaattcgatgttaattacggcgacgttttttagtaatgacggtgtgtgttgttgtgcggtaggcgagagcggatgaattaacgttgtcgttagtaaggtggttttcggtagcgaatttacgatcgtaattttcgtattttttagcgtggcgatttgttgcgagcggtattgcgggttacgtttagtgtttgttatcgtggtaatggtatatagtggttgattatttaaacgcgcggtataggttttttgttaggcgtttattagcgtaggcggtaggatcggcggtcgtatcgaagttaattacgatattaagtagtaatacgcgtatttgcggtttagcgtcgagatcggtaattaattggttgcgtaaggttgggtcgattatcggatggggacgttcgacggtgtagaaattatcgtcgaggttaataatttggtggttatcggcgtttagtattatgttatgttgatgggtatcgtcggtttttacgttaaggtgttcggtaagtaatttcgtcgtttcggtagttagcgtatcgtcggtatataaatcgtaaataaattcgttgttgataggcgttattgcgttacgtcgcgtcgtgacgcgtgaaagtaggtaagttaggcgtgcggttttatttagcgaggaggtaaattagatattttcg

SEQ ID NO: 10062 - DNA, 681 bp, Artificial Sequence
  chemically treated genomic DNA (Homo sapiens) CpG-island No: 10062
cgaaaatatctaatttacctcctcgctaaataaaaccgcacgcctaacttacctactttcacgcgtcacgacgcgacgtaacgcaataacgcctatcaacaacgaatttatttacgatttatataccgacgatacgctaactaccgaaacgacgaaattacttaccgaacaccttaacgtaaaaaccgacgatacccatcaacataacataatactaaacgccgataaccaccaaattattaacctcgacgataatttctacaccgtcgaacgtccccatccgataatcgacccaaccttacgcaaccaattaattaccgatctcgacgctaaaccgcaaatacgcgtattactacttaatatcgtaattaacttcgatacgaccgccgatcctaccgcctacgctaataaacgcctaacaaaaaacctataccgcgcgtttaaataatcaaccactatataccattaccacgataacaaacactaaacgtaacccgcaataccgctcgcaacaaatcgccacgctaaaaaatacgaaaattacgatcgtaaattcgctaccgaaaaccaccttactaacgacaacgttaattcatccgctctcgcctaccgcacaacaacacacaccgtcattactaaaaaacgtcgccgtaattaacatcgaattacgcaactttacgc

SEQ ID NO: 10063 - DNA, 681 bp, Artificial Sequence
  chemically treated genomic DNA (Homo sapiens) CpG-island No: 10063
cgagaatgtttggtttgttttttcgttggatgaggtcgtacgtttggtttgtttgtttttacgcgttacggcgcgacgtaacgtaatagcgtttgttagtagcggatttatttgcggtttgtatatcggcggtacgttggttgtcgaagcggcgggattatttgtcggatattttggcgtggaagtcgacgatatttattaatatggtatgatgttggacgtcgatagttattagattattgatttcggcgatgatttttatatcgtcgggcgtttttattcgatgatcgatttaattttacgtaattagttaattgtcgatttcggcgttaaatcgtaagtgcgcgtgttgttgtttgatgtcgtgattggtttcggtgcgatcgtcgattttgtcgtttacgttggtgagcgtttggtaaaaagtttgtgtcgcgcgtttagataattaattattgtatgttattgttacggtgataggtattgaacgtgattcgtaatgtcgttcgtagtaaatcgttacgttggaagatgcggggattgcggtcgtgagttcgttatcggaagttattttgttggcggtagcgttaatttattcgttttcgtttgtcgtatagtaatatatatcgttattattggaaaacgtcgtcgtgattaatatcggattacgtagttttgcgt

SEQ ID NO: 10064 - DNA, 681 bp, Artificial Sequence
  chemically treated genomic DNA (Homo sapiens) CpG-island No: 10064
acgcaaaactacgtaatccgatattaatcacgacgacgttttccaataataacgatatatattactatacgacaaacgaaaacgaataaattaacgctaccgccaacaaaataacttccgataacgaactcacgaccgcaatccccgcatcttccaacgtaacgatttactacgaacgacattacgaatcacgttcaatacctatcaccgtaacaataacatacaataattaattatctaaacgcgcgacacaaactttttaccaaacgctcaccaacgtaaacgacaaaatcgacgatcgcaccgaaaccaatcacgacatcaaacaacaacacgcgcacttacgatttaacgccgaaatcgacaattaactaattacgtaaaattaaatcgatcatcgaataaaaacgcccgacgatataaaaatcatcgccgaaatcaataatctaataactatcgacgtccaacatcataccatattaataaatatcgtcgacttccacgccaaaatatccgacaaataatcccgccgcttcgacaaccaacgtaccgccgatatacaaaccgcaaataaatccgctactaacaaacgctattacgttacgtcgcgccgtaacgcgtaaaaacaaacaaaccaaacgtacgacctcatccaacgaaaaaacaaaccaaacattctcg

SEQ ID NO: 10065 - DNA, 673 bp, Artificial Sequence
  chemically treated genomic DNA (Homo sapiens) CpG-island No: 10065
cgtgttgcgcgtgcgtaaaggggaagaaattttaattttaagttatatgttgtcgaagttgtatgaagaagcgatggcgttgtcgtttgaagaagagttcgttgaacgtaagcgttcggaataatttgcgttggtaatttttgttatgtcggatgtgtcgtttgcgttaacgttagttgaatttgtcgcgtttgttgtagttttagtatcgaaagttgtatcggtaatattagtagtttttgtataatttgggttgttgagtcgttttttcggcgtattgaaagcgttgtttagcggtggtgaagaaattaaatcgatcgagtaattagtatcgaaagtagaagcgaaatcggaacgttaataggatcgtcgtaagtttcgttagaataatcgtcgtgatcgtaatgagcgcgcgatattcgtagtgaacgtattgaaggtagcgataatcgcgaagaaaatcgtcgtaattcgtcgttaggtatagtagtagattgtcgagacgcgtagagtcgttagtaggttgaggtacggaaaaagcgcgtatcgtcgacgagtagtaagcgtcgcgtcgtgaacgtagtcgtcgtcgtaatgatataaacgttaggcgtaataagaagcgaaggcgttgaatgttgaagagtaatttgtttaggaaatcgaataggaa

SEQ ID NO: 10066 - DNA, 673 bp, Artificial Sequence
  chemically treated genomic DNA (Homo sapiens) CpG-island No: 10066
ttcctattcgatttcctaaacaaattactcttcaacattcaacgccttcgcttcttattacgcctaacgtttatatcattacgacgacgactacgttcacgacgcgacgcttactactcgtcgacgatacgcgctttttccgtacctcaacctactaacgactctacgcgtctcgacaatctactactatacctaacgacgaattacgacgattttcttcgcgattatcgctaccttcaatacgttcactacgaatatcgcgcgctcattacgatcacgacgattattctaacgaaacttacgacgatcctattaacgttccgatttcgcttctactttcgatactaattactcgatcgatttaatttcttcaccaccgctaaacaacgctttcaatacgccgaaaaaacgactcaacaacccaaattatacaaaaactactaatattaccgatacaactttcgatactaaaactacaacaaacgcgacaaattcaactaacgttaacgcaaacgacacatccgacataacaaaaattaccaacgcaaattattccgaacgcttacgttcaacgaactcttcttcaaacgacaacgccatcgcttcttcatacaacttcgacaacatataacttaaaattaaaatttcttcccctttacgcacgcgcaacacg

SEQ ID NO: 10067 - DNA, 673 bp, Artificial Sequence
  chemically treated genomic DNA (Homo sapiens) CpG-island No: 10067
tttttgttcggttttttgaatagattgttttttaatatttagcgttttcgttttttgttgcgtttgacgtttatattattacggcggcggttacgtttacgacgcggcgtttgttgttcgtcggcggtacgcgtttttttcgtattttagtttgttgacggttttacgcgtttcggtagtttgttgttgtgtttggcgacgagttacgacggtttttttcgcgattatcgttgtttttagtacgtttattacgggtgtcgcgcgtttattacggttacggcggttgttttgacgaggtttgcgacgattttgttgacgtttcggtttcgtttttgttttcggtgttggttgttcggtcggtttggtttttttattatcgttgaatagcgtttttagtgcgtcgaagaagcggtttaatagtttaggttgtgtaggagttgttggtgttgtcggtgtagttttcggtgttggagttataataggcgcggtaggtttagttggcgttggcgtaggcggtatattcggtatggtaaaggttgttagcgtaggttgtttcggacgtttacgtttagcgaatttttttttagacggtagcgttatcgtttttttatgtagtttcggtagtatgtagtttaaggttggggtttttttttttttacgtacgcgtagtacg

SEQ ID NO: 10068 - DNA, 673 bp, Artificial Sequence
  chemically treated genomic DNA (Homo sapiens) CpG-island No: 10068
cgtactacgcgtacgtaaaaaaaaaaaaaccccaaccttaaactacatactaccgaaactacataaaaaaacgataacgctaccgtctaaaaaaaaattcgctaaacgtaaacgtccgaaacaacctacgctaacaacctttaccataccgaatataccgcctacgccaacgccaactaaacctaccgcgcctattataactccaacaccgaaaactacaccgacaacaccaacaactcctacacaacctaaactattaaaccgcttcttcgacgcactaaaaacgctattcaacgataataaaaaaaccaaaccgaccgaacaaccaacaccgaaaacaaaaacgaaaccgaaacgtcaacaaaatcgtcgcaaacctcgtcaaaacaaccgccgtaaccgtaataaacgcgcgacacccgtaataaacgtactaaaaacaacgataatcgcgaaaaaaaccgtcgtaactcgtcgccaaacacaacaacaaactaccgaaacgcgtaaaaccgtcaacaaactaaaatacgaaaaaaacgcgtaccgccgacgaacaacaaacgccgcgtcgtaaacgtaaccgccgccgtaataatataaacgtcaaacgcaacaaaaaacgaaaacgctaaatattaaaaaacaatctattcaaaaaaccgaacaaaaa

SEQ ID NO: 10069 - DNA, 933 bp, Artificial Sequence
  chemically treated genomic DNA (Homo sapiens) CpG-island No: 10069
atcgtttatatttttgtcgggtagttatagagttagtatttgaatagtttgttgtttgatcgcgattatatttggaacgataacggcgaatttattcgtattagtagttcgcgttagattcggagttatagttatagtattatcggtaggttgatcggcgtttatattatcgtagcgaatttggatattcgtatttcgtatgttatagattcggtaggtaatcgtttgttcgattcggagttgtattcggatagtatttttagtatgtggtcggataatcgtatcgttcgtgacgcgtattatttttatcggtatgatcgttacggtaggttgatagagaaaatcgattttatttcggaaggggttattcgtacggatgatgagcggatttatcggtattattacgatagttagtatcggttggtgtattatacgcggatataatatgaagagtcgttggtcgaaagtcgttatttttattattcgttgggtcgtagggtggtaaaacgggtgtggcggcgtgaacgggatttgacgggttggatgtcgttgttacggaaatcgtaagtgatttgggtacggttgggacggcgatcggttgattacgatatagaacgataggagtcgtatttagacgatttattagtcggggagttttacgttatttattagggtcggaattgtaacggtgagcggcgaaaacgcgcgtcgagtttggtggagttttttatagttcggggcgaaacggggcgcgtgtgtatcgcgggttgtgtaatgtcgatcgttgaacggaatttgtgacggtgatagaagcgtaggtggattgcgcgatcgggtatttaataggtcggaaagggaaaatcggtcgtaacgttcggattaagaggaaggcgtaaaaggatttaaagacgaaattcggaaagggttaaaagg

SEQ ID NO: 10070 - DNA, 933 bp, Artificial Sequence
  chemically treated genomic DNA (Homo sapiens) CpG-island No: 10070
ccttttaaccctttccgaatttcgtctttaaatccttttacgccttcctcttaatccgaacgttacgaccgattttccctttccgacctattaaatacccgatcgcgcaatccacctacgcttctatcaccgtcacaaattccgttcaacgatcgacattacacaacccgcgatacacacgcgccccgtttcgccccgaactataaaaaactccaccaaactcgacgcgcgttttcgccgctcaccgttacaattccgaccctaataaataacgtaaaactccccgactaataaatcgtctaaatacgactcctatcgttctatatcgtaatcaaccgatcgccgtcccaaccgtacccaaatcacttacgatttccgtaacaacgacatccaacccgtcaaatcccgttcacgccgccacacccgttttaccaccctacgacccaacgaataataaaaataacgactttcgaccaacgactcttcatattatatccgcgtataatacaccaaccgatactaactatcgtaataataccgataaatccgctcatcatccgtacgaataaccccttccgaaataaaatcgattttctctatcaacctaccgtaacgatcataccgataaaaataatacgcgtcacgaacgatacgattatccgaccacatactaaaaatactatccgaatacaactccgaatcgaacaaacgattacctaccgaatctataacatacgaaatacgaatatccaaattcgctacgataatataaacgccgatcaacctaccgataatactataactataactccgaatctaacgcgaactactaatacgaataaattcgccgttatcgttccaaatataatcgcgatcaaacaacaaactattcaaatactaactctataactacccgacaaaaatataaacgat

SEQ ID NO: 10071 - DNA, 933 bp, Artificial Sequence
  chemically treated genomic DNA (Homo sapiens) CpG-island No: 10071
ttttttggtttttttcgggtttcgtttttaggtttttttgcgttttttttttggttcgggcgttacggtcggtttttttttttcggtttgttaggtgttcggtcgcgtaatttatttgcgtttttattatcgttataggtttcgtttagcggtcgatattgtatagttcgcggtatatacgcgtttcgtttcgtttcggattgtgaagggttttattaggttcggcgcgcgttttcgtcgtttatcgttgtagtttcgattttgatgagtggcgtgaagtttttcggttgataaatcgtttggatgcggtttttgtcgttttgtatcgtggttagtcggtcgtcgttttagtcgtatttaggttatttgcggttttcgtgatagcgatatttagttcgttaggtttcgtttacgtcgttatattcgttttgttattttgcggtttagcgggtggtaaagatagcgattttcgattagcggttttttatattgtgttcgcgtgtagtgtattagtcggtgttgattgtcgtaatggtatcggtgagttcgtttattattcgtgcggataatttttttcgggatgaggtcggttttttttgttagtttgtcgtgacggttatatcggtaaagatagtgcgcgttacgggcgatacggttattcggttatatgttgagggtgttgttcgggtgtagtttcgggtcgggtaggcggttatttgtcgggtttgtggtatacgggatgcggatatttagattcgttgcggtggtgtgaacgtcggttagtttgtcggtggtgttgtagttgtaatttcgggtttggcgcgggttgttgatgcggatgagttcgtcgttgtcgttttaggtgtaatcgcggttagatagtaggttgtttaggtgttggttttgtaattgttcggtaggggtataagcggt

SEQ ID NO: 10072 - DNA, 933 bp, Artificial Sequence
  chemically treated genomic DNA (Homo sapiens) CpG-island No: 10072
accgcttatacccctaccgaacaattacaaaaccaacacctaaacaacctactatctaaccgcgattacacctaaaacgacaacgacgaactcatccgcatcaacaacccgcgccaaacccgaaattacaactacaacaccaccgacaaactaaccgacgttcacaccaccgcaacgaatctaaatatccgcatcccgtataccacaaacccgacaaataaccgcctacccgacccgaaactacacccgaacaacaccctcaacatataaccgaataaccgtatcgcccgtaacgcgcactatctttaccgatataaccgtcacgacaaactaacaaaaaaaaccgacctcatcccgaaaaaaattatccgcacgaataataaacgaactcaccgataccattacgacaatcaacaccgactaatacactacacgcgaacacaatataaaaaaccgctaatcgaaaatcgctatctttaccacccgctaaaccgcaaaataacaaaacgaatataacgacgtaaacgaaacctaacgaactaaatatcgctatcacgaaaaccgcaaataacctaaatacgactaaaacgacgaccgactaaccacgatacaaaacgacaaaaaccgcatccaaacgatttatcaaccgaaaaacttcacgccactcatcaaaatcgaaactacaacgataaacgacgaaaacgcgcgccgaacctaataaaacccttcacaatccgaaacgaaacgaaacgcgtatataccgcgaactatacaatatcgaccgctaaacgaaacctataacgataataaaaacgcaaataaattacgcgaccgaacacctaacaaaccgaaaaaaaaaaaccgaccgtaacgcccgaaccaaaaaaaaaacgcaaaaaaacctaaaaacgaaacccgaaaaaaaccaaaaaa

SEQ ID NO: 10073 - DNA, 758 bp, Artificial Sequence
  chemically treated genomic DNA (Homo sapiens) CpG-island No: 10073
tgcggttttaacggcggcgaaatgacgttgtcgttggcggatcgttggattttggcggagtttaattagattattaaagcgtatcgcgaagcgttggatagttttcgtttcgatatcgtcgtaggtattttgtatgagtttatttggaattagttttgtgattggtatttcgagttgattaagtcggtaatgaacggtggtatcgaagtagaattgcgcggtattcgttatacgttggtgattgtattggaaggtttgttgcgtttcgcgtattcgattatttcgtttattatcgaaattatttggtagcgtgtgaaagtattttgcggtattattgtcgatattattatgttgtagtcgttttcgtagtacgatgtattttaggttgatgaagtcgtattggtcgatatcgaatggttgaaataggcgatcgttgcggtacgtaatattcgtgtaggaaatgaatatcgcgtcgggtaatcgttggagttgttgttgcgtggttgtagcgcggatgtagaacgtcgcgtaaatgaaaatcgtggttttttgtaaattttggcgcgtttggaaagtattatcgtgttgtttgtcgatgataaaggttcggttttcgttacgaagattatcgacggtgtagagttgttgatttcgatggttggttttattaataaagaagatgagttggcgcgtttggcgaaagaagtggcgaagattgaaggtgaaattagtcgtatcgagaataaattggcgaacga

SEQ ID NO: 10074 - DNA, 758 bp, Artificial Sequence
  chemically treated genomic DNA (Homo sapiens) CpG-island No: 10074
tcgttcgccaatttattctcgatacgactaatttcaccttcaatcttcgccacttctttcgccaaacgcgccaactcatcttctttattaataaaaccaaccatcgaaatcaacaactctacaccgtcgataatcttcgtaacgaaaaccgaacctttatcatcgacaaacaacacgataatactttccaaacgcgccaaaatttacaaaaaaccacgattttcatttacgcgacgttctacatccgcgctacaaccacgcaacaacaactccaacgattacccgacgcgatattcatttcctacacgaatattacgtaccgcaacgatcgcctatttcaaccattcgatatcgaccaatacgacttcatcaacctaaaatacatcgtactacgaaaacgactacaacataataatatcgacaataataccgcaaaatactttcacacgctaccaaataatttcgataataaacgaaataatcgaatacgcgaaacgcaacaaaccttccaatacaatcaccaacgtataacgaataccgcgcaattctacttcgataccaccgttcattaccgacttaatcaactcgaaataccaatcacaaaactaattccaaataaactcatacaaaatacctacgacgatatcgaaacgaaaactatccaacgcttcgcgatacgctttaataatctaattaaactccgccaaaatccaacgatccgccaacgacaacgtcatttcgccgccgttaaaaccgca

SEQ ID NO: 10075 - DNA, 758 bp, Artificial Sequence
  chemically treated genomic DNA (Homo sapiens) CpG-island No: 10075
tcgttcgttagtttgttttcgatacggttgattttatttttaattttcgttatttttttcgttagacgcgttagtttattttttttgttgatgaggttagttatcgggattagtagttttgtatcgtcgatgattttcgtaacggaaatcggatttttgttatcggtaggtagtacggtgatattttttagacgcgttagggtttgtaggaagttacggtttttatttacgcgacgttttgtattcgcgttgtaattacgtagtagtagttttagcggttgttcggcgcgatgtttattttttgtacggatgttacgtatcgtaacgatcgtttgttttagttattcggtgtcggttagtgcggttttattaatttgagatgtatcgtattgcgggaacggttgtagtatgatggtgtcggtagtgatatcgtaaagtatttttatacgttgttagatggtttcggtgatgaacggaatgatcggatgcgcgaggcgtagtagattttttagtatagttattagcgtatggcgagtatcgcgtagttttgtttcggtgttatcgtttattatcggtttggttagttcgagatattagttatagaattggttttaggtgaatttatatagaatgtttgcggcgatatcgaagcggaagttgtttagcgtttcgcggtacgttttgatggtttggttgaatttcgttagaatttagcggttcgttagcgatagcgttatttcgtcgtcgttgaagtcgta

SEQ ID NO: 10076 - DNA, 758 bp, Artificial Sequence
  chemically treated genomic DNA (Homo sapiens) CpG-island No: 10076
tacgacttcaacgacgacgaaataacgctatcgctaacgaaccgctaaattctaacgaaattcaaccaaaccatcaaaacgtaccgcgaaacgctaaacaacttccgcttcgatatcgccgcaaacattctatataaattcacctaaaaccaattctataactaatatctcgaactaaccaaaccgataataaacgataacaccgaaacaaaactacgcgatactcgccatacgctaataactatactaaaaaatctactacgcctcgcgcatccgatcattccgttcatcaccgaaaccatctaacaacgtataaaaatactttacgatatcactaccgacaccatcatactacaaccgttcccgcaatacgatacatctcaaattaataaaaccgcactaaccgacaccgaataactaaaacaaacgatcgttacgatacgtaacatccgtacaaaaaataaacatcgcgccgaacaaccgctaaaactactactacgtaattacaacgcgaatacaaaacgtcgcgtaaataaaaaccgtaacttcctacaaaccctaacgcgtctaaaaaatatcaccgtactacctaccgataacaaaaatccgatttccgttacgaaaatcatcgacgatacaaaactactaatcccgataactaacctcatcaacaaaaaaaataaactaacgcgtctaacgaaaaaaataacgaaaattaaaaataaaatcaaccgtatcgaaaacaaactaacgaacga

SEQ ID NO: 10077 - DNA, 795 bp, Artificial Sequence
  chemically treated genomic DNA (Homo sapiens) CpG-island No: 10077
tttagtcggttggttgtgcgttagtacggatatttagtgttggcgggtcgcggtatttgcgtgtatttagtgttttatagtgaatttaattatgtcggcgcgcgttaggttgacggagtatttcgtcgggttgtttttatcgttacggtggttaagggtgcgtacgtatagtagcggcgatatattcgggattttaagacgttggtattttttggtttgggcgcggcgggcgttgattcgcgtttggttgcggcgtagcgtaatttcggtttgttcgcgtagaaaatcgtgtagcgagtcgttgtcgaagcgttgtagcgtcggttagagggtgaggttcgcgaagtagtggtcgattaaatagagcgcgacgtcgttgatacgacgtagggtgcgtaggtggatgacgttttttttttcggtaatttttagtgcgttagcgacgtggtcggacgcggggcgtaatatcgaaagtagtttttcgttggtgggatggttgttttgatttagtagattttggttaaaacgcgtttgggcgttgagcgggtaatcgaacgggcgtattagtattagtacgtcgacgttttgacggcgttgtatttagtttttttttattagttggtcgatggcgcggcgtagggtgtggcgatttattttaaagcgcgttgttagttgttgttcggcgggaagatagtcgtcgtagcggtagtgttgacgaagtttttgtttaagttttgcggttattttttgatagcgtgtagggtagttggtcggatgtgtagataagtgtataga

SEQ ID NO: 10078 - DNA, 795 bp, Artificial Sequence
  chemically treated genomic DNA (Homo sapiens) CpG-island No: 10078
tctatacacttatctacacatccgaccaactaccctacacgctatcaaaaaataaccgcaaaacttaaacaaaaacttcgtcaacactaccgctacgacgactatcttcccgccgaacaacaactaacaacgcgctttaaaataaatcgccacaccctacgccgcgccatcgaccaactaataaaaaaaaactaaatacaacgccgtcaaaacgtcgacgtactaatactaatacgcccgttcgattacccgctcaacgcccaaacgcgttttaaccaaaatctactaaatcaaaacaaccatcccaccaacgaaaaactactttcgatattacgccccgcgtccgaccacgtcgctaacgcactaaaaattaccgaaaaaaaaaacgtcatccacctacgcaccctacgtcgtatcaacgacgtcgcgctctatttaatcgaccactacttcgcgaacctcaccctctaaccgacgctacaacgcttcgacaacgactcgctacacgattttctacgcgaacaaaccgaaattacgctacgccgcaaccaaacgcgaatcaacgcccgccgcgcccaaaccaaaaaataccaacgtcttaaaatcccgaatatatcgccgctactatacgtacgcacccttaaccaccgtaacgataaaaacaacccgacgaaatactccgtcaacctaacgcgcgccgacataattaaattcactataaaacactaaatacacgcaaataccgcgacccgccaacactaaatatccgtactaacgcacaaccaaccgactaaa

SEQ ID NO: 10079 - DNA, 795 bp, Artificial Sequence
  chemically treated genomic DNA (Homo sapiens) CpG-island No: 10079
tttatgtatttgtttatatattcgattagttattttatacgttattaagagatagtcgtaaaatttgagtaggagtttcgttaatattatcgttgcggcgattattttttcgtcgagtagtaattggtagcgcgttttgaggtgaatcgttatattttgcgtcgcgttatcgattaattggtggaaaaaggttgggtatagcgtcgttagggcgtcggcgtgttggtgttgatgcgttcgttcgattattcgtttaacgtttaggcgcgttttagttagaatttgttggattagggtagttattttattagcgaaaaattgttttcggtattgcgtttcgcgttcggttacgtcgttgacgtattggggattatcgagggggagaacgttatttatttgcgtattttgcgtcgtgttaacggcgtcgcgttttgtttaatcgattattatttcgcggattttattttttggtcgacgttgtaacgtttcgatagcggttcgttgtacgattttttgcgcgagtaaatcggaattgcgttgcgtcgtagttagacgcggattagcgttcgtcgcgtttaggttaaagagtgttagcgttttgaaatttcgaatatgtcgtcgttgttgtgcgtgcgtatttttaattatcgtgacggtgaaagtagttcggcggagtatttcgttagtttgacgcgcgtcgatatgattgaatttattatggagtattgaatgtacgtagatatcgcgattcgttagtattggatgttcgtgttggcgtatagttaatcggttgaa

SEQ ID NO: 10080 - DNA, 795 bp, Artificial Sequence
  chemically treated genomic DNA (Homo sapiens) CpG-island No: 10080
ttcaaccgattaactatacgccaacacgaacatccaatactaacgaatcgcgatatctacgtacattcaatactccataataaattcaatcatatcgacgcgcgtcaaactaacgaaatactccgccgaactactttcaccgtcacgataattaaaaatacgcacgcacaacaacgacgacatattcgaaatttcaaaacgctaacactctttaacctaaacgcgacgaacgctaatccgcgtctaactacgacgcaacgcaattccgatttactcgcgcaaaaaatcgtacaacgaaccgctatcgaaacgttacaacgtcgaccaaaaaataaaatccgcgaaataataatcgattaaacaaaacgcgacgccgttaacacgacgcaaaatacgcaaataaataacgttctccccctcgataatccccaatacgtcaacgacgtaaccgaacgcgaaacgcaataccgaaaacaatttttcgctaataaaataactaccctaatccaacaaattctaactaaaacgcgcctaaacgttaaacgaataatcgaacgaacgcatcaacaccaacacgccgacgccctaacgacgctatacccaacctttttccaccaattaatcgataacgcgacgcaaaatataacgattcacctcaaaacgcgctaccaattactactcgacgaaaaaataatcgccgcaacgataatattaacgaaactcctactcaaattttacgactatctcttaataacgtataaaataactaatcgaatatataaacaaatacataaa

SEQ ID NO: 10081 - DNA, 576 bp, Artificial Sequence
  chemically treated genomic DNA (Homo sapiens) CpG-island No: 10081
ttagatgtttgatgcgacgtttgcgcgttttattaggtttataaattttcgtatttttcgtaggtcggataaggcgtttacgtcgtattcggcgatattagtttacgtcgttaatagattagttatcgtgcgtatattaagtttcgtagcgttcgtagattattgtttaatcggcgttttacggtaagtcgtcgagtagtcgatatgtagttagttttgttgatagtttttaataaagtgcgataggaagttcgtcgtcgtgttcgcgtttgtcggatacgtcgcgttttcggtattgtttagttcggtaaagttagacggtagttggttgcggtggaatttcgttagcggtagacgttagaacggttcgtttttttgcgcggtattcgttagtaagcgatcggttagcgtatcgttaaaattgaatagcgcgtgataattattatttagcgtagttttcgtcgtttcggtgagggtcgtcgtattaatgattattttcggtttttgcgtattggtattaattagattatcggtaagtattagacgtttttcggtattagtgtttattattttaat

SEQ ID NO: 10082 - DNA, 576 bp, Artificial Sequence
  chemically treated genomic DNA (Homo sapiens) CpG-island No: 10082
attaaaataataaacactaataccgaaaaacgtctaatacttaccgataatctaattaataccaatacgcaaaaaccgaaaataatcattaatacgacgaccctcaccgaaacgacgaaaactacgctaaataataattatcacgcgctattcaattttaacgatacgctaaccgatcgcttactaacgaataccgcgcaaaaaaacgaaccgttctaacgtctaccgctaacgaaattccaccgcaaccaactaccgtctaactttaccgaactaaacaataccgaaaacgcgacgtatccgacaaacgcgaacacgacgacgaacttcctatcgcactttattaaaaactatcaacaaaactaactacatatcgactactcgacgacttaccgtaaaacgccgattaaacaataatctacgaacgctacgaaacttaatatacgcacgataactaatctattaacgacgtaaactaatatcgccgaatacgacgtaaacgccttatccgacctacgaaaaatacgaaaatttataaacctaataaaacgcgcaaacgtcgcatcaaacatctaa

SEQ ID NO: 10083 - DNA, 576 bp, Artificial Sequence
  chemically treated genomic DNA (Homo sapiens) CpG-island No: 10083
gttgaagtgatgaatattgatgtcgaagggcgtttggtgtttgtcgatggtttgattgatgttagtgcgtagaaatcggaaatgattattgatgcggcgatttttatcggggcggcgaaaattgcgttgggtaatgattattacgcgttgtttagttttgacgatgcgttggtcggtcgtttgttggcgagtgtcgcgtaggagaacgaatcgttttggcgtttgtcgttggcggagttttatcgtagttagttgtcgtttaattttgtcgaattgaataatatcggaagcgcggcgtattcggtaggcgcgagtacggcggcgggttttttgtcgtattttgttgagaattattagtaaggttggttgtatatcgattgttcggcgatttatcgtaaagcgtcggttgaatagtggtttgcgggcgttacgggatttggtgtgcgtacgatagttaatttgttaacggcgtaaattaatatcgtcggatgcggcgtaaacgttttattcggtttacggagggtgcgggaatttgtaggtttgataagacgcgtaagcgtcgtattaggtatttgg

SEQ ID NO: 10084 - DNA, 576 bp, Artificial Sequence
  chemically treated genomic DNA (Homo sapiens) CpG-island No: 10084
ccaaatacctaatacgacgcttacgcgtcttatcaaacctacaaattcccgcaccctccgtaaaccgaataaaacgtttacgccgcatccgacgatattaatttacgccgttaacaaattaactatcgtacgcacaccaaatcccgtaacgcccgcaaaccactattcaaccgacgctttacgataaatcgccgaacaatcgatatacaaccaaccttactaataattctcaacaaaatacgacaaaaaacccgccgccgtactcgcgcctaccgaatacgccgcgcttccgatattattcaattcgacaaaattaaacgacaactaactacgataaaactccgccaacgacaaacgccaaaacgattcgttctcctacgcgacactcgccaacaaacgaccgaccaacgcatcgtcaaaactaaacaacgcgtaataatcattacccaacgcaattttcgccgccccgataaaaatcgccgcatcaataatcatttccgatttctacgcactaacatcaatcaaaccatcgacaaacaccaaacgcccttcgacatcaatattcatcacttcaac

SEQ ID NO: 10085 - DNA, 646 bp, Artificial Sequence
  chemically treated genomic DNA (Homo sapiens) CpG-island No: 10085
gggagagcgcgtattgtcgggtgtggagcgggttgaggtgattaagatagggggaaaggtatcggtttcgtacggtcggttacggaatttttttcgcgggaagatcgtttatatgttacgttatttcgtgtcggaattaatttgcgagggaaagtcggttatcggacgttttggaggtaggattttcgtcggaagggcgggcgttttttgtagttcgagttaattttcggttggtgcggtgttcggtttgttaggttggcgcggttgacgggatttcgtggagatggtttgcgcggtcgcgcggttttcggtcgattaggataggtgggttttcgggaaggttggtcgtggtattattgggttcggggttttttttatcggaatttcggtatttcgtagttttcgagtttcgatcgtatttcggtcgcggggcggcgcggcgcgggttggtgcggtgagaatcggattcgattcgatcggattttagcgaatagttacgtcgcgagaagcgcgttttatattcgtgttgcgattagagaggttcgttcggtgttttttgagtttttttttttcgtgtaagagcgcgttttaggttcggggacgttggataagttgttgtgttaaaataatagttgtattattgttt

SEQ ID NO: 10086 - DNA, 646 bp, Artificial Sequence
  chemically treated genomic DNA (Homo sapiens) CpG-island No: 10086
aaacaataatacaactattattttaacacaacaacttatccaacgtccccgaacctaaaacgcgctcttacacgaaaaaaaaaaactcaaaaaacaccgaacgaacctctctaatcgcaacacgaatataaaacgcgcttctcgcgacgtaactattcgctaaaatccgatcgaatcgaatccgattctcaccgcaccaacccgcgccgcgccgccccgcgaccgaaatacgatcgaaactcgaaaactacgaaataccgaaattccgataaaaaaaaccccgaacccaataataccacgaccaaccttcccgaaaacccacctatcctaatcgaccgaaaaccgcgcgaccgcgcaaaccatctccacgaaatcccgtcaaccgcgccaacctaacaaaccgaacaccgcaccaaccgaaaattaactcgaactacaaaaaacgcccgcccttccgacgaaaatcctacctccaaaacgtccgataaccgactttccctcgcaaattaattccgacacgaaataacgtaacatataaacgatcttcccgcgaaaaaaattccgtaaccgaccgtacgaaaccgatacctttccccctatcttaatcacctcaacccgctccacacccgacaatacgcgctctccc

SEQ ID NO: 10087 - DNA, 646 bp, Artificial Sequence
  chemically treated genomic DNA (Homo sapiens) CpG-island No: 10087
aaataatgatgtaattgttattttgatataatagtttgtttagcgttttcgagtttggagcgcgtttttatacggaaaggagaaatttagaggatatcgggcgagtttttttgatcgtaatacgaatgtagaacgcgtttttcgcggcgtgattgttcgttaaggttcggtcgggtcgggttcggtttttatcgtattaattcgcgtcgcgtcgtttcgcgatcggggtgcgatcggggttcggaagttgcggaatgtcggggtttcggtgggaagagtttcgagtttaatgatgttacggttagttttttcgaggatttatttgttttggtcggtcggggatcgcgcggtcgcgtaagttatttttacggagtttcgttagtcgcgttagtttagtaggtcggatatcgtattagtcggaagttgattcggattatagagagcgttcgttttttcggcggaagttttatttttaaagcgttcggtagtcggttttttttcgtaggttggtttcggtacggagtgacgtggtatgtagacggttttttcgcgagaagagtttcgtggtcggtcgtgcggggtcggtatttttttttttgttttagttattttagttcgttttatattcggtagtgcgcgttttttt

SEQ ID NO: 10088 - DNA, 646 bp, Artificial Sequence
  chemically treated genomic DNA (Homo sapiens) CpG-island No: 10088
aaaaaaacgcgcactaccgaatataaaacgaactaaaataactaaaacaaaaaaaaaaataccgaccccgcacgaccgaccacgaaactcttctcgcgaaaaaaccgtctacataccacgtcactccgtaccgaaaccaacctacgaaaaaaaaccgactaccgaacgctttaaaaataaaacttccgccgaaaaaacgaacgctctctataatccgaatcaacttccgactaatacgatatccgacctactaaactaacgcgactaacgaaactccgtaaaaataacttacgcgaccgcgcgatccccgaccgaccaaaacaaataaatcctcgaaaaaactaaccgtaacatcattaaactcgaaactcttcccaccgaaaccccgacattccgcaacttccgaaccccgatcgcaccccgatcgcgaaacgacgcgacgcgaattaatacgataaaaaccgaacccgacccgaccgaaccttaacgaacaatcacgccgcgaaaaacgcgttctacattcgtattacgatcaaaaaaactcgcccgatatcctctaaatttctcctttccgtataaaaacgcgctccaaactcgaaaacgctaaacaaactattatatcaaaataacaattacatcattattt

SEQ ID NO: 10089 - DNA, 752 bp, Artificial Sequence
  chemically treated genomic DNA (Homo sapiens) CpG-island No: 10089
agcggcggcggcgtagcgggggtttagtttagggcgtttttacggcggtttatatttcgtagtcgcgtttgtagcgtttttcgttcggtttgtagttttcggcgcgtttgggtcgcggcgcgtttttttttttgtagcgtttttcgttttcgttttagggcgcgttcgttttgttttacggtcgtttcgcgtcgttttagttttcgttttcgtcggttgtcgcgtacggttagcgcgtttatttgttttagtaggcgcgtttagtcgttttcgggggtcgtagcggggtcgggcggcggcgggtagggcgcggtaggtggggagttttcggcgtcgttgttttttagttttcgtcggtgcgcgttttttaggtgtttttataacgtcgaggttttcgcgtggaagttcgggtcgcggtttatttgtttttcgtatagacggtaggtggtttagtggttcgacggatgttcggggcgtttcggcgttaggtggaagtagttttaggtttcggagtatggcgtttttaggcggtcgggaggcgtcggcgtcggcgtcggttttagtttcggatattgatcgtttcgcgtcgtcgcgtcgtttagttcgcgggtttggtttatggtgtaggtcggttcgttattttttattttgcggcgttcgtacgttggggagtaggggaagaataataatgagtgttaggattacgtatatagtttttagattatagttagtttaagaaattatgtcgtttt

SEQ ID NO: 10090 - DNA, 752 bp, Artificial Sequence
  chemically treated genomic DNA (Homo sapiens) CpG-island No: 10090
aaaacgacataatttcttaaactaactataatctaaaaactatatacgtaatcctaacactcattattattcttcccctactccccaacgtacgaacgccgcaaaataaaaaataacgaaccgacctacaccataaaccaaacccgcgaactaaacgacgcgacgacgcgaaacgatcaatatccgaaactaaaaccgacgccgacgccgacgcctcccgaccgcctaaaaacgccatactccgaaacctaaaactacttccacctaacgccgaaacgccccgaacatccgtcgaaccactaaaccacctaccgtctatacgaaaaacaaataaaccgcgacccgaacttccacgcgaaaacctcgacgttataaaaacacctaaaaaacgcgcaccgacgaaaactaaaaaacaacgacgccgaaaactccccacctaccgcgccctacccgccgccgcccgaccccgctacgacccccgaaaacgactaaacgcgcctactaaaacaaataaacgcgctaaccgtacgcgacaaccgacgaaaacgaaaactaaaacgacgcgaaacgaccgtaaaacaaaacgaacgcgccctaaaacgaaaacgaaaaacgctacaaaaaaaaaaacgcgccgcgacccaaacgcgccgaaaactacaaaccgaacgaaaaacgctacaaacgcgactacgaaatataaaccgccgtaaaaacgccctaaactaaacccccgctacgccgccgccgct

SEQ ID NO: 10091 - DNA, 752 bp, Artificial Sequence
  chemically treated genomic DNA (Homo sapiens) CpG-island No: 10091
agggcggtatggttttttaggttaattgtagtttaggagttgtgtgcgtgattttaatatttattattattttttttttgttttttagcgtgcgggcgtcgtagaatgaggagtggcgagtcggtttgtattatggattaggttcgcgggttggacgacgcggcggcgcggggcggttagtgttcgggattggggtcggcgtcgacgtcgacgtttttcggtcgtttgggggcgttatatttcgaggtttggggttatttttatttggcgtcggggcgtttcgggtattcgtcgggttattgggttatttgtcgtttgtgcggggagtaggtgggtcgcggttcgggtttttacgcggggatttcggcgttgtggaggtatttgaggagcgcgtatcggcgggagttggagagtagcggcgtcgggagttttttatttgtcgcgttttgttcgtcgtcgttcggtttcgttgcggttttcgagggcgattgggcgcgtttgttggaatagatgggcgcgttggtcgtgcgcggtagtcggcgggagcgggagttggagcggcgcgaggcggtcgtggagtagggcgagcgcgttttggagcggaggcggagggcgttgtaggaggaagagcgcgtcgcggtttaggcgcgtcgggaattgtaggtcgagcgggaggcgttgtaggcgcggttgcgggatgtgagtcgtcgtgagggcgttttgggttgggttttcgttgcgtcgtcgtcgtt

SEQ ID NO: 10092 - DNA, 752 bp, Artificial Sequence
  chemically treated genomic DNA (Homo sapiens) CpG-island No: 10092
aacgacgacgacgcaacgaaaacccaacccaaaacgccctcacgacgactcacatcccgcaaccgcgcctacaacgcctcccgctcgacctacaattcccgacgcgcctaaaccgcgacgcgctcttcctcctacaacgccctccgcctccgctccaaaacgcgctcgccctactccacgaccgcctcgcgccgctccaactcccgctcccgccgactaccgcgcacgaccaacgcgcccatctattccaacaaacgcgcccaatcgccctcgaaaaccgcaacgaaaccgaacgacgacgaacaaaacgcgacaaataaaaaactcccgacgccgctactctccaactcccgccgatacgcgctcctcaaatacctccacaacgccgaaatccccgcgtaaaaacccgaaccgcgacccacctactccccgcacaaacgacaaataacccaataacccgacgaatacccgaaacgccccgacgccaaataaaaataaccccaaacctcgaaatataacgcccccaaacgaccgaaaaacgtcgacgtcgacgccgaccccaatcccgaacactaaccgccccgcgccgccgcgtcgtccaacccgcgaacctaatccataatacaaaccgactcgccactcctcattctacgacgcccgcacgctaaaaaacaaaaaaaaaataataataaatattaaaatcacgcacacaactcctaaactacaattaacctaaaaaaccataccgccct

SEQ ID NO: 10093 - DNA, 544 bp, Artificial Sequence
  chemically treated genomic DNA (Homo sapiens) CpG-island No: 10093
gtaggtcgcgtatatcgggtaggggttattttcggtttttttgttcgttgttcgtagtttcgttcggttataagtgagttttagggcgttatggttaggggttatcgcggttagtcgggtgtgaggttgtttttcgttgttcgcgcgttttagtggtttttgggttcgtcggcgttcgtttcggtttgaacgtagttttttcgcggcgacgagtagtttcgcgtcggagtttatggtttcggaggcgtcgttttcgtcgcggtcgtcgtcgtcgtttatttttttcgagtttgagttggtttagttaaggcggaaggtggagaagttggaacgtgaattgcggagttgtaagcggtaggtgcgggagatcgagaagttgttgtattatatagaacggttgtattagaacgtagaaagtaataattaggagtttcgtacgtaggtgcgcggttttttttagtttcgcgttttatttagtttaggcgaggttttcgaagttcgtgatagtttcggaaggggtttttgataggggtttagaattatt

SEQ ID NO: 10094 - DNA, 544 bp, Artificial Sequence
  chemically treated genomic DNA (Homo sapiens) CpG-island No: 10094
aataattctaaacccctatcaaaaaccccttccgaaactatcacgaacttcgaaaacctcgcctaaactaaataaaacgcgaaactaaaaaaaaccgcgcacctacgtacgaaactcctaattattactttctacgttctaatacaaccgttctatataatacaacaacttctcgatctcccgcacctaccgcttacaactccgcaattcacgttccaacttctccaccttccgccttaactaaaccaactcaaactcgaaaaaaataaacgacgacgacgaccgcgacgaaaacgacgcctccgaaaccataaactccgacgcgaaactactcgtcgccgcgaaaaaactacgttcaaaccgaaacgaacgccgacgaacccaaaaaccactaaaacgcgcgaacaacgaaaaacaacctcacacccgactaaccgcgataacccctaaccataacgccctaaaactcacttataaccgaacgaaactacgaacaacgaacaaaaaaaccgaaaataacccctacccgatatacgcgacctac

SEQ ID NO: 10095 - DNA, 544 bp, Artificial Sequence
  chemically treated genomic DNA (Homo sapiens) CpG-island No: 10095
agtagttttgagtttttgttagggatttttttcgaggttattacgggtttcgaaggtttcgtttgggttggatggggcgcggggttgaggaggatcgcgtatttgcgtgcggagtttttggttgttgttttttgcgttttggtatagtcgttttgtgtgatgtagtagtttttcgatttttcgtatttgtcgtttgtagtttcgtagtttacgttttaatttttttatttttcgttttagttgggttagtttaggttcgggggaggtgggcggcggcggcgatcgcggcggggacggcgttttcgaggttatgagtttcggcgcgagattgttcgtcgtcgcggaggggttgcgtttaggtcgaaacggacgtcggcggatttagagattattggagcgcgcgggtagcgaaaggtagttttatattcggttggtcgcggtggtttttggttatgacgttttgaaatttatttgtagtcgaacggggttgcgagtaacgagtaaggggatcgaggatggtttttgttcgatgtgcgcggtttgt

SEQ ID NO: 10096 - DNA, 544 bp, Artificial Sequence
  chemically treated genomic DNA (Homo sapiens) CpG-island No: 10096
acaaaccgcgcacatcgaacaaaaaccatcctcgatccccttactcgttactcgcaaccccgttcgactacaaataaatttcaaaacgtcataaccaaaaaccaccgcgaccaaccgaatataaaactacctttcgctacccgcgcgctccaataatctctaaatccgccgacgtccgtttcgacctaaacgcaacccctccgcgacgacgaacaatctcgcgccgaaactcataacctcgaaaacgccgtccccgccgcgatcgccgccgccgcccacctcccccgaacctaaactaacccaactaaaacgaaaaataaaaaaattaaaacgtaaactacgaaactacaaacgacaaatacgaaaaatcgaaaaactactacatcacacaaaacgactataccaaaacgcaaaaaacaacaaccaaaaactccgcacgcaaatacgcgatcctcctcaaccccgcgccccatccaacccaaacgaaaccttcgaaacccgtaataacctcgaaaaaaatccctaacaaaaactcaaaactact

SEQ ID NO: 10097 - DNA, 1124 bp, Artificial Sequence
  chemically treated genomic DNA (Homo sapiens) CpG-island No: 10097
ttggcgcgagtttgtgttgacgagtggatcgcgcgtacgttagagaaatcgcgttacgttgtcggtgttttcggttcgattaatcgtacggcgtttattttttcggacgttaacgattcggtatttcgtaatattatttttgacgggttggtggcggtttatcgagagtttattaaagcgttggtggaaggtggcgcggatttgattttgattgaaatcgttttcgatatttttaacgttaaagcggcggtatttgcggtgaaaacggagtttgaagcgttgggcgttgagttgtcgattatgattttcggtattattatcgacgttttcgggcgtacgtttttcgggtagattatcgaagtattttataatttattgcgttacgtcgaagttttgatttttggtttgaattgtgcgttggggttcgatgaattgcgttagtacgtgtaggagttgttacggattgcggaatgttacgttatcgcgtattcgaacgtcgggttatttaacgtttttggtgagtacgatttcgacgtcgatacgatggtaaaatagatacgtgaatgggcgtaagcgggtttttttaatatcgttcgcggttgttgtggtattacgttataatatattgcggagatgagttttggtcgtaaaaggttaacgcgcgtagaatcgagttcggtattttcgacgttgtcgggtaaagtttggttggaatatgtattgtcgttaattgttgaatagttgtaggtcgtcgtttagcggtgtttattttttttcgttggcgtaacgtagatttgggatgattatatagcgaaaacggttgcggttttcgtttcgttgggtgtttttgttatcggtatttatagcgttgtcgatttcgttgtcgcgattgaaaatgttgagatcgtgattgtcggcggggggaatattttttagttggttgaaatagtggtcgcgaagcgcgggttggtggtattaattattggacgtgggtaaacgtggggttttgtattttggttggaggcggtaggggttaaatttggttggttaaatattcgtattaataacgatatgtcgattgtcgattcgtaagggtttcgatggcgttaaatttgttttcgttg

SEQ ID NO: 10098 - DNA, 1124 bp, Artificial Sequence
  chemically treated genomic DNA (Homo sapiens) CpG-island No: 10098
caacgaaaacaaatttaacgccatcgaaacccttacgaatcgacaatcgacatatcgttattaatacgaatatttaaccaaccaaatttaacccctaccgcctccaaccaaaatacaaaaccccacgtttacccacgtccaataattaataccaccaacccgcgcttcgcgaccactatttcaaccaactaaaaaatattccccccgccgacaatcacgatctcaacattttcaatcgcgacaacgaaatcgacaacgctataaataccgataacaaaaacacccaacgaaacgaaaaccgcaaccgttttcgctatataatcatcccaaatctacgttacgccaacgaaaaaaaataaacaccgctaaacgacgacctacaactattcaacaattaacgacaatacatattccaaccaaactttacccgacaacgtcgaaaataccgaactcgattctacgcgcgttaaccttttacgaccaaaactcatctccgcaatatattataacgtaataccacaacaaccgcgaacgatattaaaaaaacccgcttacgcccattcacgtatctattttaccatcgtatcgacgtcgaaatcgtactcaccaaaaacgttaaataacccgacgttcgaatacgcgataacgtaacattccgcaatccgtaacaactcctacacgtactaacgcaattcatcgaaccccaacgcacaattcaaaccaaaaatcaaaacttcgacgtaacgcaataaattataaaatacttcgataatctacccgaaaaacgtacgcccgaaaacgtcgataataataccgaaaatcataatcgacaactcaacgcccaacgcttcaaactccgttttcaccgcaaataccgccgctttaacgttaaaaatatcgaaaacgatttcaatcaaaatcaaatccgcgccaccttccaccaacgctttaataaactctcgataaaccgccaccaacccgtcaaaaataatattacgaaataccgaatcgttaacgtccgaaaaaataaacgccgtacgattaatcgaaccgaaaacaccgacaacgtaacgcgatttctctaacgtacgcgcgatccactcgtcaacacaaactcgcgccaa

SEQ ID NO: 10099 - DNA, 1124 bp, Artificial Sequence
  chemically treated genomic DNA (Homo sapiens) CpG-island No: 10099
tagcgggaatagatttagcgttatcgaaatttttgcggatcgataatcggtatatcgttgttggtacgaatatttggttaattaagtttagtttttgtcgtttttagttaaaatatagagttttacgtttatttacgtttagtaattggtgttattagttcgcgtttcgcggttattgttttagttaattggaaagtatttttttcgtcgataattacgattttagtatttttaatcgcggtaacgggatcgataacgttatgaatatcggtgatagaaatatttagcggagcgagaatcgtagtcgttttcgttgtgtaattattttaggtttgcgttacgttagcgaaagggaataaatatcgttgagcggcgatttgtaattgtttagtaattagcggtagtgtatgttttagttaggttttattcggtagcgtcgagggtatcgagttcgattttgcgcgcgttaattttttacggttaggatttattttcgtaatatgttgtggcgtggtgttatagtagtcgcggacgatattgagaaaattcgtttgcgtttatttacgtatttgttttgttatcgtgtcggcgtcgagatcgtatttattaaaggcgttgggtagttcggcgttcgggtgcgcggtgacgtagtatttcgtaattcgtgatagtttttgtacgtattggcgtagtttatcgggttttagcgtatagtttaggttaaaggttagagtttcggcgtggcgtaatgagttgtaaaatgtttcggtggtttgttcggagagcgtgcgttcggaggcgtcggtgatggtgtcggagattataatcggtagtttaacgtttagcgttttaaatttcgtttttatcgtaaatatcgtcgttttggcgttaagggtgtcgaaaacggttttaattaggattagattcgcgttattttttattagcgttttggtggattttcgataagtcgttattagttcgttaaaagtgatattacgaaatgtcggatcgttgacgttcggagaaatagacgtcgtgcggttggtcgggtcgagaatatcggtaacgtagcgcggtttttttggcgtgcgcgcggtttattcgttagtataagttcgcgttag

SEQ ID NO: 10100 - DNA, 1124 bp, Artificial Sequence
  chemically treated genomic DNA (Homo sapiens) CpG-island No: 10100
ctaacgcgaacttatactaacgaataaaccgcgcgcacgccaaaaaaaccgcgctacgttaccgatattctcgacccgaccaaccgcacgacgtctatttctccgaacgtcaacgatccgacatttcgtaatatcacttttaacgaactaataacgacttatcgaaaatccaccaaaacgctaataaaaaataacgcgaatctaatcctaattaaaaccgttttcgacacccttaacgccaaaacgacgatatttacgataaaaacgaaatttaaaacgctaaacgttaaactaccgattataatctccgacaccatcaccgacgcctccgaacgcacgctctccgaacaaaccaccgaaacattttacaactcattacgccacgccgaaactctaacctttaacctaaactatacgctaaaacccgataaactacgccaatacgtacaaaaactatcacgaattacgaaatactacgtcaccgcgcacccgaacgccgaactacccaacgcctttaataaatacgatctcgacgccgacacgataacaaaacaaatacgtaaataaacgcaaacgaattttctcaatatcgtccgcgactactataacaccacgccacaacatattacgaaaataaatcctaaccgtaaaaaattaacgcgcgcaaaatcgaactcgataccctcgacgctaccgaataaaacctaactaaaacatacactaccgctaattactaaacaattacaaatcgccgctcaacgatatttattccctttcgctaacgtaacgcaaacctaaaataattacacaacgaaaacgactacgattctcgctccgctaaatatttctatcaccgatattcataacgttatcgatcccgttaccgcgattaaaaatactaaaatcgtaattatcgacgaaaaaaatactttccaattaactaaaacaataaccgcgaaacgcgaactaataacaccaattactaaacgtaaataaacgtaaaactctatattttaactaaaaacgacaaaaactaaacttaattaaccaaatattcgtaccaacaacgatataccgattatcgatccgcaaaaatttcgataacgctaaatctattcccgcta

SEQ ID NO: 10101 - DNA, 597 bp, Artificial Sequence
  chemically treated genomic DNA (Homo sapiens) CpG-island No: 10101
cgtttgcgcgttcgtttcgagcgcggtaaaggtttcggtcgtcgtcgcgtagtcggggtagacggttatgtcgtagtttatcgtacggcggattattttattatggatattgggcgtaacgatgagttgatagtttattttggcgagcgtatcgatttgtttaggttttagtatcgtatttgcgttaattaacgttttgtcgtcgtacgtattaacgatggcgggaatgttttgtttttattgtggggaatttagcgggattttaatcgcgtcgaattcggcgttaattatcgcgttaatatgcgttagcgtttcgtcgggcgtaatatcgcgtaaaatggcgattagcgggagtttagtttgttattgtatgagcgatgttttttatattagtttgaaatgtcgtgtcgttcggtaacggcgttacgtcgtaatttatcgtttgaaaggtttgttggtagcgcgcggttagcgatgtttcggcgtatacggtgatggcgtgttcgttttcgtgaaagtgtcggattcgaaattttttttttagattaaagataaattggttttttttgaggtgaaatcggcggttgaatagtagat

SEQ ID NO: 10102 - DNA, 597 bp, Artificial Sequence
  chemically treated genomic DNA (Homo sapiens) CpG-island No: 10102
atctactattcaaccgccgatttcacctcaaaaaaaaccaatttatctttaatctaaaaaaaaaatttcgaatccgacactttcacgaaaacgaacacgccatcaccgtatacgccgaaacatcgctaaccgcgcgctaccaacaaacctttcaaacgataaattacgacgtaacgccgttaccgaacgacacgacatttcaaactaatataaaaaacatcgctcatacaataacaaactaaactcccgctaatcgccattttacgcgatattacgcccgacgaaacgctaacgcatattaacgcgataattaacgccgaattcgacgcgattaaaatcccgctaaattccccacaataaaaacaaaacattcccgccatcgttaatacgtacgacgacaaaacgttaattaacgcaaatacgatactaaaacctaaacaaatcgatacgctcgccaaaataaactatcaactcatcgttacgcccaatatccataataaaataatccgccgtacgataaactacgacataaccgtctaccccgactacgcgacgacgaccgaaacctttaccgcgctcgaaacgaacgcgcaaacg

SEQ ID NO: 10103 - DNA, 597 bp, Artificial Sequence
  chemically treated genomic DNA (Homo sapiens) CpG-island No: 10103
atttgttgtttaatcgtcgattttattttagaagaaattagtttgtttttggtttgggaggagaatttcgggttcggtatttttacggaaacgaatacgttattatcgtgtgcgtcggaatatcgttgatcgcgcgttattagtaagttttttaggcgatgggttgcgacgtgacgtcgttgtcgggcgatacggtattttaggttggtataaggagtatcgtttatgtagtggtaaattaaattttcgttgatcgttattttgcgcggtattacgttcgacgaggcgttggcgtatgttggcgcggtgattgacgtcgggttcgacgcggttgaaatttcgttgaattttttataatgggagtaaagtattttcgttatcgttgatgcgtacggcgataaggcgttgattggcgtaggtacggtattgaaatttgaataggtcgatgcgttcgttaggatgggttgttagtttatcgttacgtttaatatttatagtgaagtgattcgtcgtgcggtgggttacggtatgatcgtttgtttcggttgcgcgacggcgatcgaagtttttatcgcgttcgaagcgggcgcgtaggcg

SEQ ID NO: 10104 - DNA, 597 bp, Artificial Sequence
  chemically treated genomic DNA (Homo sapiens) CpG-island No: 10104
cgcctacgcgcccgcttcgaacgcgataaaaacttcgatcgccgtcgcgcaaccgaaacaaacgatcataccgtaacccaccgcacgacgaatcacttcactataaatattaaacgtaacgataaactaacaacccatcctaacgaacgcatcgacctattcaaatttcaataccgtacctacgccaatcaacgccttatcgccgtacgcatcaacgataacgaaaatactttactcccattataaaaaattcaacgaaatttcaaccgcgtcgaacccgacgtcaatcaccgcgccaacatacgccaacgcctcgtcgaacgtaataccgcgcaaaataacgatcaacgaaaatttaatttaccactacataaacgatactccttataccaacctaaaataccgtatcgcccgacaacgacgtcacgtcgcaacccatcgcctaaaaaacttactaataacgcgcgatcaacgatattccgacgcacacgataataacgtattcgtttccgtaaaaataccgaacccgaaattctcctcccaaaccaaaaacaaactaatttcttctaaaataaaatcgacgattaaacaacaaat

SEQ ID NO: 10105 - DNA, 697 bp, Artificial Sequence
  chemically treated genomic DNA (Homo sapiens) CpG-island No: 10105
gacgtatttgtaagttatttaaaggttaaatcgttggcggagttattaatttcgtcggaagtattgatagcggtttttgaggcgttttcggtagcgatcgtcgatgacgatgatagttagtagttgttgttgagcggtatgagttgcgttagttgtgttattcgcgtataaaatgcgttgtaaagcgtatcgggcgttatttaggtacgggtaaatttggcggagcgtattgcgttggtgatgggtagtgtttttttataagatttagtgtaggcggtggaaaaagcgggttacggcgcggaagcgattgaagatgacgttaaacgtcgcgagcgttagtaagaaatcgtcgtcgttacgatgaagcgttttcgttggtaggtaattgtcgtattggcggtgggtatttcggtgatggtttgggggatgatcggcgataatatgatggttatcgttgataatcgtagtttgtggttggttatcggtttgataattttggtagtgatggttttcgtcggcgggtatttttatcgtagtgtatggaaaaggttgttgaacggtgcggcgacgatggatacgttggtggcgttgggtattggcgtggcgtgggtttattcgatgagcgttaattgtggtcgcggtggtttcgatggaagcgcgatattttaatgtaattataattgatataaaattttaa

SEQ ID NO: 10106 - DNA, 697 bp, Artificial Sequence
  chemically treated genomic DNA (Homo sapiens) CpG-island No: 10106
ttaaaattttatatcaattataattacattaaaatatcgcgcttccatcgaaaccaccgcgaccacaattaacgctcatcgaataaacccacgccacgccaatacccaacgccaccaacgtatccatcgtcgccgcaccgttcaacaaccttttccatacactacgataaaaatacccgccgacgaaaaccatcactaccaaaattatcaaaccgataaccaaccacaaactacgattatcaacgataaccatcatattatcgccgatcatcccccaaaccatcaccgaaatacccaccgccaatacgacaattacctaccaacgaaaacgcttcatcgtaacgacgacgatttcttactaacgctcgcgacgtttaacgtcatcttcaatcgcttccgcgccgtaacccgctttttccaccgcctacactaaatcttataaaaaaacactacccatcaccaacgcaatacgctccgccaaatttacccgtacctaaataacgcccgatacgctttacaacgcattttatacgcgaataacacaactaacgcaactcataccgctcaacaacaactactaactatcatcgtcatcgacgatcgctaccgaaaacgcctcaaaaaccgctatcaatacttccgacgaaattaataactccgccaacgatttaacctttaaataacttacaaatacgtc

SEQ ID NO: 10107 - DNA, 697 bp, Artificial Sequence
  chemically treated genomic DNA (Homo sapiens) CpG-island No: 10107
ttgaagttttgtgttagttataattgtattaagatgtcgcgtttttatcgggattatcgcggttatagttgacgtttatcgaatagatttacgttacgttagtatttagcgttattagcgtatttatcgtcgtcgtatcgtttagtagttttttttatgtattgcggtaaaaatgttcgtcggcgaaaattattattgttagggttattaggtcgataattaattataggttgcggttgttagcggtgattattatgttatcgtcgattattttttagattattatcgggatatttatcgttagtgcgataattgtttgttagcggaagcgttttatcgtagcgacggcggttttttgttggcgttcgcggcgtttagcgttatttttaatcgttttcgcgtcgtagttcgttttttttatcgtttgtattaaattttgtggggaggtattgtttattattagcgtagtacgtttcgttaggtttattcgtgtttgagtgacgttcggtacgttttgtagcgtattttgtacgcgggtgatatagttggcgtagtttatgtcgtttagtagtaattgttggttgttatcgttatcggcggtcgttgtcggaagcgttttagaaatcgttgttagtgttttcgacgggattgatgatttcgttagcggtttagtttttgggtggtttatagatgcgtt

SEQ ID NO: 10108 - DNA, 697 bp, Artificial Sequence
  chemically treated genomic DNA (Homo sapiens) CpG-island No: 10108
aacgcatctataaaccacccaaaaactaaaccgctaacgaaatcatcaatcccgtcgaaaacactaacaacgatttctaaaacgcttccgacaacgaccgccgataacgataacaaccaacaattactactaaacgacataaactacgccaactatatcacccgcgtacaaaatacgctacaaaacgtaccgaacgtcactcaaacacgaataaacctaacgaaacgtactacgctaataataaacaatacctccccacaaaatttaatacaaacgataaaaaaaacgaactacgacgcgaaaacgattaaaaataacgctaaacgccgcgaacgccaacaaaaaaccgccgtcgctacgataaaacgcttccgctaacaaacaattatcgcactaacgataaatatcccgataataatctaaaaaataatcgacgataacataataatcaccgctaacaaccgcaacctataattaattatcgacctaataaccctaacaataataattttcgccgacgaacatttttaccgcaatacataaaaaaaactactaaacgatacgacgacgataaatacgctaataacgctaaatactaacgtaacgtaaatctattcgataaacgtcaactataaccgcgataatcccgataaaaacgcgacatcttaatacaattataactaacacaaaacttcaa

SEQ ID NO: 10109 - DNA, 514 bp, Artificial Sequence
  chemically treated genomic DNA (Homo sapiens) CpG-island No: 10109
cgtttttttattagttaggttttattttcgggcgaggtttgttatcgattagtagtcgtttcgttcgttcggagtttttttaattttcgagtttaagtagatttcgttggttcgcgtttgtatttttcgtcgggtttacgttttttcggtcgtttagtaggagttagttttcgttatcggagtcggtcgggagagggtataaaattatcgttattaaggcggttgttattagagaggagcgaattttagattcgtttgtggagagatttggggtcgttaaggaaacggcggggaggggagcgaggaggagaacgttgaggatttggcgtcggcgtcgtcgtcgtcgtcgtcgaaataaaggtaggaatttatttgggcgaatcggcgtttgaatttaaggggaggtcgagtcgttgtggcgagagattataattcgggtcgggaggggggggtggttaggtttttttttcgtttttttagtgcggggaatatgtagagtagttacggtaggtat

SEQ ID NO: 10110 - DNA, 514 bp, Artificial Sequence
  chemically treated genomic DNA (Homo sapiens) CpG-island No: 10110
atacctaccgtaactactctacatattccccgcactaaaaaaacgaaaaaaaaacctaaccacccccccctcccgacccgaattataatctctcgccacaacgactcgacctccccttaaattcaaacgccgattcgcccaaataaattcctacctttatttcgacgacgacgacgacgacgccgacgccaaatcctcaacgttctcctcctcgctcccctccccgccgtttccttaacgaccccaaatctctccacaaacgaatctaaaattcgctcctctctaataacaaccgccttaataacgataattttataccctctcccgaccgactccgataacgaaaactaactcctactaaacgaccgaaaaaacgtaaacccgacgaaaaatacaaacgcgaaccaacgaaatctacttaaactcgaaaattaaaaaaactccgaacgaacgaaacgactactaatcgataacaaacctcgcccgaaaataaaacctaactaataaaaaaacg

SEQ ID NO: 10111 - DNA, 514 bp, Artificial Sequence
  chemically treated genomic DNA (Homo sapiens) CpG-island No: 10111
atgtttgtcgtagttgttttatatgtttttcgtattgaggagacggaagaggagtttagttatttttttttttcggttcggattatagtttttcgttatagcggttcggtttttttttggatttagacgtcgattcgtttaggtaaatttttgtttttatttcggcggcggcggcggcggcgtcggcgttaggtttttagcgttttttttttcgttttttttttcgtcgtttttttagcggttttaggtttttttataggcgagtttagagttcgtttttttttggtggtagtcgttttggtagcggtggttttgtattttttttcggtcggtttcggtggcggggattggtttttgttgggcggtcggggaggcgtaggttcggcggagagtgtaggcgcgggttagcggaatttatttgagttcggggattaggagagtttcgggcgagcggagcgattgttggtcggtgataggtttcgttcgggagtggagtttagttagtggggaggcg

SEQ ID NO: 10112 - DNA, 514 bp, Artificial Sequence
  chemically treated genomic DNA (Homo sapiens) CpG-island No: 10112
cgcctccccactaactaaactccactcccgaacgaaacctatcaccgaccaacaatcgctccgctcgcccgaaactctcctaatccccgaactcaaataaattccgctaacccgcgcctacactctccgccgaacctacgcctccccgaccgcccaacaaaaaccaatccccgccaccgaaaccgaccgaaaaaaaatacaaaaccaccgctaccaaaacgactaccaccaaaaaaaaacgaactctaaactcgcctataaaaaaacctaaaaccgctaaaaaaacgacgaaaaaaaaaacgaaaaaaaaaacgctaaaaacctaacgccgacgccgccgccgccgccgccgaaataaaaacaaaaatttacctaaacgaatcgacgtctaaatccaaaaaaaaaccgaaccgctataacgaaaaactataatccgaaccgaaaaaaaaaaataactaaactcctcttccgtctcctcaatacgaaaaacatataaaacaactacgacaaacat

SEQ ID NO: 10113 - DNA, 626 bp, Artificial Sequence
  chemically treated genomic DNA (Homo sapiens) CpG-island No: 10113
acgtgcgggcgtgtcggttttaatattacgaacgcggtggatatagttataatcgtgggcgtgacgattatcgtgacgtatatcgttatttttgatgcgattattatttagtttgttaaggatttgtttcggcgtttcgtttagattaatttttagatggtttattagcgttagtttgtcgtttttatttatacgcgcgaataacgatatttcggtatacgtcgggttacgttgtattagcgagtcgtcggagttgttataaatatcgtcgatgatcgatgcgtttatatacgatgatttaattattgagtgcggttcgcgttttagcggtttgagggttttttttagcgattagagcgtggtgttcggataggttagtatttgttcgtttttgttaagaacgtgtagtttgtcgagacgtagggtgttgatgataacgatatcgcgattataatcgttaacgtatggcgtcgattttttcgttaggtttgtattggcggttgtattagaatattttagtcggcggtgacgtaggtttttagaattcgtataatttattagtgagcgggtagtattaaggtaattatcgttatttcggaatttttcgtggttatttcggttattaa

SEQ ID NO: 10114 - DNA, 626 bp, Artificial Sequence
  chemically treated genomic DNA (Homo sapiens) CpG-island No: 10114
ttaataaccgaaataaccacgaaaaattccgaaataacgataattaccttaatactacccgctcactaataaattatacgaattctaaaaacctacgtcaccgccgactaaaatattctaatacaaccgccaatacaaacctaacgaaaaaatcgacgccatacgttaacgattataatcgcgatatcgttatcatcaacaccctacgtctcgacaaactacacgttcttaacaaaaacgaacaaatactaacctatccgaacaccacgctctaatcgctaaaaaaaaccctcaaaccgctaaaacgcgaaccgcactcaataattaaatcatcgtatataaacgcatcgatcatcgacgatatttataacaactccgacgactcgctaatacaacgtaacccgacgtataccgaaatatcgttattcgcgcgtataaataaaaacgacaaactaacgctaataaaccatctaaaaattaatctaaacgaaacgccgaaacaaatccttaacaaactaaataataatcgcatcaaaaataacgatatacgtcacgataatcgtcacgcccacgattataactatatccaccgcgttcgtaatattaaaaccgacacgcccgcacgt

SEQ ID NO: 10115 - DNA, 626 bp, Artificial Sequence
  chemically treated genomic DNA (Homo sapiens) CpG-island No: 10115
ttaatggtcggggtaattacgaagaatttcgaagtggcggtaattattttggtattattcgtttattagtagattgtgcgggttttggaagtttgcgttatcgtcgattgaagtattttgatgtagtcgttaatataggtttgacggaaggatcgacgttatacgttaacgattatgatcgcgatgtcgttattattagtattttgcgtttcgataagttgtacgtttttggtaagggcgaataggtgttggtttattcgggtattacgttttagtcgttggaaaaagtttttaaatcgttgggacgcgaatcgtatttagtgattggattatcgtgtataggcgtatcggttatcggcggtatttgtaataatttcggcggttcgttggtgtaacgtggttcggcgtatatcgaaatgtcgttattcgcgcgtataaatgaagacggtaaattgacgttggtgaattatttggggattgatttgggcgaaacgtcggagtagatttttagtaagttggatgatgatcgtattaaagatgacgatgtgcgttacgatggtcgttacgtttacgattatgattatgtttatcgcgttcgtgatattgaagtcgatacgttcgtacgt

SEQ ID NO: 10116 - DNA, 626 bp, Artificial Sequence
  chemically treated genomic DNA (Homo sapiens) CpG-island No: 10116
acgtacgaacgtatcgacttcaatatcacgaacgcgataaacataatcataatcgtaaacgtaacgaccatcgtaacgcacatcgtcatctttaatacgatcatcatccaacttactaaaaatctactccgacgtttcgcccaaatcaatccccaaataattcaccaacgtcaatttaccgtcttcatttatacgcgcgaataacgacatttcgatatacgccgaaccacgttacaccaacgaaccgccgaaattattacaaataccgccgataaccgatacgcctatacacgataatccaatcactaaatacgattcgcgtcccaacgatttaaaaactttttccaacgactaaaacgtaatacccgaataaaccaacacctattcgcccttaccaaaaacgtacaacttatcgaaacgcaaaatactaataataacgacatcgcgatcataatcgttaacgtataacgtcgatccttccgtcaaacctatattaacgactacatcaaaatacttcaatcgacgataacgcaaacttccaaaacccgcacaatctactaataaacgaataataccaaaataattaccgccacttcgaaattcttcgtaattaccccgaccattaa

SEQ ID NO: 10117 - DNA, 608 bp, Artificial Sequence
  chemically treated genomic DNA (Homo sapiens) CpG-island No: 10117
  unsure (279)
gcgtagtaattttttttgatatattttcgcgtgaagtttatatcgcgagttgttcgtattgcgcggcggagcgtataatattttcgcgtgtttcgttatcgcgtatttgtcgaaggttgttgttttggcgtagttttattacggtcgattgtcgttcgtacgtcgatcggttttcggttgtagtgttttgtttttatcgttattttttagtttgattcgttttgggttaagtgtttttttgattttgatcggtatggttatgacgatcgcgtggttttnttcgagtgttttgggtttaacgttttggtattcgtagtatcgtcgttgtatatttatagtggggtattttagtcgtgttggcgtcgtggcgtgtgtttatcggttcgtcggcgggatgatgtagtgttgttgtacgttttttcggttattcgtgttttttttatttgtcgtttttttttcggcgggatatcgtattcgggtttggcggggttggtaatttcgttagtcgtcgggtcgattattttcgttacgttgatgttgttgttttattagtattcgaattagatggggtatttggtgattgttttgttgttggtttggggcggtat

SEQ ID NO: 10118 - DNA, 608 bp, Artificial Sequence
  chemically treated genomic DNA (Homo sapiens) CpG-island No: 10118
  unsure (330)
ataccgccccaaaccaacaacaaaacaatcaccaaataccccatctaattcgaatactaataaaacaacaacatcaacgtaacgaaaataatcgacccgacgactaacgaaattaccaaccccgccaaacccgaatacgatatcccgccgaaaaaaaaacgacaaataaaaaaaacacgaataaccgaaaaaacgtacaacaacactacatcatcccgccgacgaaccgataaacacacgccacgacgccaacacgactaaaataccccactataaatatacaacgacgatactacgaataccaaaacgttaaacccaaaacactcgaanaaaaccacgcgatcgtcataaccataccgatcaaaatcaaaaaaacacttaacccaaaacgaatcaaactaaaaaataacgataaaaacaaaacactacaaccgaaaaccgatcgacgtacgaacgacaatcgaccgtaataaaactacgccaaaacaacaaccttcgacaaatacgcgataacgaaacacgcgaaaatattatacgctccgccgcgcaatacgaacaactcgcgatataaacttcacgcgaaaatatatcaaaaaaaattactacgc

SEQ ID NO: 10119 - DNA, 608 bp, Artificial Sequence
  chemically treated genomic DNA (Homo sapiens) CpG-island No: 10119
  unsure (330)
gtgtcgttttaggttagtagtagagtaattattagatgttttatttgattcgggtattgatgagataataatattagcgtggcgagaatagtcggttcggcgattaacggaattgttaatttcgttaagttcgggtgcggtgtttcgtcggagaagagacgataggtaaagggggtacgagtgatcggagggacgtgtaataatattatattatttcgtcggcgagtcgatgggtatacgttacggcgttagtacggttggaatgttttattgtaagtgtatagcgacggtattgcggatattaggacgttgagtttagaatattcggangagattacgcggtcgttataattatgtcggttaggattagaagaatatttaatttagggcggattaggttggaaagtagcggtggggataaaatattgtaatcgggggtcgatcggcgtgcggacgatagtcggtcgtggtgaaattacgttaaagtaataattttcgatagatgcgcgatgacgaggtacgcgaggatattatgcgtttcgtcgcgtaatgcggataattcgcggtatgagttttacgcggaggtatgttaggaagaattattacgt

SEQ ID NO: 10120 - DNA, 608 bp, Artificial Sequence
  chemically treated genomic DNA (Homo sapiens) CpG-island No: 10120
  unsure (279)
acgtaataattcttcctaacatacctccgcgtaaaactcataccgcgaattatccgcattacgcgacgaaacgcataatatcctcgcgtacctcgtcatcgcgcatctatcgaaaattattactttaacgtaatttcaccacgaccgactatcgtccgcacgccgatcgacccccgattacaatattttatccccaccgctactttccaacctaatccgccctaaattaaatattcttctaatcctaaccgacataattataacgaccgcgtaatctcntccgaatattctaaactcaacgtcctaatatccgcaataccgtcgctatacacttacaataaaacattccaaccgtactaacgccgtaacgtatacccatcgactcgccgacgaaataatataatattattacacgtccctccgatcactcgtaccccctttacctatcgtctcttctccgacgaaacaccgcacccgaacttaacgaaattaacaattccgttaatcgccgaaccgactattctcgccacgctaatattattatctcatcaatacccgaatcaaataaaacatctaataattactctactactaacctaaaacgacac

SEQ ID NO: 10121 - DNA, 585 bp, Artificial Sequence
  chemically treated genomic DNA (Homo sapiens) CpG-island No: 10121
ttcggttggcgtaatttagttcgaagcggtagacgtatcggaaattatttcggattcgtttgattcgtcgaagaaacgtaaatcgataatgttggtgatcgatttgacgttgcgttttgattttgagttcgagaagatttttcgtcgtttttttaacgattcgtaggcgtttaacgaagtttttgttcgtgtttggtttaaattgacgtatagggatatggggtcgaaatttcgttatatcgggtcggaagtgtcgaaagaagatttgatttggtaagattcgttgtcgtagtcgatttataattcgatcgagtaggatattatcgatttgaaattcgcgattgcggattttggtttgtttgttagtgagttggtatcggtggtttgggtatttgtttttatttttcgtggtggcgataaacgcggtggtgttaacggtgcgcgtttggtattaatgtcgtagcgcgattgggatgtgaacgtcgtagtcgttcgtgttttgtttgttttggagaaaatttagaaagagtttggtaaagtttcgttggcggatattatagtgttggttggtgtggttggtgttga

SEQ ID NO: 10122 - DNA, 585 bp, Artificial Sequence
  chemically treated genomic DNA (Homo sapiens) CpG-island No: 10122
tcaacaccaaccacaccaaccaacactataatatccgccaacgaaactttaccaaactctttctaaattttctccaaaacaaacaaaacacgaacgactacgacgttcacatcccaatcgcgctacgacattaataccaaacgcgcaccgttaacaccaccgcgtttatcgccaccacgaaaaataaaaacaaatacccaaaccaccgataccaactcactaacaaacaaaccaaaatccgcaatcgcgaatttcaaatcgataatatcctactcgatcgaattataaatcgactacgacaacgaatcttaccaaatcaaatcttctttcgacacttccgacccgatataacgaaatttcgaccccatatccctatacgtcaatttaaaccaaacacgaacaaaaacttcgttaaacgcctacgaatcgttaaaaaaacgacgaaaaatcttctcgaactcaaaatcaaaacgcaacgtcaaatcgatcaccaacattatcgatttacgtttcttcgacgaatcaaacgaatccgaaataatttccgatacgtctaccgcttcgaactaaattacgccaaccgaa

SEQ ID NO: 10123 - DNA, 585 bp, Artificial Sequence
  chemically treated genomic DNA (Homo sapiens) CpG-island No: 10123
ttaatattaattatattagttagtattatgatattcgttagcgaggttttattagattttttttggattttttttagaataggtagagtacgaacggttgcggcgtttatattttagtcgcgttgcggtattaatgttagacgcgtatcgttggtattatcgcgtttgtcgttattacggaaggtagaagtagatgtttaggttatcgatattagtttattaatagatagattagaattcgtaatcgcgaattttagatcgataatgttttgttcggtcgggttgtagatcggttgcggtagcggattttgttagattagattttttttcggtattttcggttcgatgtagcgagatttcggttttatatttttgtgcgttagtttgaattaggtacgggtaaaggtttcgttgaacgtttgcggatcgttgaggaaacgacgagagattttttcgaatttaggattaaaacgtagcgttaggtcggttattagtattgtcggtttacgttttttcgacggattaaacggattcgggataattttcggtgcgtttatcgtttcgaattggattgcgttagtcggg

SEQ ID NO: 10124 - DNA, 585 bp, Artificial Sequence
  chemically treated genomic DNA (Homo sapiens) CpG-island No: 10124
cccgactaacgcaatccaattcgaaacgataaacgcaccgaaaattatcccgaatccgtttaatccgtcgaaaaaacgtaaaccgacaatactaataaccgacctaacgctacgttttaatcctaaattcgaaaaaatctctcgtcgtttcctcaacgatccgcaaacgttcaacgaaacctttacccgtacctaattcaaactaacgcacaaaaatataaaaccgaaatctcgctacatcgaaccgaaaataccgaaaaaaaatctaatctaacaaaatccgctaccgcaaccgatctacaacccgaccgaacaaaacattatcgatctaaaattcgcgattacgaattctaatctatctattaataaactaatatcgataacctaaacatctacttctaccttccgtaataacgacaaacgcgataataccaacgatacgcgtctaacattaataccgcaacgcgactaaaatataaacgccgcaaccgttcgtactctacctattctaaaaaaaatccaaaaaaaatctaataaaacctcgctaacgaatatcataatactaactaatataattaatattaa

SEQ ID NO: 10125 - DNA, 534 bp, Artificial Sequence
  chemically treated genomic DNA (Homo sapiens) CpG-island No: 10125
ttgttattcgttgaagaagtcgatagttttattagcgtttttgttagcgattttgagcgtttggcggcgttgttcgatagcggtattaacgacgtagtgtatgcggaagtggtgggttacggggaagtatggtcggtacgtttgatgtttgcggtatttaattaataagggttgttagcggtttggtttgatgttcgcgagtttttacgcgttgaacgcgtcgtataatcgtaggttgatgaagggtttttttattcgttgttgtaatagttgttggtgtaatattcgggtaaacgtttggtggtgatcggatttattagtcgtaataacgtcggtgaaacggtgttgttggggcgtaacggtttcgattatttcgcgatataaatcggtgcgttggcgggtgtttttcgcgtaattatttggagcgacgtcgtcggggtatatagtgttcgatcgcgtaaagtgttgaatcgcgaaaaagtagatttagttattagcgatttgcggatggatgaaatggacggtatgtagttg

SEQ ID NO: 10126 - DNA, 534 bp, Artificial Sequence
  chemically treated genomic DNA (Homo sapiens) CpG-island No: 10126
caactacataccgtccatttcatccatccgcaaatcgctaataactaaatctactttttcgcgattcaacactttacgcgatcgaacactatataccccgacgacgtcgctccaaataattacgcgaaaaacacccgccaacgcaccgatttatatcgcgaaataatcgaaaccgttacgccccaacaacaccgtttcaccgacgttattacgactaataaatccgatcaccaccaaacgtttacccgaatattacaccaacaactattacaacaacgaataaaaaaacccttcatcaacctacgattatacgacgcgttcaacgcgtaaaaactcgcgaacatcaaaccaaaccgctaacaacccttattaattaaataccgcaaacatcaaacgtaccgaccatacttccccgtaacccaccacttccgcatacactacgtcgttaataccgctatcgaacaacgccgccaaacgctcaaaatcgctaacaaaaacgctaataaaactatcgacttcttcaacgaataacaa

SEQ ID NO: 10127 - DNA, 534 bp, Artificial Sequence
  chemically treated genomic DNA (Homo sapiens) CpG-island No: 10127
tagttgtatatcgtttattttatttattcgtaggtcgttgatgattaaatttattttttcgcgatttagtattttacgcggtcgggtattgtatatttcggcgacgtcgttttagatggttacgcgagaaatattcgttagcgtatcgatttgtgtcgcggaatagtcggaatcgttacgttttagtagtatcgttttatcggcgttgttgcggttgataaattcggttattattagacgtttgttcggatgttgtattagtagttgttgtagtaacgggtaagaaagttttttattaatttgcggttgtgcggcgcgtttagcgcgtaaaaattcgcgggtattaagttaggtcgttggtagtttttgttgattaagtatcgtagatattagacgtgtcgattatattttttcgtggtttattattttcgtatatattgcgtcgttaatatcgttgtcgagtagcgtcgttaggcgtttaaggtcgttgataaaagcgttaatgaggttatcggtttttttagcgggtagtag

SEQ ID NO: 10128 - DNA, 534 bp, Artificial Sequence
  chemically treated genomic DNA (Homo sapiens) CpG-island No: 10128
ctactacccgctaaaaaaaccgataacctcattaacgcttttatcaacgaccttaaacgcctaacgacgctactcgacaacgatattaacgacgcaatatatacgaaaataataaaccacgaaaaaatataatcgacacgtctaatatctacgatacttaatcaacaaaaactaccaacgacctaacttaatacccgcgaatttttacgcgctaaacgcgccgcacaaccgcaaattaataaaaaactttcttacccgttactacaacaactactaatacaacatccgaacaaacgtctaataataaccgaatttatcaaccgcaacaacgccgataaaacgatactactaaaacgtaacgattccgactattccgcgacacaaatcgatacgctaacgaatatttctcgcgtaaccatctaaaacgacgtcgccgaaatatacaatacccgaccgcgtaaaatactaaatcgcgaaaaaataaatttaatcatcaacgacctacgaataaataaaataaacgatatacaacta

SEQ ID NO: 10129 - DNA, 543 bp, Artificial Sequence
  chemically treated genomic DNA (Homo sapiens) CpG-island No: 10129
cgcgatttcgattttgtgttgacggatttgttgatgtcgggtatggatggcgtgtagtttatttagagtttggcgagtttacggtgtaagttcgttttggcgattatgagtgtcgcgtttcggcgtatgttgatggcggttagtttggtggcgaaaaatttcgacgtggaagtgatagggttgattttaaaatcggtggcggtcgaagttttgcgtaatttggtgaattaatttaacgataaggatcgtagtttttcgtcgtcgatgtttttcgtttatttggaaatagatcggtagacgattatttaggcgatgggcgacggttaattttaggtttggttttaatcgaaaaaatttttggttaacggtcgtatcgtcgtcgtcgaagcgttggtgcgttggatgtatttcgagtaaggcgtgatgttgtcggtttcgtttttatcggttattaaagttttcgagttggaagagcgtttgttgtggatcgtgttgaaataggttatttatgtttaggaacgttggcgttagcgcggttacgag

SEQ ID NO: 10130 - DNA, 543 bp, Artificial Sequence
  chemically treated genomic DNA (Homo sapiens) CpG-island No: 10130
ctcgtaaccgcgctaacgccaacgttcctaaacataaataacctatttcaacacgatccacaacaaacgctcttccaactcgaaaactttaataaccgataaaaacgaaaccgacaacatcacgccttactcgaaatacatccaacgcaccaacgcttcgacgacgacgatacgaccgttaaccaaaaattttttcgattaaaaccaaacctaaaattaaccgtcgcccatcgcctaaataatcgtctaccgatctatttccaaataaacgaaaaacatcgacgacgaaaaactacgatccttatcgttaaattaattcaccaaattacgcaaaacttcgaccgccaccgattttaaaatcaaccctatcacttccacgtcgaaatttttcgccaccaaactaaccgccatcaacatacgccgaaacgcgacactcataatcgccaaaacgaacttacaccgtaaactcgccaaactctaaataaactacacgccatccatacccgacatcaacaaatccgtcaacacaaaatcgaaatcgcg

SEQ ID NO: 10131 - DNA, 543 bp, Artificial Sequence
  chemically treated genomic DNA (Homo sapiens) CpG-island No: 10131
ttcgtaatcgcgttggcgttagcgtttttgggtatggatggtttgttttagtacgatttatagtaggcgtttttttagttcgaaagttttgatggtcggtaaaaacgaggtcggtagtattacgttttgttcgggatgtatttagcgtattagcgtttcggcggcgacgatgcggtcgttggttaaggattttttcggttggaattaggtttggaattggtcgtcgtttatcgtttggatgatcgtttgtcggtttatttttaggtgggcggggagtatcggcggcgaagggttgcggtttttgtcgttgagttgatttattaagttgcgtagggtttcggtcgttatcggttttgaaattagttttattatttttacgtcgaggtttttcgttattaggttggtcgttattaatatgcgtcgggacgcggtatttatgatcgttagggcgggtttgtatcgtaggttcgttaggttttggataaattgtacgttatttatgttcggtattagtagattcgttagtataaggtcgaaatcgcg

SEQ ID NO: 10132 - DNA, 543 bp, Artificial Sequence
  chemically treated genomic DNA (Homo sapiens) CpG-island No: 10132
cgcgatttcgaccttatactaacgaatctactaataccgaacataaataacgtacaatttatccaaaacctaacgaacctacgatacaaacccgccctaacgatcataaataccgcgtcccgacgcatattaataacgaccaacctaataacgaaaaacctcgacgtaaaaataataaaactaatttcaaaaccgataacgaccgaaaccctacgcaacttaataaatcaactcaacgacaaaaaccgcaacccttcgccgccgatactccccgcccacctaaaaataaaccgacaaacgatcatccaaacgataaacgacgaccaattccaaacctaattccaaccgaaaaaatccttaaccaacgaccgcatcgtcgccgccgaaacgctaatacgctaaatacatcccgaacaaaacgtaatactaccgacctcgtttttaccgaccatcaaaactttcgaactaaaaaaacgcctactataaatcgtactaaaacaaaccatccatacccaaaaacgctaacgccaacgcgattacgaa

SEQ ID NO: 10133 - DNA, 1080 bp, Artificial Sequence
  chemically treated genomic DNA (Homo sapiens) CpG-island No: 10133
ataggggacgttttttatatagcggatgttttttatgttacggaggttttcgtatatagggacgttttttatttcgcggacgttttttatatagggacgttttttacgtcgcggatatttttttatatagcggatatgtttcgacgtttttttatatggcggacgtttttttatacggcggatttcgatttcgtcgttttttaaacgggaggggaggagtcgtggttatcgtgataattataaaataggatgagtttcgttttttagaacgcggagtcgcggtggaagagggtgacgtcgtcgagagtttacgagcgtgttttaagtcgagtgaggagcgcgcgggggcgtttttgtttttaaggtcgtacgagcgttaaggtttcgcggggagaatagttacggggggagacggggttcgcgttgtttttacgaacgttgttggtggggattttacggttgcgttcgttgaggtggaggggtcgggaggatagagtttcgcgttcgtcgtcgttcgtttttgattttgtcggtttcgggttggggtagagaagggcgggcgcgggcggtcgtgtcgggagcggaggcggacgtcggtcgggttttttcgggttttttcgttgggcgttttgcggtcgtatttttttttttattcggagattaggtttttgtttcgttcgcggttgaggagataaggagaggttgatttgaaaagttgcgaggacgcgtattttaatttttagggacggtttgagtttcgttttgtttttcgaaagtgttgggaacggattttattagtaggcgaaattgtttttaaagtttcgtggtttagtaaaaggtagggcggggacgtttatggttttcgggtcggttttttacgggtttagttttcgagttttcggattggacggcgcgggcgtcgggggtttaggttgtttcggtcgtttcgttgtgagttcgagttgcgttgtagtcgttggttacgtatgggggtttttcgcgtttttttttttaggtcggtagtgggttggggtcgtaagtgttttcgcgtatattggtcgttttttagggataaggata

SEQ ID NO: 10134 - DNA, 1080 bp, Artificial Sequence
  chemically treated genomic DNA (Homo sapiens) CpG-island No: 10134
tatccttatccctaaaaaacgaccaatatacgcgaaaacacttacgaccccaacccactaccgacctaaaaaaaaaaacgcgaaaaacccccatacgtaaccaacgactacaacgcaactcgaactcacaacgaaacgaccgaaacaacctaaacccccgacgcccgcgccgtccaatccgaaaactcgaaaactaaacccgtaaaaaaccgacccgaaaaccataaacgtccccgccctaccttttactaaaccacgaaactttaaaaacaatttcgcctactaataaaatccgttcccaacactttcgaaaaacaaaacgaaactcaaaccgtccctaaaaattaaaatacgcgtcctcgcaacttttcaaatcaacctctccttatctcctcaaccgcgaacgaaacaaaaacctaatctccgaataaaaaaaaaaatacgaccgcaaaacgcccaacgaaaaaacccgaaaaaacccgaccgacgtccgcctccgctcccgacacgaccgcccgcgcccgcccttctctaccccaacccgaaaccgacaaaatcaaaaacgaacgacgacgaacgcgaaactctatcctcccgacccctccacctcaacgaacgcaaccgtaaaatccccaccaacaacgttcgtaaaaacaacgcgaaccccgtctccccccgtaactattctccccgcgaaaccttaacgctcgtacgaccttaaaaacaaaaacgcccccgcgcgctcctcactcgacttaaaacacgctcgtaaactctcgacgacgtcaccctcttccaccgcgactccgcgttctaaaaaacgaaactcatcctattttataattatcacgataaccacgactcctcccctcccgtttaaaaaacgacgaaatcgaaatccgccgtataaaaaaacgtccgccatataaaaaaacgtcgaaacatatccgctatataaaaaaatatccgcgacgtaaaaaacgtccctatataaaaaacgtccgcgaaataaaaaacgtccctatatacgaaaacctccgtaacataaaaaacatccgctatataaaaaacgtcccctat

SEQ ID NO: 10135 - DNA, 1080 bp, Artificial Sequence
  chemically treated genomic DNA (Homo sapiens) CpG-island No: 10135
tgtttttgtttttgggggacggttagtgtacgcggggatatttgcggttttagtttattgtcggtttggaggaaaggacgcgggggatttttatacgtgattagcggttgtagcgtagttcgggtttatagcggggcggtcggagtagtttggattttcgacgttcgcgtcgtttagttcggggattcggaggttgagttcgtagggggtcggttcgggggttatgggcgttttcgttttgttttttgttgggttacggagttttgaggatagtttcgtttgttgataaaattcgtttttagtattttcgaaaggtagggcggggtttaagtcgtttttggaggttaaaatgcgcgttttcgtagttttttaaattagtttttttttatttttttagtcgcgggcggggtaggggtttggttttcggatggaggaggaggtgcggtcgtaggacgtttagcggggagattcggggagattcggtcggcgttcgttttcgttttcggtacggtcgttcgcgttcgtttttttttgttttagttcgggatcggtagggttagaagcgggcggcggcgggcgcggggttttgttttttcggtttttttattttagcgggcgtagtcgtggggtttttattaatagcgttcgtgggggtagcgcgggtttcgttttttttcgtggttatttttttcgcgaggttttggcgttcgtgcggttttgggagtaagagcgttttcgcgcgttttttattcggtttgggatacgttcgtgaattttcggcggcgttatttttttttatcgcgatttcgcgttttgggaggcggggtttattttgttttgtggttgttacggtggttacggttttttttttttcgtttagaaagcggcgaggtcggggttcgtcgtgtgagggggcgttcgttatgtgaaggggcgtcgaggtatgttcgttgtgtgagggggtgttcgcggcgtgaggggcgtttttgtgtgagaggcgttcgcggagtgaggggcgtttttgtgtgcggaggttttcgtggtatgaggggtattcgttgtgtgaggggcgttttttgt

SEQ ID NO: 10136 - DNA, 1080 bp, Artificial Sequence
  chemically treated genomic DNA (Homo sapiens) CpG-island No: 10136
acaaaaaacgcccctcacacaacgaatacccctcataccacgaaaacctccgcacacaaaaacgcccctcactccgcgaacgcctctcacacaaaaacgcccctcacgccgcgaacaccccctcacacaacgaacatacctcgacgccccttcacataacgaacgccccctcacacgacgaaccccgacctcgccgctttctaaacgaaaaaaaaaaaaccgtaaccaccgtaacaaccacaaaacaaaataaaccccgcctcccaaaacgcgaaatcgcgataaaaaaaaataacgccgccgaaaattcacgaacgtatcccaaaccgaataaaaaacgcgcgaaaacgctcttactcccaaaaccgcacgaacgccaaaacctcgcgaaaaaaataaccacgaaaaaaaacgaaacccgcgctacccccacgaacgctattaataaaaaccccacgactacgcccgctaaaataaaaaaaccgaaaaaacaaaaccccgcgcccgccgccgcccgcttctaaccctaccgatcccgaactaaaacaaaaaaaaacgaacgcgaacgaccgtaccgaaaacgaaaacgaacgccgaccgaatctccccgaatctccccgctaaacgtcctacgaccgcacctcctcctccatccgaaaaccaaacccctaccccgcccgcgactaaaaaaataaaaaaaaactaatttaaaaaactacgaaaacgcgcattttaacctccaaaaacgacttaaaccccgccctacctttcgaaaatactaaaaacgaattttatcaacaaacgaaactatcctcaaaactccgtaacccaacaaaaaacaaaacgaaaacgcccataacccccgaaccgaccccctacgaactcaacctccgaatccccgaactaaacgacgcgaacgtcgaaaatccaaactactccgaccgccccgctataaacccgaactacgctacaaccgctaatcacgtataaaaatcccccgcgtcctttcctccaaaccgacaataaactaaaaccgcaaatatccccgcgtacactaaccgtcccccaaaaacaaaaaca

SEQ ID NO: 10137 - DNA, 792 bp, Artificial Sequence
  chemically treated genomic DNA (Homo sapiens) CpG-island No: 10137
ggcggtttacgtttcgtttgttcgcgggcgggtattaggaatagttttgatatcgtttttcgttttcgggcgggtgcgtagcgcgattttagttttcgtttcgtcgtttatttgtttgtttcgcgcgcgtcgtttcgtttttttcgcgtttttgcggtcgttcgcgtacgcggacgttacgaagttgttttttgcggttcgggggcggacgcgcgggaaattcgtatcgaggagggaaagagacgcgtcgtgagtttcgcgggcgttgcgttttcgttgtgtttttatcgtttggagatcgcgtaggggtaggcgtgggggtttcgcgcgtttttggagattcgcggtttcgtttttttatcgttggttttagggtaggacgcgcgcgggtttttagttttgagggtttcgggtcgggtcgtcgtttttcgtttcgtttcgtcggttcgttcgtttattttttcgggtttttttttcgtttgcgggcggcggcggttgcgggtacggcgggacgcggggagaggaaaacgatagtgagaggcggttttacgttcgttcgttcgttttttcgttttatcggttcgcggtttatcgtgtttcgattgtagtttttttatcgtcgtcgttacgtttcgtcgggtttcgcgtttaggtgtagggttgagttttgaagtcggggtcgggagttcgcgggggtcgtatgggtcgggagtaagttagggtgtcggtaggaggtgagggaagatggttttacgtcgcgcgggggtcgggggagttagggggcgttaggta

SEQ ID NO: 10138 - DNA, 792 bp, Artificial Sequence
  chemically treated genomic DNA (Homo sapiens) CpG-island No: 10138
tacctaacgccccctaactcccccgacccccgcgcgacgtaaaaccatcttccctcacctcctaccgacaccctaacttactcccgacccatacgacccccgcgaactcccgaccccgacttcaaaactcaaccctacacctaaacgcgaaacccgacgaaacgtaacgacgacgataaaaaaactacaatcgaaacacgataaaccgcgaaccgataaaacgaaaaaacgaacgaacgaacgtaaaaccgcctctcactatcgttttcctctccccgcgtcccgccgtacccgcaaccgccgccgcccgcaaacgaaaaaaaaacccgaaaaaataaacgaacgaaccgacgaaacgaaacgaaaaacgacgacccgacccgaaaccctcaaaactaaaaacccgcgcgcgtcctaccctaaaaccaacgataaaaaaacgaaaccgcgaatctccaaaaacgcgcgaaacccccacgcctacccctacgcgatctccaaacgataaaaacacaacgaaaacgcaacgcccgcgaaactcacgacgcgtctctttccctcctcgatacgaatttcccgcgcgtccgcccccgaaccgcaaaaaacaacttcgtaacgtccgcgtacgcgaacgaccgcaaaaacgcgaaaaaaacgaaacgacgcgcgcgaaacaaacaaataaacgacgaaacgaaaactaaaatcgcgctacgcacccgcccgaaaacgaaaaacgatatcaaaactattcctaatacccgcccgcgaacaaacgaaacgtaaaccgcc

SEQ ID NO: 10139 - DNA, 792 bp, Artificial Sequence
  chemically treated genomic DNA (Homo sapiens) CpG-island No: 10139
tatttggcgttttttggttttttcggttttcgcgcggcgtggagttatttttttttattttttatcggtattttagtttgttttcggtttatgcggttttcgcgggttttcggtttcggttttagaatttagttttgtatttgagcgcggggttcggcggggcgtggcggcggcgatggggaaattgtagtcgaagtacggtgagtcgcgggtcggtagggcgggagggcgggcgggcgggcgtggggtcgttttttattgtcgttttttttttttcgcgtttcgtcgtgttcgtagtcgtcgtcgttcgtaagcggagagagagttcggaagggtgagcgggcgagtcgacggggcggggcggggggcggcgattcggttcgggatttttagagttaggagttcgcgcgcgttttgttttggagttagcggtggggggacggggtcgcgggtttttaggagcgcgcgggatttttacgtttgtttttgcgcggtttttaggcgatggggatatagcgaaggcgtagcgttcgcggggtttacggcgcgttttttttttttttcggtgcgggtttttcgcgcgttcgttttcggatcgtaggggatagtttcgtggcgttcgcgtacgcgagcggtcgtaaaggcgcggaggaagcggagcggcgcgcgcgggataagtaggtaggcggcggggcggaggttggggtcgcgttgcgtattcgttcgggggcggggagcggtgttagagttgtttttggtgttcgttcgcggataggcgagacgtgggtcgtt

SEQ ID NO: 10140 - DNA, 792 bp, Artificial Sequence
  chemically treated genomic DNA (Homo sapiens) CpG-island No: 10140
aacgacccacgtctcgcctatccgcgaacgaacaccaaaaacaactctaacaccgctccccgcccccgaacgaatacgcaacgcgaccccaacctccgccccgccgcctacctacttatcccgcgcgcgccgctccgcttcctccgcgcctttacgaccgctcgcgtacgcgaacgccacgaaactatcccctacgatccgaaaacgaacgcgcgaaaaacccgcaccgaaaaaaaaaaaaaacgcgccgtaaaccccgcgaacgctacgccttcgctatatccccatcgcctaaaaaccgcgcaaaaacaaacgtaaaaatcccgcgcgctcctaaaaacccgcgaccccgtccccccaccgctaactccaaaacaaaacgcgcgcgaactcctaactctaaaaatcccgaaccgaatcgccgccccccgccccgccccgtcgactcgcccgctcacccttccgaactctctctccgcttacgaacgacgacgactacgaacacgacgaaacgcgaaaaaaaaaaaacgacaataaaaaacgaccccacgcccgcccgcccgccctcccgccctaccgacccgcgactcaccgtacttcgactacaatttccccatcgccgccgccacgccccgccgaaccccgcgctcaaatacaaaactaaattctaaaaccgaaaccgaaaacccgcgaaaaccgcataaaccgaaaacaaactaaaataccgataaaaaataaaaaaaaataactccacgccgcgcgaaaaccgaaaaaaccaaaaaacgccaaata

SEQ ID NO: 10141 - DNA, 551 bp, Artificial Sequence
  chemically treated genomic DNA (Homo sapiens) CpG-island No: 10141
gagagcgttatcgcgagtgttatttagcgaatagtttagatcggggtataaagttacgttagtttagatacgttaacgttagttaggtgggtttacgatagtttagcgtttttgaatatacgtagatttaggttagttttatatagttaattcggttatatcgttttagatagcgtaagtttagattagtttagtgttacgttacgttatacgattaacgcgtagcgttagttgtattaagtttagtttagtttatacgagttaagtcgagttacgtcgagtttagtatggaacgtagaggcgtaacgtcgagtttagtagcgattaaagtcgtacgttagttttagtcggcgggacgagttgaagttcgacggcggattgtatttcgagtagagttgaaaatcgagtggtaagcgtatagcgggaggtcgtcgagacgtcggtggtagttgtcggggaggggtgcgcgtttacggattggtagatagaagggataagatgtttattggtatgtaatacgattgaggatattacgttcgatagttttagtt

SEQ ID NO: 10142 - DNA, 551 bp, Artificial Sequence
  chemically treated genomic DNA (Homo sapiens) CpG-island No: 10142
aactaaaactatcgaacgtaatatcctcaatcgtattacataccaataaacatcttatcccttctatctaccaatccgtaaacgcgcacccctccccgacaactaccaccgacgtctcgacgacctcccgctatacgcttaccactcgattttcaactctactcgaaatacaatccgccgtcgaacttcaactcgtcccgccgactaaaactaacgtacgactttaatcgctactaaactcgacgttacgcctctacgttccatactaaactcgacgtaactcgacttaactcgtataaactaaactaaacttaatacaactaacgctacgcgttaatcgtataacgtaacgtaacactaaactaatctaaacttacgctatctaaaacgatataaccgaattaactatataaaactaacctaaatctacgtatattcaaaaacgctaaactatcgtaaacccacctaactaacgttaacgtatctaaactaacgtaactttataccccgatctaaactattcgctaaataacactcgcgataacgctctc

SEQ ID NO: 10143 - DNA, 551 bp, Artificial Sequence
  chemically treated genomic DNA (Homo sapiens) CpG-island No: 10143
aattgaggttgtcgggcgtgatatttttaatcgtgttgtatgttaatggatattttgttttttttgtttattagttcgtgggcgcgtattttttttcggtaattgttatcggcgtttcgacgatttttcgttgtgcgtttgttattcggtttttaattttgttcgaaatgtagttcgtcgtcgggttttagttcgtttcgtcgattgaaattggcgtacgattttagtcgttgttgaattcgacgttgcgtttttacgttttatgttgaattcgacgtggttcggtttagttcgtgtgaattgagttgagtttagtgtaattggcgttgcgcgttagtcgtgtgacgtgacgtgatattgaattggtttgagtttacgttgtttgaagcgatgtggtcgagttagttatgtggaattgatttgggtttacgtgtgtttaaggacgttggattgtcgtgaatttatttggttgacgttaacgtgtttgaattgacgtggttttgtgtttcgatttgggttgttcgttgaatgatattcgcggtgacgttttt

SEQ ID NO: 10144 - DNA, 551 bp, Artificial Sequence
  chemically treated genomic DNA (Homo sapiens) CpG-island No: 10144
aaaaacgtcaccgcgaatatcattcaacgaacaacccaaatcgaaacacaaaaccacgtcaattcaaacacgttaacgtcaaccaaataaattcacgacaatccaacgtccttaaacacacgtaaacccaaatcaattccacataactaactcgaccacatcgcttcaaacaacgtaaactcaaaccaattcaatatcacgtcacgtcacacgactaacgcgcaacgccaattacactaaactcaactcaattcacacgaactaaaccgaaccacgtcgaattcaacataaaacgtaaaaacgcaacgtcgaattcaacaacgactaaaatcgtacgccaatttcaatcgacgaaacgaactaaaacccgacgacgaactacatttcgaacaaaattaaaaaccgaataacaaacgcacaacgaaaaatcgtcgaaacgccgataacaattaccgaaaaaaaatacgcgcccacgaactaataaacaaaaaaaacaaaatatccattaacatacaacacgattaaaaatatcacgcccgacaacctcaatt

SEQ ID NO: 10145 - DNA, 647 bp, Artificial Sequence
  chemically treated genomic DNA (Homo sapiens) CpG-island No: 10145
  unsure (21, 265)
tgcgacgttggcgcgttttantttaggttttattaaattttgagtcgtaggtcggattaggcgtttacgttgtattcggtatttcgggagttttttgaattgtcgaatcgatttgcggcggtcgtgttttatttaggttttataaatcgagtcgtaggtcggataaggcgtttacgtcgtattcggtatttcgatattagattttatatgcgtcgttttcgtagttatcgttttggattgacggtattaagatcgttttggtgtnttcgattttgcgatattggcgtcgtaatttgatagtaggcgtacgaagtcggtgaatttttgggcgatggcgatattgcgtagtttgttagtgtcggtgacgcgtgagagtaatatttgatgttggtagcggcgacggaggatttttttaacgcgttcgataacgttcgtcgcgttgttgtgtagttttaatttttgggtaggaaatagggggatcgtttattatcgggcggttgagtagttaggaagaattgatcggatagcggtttattatatttatttcggcgtgtggattgagaatgttgatggtattaagtaagtcgcgtaggatggcgttgtcgttacgattgtcgtaagtgtggttgtttagaataagtaatttt

SEQ ID NO: 10146 - DNA, 647 bp, Artificial Sequence
  chemically treated genomic DNA (Homo sapiens) CpG-island No: 10146
  unsure (383, 627)
aaaattacttattctaaacaaccacacttacgacaatcgtaacgacaacgccatcctacgcgacttacttaataccatcaacattctcaatccacacgccgaaataaatataataaaccgctatccgatcaattcttcctaactactcaaccgcccgataataaacgatccccctatttcctacccaaaaattaaaactacacaacaacgcgacgaacgttatcgaacgcgttaaaaaaatcctccgtcgccgctaccaacatcaaatattactctcacgcgtcaccgacactaacaaactacgcaatatcgccatcgcccaaaaattcaccgacttcgtacgcctactatcaaattacgacgccaatatcgcaaaatcgaanacaccaaaacgatcttaataccgtcaatccaaaacgataactacgaaaacgacgcatataaaatctaatatcgaaataccgaatacgacgtaaacgccttatccgacctacgactcgatttataaaacctaaataaaacacgaccgccgcaaatcgattcgacaattcaaaaaactcccgaaataccgaatacaacgtaaacgcctaatccgacctacgactcaaaatttaataaaacctaaantaaaacgcgccaacgtcgca

SEQ ID NO: 10147 - DNA, 647 bp, Artificial Sequence
  chemically treated genomic DNA (Homo sapiens) CpG-island No: 10147
  unsure (383, 627)
gaaattatttattttgggtaattatatttgcggtaatcgtggcgatagcgttattttgcgcggtttatttgatgttattaatatttttaatttatacgtcgaagtggatgtgatgagtcgttattcggttagttttttttggttgtttaatcgttcggtaatgggcgatttttttgttttttgtttaaaaattgaaattatataatagcgcggcgggcgttgtcgggcgcgttaaaaaagtttttcgtcgtcgttattagtattaggtattgtttttacgcgttatcgatattggtaagttgcgtaatatcgttatcgtttagggatttatcgatttcgtgcgtttgttgttaggttacgacgttaatatcgtagggtcgggngtattaagacgattttggtgtcgttaatttaggacgatggttgcgaaagcggcgtatgtaagatttgatatcgagatgtcggatgcggcgtaaacgttttattcggtttacggttcggtttgtaaggtttagataagatacggtcgtcgtaggtcgattcgataatttaaaggattttcggggtgtcggatgtagcgtgaacgtttaattcggtttacggtttaggatttagtaaggtttggantaagacgcgttagcgtcgta

SEQ ID NO: 10148 - DNA, 647 bp, Artificial Sequence
  chemically treated genomic DNA (Homo sapiens) CpG-island No: 10148
  unsure (21, 265)
tacgacgctaacgcgtcttantccaaaccttactaaatcctaaaccgtaaaccgaattaaacgttcacgctacatccgacaccccgaaaatcctttaaattatcgaatcgacctacgacgaccgtatcttatctaaaccttacaaaccgaaccgtaaaccgaataaaacgtttacgccgcatccgacatctcgatatcaaatcttacatacgccgctttcgcaaccatcgtcctaaattaacgacaccaaaatcgtcttaatacncccgaccctacgatattaacgtcgtaacctaacaacaaacgcacgaaatcgataaatccctaaacgataacgatattacgcaacttaccaatatcgataacgcgtaaaaacaatacctaatactaataacgacgacgaaaaacttttttaacgcgcccgacaacgcccgccgcgctattatataatttcaatttttaaacaaaaaacaaaaaaatcgcccattaccgaacgattaaacaaccaaaaaaaactaaccgaataacgactcatcacatccacttcgacgtataaattaaaaatattaataacatcaaataaaccgcgcaaaataacgctatcgccacgattaccgcaaatataattacccaaaataaataatttc

SEQ ID NO: 10149 - DNA, 815 bp, Artificial Sequence
  chemically treated genomic DNA (Homo sapiens) CpG-island No: 10149
cgcggcgggcgtgatttatttttttttgggtcggtgcgtagaggttgtgtagtagattaatttgacgcgggttgattagcgatttgtcgttaaagtttagttgtttgatgtgggcggttttttgtagaaattcggtttcgttgttagcgtcggaatagacggtatcgaacgtttgaatattcgtagagcgcgcggtttgtaaaatggaatagcgtgcgaatagtagtttagtttttttcggggagcgttttgtacgtaggttgcgtatatagttttttgtatcgagggcgatatcgattaaacgttcggaagcgtgagcgatttttattgcgcgggtaatttttagcggagatttaatcgtcgttagtaggtcggtgttgtcgggtttacgattataggttttttcgatacgtaggattttttttttaatatttagaatattttgagcggtatcggttttcggtagacgtataacgttcgtattatcgcgaacgacggtttttaggtcgttaatattttattcggaatttagcgcgttgatacgtataatggttttaatatcgcgatatagcggatgttgtagcgcgtggtaaattatgcggcgggcggtgttttttttacgtaatgttacggagttttcgaagttaaatattacggtattagtcgggtagatgaacgagttgttgattatcgcgggattggatttagtataaaaatatgttgcgggggtgttattatacgttgtgtattaaacggcggggattgataattgagttattatttttttatacgggatggggtatgagtagggttaa

SEQ ID NO: 10150 - DNA, 815 bp, Artificial Sequence
  chemically treated genomic DNA (Homo sapiens) CpG-island No: 10150
ttaaccctactcataccccatcccgtataaaaaaataataactcaattatcaatccccgccgtttaatacacaacgtataataacacccccgcaacatatttttatactaaatccaatcccgcgataatcaacaactcgttcatctacccgactaataccgtaatatttaacttcgaaaactccgtaacattacgtaaaaaaaacaccgcccgccgcataatttaccacgcgctacaacatccgctatatcgcgatattaaaaccattatacgtatcaacgcgctaaattccgaataaaatattaacgacctaaaaaccgtcgttcgcgataatacgaacgttatacgtctaccgaaaaccgataccgctcaaaatattctaaatattaaaaaaaaaatcctacgtatcgaaaaaacctataatcgtaaacccgacaacaccgacctactaacgacgattaaatctccgctaaaaattacccgcgcaataaaaatcgctcacgcttccgaacgtttaatcgatatcgccctcgatacaaaaaactatatacgcaacctacgtacaaaacgctccccgaaaaaaactaaactactattcgcacgctattccattttacaaaccgcgcgctctacgaatattcaaacgttcgataccgtctattccgacgctaacaacgaaaccgaatttctacaaaaaaccgcccacatcaaacaactaaactttaacgacaaatcgctaatcaacccgcgtcaaattaatctactacacaacctctacgcaccgacccaaaaaaaaataaatcacgcccgccgcg

SEQ ID NO: 10151 - DNA, 815 bp, Artificial Sequence
  chemically treated genomic DNA (Homo sapiens) CpG-island No: 10151
ttaattttgtttatgttttatttcgtgtggagggatggtagtttagttgttaattttcgtcgtttggtgtataacgtataatggtattttcgtagtatgtttttgtgttgggtttaatttcgcgatggttagtaattcgtttatttattcggttgatgtcgtgatgtttgatttcggagatttcgtagtattgcgtgaaaaagatatcgttcgtcgtatggtttattacgcgttgtaatattcgttgtatcgcgatattgaaattattgtgcgtgttaacgcgttggatttcgaatggggtgttaacgatttggaagtcgtcgttcgcggtggtgcggacgttgtgcgtttgtcgaaaatcgatatcgtttaggatgttttggatattgaaaaagagattttgcgtatcgaaaaagtttgtggtcgtgaattcggtagtatcggtttgttggcggcgattgaattttcgttggggattattcgcgtagtggaaatcgtttacgttttcgagcgtttgatcggtatcgttttcggtgtagaagattatgtgcgtaatttgcgtatagaacgtttttcggaaggaattgaattgttgttcgtacgttgttttattttgtaggtcgcgcgttttgcgggtatttaggcgttcgatatcgtttatttcgacgttaataacgaagtcggatttttgtaagaagtcgtttatattaaatagttgggttttgacggtaaatcgttgattaattcgcgttagattgatttgttgtataatttttacgtatcgatttagaaagaagtggattacgttcgtcgcg

SEQ ID NO: 10152 - DNA, 815 bp, Artificial Sequence
  chemically treated genomic DNA (Homo sapiens) CpG-island No: 10152
cgcgacgaacgtaatccacttctttctaaatcgatacgtaaaaattatacaacaaatcaatctaacgcgaattaatcaacgatttaccgtcaaaacccaactatttaatataaacgacttcttacaaaaatccgacttcgttattaacgtcgaaataaacgatatcgaacgcctaaatacccgcaaaacgcgcgacctacaaaataaaacaacgtacgaacaacaattcaattccttccgaaaaacgttctatacgcaaattacgcacataatcttctacaccgaaaacgataccgatcaaacgctcgaaaacgtaaacgatttccactacgcgaataatccccaacgaaaattcaatcgccgccaacaaaccgatactaccgaattcacgaccacaaactttttcgatacgcaaaatctctttttcaatatccaaaacatcctaaacgatatcgattttcgacaaacgcacaacgtccgcaccaccgcgaacgacgacttccaaatcgttaacaccccattcgaaatccaacgcgttaacacgcacaataatttcaatatcgcgatacaacgaatattacaacgcgtaataaaccatacgacgaacgatatctttttcacgcaatactacgaaatctccgaaatcaaacatcacgacatcaaccgaataaataaacgaattactaaccatcgcgaaattaaacccaacacaaaaacatactacgaaaataccattatacgttatacaccaaacgacgaaaattaacaactaaactaccatccctccacacgaaataaaacataaacaaaattaa

SEQ ID NO: 10153 - DNA, 571 bp, Artificial Sequence
  chemically treated genomic DNA (Homo sapiens) CpG-island No: 10153
ttgacggttacggttttagttttattttcggttcgttgatttatgtcggttttattttggggatgatcgttggacgttttatcggcggttggtttatcgatcgttatagtcgcgttgtcgtggttcgggttagtgtattaatgggggcgttgggtattgggttgattatttttgtcgatagcgtttgggtcgttggggtgtttgttgtattttggggattgggtgtttcgttgggtttttcgttgattatttttgtcgttagcgatatcgtttcgagtattaatttttttgatacgattttagttcggtattcggaaggtgatgttagtattggtagtaggttgtttaatcgtgattaagttttcggaaattacgttattgacgatgttgcgcgtggcggaattggttagcgaggttggtatttttgatggcgtttttaatgtcgttatcgggttaggtgttgtatgcggcgcggttttgacgttatatttttatgttgcgaaaattagttttatcggtttaatcgcgacgggaaaaggtattgttagaattgttgttgattatttaacgt

SEQ ID NO: 10154 - DNA, 571 bp, Artificial Sequence
  chemically treated genomic DNA (Homo sapiens) CpG-island No: 10154
acgttaaataatcaacaacaattctaacaataccttttcccgtcgcgattaaaccgataaaactaattttcgcaacataaaaatataacgtcaaaaccgcgccgcatacaacacctaacccgataacgacattaaaaacgccatcaaaaataccaacctcgctaaccaattccgccacgcgcaacatcgtcaataacgtaatttccgaaaacttaatcacgattaaacaacctactaccaatactaacatcaccttccgaataccgaactaaaatcgtatcaaaaaaattaatactcgaaacgatatcgctaacgacaaaaataatcaacgaaaaacccaacgaaacacccaatccccaaaatacaacaaacaccccaacgacccaaacgctatcgacaaaaataatcaacccaatacccaacgcccccattaatacactaacccgaaccacgacaacgcgactataacgatcgataaaccaaccgccgataaaacgtccaacgatcatccccaaaataaaaccgacataaatcaacgaaccgaaaataaaactaaaaccgtaaccgtcaa

SEQ ID NO: 10155 - DNA, 571 bp, Artificial Sequence
  chemically treated genomic DNA (Homo sapiens) CpG-island No: 10155
gcgttaagtgattagtagtagttttggtaatattttttttcgtcgcggttgaatcggtaaaattgattttcgtaatatgaggatgtgacgttagggtcgcgtcgtatatagtatttgattcggtgacgatattaaaaacgttattagggatattagtttcgttggttagtttcgttacgcgtaatatcgttagtggcgtggttttcgaaggtttaattacgattgaatagtttgttgttagtgttggtattatttttcgggtatcgagttaaagtcgtattaaaagggttggtgttcggggcggtatcgttggcggtagaaatggttagcgggaagtttagcgaggtatttagtttttagagtataatagatattttagcgatttaggcgttatcgataaaaataattagtttaatatttaacgtttttattagtgtattggttcgaattacggtaacgcgattgtaacggtcgatgaattaatcgtcggtgaagcgtttaacggttatttttagggtaaaatcggtataaattagcgagtcggaagtagggttaaaatcgtgatcgttaa

SEQ ID NO: 10156 - DNA, 571 bp, Artificial Sequence
  chemically treated genomic DNA (Homo sapiens) CpG-island No: 10156
ttaacgatcacgattttaaccctacttccgactcgctaatttataccgattttaccctaaaaataaccgttaaacgcttcaccgacgattaattcatcgaccgttacaatcgcgttaccgtaattcgaaccaatacactaataaaaacgttaaatattaaactaattatttttatcgataacgcctaaatcgctaaaatatctattatactctaaaaactaaatacctcgctaaacttcccgctaaccatttctaccgccaacgataccgccccgaacaccaacccttttaatacgactttaactcgatacccgaaaaataataccaacactaacaacaaactattcaatcgtaattaaaccttcgaaaaccacgccactaacgatattacgcgtaacgaaactaaccaacgaaactaatatccctaataacgtttttaatatcgtcaccgaatcaaatactatatacgacgcgaccctaacgtcacatcctcatattacgaaaatcaattttaccgattcaaccgcgacgaaaaaaaatattaccaaaactactactaatcacttaacgc

SEQ ID NO: 10157 - DNA, 529 bp, Artificial Sequence
  chemically treated genomic DNA (Homo sapiens) CpG-island No: 10157
cgtttaacgggggaggcgattatcgcgttaattttcgtatcgttgattagaatgggtcgtcgtgtatcgttaggtggaatcggcgttcgcggattaattagtattttgttgtttatattatttagaattgggtacgttagtcgtgcggtggtatattcgggtcgggtttatttttcgaattatcgtgtttaaatgaacgtaggatttgaaagataagcgattattgttgcgcgaagcgttaggttatgttgcgtatattgttcgttagcgtattattatagtgatttgtataaggcgatcgagaacgtcgtttcggtaacgatttttcgtcgtttttagtggagtggttgacggataatggtttatgttatcgggttaatgaaatacgttagttcgttcggatgttgggatttgaatcgaagaatacggcggtgcggagttcggagagtaacggaatagtagagagtttcgtgaaaacgataaagcgtgattatattagtattatgtttaaattagacgggttaacggt

SEQ ID NO: 10158 - DNA, 529 bp, Artificial Sequence
  chemically treated genomic DNA (Homo sapiens) CpG-island No: 10158
accgttaacccgtctaatttaaacataatactaatataatcacgctttatcgttttcacgaaactctctactattccgttactctccgaactccgcaccgccgtattcttcgattcaaatcccaacatccgaacgaactaacgtatttcattaacccgataacataaaccattatccgtcaaccactccactaaaaacgacgaaaaatcgttaccgaaacgacgttctcgatcgccttatacaaatcactataataatacgctaacgaacaatatacgcaacataacctaacgcttcgcgcaacaataatcgcttatctttcaaatcctacgttcatttaaacacgataattcgaaaaataaacccgacccgaatataccaccgcacgactaacgtacccaattctaaataatataaacaacaaaatactaattaatccgcgaacgccgattccacctaacgatacacgacgacccattctaatcaacgatacgaaaattaacgcgataatcgcctcccccgttaaacg

SEQ ID NO: 10159 - DNA, 529 bp, Artificial Sequence
  chemically treated genomic DNA (Homo sapiens) CpG-island No: 10159
gtcgttaattcgtttggtttgggtatgatattgatgtagttacgttttatcgtttttacgaagttttttgttatttcgttatttttcggatttcgtatcgtcgtgtttttcggtttaagttttaatattcgggcgaattggcgtgttttattagttcggtagtatgaattattattcgttagttattttattggagacgacggaagatcgttgtcgaagcggcgttttcggtcgttttatatagattattgtagtgatgcgttggcgagtagtatgcgtagtatggtttggcgtttcgcgtaataatgatcgtttgttttttagattttgcgtttatttgaatacgataattcggaagataaattcggttcgggtatgttatcgtacggttggcgtatttagttttgggtggtataaataataaagtgttggttggttcgcgagcgtcgattttatttgacggtatacggcgatttattttggttaacggtgcggaagttggcgcggtgatcgtttttttcgttgagcg

SEQ ID NO: 10160 - DNA, 529 bp, Artificial Sequence
  chemically treated genomic DNA (Homo sapiens) CpG-island No: 10160
cgctcaacgaaaaaaacgatcaccgcgccaacttccgcaccgttaaccaaaataaatcgccgtataccgtcaaataaaatcgacgctcgcgaaccaaccaacactttattatttataccacccaaaactaaatacgccaaccgtacgataacatacccgaaccgaatttatcttccgaattatcgtattcaaataaacgcaaaatctaaaaaacaaacgatcattattacgcgaaacgccaaaccatactacgcatactactcgccaacgcatcactacaataatctatataaaacgaccgaaaacgccgcttcgacaacgatcttccgtcgtctccaataaaataactaacgaataataattcatactaccgaactaataaaacacgccaattcgcccgaatattaaaacttaaaccgaaaaacacgacgatacgaaatccgaaaaataacgaaataacaaaaaacttcgtaaaaacgataaaacgtaactacatcaatatcatacccaaaccaaacgaattaacgac

SEQ ID NO: 10161 - DNA, 968 bp, Artificial Sequence
  chemically treated genomic DNA (Homo sapiens) CpG-island No: 10161
tttttcgttgacgattttttattttagttcggttttcggaggggatcgagttcgtcgtttacggttcgcgtttcgcgttttcgcggatttattgttcggtcgggtattgtatttcgggtcgcggttgttcgttggtcgtcgttttttcgtcgtttcgcgtcgtggtcgtcgtttttcgcgtcggcgtttcggcgtagttcgcgtttggttacgtttcgggttggggtatagtttttcgatttatgcggtcgttcgcggtcgaaggggtttagtcggtttcgaacgattcggagtttttttcgtcggggtgttaggtagtggtcgtagttttttagtcgtcggggcggttttcgagggttcgtagagcgttttcgcgcgcgttatcgtggttcgttttacggtttttgattttgcgcgaggaggtgcggtcggaggttgaagggttcggacgcggcgtatgcgtatatacgtgtgcgggttgagtcgtcggggtttggagggggaatcgcgcgttgcggttgttgcgtttgtttcgttttcggacgtcgttggtttgttttttttgttagttgtgtggggattggtagagggtgtgagagcgggaaacgatcggacgagcggcggggagcgttttgggtgaggaggaggaagtttggttttaggtgtgaaggatgttgacgcgtttcggcgcgtcgcggtgttattttcggtttttgagcgttgttttacgtcgtagcgggttttttttagttgtgaagcgcggttgcgttttgttcgggttttttttcgtcgggacggttttaacgttcgagtttagcgggtttgggttttcgttgtcgggttaggttagttgtttcggggttgggagttacggtatcggggttggggcggagaagacgaattagtttaattcgattcggttaagtaagcgtagtagtgtgtgtttttggattatagtattttatgta

SEQ ID NO: 10162 - DNA, 968 bp, Artificial Sequence
  chemically treated genomic DNA (Homo sapiens) CpG-island No: 10162
tacataaaatactataatccaaaaacacacactactacgcttacttaaccgaatcgaattaaactaattcgtcttctccgccccaaccccgataccgtaactcccaaccccgaaacaactaacctaacccgacaacgaaaacccaaacccgctaaactcgaacgttaaaaccgtcccgacgaaaaaaaacccgaacaaaacgcaaccgcgcttcacaactaaaaaaaacccgctacgacgtaaaacaacgctcaaaaaccgaaaataacaccgcgacgcgccgaaacgcgtcaacatccttcacacctaaaaccaaacttcctcctcctcacccaaaacgctccccgccgctcgtccgatcgtttcccgctctcacaccctctaccaatccccacacaactaacaaaaaaaacaaaccaacgacgtccgaaaacgaaacaaacgcaacaaccgcaacgcgcgattccccctccaaaccccgacgactcaacccgcacacgtatatacgcatacgccgcgtccgaacccttcaacctccgaccgcacctcctcgcgcaaaatcaaaaaccgtaaaacgaaccacgataacgcgcgcgaaaacgctctacgaaccctcgaaaaccgccccgacgactaaaaaactacgaccactacctaacaccccgacgaaaaaaactccgaatcgttcgaaaccgactaaaccccttcgaccgcgaacgaccgcataaatcgaaaaactataccccaacccgaaacgtaaccaaacgcgaactacgccgaaacgccgacgcgaaaaacgacgaccacgacgcgaaacgacgaaaaaacgacgaccaacgaacaaccgcgacccgaaatacaatacccgaccgaacaataaatccgcgaaaacgcgaaacgcgaaccgtaaacgacgaactcgatcccctccgaaaaccgaactaaaataaaaaatcgtcaacgaaaaa

SEQ ID NO: 10163 - DNA, 968 bp, Artificial Sequence
  chemically treated genomic DNA (Homo sapiens) CpG-island No: 10163
tatatgaaatattatgatttaagaatatatattgttgcgtttgtttaatcgggtcgagttgaattagttcgtttttttcgttttaatttcggtgtcgtaatttttagtttcggagtaattagtttggttcgatagcggaggtttaagttcgttgggttcgggcgttggaatcgtttcggcggggggaagttcgggtaggacgtagtcgcgttttatagttgaggaaaattcgttgcggcgtagggtaacgtttagaagtcgagagtggtatcgcgacgcgtcggaacgcgttagtattttttatatttaagattagatttttttttttttatttaggacgtttttcgtcgttcgttcggtcgtttttcgtttttatattttttgttagtttttatatagttgataagggaagtaagttagcggcgttcggggacggagtaagcgtagtagtcgtagcgcgcggttttttttttaggtttcggcgatttagttcgtatacgtgtatgcgtatgcgtcgcgttcgggttttttagttttcggtcgtattttttcgcgtagggttagaggtcgtggggcgggttacggtgacgcgcgcggaagcgttttgcgggttttcggaaatcgtttcggcggttgagaggttgcggttattgtttggtatttcgacgggaggggtttcggatcgttcggagtcggttgaattttttcggtcgcgagcgatcgtatgagtcgggggattatgttttagttcgaagcgtggttaggcgcgagttgcgtcgagacgtcggcgcgggaggcggcggttacggcgcgggacggcgggaaggcggcggttagcgggtagtcgcggttcgagatgtagtgttcggtcgagtagtgagttcgcgggggcgcggggcgcgggtcgtgggcggcgggttcggtttttttcggaagtcgggttggggtggggagtcgttagcggaggg

SEQ ID NO: 10164 - DNA, 968 bp, Artificial Sequence
  chemically treated genomic DNA (Homo sapiens) CpG-island No: 10164
ccctccgctaacgactccccaccccaacccgacttccgaaaaaaaccgaacccgccgcccacgacccgcgccccgcgcccccgcgaactcactactcgaccgaacactacatctcgaaccgcgactacccgctaaccgccgccttcccgccgtcccgcgccgtaaccgccgcctcccgcgccgacgtctcgacgcaactcgcgcctaaccacgcttcgaactaaaacataatcccccgactcatacgatcgctcgcgaccgaaaaaattcaaccgactccgaacgatccgaaacccctcccgtcgaaataccaaacaataaccgcaacctctcaaccgccgaaacgatttccgaaaacccgcaaaacgcttccgcgcgcgtcaccgtaacccgccccacgacctctaaccctacgcgaaaaaatacgaccgaaaactaaaaaacccgaacgcgacgcatacgcatacacgtatacgaactaaatcgccgaaacctaaaaaaaaaaccgcgcgctacgactactacgcttactccgtccccgaacgccgctaacttacttcccttatcaactatataaaaactaacaaaaaatataaaaacgaaaaacgaccgaacgaacgacgaaaaacgtcctaaataaaaaaaaaaaaatctaatcttaaatataaaaaatactaacgcgttccgacgcgtcgcgataccactctcgacttctaaacgttaccctacgccgcaacgaattttcctcaactataaaacgcgactacgtcctacccgaacttccccccgccgaaacgattccaacgcccgaacccaacgaacttaaacctccgctatcgaaccaaactaattactccgaaactaaaaattacgacaccgaaattaaaacgaaaaaaacgaactaattcaactcgacccgattaaacaaacgcaacaatatatattcttaaatcataatatttcatata

SEQ ID NO: 10165 - DNA, 587 bp, Artificial Sequence
  chemically treated genomic DNA (Homo sapiens) CpG-island No: 10165
  unsure (226)
ttggtaagtttttttggaaattaagtcgaaacgcggttattaagttttggttaggtttgtcgtggatttgggttattgtttcgcgttggatcggagtaatataatagtgcgtcgtatattgggttgttaattatgtatatagtatgtggcgtttacgggtttcgattggtagtttacgtttatttacgttttaacgtttttagcgttttattttgttttatgaatnacgtgggggtattttttttaagaaggtttgtaatttggcgagaggttatcgtatatacggcgttgaggcgatttgtggtttcggttcggtttgtttacgatagcggttaggttggatttgcggggagaaatattcgtggtttcgattgagtcgataatttgttaatcggcgtattggcgaggttattagtcgtttttcgttttacggtttaggcgttgggtcggtagatttaggtcgaatattaagggtattcgttaattcggagttaagtttttttttacgtaaaattaagttttgacggtcgagacgcgttgaaaaatggggtagaaaattgtgatagattcgttgtaatggtcggggt

SEQ ID NO: 10166 - DNA, 587 bp, Artificial Sequence
  chemically treated genomic DNA (Homo sapiens) CpG-island No: 10166
  unsure (362)
accccgaccattacaacgaatctatcacaattttctaccccatttttcaacgcgtctcgaccgtcaaaacttaattttacgtaaaaaaaaacttaactccgaattaacgaatacccttaatattcgacctaaatctaccgacccaacgcctaaaccgtaaaacgaaaaacgactaataacctcgccaatacgccgattaacaaattatcgactcaatcgaaaccacgaatatttctccccgcaaatccaacctaaccgctatcgtaaacaaaccgaaccgaaaccacaaatcgcctcaacgccgtatatacgataacctctcgccaaattacaaaccttcttaaaaaaaatacccccacgtnattcataaaacaaaataaaacgctaaaaacgttaaaacgtaaataaacgtaaactaccaatcgaaacccgtaaacgccacatactatatacataattaacaacccaatatacgacgcactattatattactccgatccaacgcgaaacaataacccaaatccacgacaaacctaaccaaaacttaataaccgcgtttcgacttaatttccaaaaaaacttaccaa

SEQ ID NO: 10167 - DNA, 587 bp, Artificial Sequence
  chemically treated genomic DNA (Homo sapiens) CpG-island No: 10167
  unsure (362)
atttcggttattgtaacgggtttgttataattttttgttttattttttaacgcgtttcggtcgttaaaatttggttttgcgtaaaagggagtttgatttcgggttggcgggtgtttttgatattcggtttaagtttatcggtttaacgtttgggtcgtaaaacggggggcgattggtggtttcgttaatgcgtcgattaataggttgtcggtttaatcgggattacgggtattttttttcgtaggtttagtttgatcgttgtcgtgaatagatcggatcggggttataagtcgttttaacgtcgtgtgtgcgatggtttttcgttaggttgtagatttttttaggagggatgtttttacgtngtttatagagtaggatgaagcgttgggagcgttaaaacgtagataagcgtgggttgttaatcgaggttcgtaggcgttatatgttgtatatatagttagtagtttagtgtgcgacgtattgttgtgttgtttcgatttagcgcgaggtagtagtttaagtttacggtaggtttagttagaatttagtggtcgcgtttcgatttggtttttagaaagatttattag

SEQ ID NO: 10168 - DNA, 587 bp, Artificial Sequence
  chemically treated genomic DNA (Homo sapiens) CpG-island No: 10168
  unsure (226)
ctaataaatctttctaaaaaccaaatcgaaacgcgaccactaaattctaactaaacctaccgtaaacttaaactactacctcgcgctaaatcgaaacaacacaacaatacgtcgcacactaaactactaactatatatacaacatataacgcctacgaacctcgattaacaacccacgcttatctacgttttaacgctcccaacgcttcatcctactctataaacnacgtaaaaacatccctcctaaaaaaatctacaacctaacgaaaaaccatcgcacacacgacgttaaaacgacttataaccccgatccgatctattcacgacaacgatcaaactaaacctacgaaaaaaaatacccgtaatcccgattaaaccgacaacctattaatcgacgcattaacgaaaccaccaatcgccccccgttttacgacccaaacgttaaaccgataaacttaaaccgaatatcaaaaacacccgccaacccgaaatcaaactcccttttacgcaaaaccaaattttaacgaccgaaacgcgttaaaaaataaaacaaaaaattataacaaacccgttacaataaccgaaat

SEQ ID NO: 10169 - DNA, 916 bp, Artificial Sequence
  chemically treated genomic DNA (Homo sapiens) CpG-island No: 10169
  unsure (745, 748)
cgacgtaggcgtcgttcgtgacgatgatgacgtcgtagttgttttagtcgagttgttttattttcgttcggtttatgggtaggaagggtgcggggtcgaaacgtttggtttagaaggggcggtaagcggttagggttttcggggcggtaacgggtagtgcggatataagaggtggattgtcgacggtaggtttagaaagtataaagttcgcgtagggcgcgggttcggggtatagggtcggggcgtgaattatagcgcgcggatgttcgcggtttgtaggtttttggggttttgttttatttcgaattcgatttgggcgttttcggttagagtgcggaagtcgtcgttgtttttgatttcgttgtgatgggcgaataggtttttgtcgtcgtcggcgggggtgatgaagtcgaagtttttgtcgtcgttaaattatttgacgatgtcggattgtatggtgtttatgaaaatttttttggtgtcgttgaattaaattcgtttttagttcgagcggttgcggtgaaatataatatataagattagacgggacggcgtcggcggcgataagtcgatcgaagcgtaagattgtaagggtttaggtcgttagtaacgtttgggcggtcgtcgttatgttacgagtacgcggcgaatcgtttgttataaggtttttttcgaagacggcgtaggcgtagtcgcggtaggcgtcgtaggtcgtggtatacggcgtaagtcgtcgttgtagagnttntcgaaattcggggtaagttcggagcgatgtcggcgagcgggcgatggttacggggtcggggagatcgcgggtggtagattattaatagcgtttttatgtcgatttagtatttaataattttttcgttgggtattaagaatttcggttaggatattaaatatggttcgt

SEQ ID NO: 10170 - DNA, 916 bp, Artificial Sequence
  chemically treated genomic DNA (Homo sapiens) CpG-island No: 10170
  unsure (169, 172)
acgaaccatatttaatatcctaaccgaaattcttaatacccaacgaaaaaattattaaatactaaatcgacataaaaacgctattaataatctaccacccgcgatctccccgaccccgtaaccatcgcccgctcgccgacatcgctccgaacttaccccgaatttcganaanctctacaacgacgacttacgccgtataccacgacctacgacgcctaccgcgactacgcctacgccgtcttcgaaaaaaaccttataacaaacgattcgccgcgtactcgtaacataacgacgaccgcccaaacgttactaacgacctaaacccttacaatcttacgcttcgatcgacttatcgccgccgacgccgtcccgtctaatcttatatattatatttcaccgcaaccgctcgaactaaaaacgaatttaattcaacgacaccaaaaaaattttcataaacaccatacaatccgacatcgtcaaataatttaacgacgacaaaaacttcgacttcatcacccccgccgacgacgacaaaaacctattcgcccatcacaacgaaatcaaaaacaacgacgacttccgcactctaaccgaaaacgcccaaatcgaattcgaaataaaacaaaaccccaaaaacctacaaaccgcgaacatccgcgcgctataattcacgccccgaccctataccccgaacccgcgccctacgcgaactttatactttctaaacctaccgtcgacaatccacctcttatatccgcactacccgttaccgccccgaaaaccctaaccgcttaccgccccttctaaaccaaacgtttcgaccccgcacccttcctacccataaaccgaacgaaaataaaacaactcgactaaaacaactacgacgtcatcatcgtcacgaacgacgcctacgtcg

SEQ ID NO: 10171 - DNA, 916 bp, Artificial Sequence
  chemically treated genomic DNA (Homo sapiens) CpG-island No: 10171
  unsure (169, 172)
acgaattatatttggtgttttggtcgagatttttaatgtttagcgagaagattgttgggtattgaatcgatataaaggcgttgttggtggtttgttattcgcggttttttcgatttcgtgattatcgttcgttcgtcggtatcgtttcgggtttgtttcgaatttcganggnttttgtagcgacgatttgcgtcgtgtgttacggtttgcggcgtttgtcgcgattgcgtttgcgtcgttttcgaagagagttttgtggtaggcggttcgtcgcgtgttcgtggtatggcggcggtcgtttaggcgttgttggcggtttgagtttttataattttgcgtttcggtcggtttgtcgtcgtcggcgtcgtttcgtttgattttgtgtgttgtgttttatcgtagtcgttcgggttgagggcgaatttgatttaacgatattaaggaaatttttatgagtattatgtaattcggtatcgttaagtggtttgacgacggtaagggtttcggttttattattttcgtcgacggcggtaaggatttgttcgtttattatagcgaaattaagaataacggcggttttcgtattttggtcgaaggcgtttaggtcgagttcgaagtgaagtagggttttaagggtttgtaagtcgcgaatattcgcgcgttgtaatttacgtttcggttttgtgtttcgagttcgcgttttgcgcgggttttgtgttttttgggtttgtcgtcgataatttattttttatgttcgtattgttcgttgtcgtttcgaaggttttgatcgtttatcgttttttttgggttaagcgtttcggtttcgtattttttttgtttatgagtcgggcggagatggagtagttcggttgggatagttgcgacgttattatcgttacgggcgacgtttacgtcg

SEQ ID NO: 10172 - DNA, 916 bp, Artificial Sequence
  chemically treated genomic DNA (Homo sapiens) CpG-island No: 10172
  unsure (745, 748)
cgacgtaaacgtcgcccgtaacgataataacgtcgcaactatcccaaccgaactactccatctccgcccgactcataaacaaaaaaaatacgaaaccgaaacgcttaacccaaaaaaaacgataaacgatcaaaaccttcgaaacgacaacgaacaatacgaacataaaaaataaattatcgacgacaaacccaaaaaacacaaaacccgcgcaaaacgcgaactcgaaacacaaaaccgaaacgtaaattacaacgcgcgaatattcgcgacttacaaacccttaaaaccctacttcacttcgaactcgacctaaacgccttcgaccaaaatacgaaaaccgccgttattcttaatttcgctataataaacgaacaaatccttaccgccgtcgacgaaaataataaaaccgaaacccttaccgtcgtcaaaccacttaacgataccgaattacataatactcataaaaatttccttaatatcgttaaatcaaattcgccctcaacccgaacgactacgataaaacacaacacacaaaatcaaacgaaacgacgccgacgacgacaaaccgaccgaaacgcaaaattataaaaactcaaaccgccaacaacgcctaaacgaccgccgccataccacgaacacgcgacgaaccgcctaccacaaaactctcttcgaaaacgacgcaaacgcaatcgcgacaaacgccgcaaaccgtaacacacgacgcaaatcgtcgctacaaaanccntcgaaattcgaaacaaacccgaaacgataccgacgaacgaacgataatcacgaaatcgaaaaaaccgcgaataacaaaccaccaacaacgcctttatatcgattcaatacccaacaatcttctcgctaaacattaaaaatctcgaccaaaacaccaaatataattcgt

SEQ ID NO: 10173 - DNA, 603 bp, Artificial Sequence
  chemically treated genomic DNA (Homo sapiens) CpG-island No: 10173
  unsure (49)
tcgttacgcgcgatggttttttacgtttttttgttttttgggaggcgtngcggttggttttggatattcgtcgtttatttttcgttcgggcgggtttattttaattgggagcgtttagttcgtttttttgtttttttttagaatgttttattgtttatcgatagaattagcgagttattttataaatagtaattcgtagtcgaggtggagttatttattgcgtatcgcgttacgcgttttttgttttatttttttatgtcgatattttcgttaatttcgttatttcgttttattagcgtcgcgggaagttaggtttcgtttttcgtaggatcgaagtttcgtttttttttcgcgggggttatttttggtttcgttttattgagcgtatttttttttgtcgtttttttttttttatttgggaatttgaggatcgttattttggttcggtttcgtaggcgtacgtcggttttcggggtttcgtttttttgagggtaagtcgttttcgtttcgtttttttgtaaatatttatgggtatttggcgaatttgttgatttcgtttattattttagcgttatttgtatttaattatttacgaagtaaatt

SEQ ID NO: 10174 - DNA, 603 bp, Artificial Sequence
  chemically treated genomic DNA (Homo sapiens) CpG-island No: 10174
  unsure (555)
aatttacttcgtaaataattaaatacaaataacgctaaaataataaacgaaatcaacaaattcgccaaatacccataaatatttacaaaaaaacgaaacgaaaacgacttaccctcaaaaaaacgaaaccccgaaaaccgacgtacgcctacgaaaccgaaccaaaataacgatcctcaaattcccaaataaaaaaaaaaaaacgacaaaaaaaaatacgctcaataaaacgaaaccaaaaataacccccgcgaaaaaaaaacgaaacttcgatcctacgaaaaacgaaacctaacttcccgcgacgctaataaaacgaaataacgaaattaacgaaaatatcgacataaaaaaataaaacaaaaaacgcgtaacgcgatacgcaataaataactccacctcgactacgaattactatttataaaataactcgctaattctatcgataaacaataaaacattctaaaaaaaaacaaaaaaacgaactaaacgctcccaattaaaataaacccgcccgaacgaaaaataaacgacgaatatccaaaaccaaccgcnacgcctcccaaaaaacaaaaaaacgtaaaaaaccatcgcgcgtaacga

SEQ ID NO: 10175 - DNA, 603 bp, Artificial Sequence
  chemically treated genomic DNA (Homo sapiens) CpG-island No: 10175
  unsure (555)
ggtttatttcgtagatagttgggtataagtgacgttaggatgataggcggagttaataggttcgttagatatttatgagtatttataagggggcggggcgaaagcgatttgtttttaaaggggcggaatttcgagggtcggcgtgcgtttacgggatcgggttagggtgacgatttttaagtttttaagtagaggagaggaagcggtagagggaggtgcgtttagtggggcggagttaagggtggttttcgcgggaggagggcggggtttcggttttgcgaggggcgggatttgatttttcgcggcgttgatggggcgggatgacgaagttgacgagggtgtcggtatgagggggtggagtaaggagcgcgtggcgcggtgcgtagtgggtggttttatttcgattgcgaattattgtttatgaggtgattcgttggttttatcggtggatagtgggatattttgaagggaggtaaggaggcggattgagcgtttttaattggggtgagttcgttcgagcggagagtggacggcgggtgtttaggattagtcgtngcgttttttaaggggtaagaaaacgtggggaattatcgcgcgtgacgg

SEQ ID NO: 10176 - DNA, 603 bp, Artificial Sequence
  chemically treated genomic DNA (Homo sapiens) CpG-island No: 10176
  unsure (49)
ccgtcacgcgcgataattccccacgttttcttaccccttaaaaaacgcnacgactaatcctaaacacccgccgtccactctccgctcgaacgaactcaccccaattaaaaacgctcaatccgcctccttacctcccttcaaaatatcccactatccaccgataaaaccaacgaatcacctcataaacaataattcgcaatcgaaataaaaccacccactacgcaccgcgccacgcgctccttactccaccccctcataccgacaccctcgtcaacttcgtcatcccgccccatcaacgccgcgaaaaatcaaatcccgcccctcgcaaaaccgaaaccccgccctcctcccgcgaaaaccacccttaactccgccccactaaacgcacctccctctaccgcttcctctcctctacttaaaaacttaaaaatcgtcaccctaacccgatcccgtaaacgcacgccgaccctcgaaattccgcccctttaaaaacaaatcgctttcgccccgcccccttataaatactcataaatatctaacgaacctattaactccgcctatcatcctaacgtcacttatacccaactatctacgaaataaacc

SEQ ID NO: 10177 - DNA, 640 bp, Artificial Sequence
  chemically treated genomic DNA (Homo sapiens) CpG-island No: 10177
aattatttttcggaagttttggttatttatcgattagttttagtttttggtcgagacgagatttttcgaagggttttcgcggggttatataagttttgcgataaatttagtttcgggttattggtatgttggtttcgttttttcgtttgcgtttgcgcgggagagaagtgtgagcgtaagggttttaaacggcgtttgcgtagttttataattacgttaaaatttcgcggagtttagattcgatttcgcgagaataatttttaacgtttttatagttagtatttgtttttataatcgtgttgtattttcgtttaattattttgttttgttttttaacgtttttagtttatttatggaaattcggaaggttcgggttattatttaatttaaattttagagaaaaagtatatcgtcgtattttatttaagtaaattattcggttattgagaaagaggcgcgtaagcgttacggttgcgtttttatagtaacgtcggcgtttcgtgacgtttttacgtattacgtacgttagagttaattagaagaggcgttggttggttgagaagtagtggagacgtgaggttgggttagagcggcgtgttaatttgggaggattaggtttttttcggttagggagtggaaa

SEQ ID NO: 10178 - DNA, 640 bp, Artificial Sequence
  chemically treated genomic DNA (Homo sapiens) CpG-island No: 10178
tttccactccctaaccgaaaaaaacctaatcctcccaaattaacacgccgctctaacccaacctcacgtctccactacttctcaaccaaccaacgcctcttctaattaactctaacgtacgtaatacgtaaaaacgtcacgaaacgccgacgttactataaaaacgcaaccgtaacgcttacgcgcctctttctcaataaccgaataatttacttaaataaaatacgacgatatactttttctctaaaatttaaattaaataataacccgaaccttccgaatttccataaataaactaaaaacgttaaaaaacaaaacaaaataattaaacgaaaatacaacacgattataaaaacaaatactaactataaaaacgttaaaaattattctcgcgaaatcgaatctaaactccgcgaaattttaacgtaattataaaactacgcaaacgccgtttaaaacccttacgctcacacttctctcccgcgcaaacgcaaacgaaaaaacgaaaccaacataccaataacccgaaactaaatttatcgcaaaacttatataaccccgcgaaaacccttcgaaaaatctcgtctcgaccaaaaactaaaactaatcgataaataaccaaaacttccgaaaaataatt

SEQ ID NO: 10179 - DNA, 640 bp, Artificial Sequence
  chemically treated genomic DNA (Homo sapiens) CpG-island No: 10179
tttttattttttggtcggaaaaaatttagtttttttaggttagtacgtcgttttagtttagttttacgtttttattgttttttagttagttaacgttttttttgattggttttgacgtgcgtggtgcgtgaaaacgttacgagacgtcggcgttattataagagcgtagtcgtggcgtttgcgcgttttttttttagtgatcgggtggtttgtttaggtgaggtgcggcggtgtgttttttttttagggtttgggttggatggtggttcgggtttttcgagtttttatgagtaagttaaagacgttaggaaatagagtagggtggttgaacgggagtgtagtacggttgtgggggtagatattgattatgagagcgttggaggttattttcgcgagatcggatttgggtttcgcgaggttttggcgtagttgtgggattgcgtaggcgtcgtttggagtttttacgtttatatttttttttcgcgtaggcgtagacggggaagcggagttaatatgttagtggttcggagttgggtttgtcgtaaaatttatgtgatttcgcggagatttttcgagaaatttcgtttcgattaagagttgaagttgatcggtgagtggttaaggttttcgggaagtggtt

SEQ ID NO: 10180 - DNA, 640 bp, Artificial Sequence
  chemically treated genomic DNA (Homo sapiens) CpG-island No: 10180
aaccacttcccgaaaaccttaaccactcaccgatcaacttcaactcttaatcgaaacgaaatttctcgaaaaatctccgcgaaatcacataaattttacgacaaacccaactccgaaccactaacatattaactccgcttccccgtctacgcctacgcgaaaaaaaaatataaacgtaaaaactccaaacgacgcctacgcaatcccacaactacgccaaaacctcgcgaaacccaaatccgatctcgcgaaaataacctccaacgctctcataatcaatatctacccccacaaccgtactacactcccgttcaaccaccctactctatttcctaacgtctttaacttactcataaaaactcgaaaaacccgaaccaccatccaacccaaaccctaaaaaaaaaacacaccgccgcacctcacctaaacaaaccacccgatcactaaaaaaaaaacgcgcaaacgccacgactacgctcttataataacgccgacgtctcgtaacgttttcacgcaccacgcacgtcaaaaccaatcaaaaaaaacgttaactaactaaaaaacaataaaaacgtaaaactaaactaaaacgacgtactaacctaaaaaaactaaattttttccgaccaaaaaataaaaa

SEQ ID NO: 10181 - DNA, 1205 bp, Artificial Sequence
  chemically treated genomic DNA (Homo sapiens) CpG-island No: 10181
cgtttcgcgtcgttttaaggcggaggttcgggagggggtcgattcggttcgttagttttacgttcggttttagatttcggtatttttttttcgttagttggcgcggtttcgtttttttttcggaagaggaaattttcggggttcgagtaatagggttaggcgcggagaggagcggcgggagagttaggagggtcgtttagggtaggaggcgagttaggtcgggttagaagttggtcgacggcggcgcgcgggggcgtcgggcggggagggtcgttgggtcggatttagcgcgtagtcggggtagggcgcggttcggggttcgagagcgtagggcgggtcgtagttggaaggaatatttgagttgggagaggaggtcgagttggagggcggtttttttcgggtttgcgttcgggaagtcgtcgcggaggaggagacggggatagcggggttgttcgggcgttgtgcgtatgttgggtttgggtcgtcgtcggggtttgttttttgggttgttcggttatcgtcgtttcgggcgttcggtatgtcggtgtattatatttttaatttacgcgttttttggtttttggtgatcggtttgtgtatcgttttggtgtgtttttattatgttttgcggggaagcgggggcgttcgggtcgagttcgtcgacggcgtggatggcggtttttcgttgtttaaggtggtcgttttgtttttttttagttatgtttttttgcgttgtcgttacgttgttcggtagcgttttttgttcgggttttttcgtttggagggttacgtcgtttttttttcgagatattttcgagagtcgggttttagtattttgttggagagttattacgagtatgaggtgcgtttgttttcgtacgtgttgggttatagtaaggcgtacgtgagtcggatcgtgggcgagttggtgcgggttggtcgcgttcgggggtttttcggttttatttttgggggagcgttggttttggtttttcgcggagattttatttaggtgggtagcgtttacgagtaatataaaattcgtcggttcgatagtttcgacgtgttggtgttattgcgtttttcgtcgtttgtggcgttggagttacggagtttgggcgaggagttagcgttggtttcggtttttcgcggttgttttttgtgcgtttttaaggtattatttttattatcgggggtttcggggg

SEQ ID NO: 10182 - DNA, 1205 bp, Artificial Sequence
  chemically treated genomic DNA (Homo sapiens) CpG-island No: 10182
cccccgaaacccccgataataaaaataataccttaaaaacgcacaaaaaacaaccgcgaaaaaccgaaaccaacgctaactcctcgcccaaactccgtaactccaacgccacaaacgacgaaaaacgcaataacaccaacacgtcgaaactatcgaaccgacgaattttatattactcgtaaacgctacccacctaaataaaatctccgcgaaaaaccaaaaccaacgctcccccaaaaataaaaccgaaaaacccccgaacgcgaccaacccgcaccaactcgcccacgatccgactcacgtacgccttactataacccaacacgtacgaaaacaaacgcacctcatactcgtaataactctccaacaaaatactaaaacccgactctcgaaaatatctcgaaaaaaaaacgacgtaaccctccaaacgaaaaaacccgaacaaaaaacgctaccgaacaacgtaacgacaacgcaaaaaaacataactaaaaaaaaacaaaacgaccaccttaaacaacgaaaaaccgccatccacgccgtcgacgaactcgacccgaacgcccccgcttccccgcaaaacataataaaaacacaccaaaacgatacacaaaccgatcaccaaaaaccaaaaaacgcgtaaattaaaaatataatacaccgacataccgaacgcccgaaacgacgataaccgaacaacccaaaaaacaaaccccgacgacgacccaaacccaacatacgcacaacgcccgaacaaccccgctatccccgtctcctcctccgcgacgacttcccgaacgcaaacccgaaaaaaaccgccctccaactcgacctcctctcccaactcaaatattccttccaactacgacccgccctacgctctcgaaccccgaaccgcgccctaccccgactacgcgctaaatccgacccaacgaccctccccgcccgacgcccccgcgcgccgccgtcgaccaacttctaacccgacctaactcgcctcctaccctaaacgaccctcctaactctcccgccgctcctctccgcgcctaaccctattactcgaaccccgaaaatttcctcttccgaaaaaaaaacgaaaccgcgccaactaacgaaaaaaaaataccgaaatctaaaaccgaacgtaaaactaacgaaccgaatcgaccccctcccgaacctccgccttaaaacgacgcgaaacg

SEQ ID NO: 10183 - DNA, 1205 bp, Artificial Sequence
  chemically treated genomic DNA (Homo sapiens) CpG-island No: 10183
ttttcgaggttttcgatggtgagggtggtgttttgagggcgtataagaagtagtcgcggaaggtcggggttagcgttggtttttcgtttaggtttcgtggttttagcgttataagcggcgggaggcgtagtggtattagtacgtcgaagttgtcgggtcggcggattttatgttgttcgtaggcgttgtttatttggatgaagttttcgcggaaggttaaggttagcgtttttttaggaatgagatcgggggattttcgggcgcggttagttcgtattagttcgtttacgattcggtttacgtgcgttttgttgtggtttaatacgtgcggagataggcgtattttatgttcgtagtaattttttagtaggatgttgaggttcggttttcggaagtgtttcgaggagaaggcggcgtgattttttagacggggagattcgggtaggaagcgttgtcggatagcgtggcgatagcgtaggaggatatagttgaggaggagtaggacggttattttaagtaacgggaagtcgttatttacgtcgtcggcgggttcggttcgggcgttttcgttttttcgtaggatatggtagaggtatattagggcggtgtataggtcggttattaggggttagaagacgcgtagattgagggtgtagtgtatcgatatgtcgggcgttcggggcggcggtggtcgagtagtttagggggtaagtttcggcggcgatttaagtttagtatgcgtatagcgttcgggtagtttcgttgttttcgttttttttttcgcggcggtttttcgaacgtaggttcgagggaggtcgttttttagttcggtttttttttttagtttaagtgttttttttagttgcggttcgttttgcgttttcgggtttcgggtcgcgttttgtttcggttgcgcgttgagttcggtttagcggtttttttcgttcggcgttttcgcgcgtcgtcgtcggttagtttttggttcggtttggttcgttttttattttgggcggtttttttggttttttcgtcgttttttttcgcgtttgattttgttattcggatttcgggagttttttttttcgagggggaggcgaggtcgcgttagttagcggggaggaaatgtcggagtttggagtcgagcgtggagttggcgagtcgggtcggttttttttcgggttttcgttttaaagcgacgcggggcg

SEQ ID NO: 10184 - DNA, 1205 bp, Artificial Sequence
  chemically treated genomic DNA (Homo sapiens) CpG-island No: 10184
cgccccgcgtcgctttaaaacgaaaacccgaaaaaaaaccgacccgactcgccaactccacgctcgactccaaactccgacatttcctccccgctaactaacgcgacctcgcctccccctcgaaaaaaaaaactcccgaaatccgaataacaaaatcaaacgcgaaaaaaaacgacgaaaaaaccaaaaaaaccgcccaaaataaaaaacgaaccaaaccgaaccaaaaactaaccgacgacgacgcgcgaaaacgccgaacgaaaaaaaccgctaaaccgaactcaacgcgcaaccgaaacaaaacgcgacccgaaacccgaaaacgcaaaacgaaccgcaactaaaaaaaacacttaaactaaaaaaaaaaaccgaactaaaaaacgacctccctcgaacctacgttcgaaaaaccgccgcgaaaaaaaaaacgaaaacaacgaaactacccgaacgctatacgcatactaaacttaaatcgccgccgaaacttaccccctaaactactcgaccaccgccgccccgaacgcccgacatatcgatacactacaccctcaatctacgcgtcttctaacccctaataaccgacctatacaccgccctaatatacctctaccatatcctacgaaaaaacgaaaacgcccgaaccgaacccgccgacgacgtaaataacgacttcccgttacttaaaataaccgtcctactcctcctcaactatatcctcctacgctatcgccacgctatccgacaacgcttcctacccgaatctccccgtctaaaaaatcacgccgccttctcctcgaaacacttccgaaaaccgaacctcaacatcctactaaaaaattactacgaacataaaatacgcctatctccgcacgtattaaaccacaacaaaacgcacgtaaaccgaatcgtaaacgaactaatacgaactaaccgcgcccgaaaatcccccgatctcattcctaaaaaaacgctaaccttaaccttccgcgaaaacttcatccaaataaacaacgcctacgaacaacataaaatccgccgacccgacaacttcgacgtactaataccactacgcctcccgccgcttataacgctaaaaccacgaaacctaaacgaaaaaccaacgctaaccccgaccttccgcgactacttcttatacgccctcaaaacaccaccctcaccatcgaaaacctcgaaaa

SEQ ID NO: 10185 - DNA, 600 bp, Artificial Sequence
  chemically treated genomic DNA (Homo sapiens) CpG-island No: 10185
gtttcggcgttttcggtttcgtttgcgttggggtcgttgtagttttcgtagttgtttcgggttgtttgtttaggcgtttcggttttattttagtttggggagcgtttcggtggggagtacgggatagcgagggaggtcgaggcgggggtattgggcgttcgatattttcgaatcggggaggcggtttcgatttcgagagtcggaacgtagggaaaggtaaggacggggcggtcggcggaggggcgggcgtcgtttattagttacgttagttacgtttggggttatcggttgtttttttttttttttttttttttgttttttttttttttcgttgttggcgagggtaaagtggtcgtggcggcgttatgttcgggtcggagtgagtgcgcgcgggcgaaaatggcgtatatttaggtagggttgaggttgggggtaaggttcggggtgcgggtagggggtgtcgcgtttttttcggttgggagcgcgcggaagggagggtttacggttaggtttttataaatttgtttcgagaaaaagggtgttcgtgcgcgggtaatttgtgtagtaataggggtgcgtttcgggaggagagattgggga

SEQ ID NO: 10186 - DNA, 600 bp, Artificial Sequence
  chemically treated genomic DNA (Homo sapiens) CpG-island No: 10186
tccccaatctctcctcccgaaacgcacccctattactacacaaattacccgcgcacgaacaccctttttctcgaaacaaatttataaaaacctaaccgtaaaccctcccttccgcgcgctcccaaccgaaaaaaacgcgacaccccctacccgcaccccgaaccttacccccaacctcaaccctacctaaatatacgccattttcgcccgcgcgcactcactccgacccgaacataacgccgccacgaccactttaccctcgccaacaacgaaaaaaaaaaaaaacaaaaaaaaaaaaaaaaaaaaaaacaaccgataaccccaaacgtaactaacgtaactaataaacgacgcccgcccctccgccgaccgccccgtccttacctttccctacgttccgactctcgaaatcgaaaccgcctccccgattcgaaaatatcgaacgcccaatacccccgcctcgacctccctcgctatcccgtactccccaccgaaacgctccccaaactaaaataaaaccgaaacgcctaaacaaacaacccgaaacaactacgaaaactacaacgaccccaacgcaaacgaaaccgaaaacgccgaaac

SEQ ID NO: 10187 - DNA, 600 bp, Artificial Sequence
  chemically treated genomic DNA (Homo sapiens) CpG-island No: 10187
tttttagttttttttttcggggcgtatttttgttgttgtataggttgttcgcgtacgggtattttttttttcgaagtaagtttgtgggagtttagtcgtgggttttttttttcgcgcgtttttagtcggagggggcgcggtattttttattcgtatttcggattttgtttttagttttagttttatttggatgtacgttattttcgttcgcgcgtatttatttcggttcgggtatggcgtcgttacggttattttgttttcgttaatagcggagggggaagaaagtaaagggggaaaggaagaaaaaggtagtcggtggttttagacgtgattggcgtggttgatgagcggcgttcgttttttcgtcggtcgtttcgtttttgtttttttttgcgtttcggttttcggaatcggggtcgttttttcggttcggagatatcgggcgtttagtgttttcgtttcggtttttttcgttgtttcgtgttttttatcgaggcgttttttaggttggaataaggtcggggcgtttgggtaagtagttcggggtagttgcggggattgtagcgattttagcgtaggcggggtcggagacgtcggggt

SEQ ID NO: 10188 - DNA, 600 bp, Artificial Sequence
  chemically treated genomic DNA (Homo sapiens) CpG-island No: 10188
accccgacgtctccgaccccgcctacgctaaaatcgctacaatccccgcaactaccccgaactacttacccaaacgccccgaccttattccaacctaaaaaacgcctcgataaaaaacacgaaacaacgaaaaaaaccgaaacgaaaacactaaacgcccgatatctccgaaccgaaaaaacgaccccgattccgaaaaccgaaacgcaaaaaaaaacaaaaacgaaacgaccgacgaaaaaacgaacgccgctcatcaaccacgccaatcacgtctaaaaccaccgactacctttttcttcctttccccctttactttcttccccctccgctattaacgaaaacaaaataaccgtaacgacgccatacccgaaccgaaataaatacgcgcgaacgaaaataacgtacatccaaataaaactaaaactaaaaacaaaatccgaaatacgaataaaaaataccgcgccccctccgactaaaaacgcgcgaaaaaaaaaacccacgactaaactcccacaaacttacttcgaaaaaaaaaatacccgtacgcgaacaacctatacaacaacaaaaatacgccccgaaaaaaaaaactaaaaa

SEQ ID NO: 10189 - DNA, 710 bp, Artificial Sequence
  chemically treated genomic DNA (Homo sapiens) CpG-island No: 10189
tttgatcgatttggagtttttttatcgcgtttaattaggttgtttttcggtatcgttgatttttgttaatatcgtagtcggagatttttcgtttaggcgcgtgacgtttgtttttgattgtttgttttttaggtagtggtcgttttgataaagttaggcgcgtagattggtcgatttttagttaattgcgatgtagcgagttgttatgtgattttttttaattttcgtgtcgagttggcgattatggtaagcgtcgtttgttttgtcgtatcgtcgttttgatgtcgtatcgtatcgaatagcgttttatgtttttggagcgtttgcggtatgttggttttatcgtttatttaggttcgtttaaaaatcgttcgttgtagcgaattgatcgtaatgttaagttgttgtaatatcgggttatgtatcgattgtagtatcgtttcgtggtagcgaatattcgtttcgttaaacgtttcgcggttttgattgttggtaattatttcgtttagcgtcgatttaatttgcgttagatcgttggaagtcgcgcgttttgttgtttaacgggtaatcgtcggttttattagatttcgtatttcgtttatggtattgataagtcgtgggtcgtagttattttttagtatttattgtagtacgttagtgtcgaggtaattttattggttacgcggtgattagttcggtatttatagtga

SEQ ID NO: 10190 - DNA, 710 bp, Artificial Sequence
  chemically treated genomic DNA (Homo sapiens) CpG-island No: 10190
tcactataaataccgaactaatcaccgcgtaaccaataaaattacctcgacactaacgtactacaataaatactaaaaaataactacgacccacgacttatcaataccataaacgaaatacgaaatctaataaaaccgacgattacccgttaaacaacaaaacgcgcgacttccaacgatctaacgcaaattaaatcgacgctaaacgaaataattaccaacaatcaaaaccgcgaaacgtttaacgaaacgaatattcgctaccacgaaacgatactacaatcgatacataacccgatattacaacaacttaacattacgatcaattcgctacaacgaacgatttttaaacgaacctaaataaacgataaaaccaacataccgcaaacgctccaaaaacataaaacgctattcgatacgatacgacatcaaaacgacgatacgacaaaacaaacgacgcttaccataatcgccaactcgacacgaaaattaaaaaaaatcacataacaactcgctacatcgcaattaactaaaaatcgaccaatctacgcgcctaactttatcaaaacgaccactacctaaaaaacaaacaatcaaaaacaaacgtcacgcgcctaaacgaaaaatctccgactacgatattaacaaaaatcaacgataccgaaaaacaacctaattaaacgcgataaaaaaactccaaatcgatcaaa

SEQ ID NO: 10191 - DNA, 710 bp, Artificial Sequence
  chemically treated genomic DNA (Homo sapiens) CpG-island No: 10191
ttattataggtatcgagttgattatcgcgtaattagtggaattatttcgatattgacgtattgtaatgggtgttggaaaatgattacgatttacggtttattagtgttatgagcgaagtgcgaaatttggtggaatcggcgattgttcgttgggtagtagagcgcgcgatttttagcgatttggcgtagattgaatcggcgttgaacgagatgattgttaataattaggatcgcgaagcgtttaacgaagcggatattcgttattacgaggcggtgttgtagtcggtgtataattcggtgttatagtaatttagtattgcgattagttcgttgtagcgggcggtttttgaacgaatttggatgggcgatgaggttaatatgtcgtaaacgttttaggaatataaggcgttgttcgatgcgatacgatattaggacggcgatgcggtagagtaggcggcgtttattatgatcgttagttcgatacgaaggttaaaggaaattatatgatagttcgttatatcgtaattgattggggatcgattaatttgcgcgtttggttttattagggcgattattgtttggagagtaggtaattagaagtaggcgttacgcgtttgaacggaaaattttcggttgcggtgttagtagaagttagcggtatcgagggatagtttagttgggcgcgataaagagattttaaatcggttaaa

SEQ ID NO: 10192 - DNA, 710 bp, Artificial Sequence
  chemically treated genomic DNA (Homo sapiens) CpG-island No: 10192
tttaaccgatttaaaatctctttatcgcgcccaactaaactatccctcgataccgctaacttctactaacaccgcaaccgaaaattttccgttcaaacgcgtaacgcctacttctaattacctactctccaaacaataatcgccctaataaaaccaaacgcgcaaattaatcgatccccaatcaattacgatataacgaactatcatataatttcctttaaccttcgtatcgaactaacgatcataataaacgccgcctactctaccgcatcgccgtcctaatatcgtatcgcatcgaacaacgccttatattcctaaaacgtttacgacatattaacctcatcgcccatccaaattcgttcaaaaaccgcccgctacaacgaactaatcgcaatactaaattactataacaccgaattatacaccgactacaacaccgcctcgtaataacgaatatccgcttcgttaaacgcttcgcgatcctaattattaacaatcatctcgttcaacgccgattcaatctacgccaaatcgctaaaaatcgcgcgctctactacccaacgaacaatcgccgattccaccaaatttcgcacttcgctcataacactaataaaccgtaaatcgtaatcattttccaacacccattacaatacgtcaatatcgaaataattccactaattacgcgataatcaactcgatacctataataa

SEQ ID NO: 10193 - DNA, 557 bp, Artificial Sequence
  chemically treated genomic DNA (Homo sapiens) CpG-island No: 10193
gttgttcgtgttcgtgaagcggcgcgtcgcgcgcgtgaaatgattcgtcgtaaaggtgcgttcgatttagcgggtttgtcgggtaaattggtagattgttaggaacgcgattcggcgtttttcgaattgtatttggtggaaggggatttcgcgggcggttttgcgaagtaggggcgtaatcgtaagaattaggcgattttgtcgttgaagggtaaaatttttaacgtcgagaaagcgcgtttcgataagatgttttttttttaggaagtggcgacgtttattatcgcgtttggttgtggtatcggtcgtgacgagtataattcggataaattgcgttattatagtattattattatgatcgatgcggacgtcgacggttcgtatattcgtacgttgttgttgatttttttttatcgttagatggtcggaaatcgttgaacgcggttacgtttatttcggttaggcggcgtttttaaagtgtttaaaggtagtcggaatcgttttttaagacgaaaaaagttttttttagtgtttagtttgaggttttttagaagatt

SEQ ID NO: 10194 - DNA, 557 bp, Artificial Sequence
  chemically treated genomic DNA (Homo sapiens) CpG-island No: 10194
aatcttctaaaaaacctcaaactaaacactaaaaaaaacttttttcgtcttaaaaaacgattccgactacctttaaacactttaaaaacgccgcctaaccgaaataaacgtaaccgcgttcaacgatttccgaccatctaacgataaaaaaaaatcaacaacaacgtacgaatatacgaaccgtcgacgtccgcatcgatcataataataatactataataacgcaatttatccgaattatactcgtcacgaccgataccacaaccaaacgcgataataaacgtcgccacttcctaaaaaaaaaacatcttatcgaaacgcgctttctcgacgttaaaaattttacccttcaacgacaaaatcgcctaattcttacgattacgcccctacttcgcaaaaccgcccgcgaaatccccttccaccaaatacaattcgaaaaacgccgaatcgcgttcctaacaatctaccaatttacccgacaaacccgctaaatcgaacgcacctttacgacgaatcatttcacgcgcgcgacgcgccgcttcacgaacacgaacaac

SEQ ID NO: 10195 - DNA, 557 bp, Artificial Sequence
  chemically treated genomic DNA (Homo sapiens) CpG-island No: 10195
aattttttaaaaggttttagattagatattgaggagaatttttttcgttttaagggacggtttcggttgtttttgggtattttgaaagcgtcgtttgatcgaaatagacgtgatcgcgtttaacgattttcggttatttgacgatagaagaaggttaatagtagcgtacgaatgtgcgagtcgtcgacgttcgtatcggttatgatgatgatgttgtgataacgtagtttgttcgggttgtattcgttacgatcgatattatagttaagcgcggtgataagcgtcgttattttttgagaagagagtattttatcgaagcgcgttttttcgacgttgaggattttattttttagcggtagaatcgtttggtttttgcggttacgtttttgtttcgtagagtcgttcgcggagtttttttttattaggtatagttcggaaagcgtcggatcgcgtttttggtagtttgttagtttgttcggtaggttcgttaagtcgagcgtatttttacggcgggttattttacgcgcgcgacgcgtcgttttacgggtacgggtagt

SEQ ID NO: 10196 - DNA, 557 bp, Artificial Sequence
  chemically treated genomic DNA (Homo sapiens) CpG-island No: 10196
actacccgtacccgtaaaacgacgcgtcgcgcgcgtaaaataacccgccgtaaaaatacgctcgacttaacgaacctaccgaacaaactaacaaactaccaaaaacgcgatccgacgctttccgaactatacctaataaaaaaaaactccgcgaacgactctacgaaacaaaaacgtaaccgcaaaaaccaaacgattctaccgctaaaaaataaaatcctcaacgtcgaaaaaacgcgcttcgataaaatactctcttctcaaaaaataacgacgcttatcaccgcgcttaactataatatcgatcgtaacgaatacaacccgaacaaactacgttatcacaacatcatcatcataaccgatacgaacgtcgacgactcgcacattcgtacgctactattaaccttcttctatcgtcaaataaccgaaaatcgttaaacgcgatcacgtctatttcgatcaaacgacgctttcaaaatacccaaaaacaaccgaaaccgtcccttaaaacgaaaaaaattctcctcaatatctaatctaaaaccttttaaaaaatt

SEQ ID NO: 10197 - DNA, 766 bp, Artificial Sequence
  chemically treated genomic DNA (Homo sapiens) CpG-island No: 10197
tacgttgtgttgatttatttttttttttttcgagtgtggtgtatttaattattcgttgttttatatttttaaagtatttttatgagtttattatcggcggaatattaatattattcgcgatcgttagataattgcgtatttcgtgttgcgggcgtttaagcgttaaacgttggtttgtttttatcggtaatcgttagtcggtttagacggtattattatttagtcgcgtttcgtaatcggtattcgttagagtaaattatttattagtttcgaatttaatagttaattgatcgagcgtgatttttagcgcgggggtattggcgttattatttattagtaggttagtaatgcgtaacgcgggtatatttagtgcgtcgtagtggttgatattcgattggcgaaaatcgtgacgatcgttattttgtatagtggtatatatgttcgtacgaataatttttagtatattttttttttttgcggtataaagcgtacgttgtttttcggacgtaataagatgggttcgttacgcgtcggattaaataggttgagtgaggtatgattaattaattgttagttattcggcgttgttagcggataaatattagtttgcggttcgtcgatttcgatagaatttgtcggaacgagtaagcgcggtttagcgcgtcgtggcgtgtgtagttgtttcggtaaattttcgagatacgggaagttcggttgaaaatttaaaaattagattacgtattttacggaggagtgtaatttaata

SEQ ID NO: 10198 - DNA, 766 bp, Artificial Sequence
  chemically treated genomic DNA (Homo sapiens) CpG-island No: 10198
tattaaattacactcctccgtaaaatacgtaatctaatttttaaattttcaaccgaacttcccgtatctcgaaaatttaccgaaacaactacacacgccacgacgcgctaaaccgcgcttactcgttccgacaaattctatcgaaatcgacgaaccgcaaactaatatttatccgctaacaacgccgaataactaacaattaattaatcatacctcactcaacctatttaatccgacgcgtaacgaacccatcttattacgtccgaaaaacaacgtacgctttataccgcaaaaaaaaaaaatatactaaaaattattcgtacgaacatatataccactatacaaaataacgatcgtcacgattttcgccaatcgaatatcaaccactacgacgcactaaatatacccgcgttacgcattactaacctactaataaataataacgccaatacccccgcgctaaaaatcacgctcgatcaattaactattaaattcgaaactaataaataatttactctaacgaataccgattacgaaacgcgactaaataataataccgtctaaaccgactaacgattaccgataaaaacaaaccaacgtttaacgcttaaacgcccgcaacacgaaatacgcaattatctaacgatcgcgaataatattaatattccgccgataataaactcataaaaatactttaaaaatataaaacaacgaataattaaatacaccacactcgaaaaaaaaaaaaataaatcaacacaacgta

SEQ ID NO: 10199 - DNA, 766 bp, Artificial Sequence
  chemically treated genomic DNA (Homo sapiens) CpG-island No: 10199
tgttgaattgtattttttcgtggaatacgtggtttggtttttaggtttttaatcgggtttttcgtatttcgggagtttgtcggaataattatatacgttacggcgcgttgaatcgcgtttattcgtttcggtaggttttgtcgggatcggcgggtcgtagattggtgtttattcgttggtaacgtcgggtggttggtagttgattggttatattttatttagtttgtttgattcggcgcgtgacgaatttattttattacgttcgggagatagcgtgcgttttgtatcgtagaaggagggagtatgttgaagattattcgtgcgggtatgtatattattgtgtaggatggcggtcgttacggttttcgttagtcgggtattagttattgcggcgtattggatatgttcgcgttacgtattgttaatttattggtgggtaatgacgttaatgttttcgcgttggagattacgttcggttagttaattgttgagttcgaaattgatgggtggtttgttttgacgggtgtcggttgcgaagcgcggttggatgataatgtcgtttggatcggttggcgattgtcgatgaaagtaggttagcgtttaacgtttaaacgttcgtagtacgggatgcgtagttatttggcggtcgcgggtggtattgatgtttcgtcggtaatgggtttataggagtgttttaaagatgtgagatagcgggtggttaggtgtattatattcggggaaaagaagggtgggttaatataacgtg

SEQ ID NO: 10200 - DNA, 766 bp, Artificial Sequence
  chemically treated genomic DNA (Homo sapiens) CpG-island No: 10200
cacgttatattaacccacccttcttttccccgaatataatacacctaaccacccgctatctcacatctttaaaacactcctataaacccattaccgacgaaacatcaataccacccgcgaccgccaaataactacgcatcccgtactacgaacgtttaaacgttaaacgctaacctactttcatcgacaatcgccaaccgatccaaacgacattatcatccaaccgcgcttcgcaaccgacacccgtcaaaacaaaccacccatcaatttcgaactcaacaattaactaaccgaacgtaatctccaacgcgaaaacattaacgtcattacccaccaataaattaacaatacgtaacgcgaacatatccaatacgccgcaataactaatacccgactaacgaaaaccgtaacgaccgccatcctacacaataatatacatacccgcacgaataatcttcaacatactccctccttctacgatacaaaacgcacgctatctcccgaacgtaataaaataaattcgtcacgcgccgaatcaaacaaactaaataaaatataaccaatcaactaccaaccacccgacgttaccaacgaataaacaccaatctacgacccgccgatcccgacaaaacctaccgaaacgaataaacgcgattcaacgcgccgtaacgtatataattattccgacaaactcccgaaatacgaaaaacccgattaaaaacctaaaaaccaaaccacgtattccacgaaaaaatacaattcaaca

SEQ ID NO: 10201 - DNA, 565 bp, Artificial Sequence
  chemically treated genomic DNA (Homo sapiens) CpG-island No: 10201
tcgtacggttagggtcgcggcgaaacggagtttattttaagtgcgtcgcgtttggtcgcgttttgtagttcgacgaggttgaggatggagaggggagacgtagggagaagagggacgcgggatttggatttaagaggtcgtttcgttgtcggtttggcggcggcgtcgattcgggttcgcgcgttttatataagttttttgtttgtttttgtatatttggtggataaatcgggcgtttaggttatatcgtttttttttttcgcgggggcgcgggggatgttttttttcggttgttagggtgtgttttttgggtgaagagaaagtttttcggtaggcggagggaaatatttttcgcgcgttagcgaagggggaagacggtgtggtttggacgcgcggtttgtttattaggtgtgtagaggtagataggatatttgtgtggaacgcgcgaattcgagtcggcgtcgtagttagatcggtaacggagcggttttttgggtttaagtttcgcgttttttttttttttgcgttttttttttttatttttagtttcgtcgggttataggat

SEQ ID NO: 10202 - DNA, 565 bp, Artificial Sequence
  chemically treated genomic DNA (Homo sapiens) CpG-island No: 10202
atcctataacccgacgaaactaaaaataaaaaaaaaaaacgcaaaaaaaaaaaaaacgcgaaacttaaacccaaaaaaccgctccgttaccgatctaactacgacgccgactcgaattcgcgcgttccacacaaatatcctatctacctctacacacctaataaacaaaccgcgcgtccaaaccacaccgtcttcccccttcgctaacgcgcgaaaaatatttccctccgcctaccgaaaaactttctcttcacccaaaaaacacaccctaacaaccgaaaaaaaacatcccccgcgcccccgcgaaaaaaaaaaacgatataacctaaacgcccgatttatccaccaaatatacaaaaacaaacaaaaaacttatataaaacgcgcgaacccgaatcgacgccgccgccaaaccgacaacgaaacgacctcttaaatccaaatcccgcgtccctcttctccctacgtctcccctctccatcctcaacctcgtcgaactacaaaacgcgaccaaacgcgacgcacttaaaataaactccgtttcgccgcgaccctaaccgtacga

SEQ ID NO: 10203 - DNA, 565 bp, Artificial Sequence
  chemically treated genomic DNA (Homo sapiens) CpG-island No: 10203
gttttgtagttcgacgaggttgaggatggagaggggagacgtagggagaagagggacgcgggatttggatttaagaggtcgtttcgttgtcggtttggttgcggcgtcgattcgggttcgcgcgttttatataagtgttttgtttgtttttgtatatttggtggataaatcgcgcgtttaggttatatcgtttttttttttcgttggcgcgcggaggatgttttttttcgtttgtcgaggggttttttttttatttagaaagtatattttggtagtcggagggaaatatttttcgcgttttcgcgaagggggaagacggtgtggtttggacgttcggtttgtttattaggtgtgtagaggtagataggaaatttgtgtggaacgcgcgaattcgagtcggcgtcgtcgttagatcggtaacggagcggttttttgggtttaagtttcgcgttttttttttttttgcgttttttttttttatttttagtttcgtcgggttataggacgcggttaggcgcggcgtatttgagatgggtttcgtttcgtcgcggttttggtcgtgcgg

SEQ ID NO: 10204 - DNA, 565 bp, Artificial Sequence
  chemically treated genomic DNA (Homo sapiens) CpG-island No: 10204
ccgcacgaccaaaaccgcgacgaaacgaaacccatctcaaatacgccgcgcctaaccgcgtcctataacccgacgaaactaaaaataaaaaaaaaaaacgcaaaaaaaaaaaaaacgcgaaacttaaacccaaaaaaccgctccgttaccgatctaacgacgacgccgactcgaattcgcgcgttccacacaaatttcctatctacctctacacacctaataaacaaaccgaacgtccaaaccacaccgtcttcccccttcgcgaaaacgcgaaaaatatttccctccgactaccaaaatatactttctaaataaaaaaaaaacccctcgacaaacgaaaaaaaacatcctccgcgcgccaacgaaaaaaaaaaacgatataacctaaacgcgcgatttatccaccaaatatacaaaaacaaacaaaacacttatataaaacgcgcgaacccgaatcgacgccgcaaccaaaccgacaacgaaacgacctcttaaatccaaatcccgcgtccctcttctccctacgtctcccctctccatcctcaacctcgtcgaactacaaaac

SEQ ID NO: 10205 - DNA, 719 bp, Artificial Sequence
  chemically treated genomic DNA (Homo sapiens) CpG-island No: 10205
ttcgagaattcgcggcgtcgattgcgtttgtttttttcgagttggcgattttttcgcgggatttgttttcgtttaaagtttgtataattgaaagagttcgtagagttcggtcgtttttcgtttttttaagggcggcgaggtcggttattggtagacgatcggttattatttagtaggggtttacgggaattcgtatttggagtcgggggtgttacgttacgtcggtttagtggttcgcggagagcgttcgggtgtatttttgttaaagatgttttttggaggtttcggtcgcgcgggattcgggggagaggtcgtttttttttcgttgttattagcgtttaggtcgtcggtttttttttcgttgtttaaatagtagaaaagtaggcgttaagttgtttttgttaaaaaggggatatatttcggtcgcgaaattgtaaattcggtgttagatagttgtaaattcgtgtcgataggttgttagatagttgcgggggttggtcgggaaggagtttacggttttcgggtttatatttcgtcgtttcgacgcgcgcgtttatcgcgagagtagttggtcgggtcggtacggggtattacgtgttcgcgggaggggcgggagcggtcggcgagggcgggcgggaggtagggagggggcgggaggggagttaggggcggggtttgcgtttaaggggatgttaattaaagtattaattttaaattgt

SEQ ID NO: 10206 - DNA, 719 bp, Artificial Sequence
  chemically treated genomic DNA (Homo sapiens) CpG-island No: 10206
acaatttaaaattaatactttaattaacatccccttaaacgcaaaccccgcccctaactcccctcccgccccctccctacctcccgcccgccctcgccgaccgctcccgcccctcccgcgaacacgtaataccccgtaccgacccgaccaactactctcgcgataaacgcgcgcgtcgaaacgacgaaatataaacccgaaaaccgtaaactccttcccgaccaacccccgcaactatctaacaacctatcgacacgaatttacaactatctaacaccgaatttacaatttcgcgaccgaaatatatcccctttttaacaaaaacaacttaacgcctacttttctactatttaaacaacgaaaaaaaaaccgacgacctaaacgctaataacaacgaaaaaaaaacgacctctcccccgaatcccgcgcgaccgaaacctccaaaaaacatctttaacaaaaatacacccgaacgctctccgcgaaccactaaaccgacgtaacgtaacacccccgactccaaatacgaattcccgtaaacccctactaaataataaccgatcgtctaccaataaccgacctcgccgcccttaaaaaaacgaaaaacgaccgaactctacgaactctttcaattatacaaactttaaacgaaaacaaatcccgcgaaaaaatcgccaactcgaaaaaaacaaacgcaatcgacgccgcgaattctcgaa

SEQ ID NO: 10207 - DNA, 719 bp, Artificial Sequence
  chemically treated genomic DNA (Homo sapiens) CpG-island No: 10207
ataatttgaagttgatgttttgattggtatttttttgagcgtaggtttcgtttttggtttttttttcgttttttttttgtttttcgttcgttttcgtcggtcgttttcgtttttttcgcgagtacgtggtgtttcgtgtcggttcggttagttattttcgcggtgggcgcgcgcgtcggggcggcggggtgtgggttcggaggtcgtgggttttttttcgattagttttcgtagttgtttgataatttgtcgatacgggtttatagttgtttgatatcgggtttgtagtttcgcggtcgaggtgtgttttttttttaataaaaataatttggcgtttgtttttttattgtttgggtagcggggaaggggtcggcggtttggacgttggtgatagcgaggggggagcggtttttttttcgagtttcgcgcggtcggggtttttaggggatatttttggtagaagtgtattcggacgtttttcgcgagttattgaatcggcgtggcgtgatattttcgattttagatgcgggttttcgtgggtttttattgggtagtaatcgatcgtttgttaatgatcggtttcgtcgtttttggggaagcggggagcggtcgagttttgcgggtttttttaattgtgtaaattttgagcgagggtaaatttcgcggagaagtcgttagttcgggggaagtaggcgtagtcggcgtcgcgggttttcgga

SEQ ID NO: 10208 - DNA, 719 bp, Artificial Sequence
  chemically treated genomic DNA (Homo sapiens) CpG-island No: 10208
tccgaaaacccgcgacgccgactacgcctacttcccccgaactaacgacttctccgcgaaatttaccctcgctcaaaatttacacaattaaaaaaacccgcaaaactcgaccgctccccgcttccccaaaaacgacgaaaccgatcattaacaaacgatcgattactacccaataaaaacccacgaaaacccgcatctaaaatcgaaaatatcacgccacgccgattcaataactcgcgaaaaacgtccgaatacacttctaccaaaaatatcccctaaaaaccccgaccgcgcgaaactcgaaaaaaaaaccgctcccccctcgctatcaccaacgtccaaaccgccgaccccttccccgctacccaaacaataaaaaaacaaacgccaaattatttttattaaaaaaaaaacacacctcgaccgcgaaactacaaacccgatatcaaacaactataaacccgtatcgacaaattatcaaacaactacgaaaactaatcgaaaaaaaacccacgacctccgaacccacaccccgccgccccgacgcgcgcgcccaccgcgaaaataactaaccgaaccgacacgaaacaccacgtactcgcgaaaaaaacgaaaacgaccgacgaaaacgaacgaaaaacaaaaaaaaaacgaaaaaaaaaccaaaaacgaaacctacgctcaaaaaaataccaatcaaaacatcaacttcaaattat

SEQ ID NO: 10209 - DNA, 1042 bp, Artificial Sequence
  chemically treated genomic DNA (Homo sapiens) CpG-island No: 10209
tcgagcggagggcggtcgtcgtagtcggcgcgcgattgcggattcgggcgtagtcgggagtcgggcgtttgcgagtatcgggtagaggagtcgcgatcggtttttatttttcggttcgtttcgagcgcgttcggtcggtcgttcgtttttttttagatttttcgcggcgttttttgtaatttttttcggtcggttttcgttttttttttcgcgtttttaatattcgttcgttgcggcggtcgtcgagttcgcggatatgtttttttcgtagttgggttattcgtagtatttgagcgtcgcggggtcgggcgtttacggcggcgagcgttcgggggtgttggtcgcggtcgttgcggcggttgtcgtcgtttcgtcgggtcgatcgggggtcgcggagttgggcggcggggtaggcgcggttgtagttatttcggtgttgggtatgtacgcggcggcggggtcgtacgcgggcgcgtttaattatagcgtttttttgttttacgtcgcggattttagttttttttcgtagatggtgagtgcgttcggtttttttcgttttttttttgttttattcgcgttagggtaagggtggcgggtcgttcgggagggagagattacgggtggatttggttcggaagaggaattagaaaggttcgggggtaggttttcggtggtcgaggtcgcggttttcggggacgtaagagggttgggaggtcgggcgggtgacggttgggttatttcggtttgggaaagcggaaggttcgggttagggagcgggtagcgagtgaatttagagaggtcgtagaagtaggttcgtggagcggtgttcgcgttggaggtcgggggtaaattcgtttggttcggttaggggcgttcgggtaggtttacggggtttttgtaggtcggttcggcgtagcgtagtaggatttttttttttggtcgcgggttttattcgcgcggtttttttagttttcgaatcgagtttggaaaatttggttttttttttttttagtagtttcgagatagttgtattcgagtttgt

SEQ ID NO: 10210 - DNA, 1042 bp, Artificial Sequence
  chemically treated genomic DNA (Homo sapiens) CpG-island No: 10210
acaaactcgaatacaactatctcgaaactactaaaaaaaaaaaaaaccaaattttccaaactcgattcgaaaactaaaaaaaccgcgcgaataaaacccgcgaccaaaaaaaaaaatcctactacgctacgccgaaccgacctacaaaaaccccgtaaacctacccgaacgcccctaaccgaaccaaacgaatttacccccgacctccaacgcgaacaccgctccacgaacctacttctacgacctctctaaattcactcgctacccgctccctaacccgaaccttccgctttcccaaaccgaaataacccaaccgtcacccgcccgacctcccaaccctcttacgtccccgaaaaccgcgacctcgaccaccgaaaacctacccccgaacctttctaattcctcttccgaaccaaatccacccgtaatctctccctcccgaacgacccgccacccttaccctaacgcgaataaaacaaaaaaaaaacgaaaaaaaccgaacgcactcaccatctacgaaaaaaaactaaaatccgcgacgtaaaacaaaaaaacgctataattaaacgcgcccgcgtacgaccccgccgccgcgtacatacccaacaccgaaataactacaaccgcgcctaccccgccgcccaactccgcgacccccgatcgacccgacgaaacgacgacaaccgccgcaacgaccgcgaccaacacccccgaacgctcgccgccgtaaacgcccgaccccgcgacgctcaaatactacgaataacccaactacgaaaaaaacatatccgcgaactcgacgaccgccgcaacgaacgaatattaaaaacgcgaaaaaaaaaacgaaaaccgaccgaaaaaaattacaaaaaacgccgcgaaaaatctaaaaaaaaacgaacgaccgaccgaacgcgctcgaaacgaaccgaaaaataaaaaccgatcgcgactcctctacccgatactcgcaaacgcccgactcccgactacgcccgaatccgcaatcgcgcgccgactacgacgaccgccctccgctcga

SEQ ID NO: 10211 - DNA, 1042 bp, Artificial Sequence
  chemically treated genomic DNA (Homo sapiens) CpG-island No: 10211
gtaaattcggatataattatttcggagttgttaaagagggagaaaattaagttttttagattcggttcgaaaattaaagaggtcgcgcgagtggaattcgcggttaggaagggaagttttgttacgttacgtcgggtcgatttgtaggaatttcgtgggtttgttcgggcgtttttggtcgagttaggcgagtttgttttcgatttttagcgcgggtatcgttttacgggtttgtttttgcggtttttttgaatttattcgttattcgttttttggttcgggtttttcgtttttttaggtcgagatggtttagtcgttattcgttcggttttttagtttttttgcgttttcgggggtcgcggtttcggttatcgggaatttgttttcggatttttttagtttttttttcggattaggtttattcgtagtttttttttttcgggcgattcgttatttttgttttggcgcgggtgagatagaggagaagcgggggaggtcgggcgtatttattatttgcgagaagaggttgagattcgcggcgtagggtaggaaggcgttgtagttgggcgcgttcgcgtacggtttcgtcgtcgcgtatatgtttagtatcgaggtgattgtagtcgcgtttgtttcgtcgtttagtttcgcggttttcggtcggttcgacgaggcggcggtagtcgtcgtagcggtcgcggttagtattttcgggcgttcgtcgtcgtaggcgttcggtttcgcggcgtttaggtattgcgggtagtttagttgcgggaaggatatgttcgcggattcggcgatcgtcgtagcgggcgagtattaaaggcgcggggagggaggcggaggtcggtcggagggggttgtagggggcgtcgcgaggggtttagggaggagcgggcggtcggtcgggcgcgttcggggcgggtcgggagatggaggtcggtcgcggtttttttgttcggtgttcgtaggcgttcggttttcggttgcgttcggattcgtaatcgcgcgtcgattgcggcggtcgtttttcgttcgg

SEQ ID NO: 10212 - DNA, 1042 bp, Artificial Sequence
  chemically treated genomic DNA (Homo sapiens) CpG-island No: 10212
ccgaacgaaaaacgaccgccgcaatcgacgcgcgattacgaatccgaacgcaaccgaaaaccgaacgcctacgaacaccgaacaaaaaaaccgcgaccgacctccatctcccgacccgccccgaacgcgcccgaccgaccgcccgctcctccctaaacccctcgcgacgccccctacaaccccctccgaccgacctccgcctccctccccgcgcctttaatactcgcccgctacgacgatcgccgaatccgcgaacatatccttcccgcaactaaactacccgcaatacctaaacgccgcgaaaccgaacgcctacgacgacgaacgcccgaaaatactaaccgcgaccgctacgacgactaccgccgcctcgtcgaaccgaccgaaaaccgcgaaactaaacgacgaaacaaacgcgactacaatcacctcgatactaaacatatacgcgacgacgaaaccgtacgcgaacgcgcccaactacaacgccttcctaccctacgccgcgaatctcaacctcttctcgcaaataataaatacgcccgacctcccccgcttctcctctatctcacccgcgccaaaacaaaaataacgaatcgcccgaaaaaaaaaaactacgaataaacctaatccgaaaaaaaaactaaaaaaatccgaaaacaaattcccgataaccgaaaccgcgacccccgaaaacgcaaaaaaactaaaaaaccgaacgaataacgactaaaccatctcgacctaaaaaaacgaaaaacccgaaccaaaaaacgaataacgaataaattcaaaaaaaccgcaaaaacaaacccgtaaaacgatacccgcgctaaaaatcgaaaacaaactcgcctaactcgaccaaaaacgcccgaacaaacccacgaaattcctacaaatcgacccgacgtaacgtaacaaaacttcccttcctaaccgcgaattccactcgcgcgacctctttaattttcgaaccgaatctaaaaaacttaattttctccctctttaacaactccgaaataattatatccgaatttac

SEQ ID NO: 10213 - DNA, 668 bp, Artificial Sequence
  chemically treated genomic DNA (Homo sapiens) CpG-island No: 10213
gttttaacgcgagttttttttttttttggaatttttgaaaagatattagcgtttcgattttttttttcgtttcggttatgtacggagtttttacgcgtagtattggcgttagtgggtttcgagtaagtcgggaagggcgggttataggttgggggtgcgagcggaggacggtcgttttgatttcgggattcggttttgatttcgggattcggttttgtttttattagatcgtttttttcggtagtttatattttcgttggtagttttggaaatgtttgttggtttagtttttacgtatttaacgttgagtcgtttgcgttttgaaggtttcgcgtcgggttcgtaaagttttttgaaggtgtttgttgcggcgcgtggcgcgcgtttcgtttcgaatttattgatgttgatgtttcggattcgtagcgatgtttaggtttttaggtttttttttattcgcgcgcgttcgaggttagtttcgttgcgagtgttttttaatatcgttgtttttagttgttttttcgttgttcggtcgcggttatttaagggtaatttgttttggattttcgcggtgcgcgcgtttgagggtaaaggacgtagttcgtggagtttaagtgtaaaggggtttttttgggagattaaagttattttttttttttcgtttttta

SEQ ID NO: 10214 - DNA, 668 bp, Artificial Sequence
  chemically treated genomic DNA (Homo sapiens) CpG-island No: 10214
taaaaaacgaaaaaaaaaaaataactttaatctcccaaaaaaacccctttacacttaaactccacgaactacgtcctttaccctcaaacgcgcgcaccgcgaaaatccaaaacaaattacccttaaataaccgcgaccgaacaacgaaaaaacaactaaaaacaacgatattaaaaaacactcgcaacgaaactaacctcgaacgcgcgcgaataaaaaaaaacctaaaaacctaaacatcgctacgaatccgaaacatcaacatcaataaattcgaaacgaaacgcgcgccacgcgccgcaacaaacaccttcaaaaaactttacgaacccgacgcgaaaccttcaaaacgcaaacgactcaacgttaaatacgtaaaaactaaaccaacaaacatttccaaaactaccaacgaaaatataaactaccgaaaaaaacgatctaataaaaacaaaaccgaatcccgaaatcaaaaccgaatcccgaaatcaaaacgaccgtcctccgctcgcacccccaacctataacccgcccttcccgacttactcgaaacccactaacgccaatactacgcgtaaaaactccgtacataaccgaaacgaaaaaaaaaatcgaaacgctaatatcttttcaaaaattccaaaaaaaaaaaaaactcgcgttaaaac

SEQ ID NO: 10215 - DNA, 668 bp, Artificial Sequence
  chemically treated genomic DNA (Homo sapiens) CpG-island No: 10215
tgggaagcgagaaagaggaggtggttttggttttttagggaagtttttttatatttgggttttacggattgcgttttttgtttttaggcgcgcgtatcgcgggagtttagagtaaattgtttttagatggtcgcggtcgggtagcggggaggtagttgggagtagcgatgttgggaaatattcgtagcggggttggtttcgggcgcgcgcgagtggggaaaggtttaggagtttggatatcgttgcggattcgggatattagtattagtgggttcggagcgggacgcgcgttacgcgtcgtagtaggtatttttaggaggttttgcggattcggcgcggggtttttagggcgtaggcgatttagcgttgaatgcgtgaaaattgagttagtaaatatttttaaaattgttagcgaggatgtgggttgtcgggaaaaacggtttagtggggatagggtcgagtttcgaagttagagtcgagtttcgaggttagagcggtcgtttttcgttcgtatttttagtttgtgattcgtttttttcggtttgttcgagatttattggcgttagtgttgcgcgtggggatttcgtgtatggtcgaagcgagggggaaagtcggggcgttggtgtttttttagaggttttaggaaagagggaggttcgcgttaggat

SEQ ID NO: 10216 - DNA, 668 bp, Artificial Sequence
  chemically treated genomic DNA (Homo sapiens) CpG-island No: 10216
atcctaacgcgaacctccctctttcctaaaacctctaaaaaaacaccaacgccccgactttccccctcgcttcgaccatacacgaaatccccacgcgcaacactaacgccaataaatctcgaacaaaccgaaaaaaacgaatcacaaactaaaaatacgaacgaaaaacgaccgctctaacctcgaaactcgactctaacttcgaaactcgaccctatccccactaaaccgtttttcccgacaacccacatcctcgctaacaattttaaaaatatttactaactcaattttcacgcattcaacgctaaatcgcctacgccctaaaaaccccgcgccgaatccgcaaaacctcctaaaaatacctactacgacgcgtaacgcgcgtcccgctccgaacccactaatactaatatcccgaatccgcaacgatatccaaactcctaaacctttccccactcgcgcgcgcccgaaaccaaccccgctacgaatatttcccaacatcgctactcccaactacctccccgctacccgaccgcgaccatctaaaaacaatttactctaaactcccgcgatacgcgcgcctaaaaacaaaaaacgcaatccgtaaaacccaaatataaaaaaacttccctaaaaaaccaaaaccacctcctctttctcgcttccca

SEQ ID NO: 10217 - DNA, 1343 bp, Artificial Sequence
  chemically treated genomic DNA (Homo sapiens) CpG-island No: 10217
ggatcggagcgatatagggataggtagcgagaacgacggatgagttttgagaagcgattaggaggagagatggggaggatcgggaatagtagcgtttcggtggggttgcgtagaggtcgggagaggggatgagaggaggatggaggaaaggggagggcgaggttgttaggatcggagcgggtagagatggggaagaggtgtatcgggaagagggacggcggtaggggtaggggttagggatgcgagttgaagggtcgggcgggcgggaggatagggaaggaaagatagaaagggatgggggaagggagacgatggagaaggaggtgaggaggttggagaggaggtgagatagcggcggaggtagggacgtagggtcggggaagaagagatggagacgggatcgcggcgtttgtcgtagcgcgggtttcgcggatattcgtcgtcgtcgtttcggagtagtttggtggaaagcgcgtttcgtcggggttttttcggtatttatttgggggttttagtttcggattttgtgtttcgcgtcggattttttttttcgttttgtttttgcgattttagcgttttcgaatttcgttagtttttgtaggtttcgttagtagtatttttatttcgtgggacgttcggggttacgttttttttagtttttgattggttattgtttacgttagttatattattattggttgaggggtcgtcggatatgtaaattaggatgggttcgtcgtcgtatcgattggttggcgttcgtaaagcgtagttttcgatttgggttttgattggtttcgcggttttgacggcgatagtgacgcgaggcgggtttttggattgagtgtgcggcgcggtgcgtcgtttttcgaggtttttttcgcgggtggtagcggacggggcgcgtttttcggttagttttcggtttttaggtttgtggtttcgttgagtatcggtcgtcgggtttttgggttcgtcgagtggagattttttgaaaagcgtgggtttcgtggttttcggcgcggtcgcggcgggtcggttttttaggtaacgcggttcgcggcgggcggaattatgtgggtcggcgtcgcgggggaggttggacgcggtttcgaggtatagggggttttagtgttggttagagtttcggggttcgggggtagggtggtttacgtcgtttttgcgtgggggttcggtgtttggggtgcggcggtggcgcgcggcgggggttgttttcgcgttagtcgtaggcgttttttttcgtcgggatatttggggtcggggtcgttgggtgtcgtttggttacgtgggtttttttttgtttttgttttttgttttttgtt

SEQ ID NO: 10218 - DNA, 1343 bp, Artificial Sequence
  chemically treated genomic DNA (Homo sapiens) CpG-island No: 10218
aacaaaaaacaaaaaacaaaaacaaaaaaaaacccacgtaaccaaacgacacccaacgaccccgaccccaaatatcccgacgaaaaaaaacgcctacgactaacgcgaaaacaacccccgccgcgcgccaccgccgcaccccaaacaccgaacccccacgcaaaaacgacgtaaaccaccctacccccgaaccccgaaactctaaccaacactaaaaccccctatacctcgaaaccgcgtccaacctcccccgcgacgccgacccacataattccgcccgccgcgaaccgcgttacctaaaaaaccgacccgccgcgaccgcgccgaaaaccacgaaacccacgcttttcaaaaaatctccactcgacgaacccaaaaacccgacgaccgatactcaacgaaaccacaaacctaaaaaccgaaaactaaccgaaaaacgcgccccgtccgctaccacccgcgaaaaaaacctcgaaaaacgacgcaccgcgccgcacactcaatccaaaaacccgcctcgcgtcactatcgccgtcaaaaccgcgaaaccaatcaaaacccaaatcgaaaactacgctttacgaacgccaaccaatcgatacgacgacgaacccatcctaatttacatatccgacgacccctcaaccaataataatataactaacgtaaacaataaccaatcaaaaactaaaaaaaacgtaaccccgaacgtcccacgaaataaaaatactactaacgaaacctacaaaaactaacgaaattcgaaaacgctaaaatcgcaaaaacaaaacgaaaaaaaaaatccgacgcgaaacacaaaatccgaaactaaaacccccaaataaataccgaaaaaaccccgacgaaacgcgctttccaccaaactactccgaaacgacgacgacgaatatccgcgaaacccgcgctacgacaaacgccgcgatcccgtctccatctcttcttccccgaccctacgtccctacctccgccgctatctcacctcctctccaacctcctcacctccttctccatcgtctcccttcccccatccctttctatctttccttccctatcctcccgcccgcccgacccttcaactcgcatccctaacccctacccctaccgccgtccctcttcccgatacacctcttccccatctctacccgctccgatcctaacaacctcgccctcccctttcctccatcctcctctcatcccctctcccgacctctacgcaaccccaccgaaacgctactattcccgatcctccccatctctcctcctaatcgcttctcaaaactcatccgtcgttctcgctacctatccctatatcgctccgatcc

SEQ ID NO: 10219 - DNA, 1343 bp, Artificial Sequence
  chemically treated genomic DNA (Homo sapiens) CpG-island No: 10219
ggtagggggtaaagggtaagggtagaaaggaatttacgtagttaaacggtatttagcggtttcgattttaagtgtttcgacgaggggggacgtttgcgattaacgcggggatagttttcgtcgcgcgttatcgtcgtattttaggtatcgggtttttacgtagggacggcgtggattattttattttcgaatttcgaggttttggttaatattgaggttttttgtgtttcgaggtcgcgtttaatttttttcgcggcgtcggtttatatggtttcgttcgtcgcgggtcgcgttatttaggagatcgattcgtcgcggtcgcgtcggaggttacggagtttacgttttttagagagtttttattcgacggatttagaggttcggcggtcggtgtttaacggagttataagtttgaggatcgaggattggtcgaggggcgcgtttcgttcgttgttattcgcgggaggagtttcggaaggcggcgtatcgcgtcgtatatttagtttaagaattcgtttcgcgttattgtcgtcgttagggtcgcggagttaattagagtttaagtcgagggttgcgttttgcgagcgttagttaatcggtgcggcggcgggtttattttgatttgtatgttcgacgattttttaattaatggtaatgtgattggcgtgaataatagttaattagaagttggaagaggcgtggtttcgggcgttttacgaggtgaagatgttgttggcggaatttgtaggagttagcgggattcgggggcgttaaagtcgtaggggtagggcgggaaggaagattcggcgcggggtataggattcggagttggagtttttaggtgagtatcggggagatttcggcggggcgcgttttttattaagttgtttcgggacggcggcggcgggtattcgcgaggttcgcgttgcggtaggcgtcgcggtttcgtttttattttttttttttcggttttgcgtttttgttttcgtcgttgttttattttttttttagtttttttatttttttttttatcgtttttttttttttatttttttttgtttttttttttttgttttttcgttcgttcgattttttagttcgtatttttgatttttgtttttgtcgtcgttttttttttcggtgtattttttttttatttttgttcgtttcggttttagtagtttcgttttttttttttttttattttttttttattttttttttcggtttttgcgtagttttatcggggcgttgttgttttcggttttttttatttttttttttgatcgttttttaaggtttattcgtcgttttcgttgtttgtttttgtgtcgtttcggttt

SEQ ID NO: 10220 - DNA, 1343 bp, Artificial Sequence
  chemically treated genomic DNA (Homo sapiens) CpG-island No: 10220
aaaccgaaacgacacaaaaacaaacaacgaaaacgacgaataaaccttaaaaaacgatcaaaaaaaaaaataaaaaaaaccgaaaacaacaacgccccgataaaactacgcaaaaaccgaaaaaaaaaataaaaaaaaaataaaaaaaaaaaaaaaacgaaactactaaaaccgaaacgaacaaaaataaaaaaaaaatacaccgaaaaaaaaaacgacgacaaaaacaaaaatcaaaaatacgaactaaaaaatcgaacgaacgaaaaaacaaaaaaaaaaaaacaaaaaaaaataaaaaaaaaaaaacgataaaaaaaaaaataaaaaaactaaaaaaaaaataaaacaacgacgaaaacaaaaacgcaaaaccgaaaaaaaaaaaataaaaacgaaaccgcgacgcctaccgcaacgcgaacctcgcgaatacccgccgccgccgtcccgaaacaacttaataaaaaacgcgccccgccgaaatctccccgatactcacctaaaaactccaactccgaatcctataccccgcgccgaatcttccttcccgccctacccctacgactttaacgcccccgaatcccgctaactcctacaaattccgccaacaacatcttcacctcgtaaaacgcccgaaaccacgcctcttccaacttctaattaactattattcacgccaatcacattaccattaattaaaaaatcgtcgaacatacaaatcaaaataaacccgccgccgcaccgattaactaacgctcgcaaaacgcaaccctcgacttaaactctaattaactccgcgaccctaacgacgacaataacgcgaaacgaattcttaaactaaatatacgacgcgatacgccgccttccgaaactcctcccgcgaataacaacgaacgaaacgcgcccctcgaccaatcctcgatcctcaaacttataactccgttaaacaccgaccgccgaacctctaaatccgtcgaataaaaactctctaaaaaacgtaaactccgtaacctccgacgcgaccgcgacgaatcgatctcctaaataacgcgacccgcgacgaacgaaaccatataaaccgacgccgcgaaaaaaattaaacgcgacctcgaaacacaaaaaacctcaatattaaccaaaacctcgaaattcgaaaataaaataatccacgccgtccctacgtaaaaacccgatacctaaaatacgacgataacgcgcgacgaaaactatccccgcgttaatcgcaaacgtcccccctcgtcgaaacacttaaaatcgaaaccgctaaataccgtttaactacgtaaattcctttctacccttaccctttaccccctacc

SEQ ID NO: 10221 - DNA, 516 bp, Artificial Sequence
  chemically treated genomic DNA (Homo sapiens) CpG-island No: 10221
gtagttttatcgggtgacggtagtcgcgtttcgcgtggggtagcggcgagcggaaagggaagtcgggcggggttagggggttaaatacgggcgatagtttcgtttagtttcggatttgtagcgcgtataagttcgggcgtttttcgagcgtcgcgtttaagtttcgtttttttcgtttttcgggtttcgattggtcgagttatcgcgggggcgtgttcggcggagttggtcgggattcgggcggagcgggcggggattcgggttattgcggtgtggattcgagggttgggcgcggggtcggcgtagaaggtgagtttttttatcgtttttcggtcgggttgcgggtcgcggggtaggcgtatgaggcgagttttttattattattttcggataagcgagttttttttcgtcgcgcggttttggcggtttttgggtcggcggggcgtagtgtcgttgattttagtttaagaagaggtttgggaagggcgtttttgggcggtttgcggggtgaatttg

SEQ ID NO: 10222 - DNA, 516 bp, Artificial Sequence
  chemically treated genomic DNA (Homo sapiens) CpG-island No: 10222
caaattcaccccgcaaaccgcccaaaaacgcccttcccaaacctcttcttaaactaaaatcaacgacactacgccccgccgacccaaaaaccgccaaaaccgcgcgacgaaaaaaaactcgcttatccgaaaataataataaaaaactcgcctcatacgcctaccccgcgacccgcaacccgaccgaaaaacgataaaaaaactcaccttctacgccgaccccgcgcccaaccctcgaatccacaccgcaataacccgaatccccgcccgctccgcccgaatcccgaccaactccgccgaacacgcccccgcgataactcgaccaatcgaaacccgaaaaacgaaaaaaacgaaacttaaacgcgacgctcgaaaaacgcccgaacttatacgcgctacaaatccgaaactaaacgaaactatcgcccgtatttaaccccctaaccccgcccgacttccctttccgctcgccgctaccccacgcgaaacgcgactaccgtcacccgataaaactac

SEQ ID NO: 10223 - DNA, 516 bp, Artificial Sequence
  chemically treated genomic DNA (Homo sapiens) CpG-island No: 10223
taggtttatttcgtaagtcgtttaggagcgttttttttaggtttttttttgggttggagttagcggtattgcgtttcgtcggtttaggagtcgttaagatcgcgcggcgggagagagttcgtttgttcgggggtggtgatgggagattcgttttatgcgtttgtttcgcgattcgtagttcggtcgggggacggtggggggatttattttttgcgtcggtttcgcgtttagttttcgagtttatatcgtagtagttcgggttttcgttcgtttcgttcgggtttcggttagtttcgtcggatacgttttcgcggtggttcggttaatcggagttcgggaagcgggaggggcggggtttgggcgcggcgttcggagggcgttcgagtttgtgcgcgttgtaggttcggggttgggcgggattgtcgttcgtgtttgattttttggtttcgttcggttttttttttcgttcgtcgttgttttacgcggagcgcgattgtcgttattcggtgggattgt

SEQ ID NO: 10224 - DNA, 516 bp, Artificial Sequence
  chemically treated genomic DNA (Homo sapiens) CpG-island No: 10224
acaatcccaccgaataacgacaatcgcgctccgcgtaaaacaacgacgaacgaaaaaaaaaaccgaacgaaaccaaaaaatcaaacacgaacgacaatcccgcccaaccccgaacctacaacgcgcacaaactcgaacgccctccgaacgccgcgcccaaaccccgcccctcccgcttcccgaactccgattaaccgaaccaccgcgaaaacgtatccgacgaaactaaccgaaacccgaacgaaacgaacgaaaacccgaactactacgatataaactcgaaaactaaacgcgaaaccgacgcaaaaaataaatccccccaccgtcccccgaccgaactacgaatcgcgaaacaaacgcataaaacgaatctcccatcaccacccccgaacaaacgaactctctcccgccgcgcgatcttaacgactcctaaaccgacgaaacgcaataccgctaactccaacccaaaaaaaaacctaaaaaaaacgctcctaaacgacttacgaaataaaccta

SEQ ID NO: 10225 - DNA, 767 bp, Artificial Sequence
  chemically treated genomic DNA (Homo sapiens) CpG-island No: 10225
gcgggcgcgggagtatttagcgaagagagtagaggatacgaatataacgatacggaggagagatttggcgaagcgaagtagcgcgaatagagtagaaagaaggattaacggtacgagagagagtagggagcgagcgagggaagtagcggaaggagaagtaggaggtttcgtatcgtcgaggaagacgaagacgaaaggagatgagaagaagaaagggatatagggagagacgcggacggataacgaagattatcgaacgttaaggcgtaggagagcggaggcgaggggataagaggagacgggagtaggttagggagtaagggcgaagaaagtattacggatgcggaacgggggaatagaggaaggcgggagggacgcgcggggtaaggcgggcgaatagaagagagagagaaagagagggaggagatttagacgataaagcgaaggttataaggcgcggtataaggaagaagagtagggcgggagtaaatagtatagataaaacgaacggaatagtagtcggagcgggagagcggaaagggaacgcgacggggcgtacgacgagaacgagagataatattttagaggaggtcggtaggttacgtaggaggtaaaaagttagacgacgaatcgcgtacggtacgagcgagagagagaaaagcggaggtagaggagcgggaatagaaagagaaaggaagagggatacgggggtataaaagagtagagcgaaagcgaggaggaggagagagcgaaagtaagagaagacg

SEQ ID NO: 10226 - DNA, 767 bp, Artificial Sequence
  chemically treated genomic DNA (Homo sapiens) CpG-island No: 10226
cgtcttctcttactttcgctctctcctcctcctcgctttcgctctactcttttatacccccgtatccctcttcctttctctttctattcccgctcctctacctccgcttttctctctctcgctcgtaccgtacgcgattcgtcgtctaactttttacctcctacgtaacctaccgacctcctctaaaatattatctctcgttctcgtcgtacgccccgtcgcgttccctttccgctctcccgctccgactactattccgttcgttttatctatactatttactcccgccctactcttcttccttataccgcgccttataaccttcgctttatcgtctaaatctcctccctctctttctctctctcttctattcgcccgccttaccccgcgcgtccctcccgccttcctctattcccccgttccgcatccgtaatactttcttcgcccttactccctaacctactcccgtctcctcttatcccctcgcctccgctctcctacgccttaacgttcgataatcttcgttatccgtccgcgtctctccctatatccctttcttcttctcatctcctttcgtcttcgtcttcctcgacgatacgaaacctcctacttctccttccgctacttccctcgctcgctccctactctctctcgtaccgttaatccttctttctactctattcgcgctacttcgcttcgccaaatctctcctccgtatcgttatattcgtatcctctactctcttcgctaaatactcccgcgcccgc

SEQ ID NO: 10227 - DNA, 767 bp, Artificial Sequence
  chemically treated genomic DNA (Homo sapiens) CpG-island No: 10227
cgtttttttttgttttcgtttttttttttttttcgttttcgttttgtttttttgtgttttcgtgtttttttttttttttttttttgttttcgtttttttgttttcgtttttttttttttcgttcgtgtcgtgcgcggttcgtcgtttggttttttgttttttgcgtggtttgtcggttttttttggggtgttgtttttcgttttcgtcgtgcgtttcgtcgcgtttttttttcgttttttcgtttcggttgttgtttcgttcgttttgtttgtgttgtttgttttcgttttattttttttttttgtgtcgcgttttgtggttttcgttttatcgtttgggtttttttttttttttttttttttttttttgttcgttcgttttgtttcgcgcgtttttttcgtttttttttgttttttcgtttcgtattcgtggtgtttttttcgtttttgttttttggtttgttttcgtttttttttgttttttcgttttcgtttttttgcgttttggcgttcggtgattttcgttgttcgttcgcgtttttttttgtgttttttttttttttttattttttttcgttttcgtttttttcggcggtgcggggttttttgttttttttttcgttatttttttcgttcgttttttgttttttttcgtgtcgttggtttttttttttgttttgttcgcgttgtttcgtttcgttaggtttttttttcgtgtcgttgtgttcgtgttttttgtttttttcgttgggtgttttcgcgttcgt

SEQ ID NO: 10228 - DNA, 767 bp, Artificial Sequence
  chemically treated genomic DNA (Homo sapiens) CpG-island No: 10228
acgaacgcgaaaacacccaacgaaaaaaacaaaaaacacgaacacaacgacacgaaaaaaaaacctaacgaaacgaaacaacgcgaacaaaacaaaaaaaaaaaccaacgacacgaaaaaaaacaaaaaacgaacgaaaaaaataacgaaaaaaaaaacaaaaaaccccgcaccgccgaaaaaaacgaaaacgaaaaaaaataaaaaaaaaaaaaaaacacaaaaaaaaacgcgaacgaacaacgaaaatcaccgaacgccaaaacgcaaaaaaacgaaaacgaaaaaacaaaaaaaaacgaaaacaaaccaaaaaacaaaaacgaaaaaaacaccacgaatacgaaacgaaaaaacaaaaaaaaacgaaaaaaacgcgcgaaacaaaacgaacgaacaaaaaaaaaaaaaaaaaaaaaaaaaaaaacccaaacgataaaacgaaaaccacaaaacgcgacacaaaaaaaaaaaataaaacgaaaacaaacaacacaaacaaaacgaacgaaacaacaaccgaaacgaaaaaacgaaaaaaaaacgcgacgaaacgcacgacgaaaacgaaaaacaacaccccaaaaaaaaccgacaaaccacgcaaaaaacaaaaaaccaaacgacgaaccgcgcacgacacgaacgaaaaaaaaaaaaacgaaaacaaaaaaacgaaaacaaaaaaaaaaaaaaaaaaaaacacgaaaacacaaaaaaacaaaacgaaaacgaaaaaaaaaaaaaaacgaaaacaaaaaaaaacg

SEQ ID NO: 10229 - DNA, 516 bp, Artificial Sequence
  chemically treated genomic DNA (Homo sapiens) CpG-island No: 10229
ttcgttttcgtagtaataagttcgttttttggtttttttagtaataagttttttttttttttttcgaagaggggcgtcggaataaggcggattttattttttcgggtttttaagtcgtcgttgtttttatagataaagtcgttcgtatttgattttgttgggcgtcgttattttaatcggaaatacgtacggttttattcggaagtgttaggcgtatttatttaatttcgtgtcgtggttgcggttgaagttgtttgttcgatttttattttttttttatttggcgggatattgtattcggtttcgttttttttattcgggtttcgtttttaagttgggacgttttttcgtgcgggcgtcgtttttttacgtttaagtagttggttaaagttttgtttttggtttagttttcgtattttagcgagtttcgttttcgatatttttgtaagttttattttttttttaacgtgtgtttacgattataggaacgaagtagaaagaaaaaagaaaataaga

SEQ ID NO: 10230 - DNA, 516 bp, Artificial Sequence
  chemically treated genomic DNA (Homo sapiens) CpG-island No: 10230
tcttattttcttttttctttctacttcgttcctataatcgtaaacacacgttaaaaaaaaaataaaacttacaaaaatatcgaaaacgaaactcgctaaaatacgaaaactaaaccaaaaacaaaactttaaccaactacttaaacgtaaaaaaacgacgcccgcacgaaaaaacgtcccaacttaaaaacgaaacccgaataaaaaaaacgaaaccgaatacaatatcccgccaaataaaaaaaaaataaaaatcgaacaaacaacttcaaccgcaaccacgacacgaaattaaataaatacgcctaacacttccgaataaaaccgtacgtatttccgattaaaataacgacgcccaacaaaatcaaatacgaacgactttatctataaaaacaacgacgacttaaaaacccgaaaaaataaaatccgccttattccgacgcccctcttcgaaaaaaaaaaaaaaaacttattactaaaaaaaccaaaaaacgaacttattactacgaaaacgaa

SEQ ID NO: 10231 - DNA, 516 bp, Artificial Sequence
  chemically treated genomic DNA (Homo sapiens) CpG-island No: 10231
ttttgtttttttttttttttttgtttcgtttttgtggtcgtgggtatacgttagaagaggggtggagtttgtaaaagtatcgggggcgggattcgttgaggtgcgaaaattgggttaggggtagggttttgattagttatttgagcgtgaaggggcggcgttcgtacgaaggggcgttttagtttggaggcggggttcggatgggaggggcggggtcgagtgtagtatttcgttaggtgagaaggggataagagtcgggtaagtagttttagtcgtaattacggtacgaagttgggtgggtacgtttggtattttcgggtgaaatcgtgcgtattttcggttaagatggcggcgtttagtagagttaggtgcggacgattttgtttgtaggagtagcggcggtttgaggattcggggaggtgagattcgttttatttcggcgttttttttcggagaggagggagaagatttgttgttaaggagattaaagggcgggtttgttgttacggaggcgga

SEQ ID NO: 10232 - DNA, 516 bp, Artificial Sequence
  chemically treated genomic DNA (Homo sapiens) CpG-island No: 10232
tccgcctccgtaacaacaaacccgccctttaatctccttaacaacaaatcttctccctcctctccgaaaaaaaacgccgaaataaaacgaatctcacctccccgaatcctcaaaccgccgctactcctacaaacaaaatcgtccgcacctaactctactaaacgccgccatcttaaccgaaaatacgcacgatttcacccgaaaataccaaacgtacccacccaacttcgtaccgtaattacgactaaaactacttacccgactcttatccccttctcacctaacgaaatactacactcgaccccgcccctcccatccgaaccccgcctccaaactaaaacgccccttcgtacgaacgccgccccttcacgctcaaataactaatcaaaaccctacccctaacccaattttcgcacctcaacgaatcccgcccccgatacttttacaaactccacccctcttctaacgtatacccacgaccacaaaaacgaaacaaaaaaaaaaaaaaaaacaaaa

SEQ ID NO: 10233 - DNA, 1063 bp, Artificial Sequence
  chemically treated genomic DNA (Homo sapiens) CpG-island No: 10233
tttcggttcgttttcggattttagggtcgttcgtcgcgtatttagtttcgtagtttttcgggttttaggcgcggatatttcggggggcggaaattaggagtcgcggggaggtcgcggttcggttcgcgacgtcggggttcggagaagggaggcgagaggtttttcggagttcgacggagggaggggagggaacgaggaggtcgcgggtcggagcggggagtagtttcgagcggcgttcggttcggtttttattttgaggttcggtttcgcgtatttttggtaagggttacggtggagttttcggtgtcgatggtgtagaggatgttttcgtagcggattttcgttttggagatgaggttgattttgttgtcgatgtaaggggtgttttcgtttatggcgtcgtcgtcgtcgtttttagttgttcgtagagaggtagattttacgttattgtcgttcgtttcgtacgttcgttcgtttcgtcggcgtttatagtagtcgttttagatttaatatggcggcggcgtcggtttcgttatttttttttagtttttcgtttttaagtcgcggcgcggcggcggcggcggcggcggtagcggcggcggcgcggggtatgttgggagggcgaggtcgcgttttcgcgagatttggtcggttattggtggttttcggtttattcgtggtttcgggagtttcggtagcgtttgttggtttggattacggtggtggttttggggtcgcgtgagaggaatttcggggatcggttgagtgtttcgtggtattcgtttgttgcgggttggagaggaggcgcgcggttttttttttgatttaggtcgtggtcgttttgtcgtgggttttgtgtttttgtcgacgcggggttttcggtttggagcgttgtttattcgttttcgagttgtggcgagtcgttgtttatttttttaagacgttgaatttgtatttcgtggagtttttacggttttattatcgtagttatcgttcggggagtttttttcgaggttgtttttggagttggggtttttataaggatttaagtgttttagttttt

SEQ ID NO: 10234 - DNA, 1063 bp, Artificial Sequence
  chemically treated genomic DNA (Homo sapiens) CpG-island No: 10234
aaaaactaaaacacttaaatccttataaaaaccccaactccaaaaacaacctcgaaaaaaactccccgaacgataactacgataataaaaccgtaaaaactccacgaaatacaaattcaacgtcttaaaaaaataaacaacgactcgccacaactcgaaaacgaataaacaacgctccaaaccgaaaaccccgcgtcgacaaaaacacaaaacccacgacaaaacgaccacgacctaaatcaaaaaaaaaaccgcgcgcctcctctccaacccgcaacaaacgaataccacgaaacactcaaccgatccccgaaattcctctcacgcgaccccaaaaccaccaccgtaatccaaaccaacaaacgctaccgaaactcccgaaaccacgaataaaccgaaaaccaccaataaccgaccaaatctcgcgaaaacgcgacctcgccctcccaacataccccgcgccgccgccgctaccgccgccgccgccgccgccgcgccgcgacttaaaaacgaaaaactaaaaaaaaataacgaaaccgacgccgccgccatattaaatctaaaacgactactataaacgccgacgaaacgaacgaacgtacgaaacgaacgacaataacgtaaaatctacctctctacgaacaactaaaaacgacgacgacgacgccataaacgaaaacaccccttacatcgacaacaaaatcaacctcatctccaaaacgaaaatccgctacgaaaacatcctctacaccatcgacaccgaaaactccaccgtaacccttaccaaaaatacgcgaaaccgaacctcaaaataaaaaccgaaccgaacgccgctcgaaactactccccgctccgacccgcgacctcctcgttccctcccctccctccgtcgaactccgaaaaacctctcgcctcccttctccgaaccccgacgtcgcgaaccgaaccgcgacctccccgcgactcctaatttccgccccccgaaatatccgcgcctaaaacccgaaaaactacgaaactaaatacgcgacgaacgaccctaaaatccgaaaacgaaccgaaa

SEQ ID NO: 10235 - DNA, 1063 bp, Artificial Sequence
  chemically treated genomic DNA (Homo sapiens) CpG-island No: 10235
aggggttgaaatatttgagtttttgtgagagttttagttttaggggtagtttcgggggaagtttttcgggcgatgattgcggtaatggagtcgtaggagttttacgaggtgtaggtttagcgttttagaaggatgagtagcggttcgttatagttcggaggcgggtgggtagcgttttaggtcgagggtttcgcgtcggtaaagatataggatttacgataaggcggttacggtttgagttaaaaggaaggtcgcgcgttttttttttagttcgtagtaagcgggtgttacgaggtatttagtcggttttcgaagttttttttacgcggttttaagattattatcgtagtttaggttaataagcgttgtcgggattttcgaggttacgaatgagtcgggagttattagtagtcggttaagtttcgcgagagcgcggtttcgtttttttagtatgtttcgcgtcgtcgtcgttgtcgtcgtcgtcgtcgtcgtcgcgtcgcggtttgagggcgggaggttgggggagggtagcggagtcggcgtcgtcgttatgttgggtttgaagcggttgttgtaggcgtcgacggagcgagcgggcgtgcggagcgggcgatagtggcgtgggatttgtttttttgcgagtagttgggagcggcggcggcggcgttatgagcgggggtattttttatatcggtagtaagattagttttatttttaaggcggagattcgttacgagggtattttttatattatcgatatcgaaaattttatcgtagtttttgttaaaggtacgcgggatcgggttttagggtgggggtcgagtcgggcgtcgttcggggttgtttttcgtttcggttcgcggttttttcgttttttttttttttttcgtcgagtttcgggaggtttttcgtttttttttttcgggtttcggcgtcgcgggtcggatcgcggttttttcgcggtttttggttttcgtttttcggaatgttcgcgtttgaagttcggggaattacgggattgagtgcgcggcgggcggttttgaagttcgagaacgggtcggag

SEQ ID NO: 10236 - DNA, 1063 bp, Artificial Sequence
  chemically treated genomic DNA (Homo sapiens) CpG-island No: 10236
ctccgacccgttctcgaacttcaaaaccgcccgccgcgcactcaatcccgtaattccccgaacttcaaacgcgaacattccgaaaaacgaaaaccaaaaaccgcgaaaaaaccgcgatccgacccgcgacgccgaaacccgaaaaaaaaaaacgaaaaacctcccgaaactcgacgaaaaaaaaaaaaaaaacgaaaaaaccgcgaaccgaaacgaaaaacaaccccgaacgacgcccgactcgacccccaccctaaaacccgatcccgcgtacctttaacaaaaactacgataaaattttcgatatcgataatataaaaaataccctcgtaacgaatctccgccttaaaaataaaactaatcttactaccgatataaaaaatacccccgctcataacgccgccgccgccgctcccaactactcgcaaaaaaacaaatcccacgccactatcgcccgctccgcacgcccgctcgctccgtcgacgcctacaacaaccgcttcaaacccaacataacgacgacgccgactccgctaccctcccccaacctcccgccctcaaaccgcgacgcgacgacgacgacgacgacgacaacgacgacgacgcgaaacatactaaaaaaacgaaaccgcgctctcgcgaaacttaaccgactactaataactcccgactcattcgtaacctcgaaaatcccgacaacgcttattaacctaaactacgataataatcttaaaaccgcgtaaaaaaaacttcgaaaaccgactaaatacctcgtaacacccgcttactacgaactaaaaaaaaaacgcgcgaccttccttttaactcaaaccgtaaccgccttatcgtaaatcctatatctttaccgacgcgaaaccctcgacctaaaacgctacccacccgcctccgaactataacgaaccgctactcatccttctaaaacgctaaacctacacctcgtaaaactcctacgactccattaccgcaatcatcgcccgaaaaacttcccccgaaactacccctaaaactaaaactctcacaaaaactcaaatatttcaacccct

SEQ ID NO: 10237 - DNA, 727 bp, Artificial Sequence
  chemically treated genomic DNA (Homo sapiens) CpG-island No: 10237
cggattatatgtttttgaagatcgttcggggtcgggttttttggtaaggtttgtagtgacgttatttcgggttttggatttcggagagcgtttggagacggggtttggattttacgttcggcgcgttttttttttgtaaggcgcgcggtcgggcggggtttttatgatttttttaaggcgcggttagagttttttcgtagaaaaacgatttaaaggagacgcgtggcgcgatggcggcggttttacgcgcgggtcggcggcgcgggtagtcgtttttggcgttgttgtttttgttgttggcgttattgtcgtcgggggtttcgtcgggcgtcgacgtttattttttcgaggagcgttggagttcggagtcgtttttgtaggcgtcgcgcgtgtttatcgcgttgttggcgcgaaacgcggtttacgcgttgtttattacgttgggcgtattcgagcggttgcggtattcgcgggagcgtacggcgttatggtgagtcgagttcgttgtttttattaggcgggttacgcgagtttttgtttgttgtttttataggggtgggtttacgcgagtttttgttcgttgtttttttttgggcgggttcgcgcgtgttttttgttcgttatttttatcgggacggttttacgtatgtttttgttcgttgtttttatcgggacgggtttacgcgtgttttttgtttgttgtttttttatggggttagatatagtt

SEQ ID NO: 10238 - DNA, 727 bp, Artificial Sequence
  chemically treated genomic DNA (Homo sapiens) CpG-island No: 10238
aactatatctaaccccataaaaaaacaacaaacaaaaaacacgcgtaaacccgtcccgataaaaacaacgaacaaaaacatacgtaaaaccgtcccgataaaaataacgaacaaaaaacacgcgcgaacccgcccaaaaaaaaacaacgaacaaaaactcgcgtaaacccacccctataaaaacaacaaacaaaaactcgcgtaacccgcctaataaaaacaacgaactcgactcaccataacgccgtacgctcccgcgaataccgcaaccgctcgaatacgcccaacgtaataaacaacgcgtaaaccgcgtttcgcgccaacaacgcgataaacacgcgcgacgcctacaaaaacgactccgaactccaacgctcctcgaaaaaataaacgtcgacgcccgacgaaacccccgacgacaataacgccaacaacaaaaacaacaacgccaaaaacgactacccgcgccgccgacccgcgcgtaaaaccgccgccatcgcgccacgcgtctcctttaaatcgtttttctacgaaaaaactctaaccgcgccttaaaaaaatcataaaaaccccgcccgaccgcgcgccttacaaaaaaaaaacgcgccgaacgtaaaatccaaaccccgtctccaaacgctctccgaaatccaaaacccgaaataacgtcactacaaaccttaccaaaaaacccgaccccgaacgatcttcaaaaacatataatccg

SEQ ID NO: 10239 - DNA, 727 bp, Artificial Sequence
  chemically treated genomic DNA (Homo sapiens) CpG-island No: 10239
ggttgtgtttggttttatgggaggatagtaggtagggggtacgcgtggattcgtttcgatgggggtagcgggtaggggtatgcgtagaatcgtttcgatgggggtagcgagtaggaagtacgcgcggattcgtttagaagaggatagcgggtaggggttcgcgtggatttatttttatggggatagtaagtaggggttcgcgtgattcgtttgatggggatagcgggttcgatttattatagcgtcgtgcgttttcgcgggtgtcgtagtcgttcgagtgcgtttagcgtggtgggtaacgcgtgggtcgcgtttcgcgttaatagcgcgatgagtacgcgcggcgtttgtaggggcgatttcgggttttagcgtttttcggggaagtaggcgtcggcgttcggcggggttttcggcggtagtggcgttagtagtagaagtagtagcgttaggagcggttgttcgcgtcgtcggttcgcgcgtggggtcgtcgttatcgcgttacgcgttttttttaagtcgtttttttgcgggaggattttggtcgcgttttaaaggggttataggggtttcgttcggtcgcgcgttttataggggaggagcgcgtcgggcgtgaagtttaggtttcgtttttagacgtttttcgaagtttaaggttcggagtgacgttattgtaggttttattaggaggttcggtttcggacgatttttaggggtatatggttcg

SEQ ID NO: 10240 - DNA, 727 bp, Artificial Sequence
  chemically treated genomic DNA (Homo sapiens) CpG-island No: 10240
cgaaccatatacccctaaaaatcgtccgaaaccgaacctcctaataaaacctacaataacgtcactccgaaccttaaacttcgaaaaacgtctaaaaacgaaacctaaacttcacgcccgacgcgctcctcccctataaaacgcgcgaccgaacgaaacccctataacccctttaaaacgcgaccaaaatcctcccgcaaaaaaacgacttaaaaaaaacgcgtaacgcgataacgacgaccccacgcgcgaaccgacgacgcgaacaaccgctcctaacgctactacttctactactaacgccactaccgccgaaaaccccgccgaacgccgacgcctacttccccgaaaaacgctaaaacccgaaatcgcccctacaaacgccgcgcgtactcatcgcgctattaacgcgaaacgcgacccacgcgttacccaccacgctaaacgcactcgaacgactacgacacccgcgaaaacgcacgacgctataataaatcgaacccgctatccccatcaaacgaatcacgcgaacccctacttactatccccataaaaataaatccacgcgaacccctacccgctatcctcttctaaacgaatccgcgcgtacttcctactcgctacccccatcgaaacgattctacgcatacccctacccgctacccccatcgaaacgaatccacgcgtaccccctacctactatcctcccataaaaccaaacacaacc

SEQ ID NO: 10241 - DNA, 618 bp, Artificial Sequence
  chemically treated genomic DNA (Homo sapiens) CpG-island No: 10241
cgattgttcgattttcgcggtgttttatttgttttattgcgtatgtgttaaagataattatttaaagtattcgaaattaagcggtagggtcggtttttgcgtaggcgtattagcgacggtcgtagggagcgttttttttttttcgtcgtcgttttcgttatggtcgcgtcggtttcgggttttatttcggtgttttcgagtttttaggagttgggtgcggcgttagcgtagttggtggtttagcgcgtagtatgttgtttggtaggggttcgcgttcgtttcgcgttcggtttgtcgggcgggagtttcgtttcgatgttagttcgcgagttattcgtcgtcgtcgtttttgtcgggttagttagtttagcgcgttggacgttgggtttttgcgacgagcgtttcgtgtttttcgattacgtcgagagtacgtacggtttttatcgggtgagagttacgggggtcgtcggggattacgtcgagagggttatagttatcgtttatatttcggttacggaggtcgtcgggggttatgtcgaaagggtcgcgtttattgtttgtatttcggttacgggggttattgggtattatgttaagagggtcgtgtttattgtttgt

SEQ ID NO: 10242 - DNA, 618 bp, Artificial Sequence
  chemically treated genomic DNA (Homo sapiens) CpG-island No: 10242
acaaacaataaacacgaccctcttaacataatacccaataacccccgtaaccgaaatacaaacaataaacgcgaccctttcgacataacccccgacgacctccgtaaccgaaatataaacgataactataaccctctcgacgtaatccccgacgacccccgtaactctcacccgataaaaaccgtacgtactctcgacgtaatcgaaaaacacgaaacgctcgtcgcaaaaacccaacgtccaacgcgctaaactaactaacccgacaaaaacgacgacgacgaataactcgcgaactaacatcgaaacgaaactcccgcccgacaaaccgaacgcgaaacgaacgcgaacccctaccaaacaacatactacgcgctaaaccaccaactacgctaacgccgcacccaactcctaaaaactcgaaaacaccgaaataaaacccgaaaccgacgcgaccataacgaaaacgacgacgaaaaaaaaaaaacgctccctacgaccgtcgctaatacgcctacgcaaaaaccgaccctaccgcttaatttcgaatactttaaataattatctttaacacatacgcaataaaacaaataaaacaccgcgaaaatcgaacaatcg

SEQ ID NO: 10243 - DNA, 618 bp, Artificial Sequence
  chemically treated genomic DNA (Homo sapiens) CpG-island No: 10243
gtaggtagtgggtacggtttttttggtatgatatttagtggttttcgtagtcgaggtgtagatagtgggcgcggttttttcggtatggttttcggcggttttcgtagtcggggtgtaggcggtggttgtggttttttcggcgtgattttcggcggttttcgtagtttttattcggtagaggtcgtacgtgttttcggcgtgatcgaagggtacgaggcgttcgtcgtagaagtttagcgtttagcgcgttaagttagttggttcggtaggggcgacggcggcgggtagttcgcgggttagtatcgagacgaggttttcgttcgataggtcgagcgcgaaacgggcgcgggtttttgttaggtagtatgttgcgcgttgggttattagttgcgttagcgtcgtatttagtttttgggaattcgagaatatcgagatgaggttcggggtcggcgcggttatggcgagggcggcggcggggaggaggaagcgttttttacggtcgtcgttagtacgtttgcgtaagggtcggttttgtcgtttggtttcgagtattttgggtgattgtttttggtatatgcgtagtgaggtaagtgaagtatcgcgaaggtcgggtagtcg

SEQ ID NO: 10244 - DNA, 618 bp, Artificial Sequence
  chemically treated genomic DNA (Homo sapiens) CpG-island No: 10244
cgactacccgaccttcgcgatacttcacttacctcactacgcatataccaaaaacaatcacccaaaatactcgaaaccaaacgacaaaaccgacccttacgcaaacgtactaacgacgaccgtaaaaaacgcttcctcctccccgccgccgccctcgccataaccgcgccgaccccgaacctcatctcgatattctcgaattcccaaaaactaaatacgacgctaacgcaactaataacccaacgcgcaacatactacctaacaaaaacccgcgcccgtttcgcgctcgacctatcgaacgaaaacctcgtctcgatactaacccgcgaactacccgccgccgtcgcccctaccgaaccaactaacttaacgcgctaaacgctaaacttctacgacgaacgcctcgtacccttcgatcacgccgaaaacacgtacgacctctaccgaataaaaactacgaaaaccgccgaaaatcacgccgaaaaaaccacaaccaccgcctacaccccgactacgaaaaccgccgaaaaccataccgaaaaaaccgcgcccactatctacacctcgactacgaaaaccactaaatatcataccaaaaaaaccgtacccactacctac

SEQ ID NO: 10245 - DNA, 557 bp, Artificial Sequence
  chemically treated genomic DNA (Homo sapiens) CpG-island No: 10245
ttttagggtgtattcgatagtttttgttagcgtagtgtggacgttggataaagacgtagttagtaggtcgttggtggtcgcgggttggattcgttgatttggttattaaatttttttttcggggagtgaagcggtacggaaggagcggagttaagggcggggttggggattggattcgttttcgggttcggggattggattcgttttcgggtttcggaggagtttttgcgtttgcgtgtcgggcgtggatttgtggttggattttttcgttttgggttggttttcgcgttttttttcggttttttttattttcgtttatttgacgcgatgacgtattttaggtttgcggacgtggcggcggcgtacggatcggaaggcggagacgttggcggtagaggcggaggcggacggggttagtttaaagtagaggttcggttatgaatttattcgggatagcggcggcggcggattttttggttattttttcgtagagtgttttttgttaacggggataggtaaagatggtggtaggaggtgagggtagttcggtttaggag

SEQ ID NO: 10246 - DNA, 557 bp, Artificial Sequence
  chemically treated genomic DNA (Homo sapiens) CpG-island No: 10246
ctcctaaaccgaactaccctcacctcctaccaccatctttacctatccccgttaacaaaaaacactctacgaaaaaataaccaaaaaatccgccgccgccgctatcccgaataaattcataaccgaacctctactttaaactaaccccgtccgcctccgcctctaccgccaacgtctccgccttccgatccgtacgccgccgccacgtccgcaaacctaaaatacgtcatcgcgtcaaataaacgaaaataaaaaaaaccgaaaaaaaacgcgaaaaccaacccaaaacgaaaaaatccaaccacaaatccacgcccgacacgcaaacgcaaaaactcctccgaaacccgaaaacgaatccaatccccgaacccgaaaacgaatccaatccccaaccccgcccttaactccgctccttccgtaccgcttcactccccgaaaaaaaaatttaataaccaaatcaacgaatccaacccgcgaccaccaacgacctactaactacgtctttatccaacgtccacactacgctaacaaaaactatcgaatacaccctaaaa

SEQ ID NO: 10247 - DNA, 557 bp, Artificial Sequence
  chemically treated genomic DNA (Homo sapiens) CpG-island No: 10247
tttttggatcgggttatttttattttttgttattatttttatttgttttcgttagtagggagtattttgcgagaagatggttaaaaggttcgtcgtcgtcgttgtttcgggtaagtttatggtcgagtttttgttttgggttgatttcgttcgttttcgtttttgtcgttaacgttttcgtttttcggttcgtacgtcgtcgttacgttcgtaaatttgagatgcgttatcgcgttaagtgggcggaggtgggaagggtcgggggaggacgcggaggttagtttaaaacgggggagtttaattataggtttacgttcggtacgtaggcgtagggattttttcggggttcgggggcgggtttaattttcgggttcgggggcgggtttaatttttagtttcgtttttgatttcgtttttttcgtgtcgttttatttttcgaggaaaagatttggtggttaagttagcggatttaattcgcgattattagcgatttattggttgcgtttttgtttagcgtttatattgcgttggtagagattgtcgggtgtattttgagg

SEQ ID NO: 10248 - DNA, 557 bp, Artificial Sequence
  chemically treated genomic DNA (Homo sapiens) CpG-island No: 10248
cctcaaaatacacccgacaatctctaccaacgcaatataaacgctaaacaaaaacgcaaccaataaatcgctaataatcgcgaattaaatccgctaacttaaccaccaaatcttttcctcgaaaaataaaacgacacgaaaaaaacgaaatcaaaaacgaaactaaaaattaaacccgcccccgaacccgaaaattaaacccgcccccgaaccccgaaaaaatccctacgcctacgtaccgaacgtaaacctataattaaactcccccgttttaaactaacctccgcgtcctcccccgacccttcccacctccgcccacttaacgcgataacgcatctcaaatttacgaacgtaacgacgacgtacgaaccgaaaaacgaaaacgttaacgacaaaaacgaaaacgaacgaaatcaacccaaaacaaaaactcgaccataaacttacccgaaacaacgacgacgacgaaccttttaaccatcttctcgcaaaatactccctactaacgaaaacaaataaaaataataacaaaaaataaaaataacccgatccaaaaa

SEQ ID NO: 10249 - DNA, 556 bp, Artificial Sequence
  chemically treated genomic DNA (Homo sapiens) CpG-island No: 10249
tcgttcgcgtattttattttcgtgtattttttatttggtttgcgggttcgggtgcgggtagataatagcgggtcgtatagattgaagtaggcggttattagtagtagtcgtcgcggttttattgtttcgggttttgcgcggcgttgtttcgggaggttgtttcgtttcgggttgtttcgttttatttttttttttgatttttgcgggtcggggagtcggttttcgcggtaggtagagcgtagggtgtttacggtgtaagattagggtttaagcgattttcggcgagcgttgtgtttggggcggttagcggggcggggcgggattggggcgcgcggtcgcgcgggcgcgagcgaggaagggcgtttttcggcgtgtagtgagagtttttgcgttggagtcgttcggcgtttttttttcgcggttttttagtcgtcgttcgtaagtttttttggttttgtgcgtttcgtttcgtttcgatttgttttattggggggtttggtcgtcggttattgtcgggtttagaagtttatttagttcggtattagtttagattttt

SEQ ID NO: 10250 - DNA, 556 bp, Artificial Sequence
  chemically treated genomic DNA (Homo sapiens) CpG-island No: 10250
aaaaatctaaactaataccgaactaaataaacttctaaacccgacaataaccgacgaccaaaccccccaataaaacaaatcgaaacgaaacgaaacgcacaaaaccaaaaaaacttacgaacgacgactaaaaaaccgcgaaaaaaaaacgccgaacgactccaacgcaaaaactctcactacacgccgaaaaacgcccttcctcgctcgcgcccgcgcgaccgcgcgccccaatcccgccccgccccgctaaccgccccaaacacaacgctcgccgaaaatcgcttaaaccctaatcttacaccgtaaacaccctacgctctacctaccgcgaaaaccgactccccgacccgcaaaaatcaaaaaaaaaaataaaacgaaacaacccgaaacgaaacaacctcccgaaacaacgccgcgcaaaacccgaaacaataaaaccgcgacgactactactaataaccgcctacttcaatctatacgacccgctattatctacccgcacccgaacccgcaaaccaaataaaaaatacacgaaaataaaatacgcgaacga

SEQ ID NO: 10251 - DNA, 556 bp, Artificial Sequence
  chemically treated genomic DNA (Homo sapiens) CpG-island No: 10251
aagggtttgagttggtatcgaattgagtggatttttaggttcggtagtggtcggcggttaggttttttagtagggtaggtcggggcggggcggggcgtatagagttagaggggtttgcgagcggcggttgagggatcgcggggagggggcgtcgagcggttttagcgtagagatttttattgtacgtcggagggcgttttttttcgttcgcgttcgcgcgatcgcgcgttttagtttcgtttcgtttcgttaatcgttttagatatagcgttcgtcgagggtcgtttggattttgattttatatcgtgggtattttgcgttttgtttgtcgcgaagatcggtttttcgattcgtagaagttaggagagagggtgaagcggagtagttcgaggcggggtagtttttcggagtagcgtcgcgtagagttcgggataatggggtcgcggcggttgttgttggtggtcgtttgttttagtttgtgcggttcgttgttgtttgttcgtattcgggttcgtaggttaggtgagagatgtacgggaatggggtgcgcgggcgg

SEQ ID NO: 10252 - DNA, 556 bp, Artificial Sequence
  chemically treated genomic DNA (Homo sapiens) CpG-island No: 10252
ccgcccgcgcaccccattcccgtacatctctcacctaacctacgaacccgaatacgaacaaacaacaacgaaccgcacaaactaaaacaaacgaccaccaacaacaaccgccgcgaccccattatcccgaactctacgcgacgctactccgaaaaactaccccgcctcgaactactccgcttcaccctctctcctaacttctacgaatcgaaaaaccgatcttcgcgacaaacaaaacgcaaaatacccacgatataaaatcaaaatccaaacgaccctcgacgaacgctatatctaaaacgattaacgaaacgaaacgaaactaaaacgcgcgatcgcgcgaacgcgaacgaaaaaaaacgccctccgacgtacaataaaaatctctacgctaaaaccgctcgacgccccctccccgcgatccctcaaccgccgctcgcaaacccctctaactctatacgccccgccccgccccgacctaccctactaaaaaacctaaccgccgaccactaccgaacctaaaaatccactcaattcgataccaactcaaaccctt

SEQ ID NO: 10253 - DNA, 646 bp, Artificial Sequence
  chemically treated genomic DNA (Homo sapiens) CpG-island No: 10253
gtagtttttgtcgtttcgtttatttgtatatggtaggtttcgtttttagcgtttagtttcgttatatcgtttattattagtacgcggtagttcggtattttagttagtatttggattgttgtagttattgaatcgatattggcgttgtaggagtcgtcgagtagtaattggttttttgttagttggatggggaatagacggtttggaatagtttttagatttgttagtttcgttttgatagtattaagcgttgcgtttacggatatggagagcgtagcggttgttagcgtattcgtaatattgtgacgtttcggtaacggtagtagaatatcgacgttatcggttggggtttgtagggtaaatttcgtatcgtgcgaggttatatggatattggtggcggtgaaatcgttgttggcggtattgggtgagaaacgttatattttgcgtgagttaattacgttttgttagtttagttagtcgttgttgtcggcgtttataatggcgatatcgtttttcggtaggtcgttaaagattttattttcgttttcgcgatatcgtaagcgagttaaaattttcgattgcgtcgtgtcggttgtgattagcgtagttttcggcgaattcgattttaggttaggttatttcgttt

SEQ ID NO: 10254 - DNA, 646 bp, Artificial Sequence
  chemically treated genomic DNA (Homo sapiens) CpG-island No: 10254
aaacgaaataacctaacctaaaatcgaattcgccgaaaactacgctaatcacaaccgacacgacgcaatcgaaaattttaactcgcttacgatatcgcgaaaacgaaaataaaatctttaacgacctaccgaaaaacgatatcgccattataaacgccgacaacaacgactaactaaactaacaaaacgtaattaactcacgcaaaatataacgtttctcacccaataccgccaacaacgatttcaccgccaccaatatccatataacctcgcacgatacgaaatttaccctacaaaccccaaccgataacgtcgatattctactaccgttaccgaaacgtcacaatattacgaatacgctaacaaccgctacgctctccatatccgtaaacgcaacgcttaatactatcaaaacgaaactaacaaatctaaaaactattccaaaccgtctattccccatccaactaacaaaaaaccaattactactcgacgactcctacaacgccaatatcgattcaataactacaacaatccaaatactaactaaaataccgaactaccgcgtactaataataaacgatataacgaaactaaacgctaaaaacgaaacctaccatatacaaataaacgaaacgacaaaaactac

SEQ ID NO: 10255 - DNA, 646 bp, Artificial Sequence
  chemically treated genomic DNA (Homo sapiens) CpG-island No: 10255
aggcgaaatagtttggtttgggatcggattcgtcgggaattgcgttggttataatcggtacggcgtaatcggaagttttggttcgtttgcggtgtcgcgaaagcgaaagtgaaatttttagcggtttgtcggaaaacggtatcgttattatgaacgtcgataataacgattggttgaattggtagagcgtaattggtttacgtaaagtgtggcgttttttatttaatgtcgttaatagcgattttatcgttattaatatttatgtgatttcgtacggtacggaatttattttataaattttaatcggtagcgtcgatgttttgttgtcgttgtcggggcgttataatattgcgaatgcgttggtagtcgttgcgttttttatgttcgtgggcgtaacgtttgatgttattaaagcggggttggtaaatttgaaagttgttttaggtcgtttgttttttatttaattggtagaaaattagttgttgttcgacgatttttataacgttaatgtcggtttaatgattgtagtagtttaggtattggttgaaatgtcgggttatcgcgtgttggtggtgggcgatatggcggaattgggcgttgaaagcgaagtttgttatgtataggtgggcgaggcggtaaaagttgt

SEQ ID NO: 10256 - DNA, 646 bp, Artificial Sequence
  chemically treated genomic DNA (Homo sapiens) CpG-island No: 10256
acaacttttaccgcctcgcccacctatacataacaaacttcgctttcaacgcccaattccgccatatcgcccaccaccaacacgcgataacccgacatttcaaccaatacctaaactactacaatcattaaaccgacattaacgttataaaaatcgtcgaacaacaactaattttctaccaattaaataaaaaacaaacgacctaaaacaactttcaaatttaccaaccccgctttaataacatcaaacgttacgcccacgaacataaaaaacgcaacgactaccaacgcattcgcaatattataacgccccgacaacgacaacaaaacatcgacgctaccgattaaaatttataaaataaattccgtaccgtacgaaatcacataaatattaataacgataaaatcgctattaacgacattaaataaaaaacgccacactttacgtaaaccaattacgctctaccaattcaaccaatcgttattatcgacgttcataataacgataccgttttccgacaaaccgctaaaaatttcactttcgctttcgcgacaccgcaaacgaaccaaaacttccgattacgccgtaccgattataaccaacgcaattcccgacgaatccgatcccaaaccaaactatttcgcct

SEQ ID NO: 10257 - DNA, 542 bp, Artificial Sequence
  chemically treated genomic DNA (Homo sapiens) CpG-island No: 10257
gttgtagtaggttattaggcggacgggcgtcgatatatttcgtaggcgatagcgtaaggtgtggttgttattattgtagaggcgaaagatgaggcgatcgatggtgaaattcgtgaaatgtacggcgtatcggttatttattttagttagtttaacgagcgtttatttgtattggcgggtcgtttttattatgaattttttgataatttacgtttcgtgggcgtaacgggtattaacggtaaaattacgattatttagttgttggcgtagtggagttaattgtttggcgaaattagcgcggtaatgggtatcgttggtaacggtttgttggggaaagtgatttcgatagaaaatataatcggttcggtagtcgatgtttagtatgagttggcggggttggtggattagggcgcgacgttttgcgtaatggaagtttttttttacgggttggtatagtatcgtgtggcggtattgaaatttgcggcgtcggtttttattaatttaagtcgcgattattttgattattatggtgatatggaata

SEQ ID NO: 10258 - DNA, 542 bp, Artificial Sequence
  chemically treated genomic DNA (Homo sapiens) CpG-island No: 10258
tattccatatcaccataataatcaaaataatcgcgacttaaattaataaaaaccgacgccgcaaatttcaataccgccacacgatactataccaacccgtaaaaaaaaacttccattacgcaaaacgtcgcgccctaatccaccaaccccgccaactcatactaaacatcgactaccgaaccgattatattttctatcgaaatcactttccccaacaaaccgttaccaacgatacccattaccgcgctaatttcgccaaacaattaactccactacgccaacaactaaataatcgtaattttaccgttaatacccgttacgcccacgaaacgtaaattatcaaaaaattcataataaaaacgacccgccaatacaaataaacgctcgttaaactaactaaaataaataaccgatacgccgtacatttcacgaatttcaccatcgatcgcctcatctttcgcctctacaataataacaaccacaccttacgctatcgcctacgaaatatatcgacgcccgtccgcctaataacctactacaac

SEQ ID NO: 10259 - DNA, 542 bp, Artificial Sequence
  chemically treated genomic DNA (Homo sapiens) CpG-island No: 10259
tgttttatattattatgataattaaggtgatcgcggtttaagttggtaaagatcgacgtcgtaaattttaatgtcgttatacggtgttgtattagttcgtgggaggaaatttttattgcgtaaaacgtcgcgttttgatttattagtttcgttagtttatgttgaatatcgattgtcgaatcggttgtattttttgtcgggattattttttttagtaggtcgttattaacggtgtttattatcgcgttgatttcgttaagtagttggttttattgcgttaatagttgggtagtcgtggttttgtcgttggtgttcgttacgtttacgagacgtaaattgttagagggtttatggtaaaagcggttcgttagtgtagataaacgttcgttgagttggttgagatagatgatcggtacgtcgtgtattttacggattttattatcggtcgttttatttttcgtttttgtaataatggtagttatattttgcgttatcgtttgcgggatatatcgacgttcgttcgtttgatgatttattatagt

SEQ ID NO: 10260 - DNA, 542 bp, Artificial Sequence
  chemically treated genomic DNA (Homo sapiens) CpG-island No: 10260
actataataaatcatcaaacgaacgaacgtcgatatatcccgcaaacgataacgcaaaatataactaccattattacaaaaacgaaaaataaaacgaccgataataaaatccgtaaaatacacgacgtaccgatcatctatctcaaccaactcaacgaacgtttatctacactaacgaaccgcttttaccataaaccctctaacaatttacgtctcgtaaacgtaacgaacaccaacgacaaaaccacgactacccaactattaacgcaataaaaccaactacttaacgaaatcaacgcgataataaacaccgttaataacgacctactaaaaaaaataatcccgacaaaaaatacaaccgattcgacaatcgatattcaacataaactaacgaaactaataaatcaaaacgcgacgttttacgcaataaaaatttcctcccacgaactaatacaacaccgtataacgacattaaaatttacgacgtcgatctttaccaacttaaaccgcgatcaccttaattatcataataatataaaaca

SEQ ID NO: 10261 - DNA, 531 bp, Artificial Sequence
  chemically treated genomic DNA (Homo sapiens) CpG-island No: 10261
gtcgggtaaatagggcgcggatattgtttttggtttaggcgtaacgtttcgtgcgtgtcgataggttacggtggtttatacgcggtattttttgcggcgaaagatgaatataaacgtttaatgtttgggtcgtattatcggtgtatcgaaagatgtagttggtaagtatcgcgttgcgtatggcgatgtagattcgcgagtaatatattcgtcgtgagaaagcgaattttaaatatttgtattttttaggtattgttgtgttaaatatcgttagtttgtatgtcgtttattacggttcggttggtttgaaacgtatcgttatcgtatttatcgtttgatcgatattttggcggcgggtttgtaataaaaaggtttgaaattgcgttatgcgtattatttcgatattttgtgtgtggaagtggtcgataaagcgggcgtattgacgcgtgtttgaagcggttgaaattaattttgcgtagcgatttttgaacgcggttgggattatttttgatgaaataattacgcgtgata

SEQ ID NO: 10262 - DNA, 531 bp, Artificial Sequence
  chemically treated genomic DNA (Homo sapiens) CpG-island No: 10262
tatcacgcgtaattatttcatcaaaaataatcccaaccgcgttcaaaaatcgctacgcaaaattaatttcaaccgcttcaaacacgcgtcaatacgcccgctttatcgaccacttccacacacaaaatatcgaaataatacgcataacgcaatttcaaacctttttattacaaacccgccgccaaaatatcgatcaaacgataaatacgataacgatacgtttcaaaccaaccgaaccgtaataaacgacatacaaactaacgatatttaacacaacaatacctaaaaaatacaaatatttaaaattcgctttctcacgacgaatatattactcgcgaatctacatcgccatacgcaacgcgatacttaccaactacatctttcgatacaccgataatacgacccaaacattaaacgtttatattcatctttcgccgcaaaaaataccgcgtataaaccaccgtaacctatcgacacgcacgaaacgttacgcctaaaccaaaaacaatatccgcgccctatttacccgac

SEQ ID NO: 10263 - DNA, 531 bp, Artificial Sequence
  chemically treated genomic DNA (Homo sapiens) CpG-island No: 10263
tgttacgcgtggttgttttattaagagtgattttaatcgcgtttagaaatcgttacgtaaggttgattttagtcgttttaggtacgcgttagtacgttcgttttgtcggttatttttatatataaggtgtcgaaatagtgcgtatggcgtagttttagatttttttgttgtaggttcgtcgttaggatatcggttagacggtgaatgcggtagcgatacgttttaggttaatcgggtcgtgataaacggtatataggttggcgatgtttagtatagtagtatttgggaagtataaatgtttggagttcgtttttttacggcggatatgttgttcgcgagtttgtatcgttatgcgtagcgcggtatttgttagttgtatttttcgatatatcgataatacggtttaggtattgagcgtttgtatttatttttcgtcgtaaagaatgtcgcgtgtgggttatcgtagtttatcggtacgtacgaagcgttgcgtttgaattaaaaataatattcgcgttttgtttattcggt

SEQ ID NO: 10264 - DNA, 531 bp, Artificial Sequence
  chemically treated genomic DNA (Homo sapiens) CpG-island No: 10264
accgaataaacaaaacgcgaatattatttttaattcaaacgcaacgcttcgtacgtaccgataaactacgataacccacacgcgacattctttacgacgaaaaataaatacaaacgctcaatacctaaaccgtattatcgatatatcgaaaaatacaactaacaaataccgcgctacgcataacgatacaaactcgcgaacaacatatccgccgtaaaaaaacgaactccaaacatttatacttcccaaatactactatactaaacatcgccaacctatataccgtttatcacgacccgattaacctaaaacgtatcgctaccgcattcaccgtctaaccgatatcctaacgacgaacctacaacaaaaaaatctaaaactacgccatacgcactatttcgacaccttatatataaaaataaccgacaaaacgaacgtactaacgcgtacctaaaacgactaaaatcaaccttacgtaacgatttctaaacgcgattaaaatcactcttaataaaacaaccacgcgtaaca

SEQ ID NO: 10265 - DNA, 713 bp, Artificial Sequence
  chemically treated genomic DNA (Homo sapiens) CpG-island No: 10265
cgtttatcgtgacggtttcgttatcgttggcggcggcggtatggtagtggttgaagagttggaatacgcgttggcgcgtggtgtttatatttatgttgaaatcgttggttacggcgtaatttttgatggtgtagatatggttgtttcgtttggcgaaggcgtagtacgttgtatgaagatggcgatgtatggcgttgatattttaatcgattatttgaatttttacggtatttcgatttcggttggcgacgtgaaagagttggtagttattcgtgaagtgttcggcgataagagttcggcgatttttgtaattaaagttatgatcggttattttttgggcgttgttggcgtataggaagttatttattttttgttgatgttggaatacggttttatcgtttcgagtattaatattgaagagttggacgagtaggttgcgggtttgaatatcgtgatcgaaacgatcgatcgcgaaattgattatcgttatgtttaatagtttcggtttcggcggtattaacgttacgttggtaatgcgtaagttgaaagattaattcgtagtaggtcggagtagacgcgttagcgtcgtatacgacgttacggcgttaatgcgggtttcggtattaacggtaaaagggaatttgttggttttttttttatattattgtaaaatgtcggtcgatttagcggaaatttcgcgttgtggtattttt

SEQ ID NO: 10266 - DNA, 713 bp, Artificial Sequence
  chemically treated genomic DNA (Homo sapiens) CpG-island No: 10266
aaaaataccacaacgcgaaatttccgctaaatcgaccgacattttacaataatataaaaaaaaaaccaacaaattcccttttaccgttaataccgaaacccgcattaacgccgtaacgtcgtatacgacgctaacgcgtctactccgacctactacgaattaatctttcaacttacgcattaccaacgtaacgttaataccgccgaaaccgaaactattaaacataacgataatcaatttcgcgatcgatcgtttcgatcacgatattcaaacccgcaacctactcgtccaactcttcaatattaatactcgaaacgataaaaccgtattccaacatcaacaaaaaataaataacttcctatacgccaacaacgcccaaaaaataaccgatcataactttaattacaaaaatcgccgaactcttatcgccgaacacttcacgaataactaccaactctttcacgtcgccaaccgaaatcgaaataccgtaaaaattcaaataatcgattaaaatatcaacgccatacatcgccatcttcatacaacgtactacgccttcgccaaacgaaacaaccatatctacaccatcaaaaattacgccgtaaccaacgatttcaacataaatataaacaccacgcgccaacgcgtattccaactcttcaaccactaccataccgccgccgccaacgataacgaaaccgtcacgataaacg

SEQ ID NO: 10267 - DNA, 713 bp, Artificial Sequence
  chemically treated genomic DNA (Homo sapiens) CpG-island No: 10267
agaaatgttataacgcggaattttcgttgaatcggtcggtattttataatgatgtgaaaagggaattagtaggtttttttttgtcgttagtgtcggagttcgtattggcgtcgtaacgtcgtatgcgacgttggcgcgtttatttcgatttattgcgaattaattttttagtttgcgtattattagcgtggcgttggtgtcgtcgaagtcgaagttgttagatataacggtggttagtttcgcgatcggtcgtttcggttacgatgtttagattcgtagtttgttcgtttagttttttaatgttgatgttcggggcgataaagtcgtgttttagtattagtagagagtagatagttttttgtacgttagtagcgtttagagagtgatcggttatggttttggttgtagaaatcgtcgggtttttatcgtcgaatattttacggatagttgttagtttttttacgtcgttaatcggagtcgaagtatcgtgggagtttaggtaatcgattggggtattaacgttatgtatcgttatttttatgtagcgtattgcgttttcgttagacggagtaattatgtttgtattattagaggttgcgtcgtagttaacgattttagtatagatgtgagtattacgcgttagcgcgtgttttagttttttaattattattatatcgtcgtcgttagcgataacgaaatcgttacggtgagcg

SEQ ID NO: 10268 - DNA, 713 bp, Artificial Sequence
  chemically treated genomic DNA (Homo sapiens) CpG-island No: 10268
cgctcaccgtaacgatttcgttatcgctaacgacgacgatataataataattaaaaaactaaaacacgcgctaacgcgtaatactcacatctatactaaaatcgttaactacgacgcaacctctaataatacaaacataattactccgtctaacgaaaacgcaatacgctacataaaaataacgatacataacgttaataccccaatcgattacctaaactcccacgatacttcgactccgattaacgacgtaaaaaaactaacaactatccgtaaaatattcgacgataaaaacccgacgatttctacaaccaaaaccataaccgatcactctctaaacgctactaacgtacaaaaaactatctactctctactaatactaaaacacgactttatcgccccgaacatcaacattaaaaaactaaacgaacaaactacgaatctaaacatcgtaaccgaaacgaccgatcgcgaaactaaccaccgttatatctaacaacttcgacttcgacgacaccaacgccacgctaataatacgcaaactaaaaaattaattcgcaataaatcgaaataaacgcgccaacgtcgcatacgacgttacgacgccaatacgaactccgacactaacgacaaaaaaaaacctactaattcccttttcacatcattataaaataccgaccgattcaacgaaaattccgcgttataacatttct

SEQ ID NO: 10269 - DNA, 707 bp, Artificial Sequence
  chemically treated genomic DNA (Homo sapiens) CpG-island No: 10269
attttaagcgtaatcgtttttgtatgacgtaggttatcgcgtttaagtttaacgatcgttttttggatttcgttttttatttataagatttgatcgaggttgtgaattatcgggattattaattgggcgttgtcgaaattggcggcgcgtaaaatggttcgtagttgagtgcggaataggttagtaaatttcgggtaaatacgtatcgcgcgatagtcgaggaacgggttttttttttggggaatatttagataaggaatgtttttatcgtcgtcgatgtttatcgtgcggaagataatcggtttgtcgttcgtcgttagtagtatttgttggtaggttttaaattgtttttgttcgttcggcgcgttgtcgcgatttatatagagtatttcggtacggaatagttcgatatttttcgcgtcgttggtaaacgcgtttggcgtttttagagcggtgtcgatattcgtcgtaatattaatacgtttgttattacgggaataggttagttgcgcggtagtttgcgtttgttgtttttggcgtttattcgttagcgtttgcgcgaattgataataatcgttttacgcgttatttcgggttaatggtagtacgtcgaattgaggttaaatattttgtaggttgttcgtattataggtaacgtatttagggaagttattatacggatattaagaagggttaataggtttaag

SEQ ID NO: 10270 - DNA, 707 bp, Artificial Sequence
  chemically treated genomic DNA (Homo sapiens) CpG-island No: 10270
cttaaacctattaacccttcttaatatccgtataataacttccctaaatacgttacctataatacgaacaacctacaaaatatttaacctcaattcgacgtactaccattaacccgaaataacgcgtaaaacgattattatcaattcgcgcaaacgctaacgaataaacgccaaaaacaacaaacgcaaactaccgcgcaactaacctattcccgtaataacaaacgtattaatattacgacgaatatcgacaccgctctaaaaacgccaaacgcgtttaccaacgacgcgaaaaatatcgaactattccgtaccgaaatactctatataaatcgcgacaacgcgccgaacgaacaaaaacaatttaaaacctaccaacaaatactactaacgacgaacgacaaaccgattatcttccgcacgataaacatcgacgacgataaaaacattccttatctaaatattccccaaaaaaaaaacccgttcctcgactatcgcgcgatacgtatttacccgaaatttactaacctattccgcactcaactacgaaccattttacgcgccgccaatttcgacaacgcccaattaataatcccgataattcacaacctcgatcaaatcttataaataaaaaacgaaatccaaaaaacgatcgttaaacttaaacgcgataacctacgtcatacaaaaacgattacgcttaaaat

SEQ ID NO: 10271 - DNA, 707 bp, Artificial Sequence
  chemically treated genomic DNA (Homo sapiens) CpG-island No: 10271
tttaaatttgttggttttttttggtattcgtatgatggtttttttgaatgcgttgtttgtaatgcgggtaatttgtaaggtgtttaattttagttcggcgtgttgttattaattcggaatgacgcgtgaagcggttattattagttcgcgtagacgttggcggataaacgttaaaaataataggcgtaggttgtcgcgtagttggtttattttcgtgataataagcgtattgatattgcggcgaatatcggtatcgttttggaagcgttaggcgcgtttgttaacggcgcggaaggtgtcgggttgtttcgtatcgaaatgttttatatggatcgcgatagcgcgtcggacgagtaggagtaatttgaagtttattagtaggtgttattggcggcgggcgataagtcgattatttttcgtacgatggatatcggcggcgataaaagtattttttatttgaatattttttaggaagagaattcgtttttcggttatcgcgcggtacgtatttattcggaatttgttggtttgtttcgtatttaattgcgggttattttgcgcgtcgttagtttcggtaacgtttagttgatgatttcgatggtttatagtttcgattagattttatgggtgaaaggcgagatttaaaaagcgatcgttgagtttaagcgcgatggtttgcgttatgtagagacgattacgtttgggat

SEQ ID NO: 10272 - DNA, 707 bp, Artificial Sequence
  chemically treated genomic DNA (Homo sapiens) CpG-island No: 10272
atcccaaacgtaatcgtctctacataacgcaaaccatcgcgcttaaactcaacgatcgctttttaaatctcgcctttcacccataaaatctaatcgaaactataaaccatcgaaatcatcaactaaacgttaccgaaactaacgacgcgcaaaataacccgcaattaaatacgaaacaaaccaacaaattccgaataaatacgtaccgcgcgataaccgaaaaacgaattctcttcctaaaaaatattcaaataaaaaatacttttatcgccgccgatatccatcgtacgaaaaataatcgacttatcgcccgccgccaataacacctactaataaacttcaaattactcctactcgtccgacgcgctatcgcgatccatataaaacatttcgatacgaaacaacccgacaccttccgcgccgttaacaaacgcgcctaacgcttccaaaacgataccgatattcgccgcaatatcaatacgcttattatcacgaaaataaaccaactacgcgacaacctacgcctattatttttaacgtttatccgccaacgtctacgcgaactaataataaccgcttcacgcgtcattccgaattaataacaacacgccgaactaaaattaaacaccttacaaattacccgcattacaaacaacgcattcaaaaaaaccatcatacgaataccaaaaaaaaccaacaaatttaaa

SEQ ID NO: 10273 - DNA, 507 bp, Artificial Sequence
  chemically treated genomic DNA (Homo sapiens) CpG-island No: 10273
acgatgagatagtattcgatacggagatgtagatagtattttaggcgaaggatagagtgtagttaacgaggaaattaaacgagaagatagtgggtatatagacgacgtacgagtacgagcgtaagcgagatacgaacgagggagtagtagtcgataatacgataggagtttaataataggagataatacgtggatatagagtcgttatggtaacgaatgatatcgatagaattaatagagatacgtgagagatatattatagaggtagtcgatataggtatatatagaggatacgagcgtaatttacgcgtgatatatttatgaattatcgatatatgaatatagtataggtgattatcgcggtatagttgaggtagatatcgaaggatagatattagttagacggaagtaggtacggggtatataggtacgcgacgtgtagtcgaagtaacgagtcgtacgtataatggtttagaataagagtaaagagttataaagatgaagagt

SEQ ID NO: 10274 - DNA, 507 bp, Artificial Sequence
  chemically treated genomic DNA (Homo sapiens) CpG-island No: 10274
actcttcatctttataactctttactcttattctaaaccattatacgtacgactcgttacttcgactacacgtcgcgtacctatataccccgtacctacttccgtctaactaatatctatccttcgatatctacctcaactataccgcgataatcacctatactatattcatatatcgataattcataaatatatcacgcgtaaattacgctcgtatcctctatatatacctatatcgactacctctataatatatctctcacgtatctctattaattctatcgatatcattcgttaccataacgactctatatccacgtattatctcctattattaaactcctatcgtattatcgactactactccctcgttcgtatctcgcttacgctcgtactcgtacgtcgtctatatacccactatcttctcgtttaatttcctcgttaactacactctatccttcgcctaaaatactatctacatctccgtatcgaatactatctcatcgt

SEQ ID NO: 10275 - DNA, 507 bp, Artificial Sequence
  chemically treated genomic DNA (Homo sapiens) CpG-island No: 10275
attttttatttttataattttttgtttttgttttgagttattgtacgtacggttcgttgtttcgattgtacgtcgcgtgtttgtgtatttcgtatttattttcgtttggttagtgtttatttttcgatgtttattttagttgtgtcgcggtgattatttgtattgtgtttatgtgtcggtggtttatgagtgtgttacgcgtgagttgcgttcgtgttttttgtgtgtgtttgtgtcgattatttttgtagtgtgttttttacgtgtttttgttggttttatcggtgttattcgttgttatggcggttttatgtttacgtgttgttttttgttgttaggtttttgtcgtgttgtcggttattgttttttcgttcgtgtttcgtttgcgttcgtgttcgtgcgtcgtttgtgtgtttattattttttcgtttggttttttcgttagttgtattttgtttttcgtttagggtgttgtttatattttcgtgtcgggtgttgttttatcgt

SEQ ID NO: 10276 - DNA, 507 bp, Artificial Sequence
  chemically treated genomic DNA (Homo sapiens) CpG-island No: 10276
acgataaaacaacacccgacacgaaaatataaacaacaccctaaacgaaaaacaaaatacaactaacgaaaaaaccaaacgaaaaaataataaacacacaaacgacgcacgaacacgaacgcaaacgaaacacgaacgaaaaaacaataaccgacaacacgacaaaaacctaacaacaaaaaacaacacgtaaacataaaaccgccataacaacgaataacaccgataaaaccaacaaaaacacgtaaaaaacacactacaaaaataatcgacacaaacacacacaaaaaacacgaacgcaactcacgcgtaacacactcataaaccaccgacacataaacacaatacaaataatcaccgcgacacaactaaaataaacatcgaaaaataaacactaaccaaacgaaaataaatacgaaatacacaaacacgcgacgtacaatcgaaacaacgaaccgtacgtacaataactcaaaacaaaaacaaaaaattataaaaataaaaaat

SEQ ID NO: 10277 - DNA, 709 bp, Artificial Sequence
  chemically treated genomic DNA (Homo sapiens) CpG-island No: 10277
tacgtagacgttatagatcgtatacgtcgtacgcgatattagataagcgagtttacgagtaagtaagatattataatatagataggttgacggagataagcgttagacgagatacgtcgaagtttaggtaatacgtatatatatcggaagaaggaagacgataaaagagatagtaacggtattatgcgtacgagtaagagagagacgatcgaatattagtagtaagtatacgtcgacgagtagatacgacgaatagtaagaatatatcgtagaatagtacgatatatagtagtatatatatatagaataagagtagtagtaagatagacgatagagaaagataacgagtagagcgatacgtaattatcgatataaaagatatcgagcgcgatcgtaatagtatatatattacggcgaatagagacgattattaatatagtataagtacgatatacgagcgcgcgtgagagaaattatacgcgatagtattaggcgatacgtcgagagataataataaacgtatatattaatatattatattattacgtagagtatatataattacgtagttagtaatagacgataagtatcgagcgattaataatagatagtagtataataataaataataataattatatattacgaatagttagagacgaacgacgtatgatatagtataagtattcgagtagagtattaattataa

SEQ ID NO: 10278 - DNA, 709 bp, Artificial Sequence
  chemically treated genomic DNA (Homo sapiens) CpG-island No: 10278
ttataattaatactctactcgaatacttatactatatcatacgtcgttcgtctctaactattcgtaatatataattattattatttattattatactactatctattattaatcgctcgatacttatcgtctattactaactacgtaattatatatactctacgtaataatataatatattaatatatacgtttattattatctctcgacgtatcgcctaatactatcgcgtataatttctctcacgcgcgctcgtatatcgtacttatactatattaataatcgtctctattcgccgtaatatatatactattacgatcgcgctcgatatcttttatatcgataattacgtatcgctctactcgttatctttctctatcgtctatcttactactactcttattctatatatatatactactatatatcgtactattctacgatatattcttactattcgtcgtatctactcgtcgacgtatacttactactaatattcgatcgtctctctcttactcgtacgcataataccgttactatctcttttatcgtcttccttcttccgatatatatacgtattacctaaacttcgacgtatctcgtctaacgcttatctccgtcaacctatctatattataatatcttacttactcgtaaactcgcttatctaatatcgcgtacgacgtatacgatctataacgtctacgta

SEQ ID NO: 10279 - DNA, 709 bp, Artificial Sequence
  chemically treated genomic DNA (Homo sapiens) CpG-island No: 10279
ttgtggttgatgttttgttcgggtgtttgtgttgtgttatgcgtcgttcgtttttgattgttcgtggtgtgtggttgttgttgtttattgttgtgttgttgtttgttgttggtcgttcggtgtttgtcgtttgttgttggttgcgtgattgtgtgtgttttgcgtggtagtgtggtgtgttggtgtgtgcgtttgttgttgtttttcggcgtgtcgtttggtgttgtcgcgtgtggttttttttacgcgcgttcgtgtgtcgtgtttgtattatgttagtggtcgtttttgttcgtcgtggtgtgtgtgttgttgcggtcgcgttcggtgttttttgtgtcggtggttgcgtgtcgttttgttcgttatttttttttgtcgtttgttttgttgttatttttgttttgtgtgtgtgtgttgttgtgtgtcgtgttgttttgcggtgtgtttttgttgttcgtcgtgtttgttcgtcggcgtatgtttgttgttagtgttcggtcgttttttttttgttcgtacgtatggtatcgttgttgttttttttatcgttttttttttttcggtgtgtgtgcgtgttgtttgagtttcggcgtgtttcgtttggcgtttgttttcgttagtttgtttgtgttgtgatattttgtttgttcgtgggttcgtttgtttagtgtcgcgtgcggcgtgtacggtttgtggcgtttgcgtg

SEQ ID NO: 10280 - DNA, 709 bp, Artificial Sequence
  chemically treated genomic DNA (Homo sapiens) CpG-island No: 10280
cacgcaaacgccacaaaccgtacacgccgcacgcgacactaaacaaacgaacccacgaacaaacaaaatatcacaacacaaacaaactaacgaaaacaaacgccaaacgaaacacgccgaaactcaaacaacacgcacacacaccgaaaaaaaaaaaacgataaaaaaaacaacaacgataccatacgtacgaacaaaaaaaaaacgaccgaacactaacaacaaacatacgccgacgaacaaacacgacgaacaacaaaaacacaccgcaaaacaacacgacacacaacaacacacacacacaaaacaaaaataacaacaaaacaaacgacaaaaaaaaataacgaacaaaacgacacgcaaccaccgacacaaaaaacaccgaacgcgaccgcaacaacacacacaccacgacgaacaaaaacgaccactaacataatacaaacacgacacacgaacgcgcgtaaaaaaaaccacacgcgacaacaccaaacgacacgccgaaaaacaacaacaaacgcacacaccaacacaccacactaccacgcaaaacacacacaatcacgcaaccaacaacaaacgacaaacaccgaacgaccaacaacaaacaacaacacaacaataaacaacaacaaccacacaccacgaacaatcaaaaacgaacgacgcataacacaacacaaacacccgaacaaaacatcaaccacaa

SEQ ID NO: 10281 - DNA, 507 bp, Artificial Sequence
  chemically treated genomic DNA (Homo sapiens) CpG-island No: 10281
taaaatcgtagacgcgtaacggttcgggggaatttataaggaggtatttagaagcgcgatagcgaaggtttatattattagagatcgacggggcgtggatagtatggaaggtgaattagcgaggaggtggacgaaacggagaaaagtgaaggtatacgattatagggcgggacgagtcgggtcgtttcgaacgcggagcggcggtacggcgggaatagtcgggtaatttagatcgggtaaaagtcgtagagtggtataataggatagggtagcggagcgggattcgagggcgagggggagcgcggaagtcgcgttcgggaagacgtagtaataaagagggggtttaatcgttggtggggttcgtcgggaaggtaattttggcgagaagtttcgcgcgataaagggagggcggagtgtgttcggggagagaatggattaagtaaaaaaatcgacgtataagtcgcgaaaggagttagtcggaggcgaatagtgtcgatcgtgtgtttt

SEQ ID NO: 10282 - DNA, 507 bp, Artificial Sequence
  chemically treated genomic DNA (Homo sapiens) CpG-island No: 10282
aaaacacacgatcgacactattcgcctccgactaactcctttcgcgacttatacgtcgatttttttacttaatccattctctccccgaacacactccgccctccctttatcgcgcgaaacttctcgccaaaattaccttcccgacgaaccccaccaacgattaaaccccctctttattactacgtcttcccgaacgcgacttccgcgctccccctcgccctcgaatcccgctccgctaccctatcctattataccactctacgacttttacccgatctaaattacccgactattcccgccgtaccgccgctccgcgttcgaaacgacccgactcgtcccgccctataatcgtataccttcacttttctccgtttcgtccacctcctcgctaattcaccttccatactatccacgccccgtcgatctctaataatataaaccttcgctatcgcgcttctaaatacctccttataaattcccccgaaccgttacgcgtctacgatttta

SEQ ID NO: 10283 - DNA, 507 bp, Artificial Sequence
  chemically treated genomic DNA (Homo sapiens) CpG-island No: 10283
aagatatacggtcgatattattcgttttcgattgatttttttcgcgatttatacgtcgatttttttgtttaatttatttttttttcggatatatttcgttttttttttgtcgcgcggagtttttcgttaaaattattttttcggcgggttttattagcggttgggttttttttttgttgttgcgttttttcgagcgcggttttcgcgttttttttcgttttcgggtttcgtttcgttgttttgttttattgtgttattttgcggtttttgttcggtttgggttgttcgattgttttcgtcgtgtcgtcgtttcgcgttcggggcggttcggttcgtttcgttttgtggtcgtgtgtttttattttttttcgtttcgtttattttttcgttagtttattttttatgttgtttacgtttcgtcggtttttggtggtgtggattttcgttgtcgcgtttttgggtgtttttttgtgggttttttcgggtcgttgcgcgtttgcggttttg

SEQ ID NO: 10284 - DNA, 507 bp, Artificial Sequence
  chemically treated genomic DNA (Homo sapiens) CpG-island No: 10284
caaaaccgcaaacgcgcaacgacccgaaaaaacccacaaaaaaacacccaaaaacgcgacaacgaaaatccacaccaccaaaaaccgacgaaacgtaaacaacataaaaaataaactaacgaaaaaataaacgaaacgaaaaaaaataaaaacacacgaccacaaaacgaaacgaaccgaaccgccccgaacgcgaaacgacgacacgacgaaaacaatcgaacaacccaaaccgaacaaaaaccgcaaaataacacaataaaacaaaacaacgaaacgaaacccgaaaacgaaaaaaaacgcgaaaaccgcgctcgaaaaaacgcaacaacaaaaaaaaaacccaaccgctaataaaacccgccgaaaaaataattttaacgaaaaactccgcgcgacaaaaaaaaaacgaaatatatccgaaaaaaaaataaattaaacaaaaaaatcgacgtataaatcgcgaaaaaaatcaatcgaaaacgaataatatcgaccgtatatctt

SEQ ID NO: 10285 - DNA, 525 bp, Artificial Sequence
  chemically treated genomic DNA (Homo sapiens) CpG-island No: 10285
attatcggtattgattaacgttttttgcgtcgtaatcgtatgcgttagatcgataatcggatttttatcgttatgaattaggtgaattgtcgtggttgtagacgtagttttcggtaggttcgtatagcgttcgttaaaagtaatgacgcgtgaagtaaggttcggttcggttttaatgttttttagtattataatcgcgttttgagagaaatcgatgagcgtcgtggcgttagtttttatttcgttttgtttttgttagtagcgtatcgttttaataaacgtcggtatgatcgtatttatacgcgtttggcgattatttttcgtaatattttgtatcgaaaattattgacgtttcgtcggattatcgttcggtttcgcgttatcgatatttattattagcgtattaggaaatagcggtgtaaattagttgtttattttttttattgttatcgggttattttcgatatcgtggaaaagtagtaataattgttgcgtaggtttattcgggttttgaataataaaatg

SEQ ID NO: 10286 - DNA, 525 bp, Artificial Sequence
  chemically treated genomic DNA (Homo sapiens) CpG-island No: 10286
cattttattattcaaaacccgaataaacctacgcaacaattattactacttttccacgatatcgaaaataacccgataacaataaaaaaaataaacaactaatttacaccgctatttcctaatacgctaataataaatatcgataacgcgaaaccgaacgataatccgacgaaacgtcaataattttcgatacaaaatattacgaaaaataatcgccaaacgcgtataaatacgatcataccgacgtttattaaaacgatacgctactaacaaaaacaaaacgaaataaaaactaacgccacgacgctcatcgatttctctcaaaacgcgattataatactaaaaaacattaaaaccgaaccgaaccttacttcacgcgtcattacttttaacgaacgctatacgaacctaccgaaaactacgtctacaaccacgacaattcacctaattcataacgataaaaatccgattatcgatctaacgcatacgattacgacgcaaaaaacgttaatcaataccgataat

SEQ ID NO: 10287 - DNA, 525 bp, Artificial Sequence
  chemically treated genomic DNA (Homo sapiens) CpG-island No: 10287
tattttgttgtttaaagttcggataaatttgcgtaatagttgttattgtttttttacggtgtcggggataattcggtggtaatgggggaaataggtaattggtttgtatcgttgttttttgatgcgttggtggtgagtgtcggtggcgcggagtcgagcggtaattcggcggggcgttagtggttttcggtgtagggtattacggaagataatcgttaggcgcgtgtggatgcgattatgtcgacgtttattgaaacggtgcgttattggtagaaatagagcggagtaggggttaacgttacggcgtttatcggttttttttaaggcgcgattatggtgttggagagtattaaagtcgaatcgggttttgttttacgcgttattgtttttaacggacgttatgcgagtttgtcggaaattgcgtttatagttacgataatttatttgatttatggcggtgaagattcggttatcgatttggcgtatgcggttgcggcgtaggaagcgttaattagtgtcggtggt

SEQ ID NO: 10288 - DNA, 525 bp, Artificial Sequence
  chemically treated genomic DNA (Homo sapiens) CpG-island No: 10288
accaccgacactaattaacgcttcctacgccgcaaccgcatacgccaaatcgataaccgaatcttcaccgccataaatcaaataaattatcgtaactataaacgcaatttccgacaaactcgcataacgtccgttaaaaacaataacgcgtaaaacaaaacccgattcgactttaatactctccaacaccataatcgcgccttaaaaaaaaccgataaacgccgtaacgttaacccctactccgctctatttctaccaataacgcaccgtttcaataaacgtcgacataatcgcatccacacgcgcctaacgattatcttccgtaataccctacaccgaaaaccactaacgccccgccgaattaccgctcgactccgcgccaccgacactcaccaccaacgcatcaaaaaacaacgatacaaaccaattacctatttcccccattaccaccgaattatccccgacaccgtaaaaaaacaataacaactattacgcaaatttatccgaactttaaacaacaaaata

SEQ ID NO: 10289 - DNA, 652 bp, Artificial Sequence
  chemically treated genomic DNA (Homo sapiens) CpG-island No: 10289
tgcgtcgaaaaatggttaggtcgttggtattaatattattggttttttcgaggtttgtatgttcggcgggatggcgatgaaatggcgttggcgtaagcgtatggaagttgtaggtaaattaacggataaattaaatttggtgtgcggttcggtataaatttgttggtataaattcgttcgttattgggatgtggagttgcgtgagatttttatgcgtttcggttagttgtttatggattcgaaacgtatgattgaagtttgtgacgaaatatatcggcgtggtgtcgattttcggcgtgatttatattggtaattatgagtttttataatcgttgtacgatgcgttggataaattttaggtcgatatcggtatcgatatcgatatgtatatcgacgttgttagcggtggttttttggtatcgttcgtcgtttcggatatcgtttgggattttcgtttgtcgcgtgtgaaatcgattagtgttttaggttattaattcggtttggtttcgttgggttgcggttgggttatttggcgtgacgaagaagcgttgtcgtaggaattggtgtttaacgttgattatttgggtggttaaattggtatttttgttattaatttttttcgttcggcgggttaggtaattgtatagtatta

SEQ ID NO: 10290 - DNA, 652 bp, Artificial Sequence
  chemically treated genomic DNA (Homo sapiens) CpG-island No: 10290
taatactatacaattacctaacccgccgaacgaaaaaaattaataacaaaaataccaatttaaccacccaaataatcaacgttaaacaccaattcctacgacaacgcttcttcgtcacgccaaataacccaaccgcaacccaacgaaaccaaaccgaattaataacctaaaacactaatcgatttcacacgcgacaaacgaaaatcccaaacgatatccgaaacgacgaacgataccaaaaaaccaccgctaacaacgtcgatatacatatcgatatcgataccgatatcgacctaaaatttatccaacgcatcgtacaacgattataaaaactcataattaccaatataaatcacgccgaaaatcgacaccacgccgatatatttcgtcacaaacttcaatcatacgtttcgaatccataaacaactaaccgaaacgcataaaaatctcacgcaactccacatcccaataacgaacgaatttataccaacaaatttataccgaaccgcacaccaaatttaatttatccgttaatttacctacaacttccatacgcttacgccaacgccatttcatcgccatcccgccgaacatacaaacctcgaaaaaaccaataatattaataccaacgacctaaccatttttcgacgca

SEQ ID NO: 10291 - DNA, 652 bp, Artificial Sequence
  chemically treated genomic DNA (Homo sapiens) CpG-island No: 10291
tagtattgtgtaattatttgattcgtcgggcgggagaagttgatggtaaaagtattaatttgattatttaggtagttaacgttgaatattagtttttgcggtagcgttttttcgttacgttagataatttagtcgtagtttagcggagttagatcgaattgatggtttgaagtattgatcgattttatacgcggtaggcggaagttttagacgatattcggggcgacgaacggtgttaggaagttatcgttggtagcgtcgatgtgtatgtcgatgtcgatatcggtatcggtttggaatttatttagcgtatcgtgtagcggttgtgggaatttatagttattagtgtaggttacgtcgaaagtcggtattacgtcgatgtgtttcgttataggttttaattatgcgtttcgggtttataaataattgatcggggcgtatagggattttacgtagttttatattttagtagcgggcgaatttatgttagtagatttgtatcggatcgtatattaggtttggtttattcgttggtttgtttgtagtttttatacgtttgcgttaacgttattttatcgttatttcgtcgagtatataggtttcggaagaattaatggtgttggtgttaacggtttgattatttttcggcgta

SEQ ID NO: 10292 - DNA, 652 bp, Artificial Sequence
  chemically treated genomic DNA (Homo sapiens) CpG-island No: 10292
tacgccgaaaaataatcaaaccgttaacaccaacaccattaattcttccgaaacctatatactcgacgaaataacgataaaataacgttaacgcaaacgtataaaaactacaaacaaaccaacgaataaaccaaacctaatatacgatccgatacaaatctactaacataaattcgcccgctactaaaatataaaactacgtaaaatccctatacgccccgatcaattatttataaacccgaaacgcataattaaaacctataacgaaacacatcgacgtaataccgactttcgacgtaacctacactaataactataaattcccacaaccgctacacgatacgctaaataaattccaaaccgataccgatatcgacatcgacatacacatcgacgctaccaacgataacttcctaacaccgttcgtcgccccgaatatcgtctaaaacttccgcctaccgcgtataaaatcgatcaatacttcaaaccatcaattcgatctaactccgctaaactacgactaaattatctaacgtaacgaaaaaacgctaccgcaaaaactaatattcaacgttaactacctaaataatcaaattaatacttttaccatcaacttctcccgcccgacgaatcaaataattacacaatacta

SEQ ID NO: 10293 - DNA, 860 bp, Artificial Sequence
  chemically treated genomic DNA (Homo sapiens) CpG-island No: 10293
  unsure (708, 796)
tacgatgttagttagcggcggttttttttatttattcggttagttaggattttattttttagtcggtcgagtatttgtattagtatcggcgggaatattatattgttatcgttttcgtcgtcggattgttgaagcgtattcgttaggttgcggcgttgcgttttcgttagtttatcggtggcggttttaattttgatgagtggcgtgaagtttttcggttgataaatcgtttggatgcgggttttgtcgttttgtattgtggttagtcggtcgtcgttttagtcgtattaggttatttgcggttttcgtgatagcgatatttagttcgttaggtttcgtttacgtcgttatattcgttttgttattttgcggtttagcgggtcgtaaagatagcgattttcgattagcggttttttatattgtgttcgcgtgtagtgtattagtcggtgttgattgtcgtaatggtatcggtgagttcgtttattattcgtgcggataatttttttcgggatgaggtcggttttttttgttagtttgtcgtgacggttatatcggtaaagatagtgcgcgttacgggcgatacggttattcggttatatgttgagggtgttgttcgtgtgtagtttcgggtcgggtcggcggttatttgtcgggtttgttgtttcgggatgcgatatttagatcgcggcggggtgtgaacgtcggtanttgcggtggtgtgtacgtattcgggttgcgcggtcgtgtcggtgatcgcgagacgtcgggtattcggttattcgttgtcggcggttgnagcgtaggtcgggggataagcgggagcgttcgcgcgcgggtattcggttgttttcgttatcgga

SEQ ID NO: 10294 - DNA, 860 bp, Artificial Sequence
  chemically treated genomic DNA (Homo sapiens) CpG-island No: 10294
  unsure (65, 153)
tccgataacgaaaacaaccgaatacccgcgcgcgaacgctcccgcttatcccccgacctacgctncaaccgccgacaacgaataaccgaatacccgacgtctcgcgatcaccgacacgaccgcgcaacccgaatacgtacacaccaccgcaantaccgacgttcacaccccgccgcgatctaaatatcgcatcccgaaacaacaaacccgacaaataaccgccgacccgacccgaaactacacacgaacaacaccctcaacatataaccgaataaccgtatcgcccgtaacgcgcactatctttaccgatataaccgtcacgacaaactaacaaaaaaaaccgacctcatcccgaaaaaaattatccgcacgaataataaacgaactcaccgataccattacgacaatcaacaccgactaatacactacacgcgaacacaatataaaaaaccgctaatcgaaaatcgctatctttacgacccgctaaaccgcaaaataacaaaacgaatataacgacgtaaacgaaacctaacgaactaaatatcgctatcacgaaaaccgcaaataacctaatacgactaaaacgacgaccgactaaccacaatacaaaacgacaaaacccgcatccaaacgatttatcaaccgaaaaacttcacgccactcatcaaaattaaaaccgccaccgataaactaacgaaaacgcaacgccgcaacctaacgaatacgcttcaacaatccgacgacgaaaacgataacaatataatattcccgccgatactaatacaaatactcgaccgactaaaaaataaaatcctaactaaccgaataaataaaaaaaaccgccgctaactaacatcgta

SEQ ID NO: 10295 - DNA, 860 bp, Artificial Sequence
  chemically treated genomic DNA (Homo sapiens) CpG-island No: 10295
  unsure (65, 153)
ttcggtggcgaaagtaatcgggtattcgcgcgcggacgttttcgtttatttttcgatttgcgttntagtcgtcgatagcgggtggtcgggtattcgacgtttcgcgattatcgatacgatcgcgtaattcgggtacgtatatattatcgtagntgtcggcgtttatatttcgtcgcgatttggatatcgtatttcgaagtagtagattcggtaggtaatcgtcggttcgattcggagttgtatacggatagtatttttagtatgtggtcggataatcgtatcgttcgtgacgcgtattatttttatcggtatgatcgttacggtaggttgatagagaaaatcgattttatttcggaaggggttattcgtacggatgatgagcggatttatcggtattattacgatagttagtatcggttggtgtattatacgcggatataatatgaagagtcgttggtcgaaagtcgttatttttacgattcgttgggtcgtagggtggtaaaacgggtgtggcggcgtgaacgggatttgacgggttggatgtcgttgttacggaaatcgtaagtgatttggtacggttgggacggcgatcggttgattataatatagaacgatagaattcgtatttagacgatttattagtcggggagttttacgttatttattagagttgaaatcgttatcggtgagttggcgaaaacgtagcgtcgtagtttggcggatgcgttttagtagttcggcggcgaagacggtggtagtgtggtgttttcgtcggtgttggtgtagatgttcgatcggttggaaagtgaaattttggttgatcgggtgagtgaggaaagtcgtcgttggttggtatcgtg

SEQ ID NO: 10296 - DNA, 860 bp, Artificial Sequence
  chemically treated genomic DNA (Homo sapiens) CpG-island No: 10296
  unsure (708, 796)
cacgataccaaccaacgacgactttcctcactcacccgatcaaccaaaatttcactttccaaccgatcgaacatctacaccaacaccgacgaaaacaccacactaccaccgtcttcgccgccgaactactaaaacgcatccgccaaactacgacgctacgttttcgccaactcaccgataacgatttcaactctaataaataacgtaaaactccccgactaataaatcgtctaaatacgaattctatcgttctatattataatcaaccgatcgccgtcccaaccgtaccaaatcacttacgatttccgtaacaacgacatccaacccgtcaaatcccgttcacgccgccacacccgttttaccaccctacgacccaacgaatcgtaaaaataacgactttcgaccaacgactcttcatattatatccgcgtataatacaccaaccgatactaactatcgtaataataccgataaatccgctcatcatccgtacgaataaccccttccgaaataaaatcgattttctctatcaacctaccgtaacgatcataccgataaaaataatacgcgtcacgaacgatacgattatccgaccacatactaaaaatactatccgtatacaactccgaatcgaaccgacgattacctaccgaatctactacttcgaaatacgatatccaaatcgcgacgaaatataaacgccgacanctacgataatatatacgtacccgaattacgcgatcgtatcgataatcgcgaaacgtcgaatacccgaccacccgctatcgacgactanaacgcaaatcgaaaaataaacgaaaacgtccgcgcgcgaatacccgattactttcgccaccgaa

SEQ ID NO: 10297 - DNA, 566 bp, Artificial Sequence
  chemically treated genomic DNA (Homo sapiens) CpG-island No: 10297
cgttcgcgtaggtatttcggtaggtgattcgaatcgattattcggttttcgttttttagtatttataggcgtaaattttgacgggcgtcggtttttagtatttcggtagttagtaggtttttaaaattcgtttggttaagttgtggttgtaacgtgcgattaaacgtcgaatcgcgatgacgcgttaatttttttagattaatatcgttcggttgttgttgtattaatagcgttttatcgttgtcggtataatcgttaattagtattatcggtttttgtgttagtttaatagtcgtttgaatcgcggtttggcgtaggtgttttataatcgatttttattagcgggataattaattttcgttgtatgtaattagttttgtataatatgtgagcgttgaacggtaagggcgtagtagaaaatatttggcggatttggaggtacgttgtcgttagcgtttatgttcggtgacgaatttttcggtattagtgtaggttaacgtagagagatacgagtcgggggtaattaggtgtacgcgggtcgaaaacgtattatacgggaaaaaacg

SEQ ID NO: 10298 - DNA, 566 bp, Artificial Sequence
  chemically treated genomic DNA (Homo sapiens) CpG-island No: 10298
cgttttttcccgtataatacgttttcgacccgcgtacacctaattacccccgactcgtatctctctacgttaacctacactaataccgaaaaattcgtcaccgaacataaacgctaacgacaacgtacctccaaatccgccaaatattttctactacgcccttaccgttcaacgctcacatattatacaaaactaattacatacaacgaaaattaattatcccgctaataaaaatcgattataaaacacctacgccaaaccgcgattcaaacgactattaaactaacacaaaaaccgataatactaattaacgattataccgacaacgataaaacgctattaatacaacaacaaccgaacgatattaatctaaaaaaattaacgcgtcatcgcgattcgacgtttaatcgcacgttacaaccacaacttaaccaaacgaattttaaaaacctactaactaccgaaatactaaaaaccgacgcccgtcaaaatttacgcctataaatactaaaaaacgaaaaccgaataatcgattcgaatcacctaccgaaatacctacgcgaacg

SEQ ID NO: 10299 - DNA, 566 bp, Artificial Sequence
  chemically treated genomic DNA (Homo sapiens) CpG-island No: 10299
cgttttttttcgtatgatgcgttttcggttcgcgtgtatttgattattttcggttcgtgtttttttgcgttggtttatattggtgtcggggaattcgttatcgggtatggacgttggcggtaacgtgtttttaaattcgttaggtattttttgttgcgtttttgtcgtttagcgtttatatattgtgtaaagttggttgtatgtagcggggattgattatttcgttggtggaagtcggttataaggtatttgcgttagatcgcgatttaggcgattattgaattggtataaaaatcgatagtgttgattggcggttgtatcggtagcggtaaaacgttgttagtgtagtaatagtcgaacggtgttgatttggaagggttggcgcgttatcgcggttcggcgtttggtcgtacgttataattataatttagttaggcgagttttgaaaatttgttggttgtcgaaatgttaaaaatcgacgttcgttagaatttgcgtttgtgggtgttggaagacgaaagtcggatgatcggttcgaattatttgtcggaatgtttgcgcgagcg

SEQ ID NO: 10300 - DNA, 566 bp, Artificial Sequence
  chemically treated genomic DNA (Homo sapiens) CpG-island No: 10300
cgctcgcgcaaacattccgacaaataattcgaaccgatcatccgactttcgtcttccaacacccacaaacgcaaattctaacgaacgtcgatttttaacatttcgacaaccaacaaattttcaaaactcgcctaactaaattataattataacgtacgaccaaacgccgaaccgcgataacgcgccaacccttccaaatcaacaccgttcgactattactacactaacaacgttttaccgctaccgatacaaccgccaatcaacactatcgatttttataccaattcaataatcgcctaaatcgcgatctaacgcaaataccttataaccgacttccaccaacgaaataatcaatccccgctacatacaaccaactttacacaatatataaacgctaaacgacaaaaacgcaacaaaaaatacctaacgaatttaaaaacacgttaccgccaacgtccatacccgataacgaattccccgacaccaatataaaccaacgcaaaaaaacacgaaccgaaaataatcaaatacacgcgaaccgaaaacgcatcatacgaaaaaaaacg

SEQ ID NO: 10301 - DNA, 748 bp, Artificial Sequence
  chemically treated genomic DNA (Homo sapiens) CpG-island No: 10301
cgtagtcgagcgttacggtttcgtagagtagtttcggtcgttggcgcgttatgaggaaggcgttacgtagttcgcgacggagtcggttcgtcgaggacgttgtggttagggtcgggttcgagttgaggtagtttgagttcgcggggtcgtcgtcgttttttttttcgttttcggcgttttcgttgttgttgttgtcgtcgtcgcggttttcgtatttcgatattatatgtttttagtcgtcggttttatatcgtcgtcgtcgtttcgggttcgaaggttcggttcggttcgttgttttttaatttcgtagttcgtcgtattcgttaattcggacgttttacgttagtcgcgtcgtcgtcgcggggttcgttttattttatattttagagtacgtagtttcgtttatcgtttacggagttcgggcgggtatcgatatcgtttaaattttcgtttttaacgggttacgttttgtattttacgtaaatgtacggaagtttttttcgttcgtagtttagttttggtttttatcggttacgatttcgtttacggagtttgcgtaggcgtcgtcgcggggcgtggagaagttgtttttttgggataaggttcgcggggaatatttggaattttgatatcgttgtagtttgttttcgtcgcgttgggttttaggagtcgtaacgataataatcgtgtttattatttttattataggtttcgaagtacgtaggtgtcgttttttattttaatttaa

SEQ ID NO: 10302 - DNA, 748 bp, Artificial Sequence
  chemically treated genomic DNA (Homo sapiens) CpG-island No: 10302
ttaaattaaaataaaaaacgacacctacgtacttcgaaacctataataaaaataataaacacgattattatcgttacgactcctaaaacccaacgcgacgaaaacaaactacaacgatatcaaaattccaaatattccccgcgaaccttatcccaaaaaaacaacttctccacgccccgcgacgacgcctacgcaaactccgtaaacgaaatcgtaaccgataaaaaccaaaactaaactacgaacgaaaaaaacttccgtacatttacgtaaaatacaaaacgtaacccgttaaaaacgaaaatttaaacgatatcgatacccgcccgaactccgtaaacgataaacgaaactacgtactctaaaatataaaataaaacgaaccccgcgacgacgacgcgactaacgtaaaacgtccgaattaacgaatacgacgaactacgaaattaaaaaacaacgaaccgaaccgaaccttcgaacccgaaacgacgacgacgatataaaaccgacgactaaaaacatataatatcgaaatacgaaaaccgcgacgacgacaacaacaacaacgaaaacgccgaaaacgaaaaaaaaaacgacgacgaccccgcgaactcaaactacctcaactcgaacccgaccctaaccacaacgtcctcgacgaaccgactccgtcgcgaactacgtaacgccttcctcataacgcgccaacgaccgaaactactctacgaaaccgtaacgctcgactacg

SEQ ID NO: 10303 - DNA, 748 bp, Artificial Sequence
  chemically treated genomic DNA (Homo sapiens) CpG-island No: 10303
ttaagttgggataaaaaacggtatttacgtgtttcggggtttgtagtgagaatggtggatacgattattgtcgttacggtttttaaaatttagcgcggcgagagtagattatagcggtgttaaggttttaagtatttttcgcgggttttattttaagggagtagtttttttacgtttcgcgacggcgtttgcgtagatttcgtgagcggggtcgtgatcggtgggggttaagattgggttgcgggcggggaaggttttcgtgtatttacgtagggtgtagggcgtggttcgttgggggcggggatttgggcggtgtcggtgttcgttcggatttcgtgagcggtgggcggagttgcgtgttttggggtgtgaggtggggcggatttcgcggcggcggcgcggttgacgtggagcgttcgggttagcgggtgcggcgagttgcgggattggggagtaacgggtcgggtcgggttttcgggttcgaggcggcggcggcggtataaagtcggcgattgggagtatgtaatgtcggaatgcggaggtcgcggcggcggtagtagtagtagcgaggacgtcgaggacgagggagggggcggcggcggtttcgcgggtttagattgttttagttcgagttcgattttggttatagcgttttcggcgggtcggtttcgtcgcgggttgcgtggcgttttttttatggcgcgttagcggtcggagttgttttgcggggtcgtggcgttcggttgcg

SEQ ID NO: 10304 - DNA, 748 bp, Artificial Sequence
  chemically treated genomic DNA (Homo sapiens) CpG-island No: 10304
cgcaaccgaacgccacgaccccgcaaaacaactccgaccgctaacgcgccataaaaaaaacgccacgcaacccgcgacgaaaccgacccgccgaaaacgctataaccaaaatcgaactcgaactaaaacaatctaaacccgcgaaaccgccgccgccccctccctcgtcctcgacgtcctcgctactactactaccgccgccgcgacctccgcattccgacattacatactcccaatcgccgactttataccgccgccgccgcctcgaacccgaaaacccgacccgacccgttactccccaatcccgcaactcgccgcacccgctaacccgaacgctccacgtcaaccgcgccgccgccgcgaaatccgccccacctcacaccccaaaacacgcaactccgcccaccgctcacgaaatccgaacgaacaccgacaccgcccaaatccccgcccccaacgaaccacgccctacaccctacgtaaatacacgaaaaccttccccgcccgcaacccaatcttaacccccaccgatcacgaccccgctcacgaaatctacgcaaacgccgtcgcgaaacgtaaaaaaactactcccttaaaataaaacccgcgaaaaatacttaaaaccttaacaccgctataatctactctcgccgcgctaaattttaaaaaccgtaacgacaataatcgtatccaccattctcactacaaaccccgaaacacgtaaataccgttttttatcccaacttaa

SEQ ID NO: 10305 - DNA, 641 bp, Artificial Sequence
  chemically treated genomic DNA (Homo sapiens) CpG-island No: 10305
tttcgcgaggaaatcgcgagaatgtagtatatttaggttgtgtaaagtgagtagagtttgattgcgacgaagcgttagagcgcggaatagcggcggatttttagttttattgtatattagcgtattatttgcgcgtgggtttttgttggagtcgataaagatcgggatatcgttgcgtattgcgggtagtaacgttgtcggatgtagtatttttgtattaaaagttgttatttttgtcgtttcggtaaacgcgattttattaatgcgttttgttgcggaaattacgcgtggatcggtggtgtagatgttcgggacgtcggtttagatattaatacgagatgcgtgtaaagttttcgttagtaaggttgtcgtataatcgttgtttttacggttaagcgtcgttgtacgatttttattttcgttatcgataaatttttgggtgattattaagtttttattgagacgtgggagtagttgtagcgcggttagtttcgttagcgcggttatatttggttttgtacgattaaatcggtcgttggtacgtattattttacgtatattaaattattgtgtttgaatatcgcgttcgcgtaggattttaataaatagtagggtcgatattagttcgtcgtggttgatta

SEQ ID NO: 10306 - DNA, 641 bp, Artificial Sequence
  chemically treated genomic DNA (Homo sapiens) CpG-island No: 10306
taatcaaccacgacgaactaatatcgaccctactatttattaaaatcctacgcgaacgcgatattcaaacacaataatttaatatacgtaaaataatacgtaccaacgaccgatttaatcgtacaaaaccaaatataaccgcgctaacgaaactaaccgcgctacaactactcccacgtctcaataaaaacttaataatcacccaaaaatttatcgataacgaaaataaaaatcgtacaacgacgcttaaccgtaaaaacaacgattatacgacaaccttactaacgaaaactttacacgcatctcgtattaatatctaaaccgacgtcccgaacatctacaccaccgatccacgcgtaatttccgcaacaaaacgcattaataaaatcgcgtttaccgaaacgacaaaaataacaacttttaatacaaaaatactacatccgacaacgttactacccgcaatacgcaacgatatcccgatctttatcgactccaacaaaaacccacgcgcaaataatacgctaatatacaataaaactaaaaatccgccgctattccgcgctctaacgcttcgtcgcaatcaaactctactcactttacacaacctaaatatactacattctcgcgatttcctcgcgaaa

SEQ ID NO: 10307 - DNA, 641 bp, Artificial Sequence
  chemically treated genomic DNA (Homo sapiens) CpG-island No: 10307
tggttagttacggcgagttgatgtcgattttgttgtttgttgagattttgcgcgaacgcgatgtttaggtatagtggtttgatgtacgtaaagtgatgcgtattaacgatcgatttggtcgtgtagagttagatatagtcgcgttggcggaattggtcgcgttgtagttgtttttacgttttaatgaaggtttagtgattatttagggatttatcggtagcgaaaataaaggtcgtataacgacgtttggtcgtggaggtagcgattatacggtagttttgttggcggaggttttatacgtatttcgtgttgatatttggatcgacgtttcgggtatttatattatcgatttacgcgtagttttcgtagtaaaacgtattgatgaaatcgcgtttgtcgaagcggtagagatggtaatttttggtgtaaaagtattgtattcggtaacgttgttattcgtagtacgtagcgatatttcggtttttgtcggttttagtaaagatttacgcgtaggtggtacgttggtgtgtaataaaattgaaaattcgtcgttgtttcgcgttttggcgtttcgtcgtaattagattttgtttattttgtatagtttgaatatgttgtattttcgcggttttttcgcggaa

SEQ ID NO: 10308 - DNA, 641 bp, Artificial Sequence
  chemically treated genomic DNA (Homo sapiens) CpG-island No: 10308
ttccgcgaaaaaaccgcgaaaatacaacatattcaaactatacaaaataaacaaaatctaattacgacgaaacgccaaaacgcgaaacaacgacgaattttcaattttattacacaccaacgtaccacctacgcgtaaatctttactaaaaccgacaaaaaccgaaatatcgctacgtactacgaataacaacgttaccgaatacaatacttttacaccaaaaattaccatctctaccgcttcgacaaacgcgatttcatcaatacgttttactacgaaaactacgcgtaaatcgataatataaatacccgaaacgtcgatccaaatatcaacacgaaatacgtataaaacctccgccaacaaaactaccgtataatcgctacctccacgaccaaacgtcgttatacgacctttattttcgctaccgataaatccctaaataatcactaaaccttcattaaaacgtaaaaacaactacaacgcgaccaattccgccaacgcgactatatctaactctacacgaccaaatcgatcgttaatacgcatcactttacgtacatcaaaccactatacctaaacatcgcgttcgcgcaaaatctcaacaaacaacaaaatcgacatcaactcgccgtaactaacca

SEQ ID NO: 10309 - DNA, 926 bp, Artificial Sequence
  chemically treated genomic DNA (Homo sapiens) CpG-island No: 10309
gtaacgggtatcgcgttcgaataatcggcgttgattgtttttggtttggtcggtggtttgtattatttgtttaattatagtttgtttaaaagcgtattgtttttcggggcggggagcgtttggtttcgtatcggttatcgcgatatcgaaaaattcggtggtattggtaagaaaatgtcggttatttttatcgttatgttagtcgggttgatggtaatggttgcgttgtcgtcgttgaatggttttgtcggggaatgggttatttattaattattttttaaattgagtaatagtggcgcgtttgttgttcgtttgttggggtcgttgttcgttgtggggttggtaattatcggtgcgttggcggtgatgtgtatggcgaaagtttatggcgttacgtttttcggcgcgtcgcgtattaaagaagtcgaaaacgttatttgtgcgtcgtttttgatgagcgtaagcgtagtggtattggcgatttgttgcgtaattggcggtgttgttgcgtcgtggcgtattgtcgatgttttttgttgttgtatttttgtcgttggagtttgttaatattatcgttttttaatcgatgattacgttgttgttgattgtttgttcgttgttgttatttattattatggcgatttgtaaaggcgatcgtttgttatcgcgttttcgcggtgcggtttgggtgtgcggttacgattacgaaaaattaatggtgattatcgtttacggttttgttatgtcggtgaaataggcgtttgcgtcggtgttgaaattacgtaaatggttgaattcggtgtttttggtgtcgggttggtagtgcgaagggagtgcgttgttgtttcgtcggatgtgcgtttgttgaattggcggtattggtggtgattattgttttacgaggaatttgaaatgagtgtttatat

SEQ ID NO: 10310 - DNA, 926 bp, Artificial Sequence
  chemically treated genomic DNA (Homo sapiens) CpG-island No: 10310
atataaacactcatttcaaattcctcgtaaaacaataatcaccaccaataccgccaattcaacaaacgcacatccgacgaaacaacaacgcactcccttcgcactaccaacccgacaccaaaaacaccgaattcaaccatttacgtaatttcaacaccgacgcaaacgcctatttcaccgacataacaaaaccgtaaacgataatcaccattaatttttcgtaatcgtaaccgcacacccaaaccgcaccgcgaaaacgcgataacaaacgatcgcctttacaaatcgccataataataaataacaacaacgaacaaacaatcaacaacaacgtaatcatcgattaaaaaacgataatattaacaaactccaacgacaaaaatacaacaacaaaaaacatcgacaatacgccacgacgcaacaacaccgccaattacgcaacaaatcgccaataccactacgcttacgctcatcaaaaacgacgcacaaataacgttttcgacttctttaatacgcgacgcgccgaaaaacgtaacgccataaactttcgccatacacatcaccgccaacgcaccgataattaccaaccccacaacgaacaacgaccccaacaaacgaacaacaaacgcgccactattactcaatttaaaaaataattaataaataacccattccccgacaaaaccattcaacgacgacaacgcaaccattaccatcaacccgactaacataacgataaaaataaccgacattttcttaccaataccaccgaatttttcgatatcgcgataaccgatacgaaaccaaacgctccccgccccgaaaaacaatacgcttttaaacaaactataattaaacaaataatacaaaccaccgaccaaaccaaaaacaatcaacgccgattattcgaacgcgatacccgttac

SEQ ID NO: 10311 - DNA, 926 bp, Artificial Sequence
  chemically treated genomic DNA (Homo sapiens) CpG-island No: 10311
atataaatatttattttaggtttttcgtgaaataataattattattagtatcgttagtttaataggcgtatattcggcggaatagtaacgtatttttttcgtattgttagttcggtattagagatatcggatttagttatttgcgtagttttagtatcggcgtaaacgtttgttttatcggtatggtaaaatcgtgagcggtaattattattgatttttcgtggtcgtaatcgtatatttaggtcgtatcgcgggaacgcgatggtaaacgatcgtttttgtaaatcgttataatgatgaatggtagtagcgggtaggtaattagtagtaacgtgattatcggttgagaaacggtggtgttagtaggttttagcggtagaggtatagtagtagagagtatcggtagtacgttacggcgtagtaatatcgttaattacgtagtaaatcgttagtgttattacgtttacgtttattaggagcggcgtataggtggcgttttcggtttttttggtgcgcggcgcgtcgaggaacgtgacgttatagattttcgttatatatattatcgttagcgtatcggtaattgttagttttatagcgagtagcggttttagtagacgggtaataaacgcgttattattgtttagtttgaaaaatgattgatagataatttatttttcggtaaaattatttagcggcggtagcgtagttattgttattagttcgattaatatggcgatggagataatcggtatttttttgttaatattatcgagtttttcgatatcgcgatgatcggtacggaattagacgtttttcgtttcgaggaatagtacgtttttgaataggttatggttaagtagatggtatagattatcgattaggttaagagtaattagcgtcggttgttcgagcgcgatattcgttat

SEQ ID NO: 10312 - DNA, 926 bp, Artificial Sequence
  chemically treated genomic DNA (Homo sapiens) CpG-island No: 10312
ataacgaatatcgcgctcgaacaaccgacgctaattactcttaacctaatcgataatctataccatctacttaaccataacctattcaaaaacgtactattcctcgaaacgaaaaacgtctaattccgtaccgatcatcgcgatatcgaaaaactcgataatattaacaaaaaaataccgattatctccatcgccatattaatcgaactaataacaataactacgctaccgccgctaaataattttaccgaaaaataaattatctatcaatcatttttcaaactaaacaataataacgcgtttattacccgtctactaaaaccgctactcgctataaaactaacaattaccgatacgctaacgataatatatataacgaaaatctataacgtcacgttcctcgacgcgccgcgcaccaaaaaaaccgaaaacgccacctatacgccgctcctaataaacgtaaacgtaataacactaacgatttactacgtaattaacgatattactacgccgtaacgtactaccgatactctctactactatacctctaccgctaaaacctactaacaccaccgtttctcaaccgataatcacgttactactaattacctacccgctactaccattcatcattataacgatttacaaaaacgatcgtttaccatcgcgttcccgcgatacgacctaaatatacgattacgaccacgaaaaatcaataataattaccgctcacgattttaccataccgataaaacaaacgtttacgccgatactaaaactacgcaaataactaaatccgatatctctaataccgaactaacaatacgaaaaaaatacgttactattccgccgaatatacgcctattaaactaacgatactaataataattattatttcacgaaaaacctaaaataaatatttatat

SEQ ID NO: 10313 - DNA, 564 bp, Artificial Sequence
  chemically treated genomic DNA (Homo sapiens) CpG-island No: 10313
ttgcgttcgttgggttagttgttttagatagttattggcggtaggcgataatagcgttattatgtcgtcgcgggtgagttgcgaggtatttagcgttcgttttacgttagtagtcgttttgtcgttgatacgtaggcggatgtcgttttagtttagttgtcgttagcgatcgttgaaggtttttatgtcgatgtttttagaaattcggttagcgggttggtggtatgagtaaaataattgcggttgttcggttcggattgacgtgttagtaggtttgtttttatcgttagacgaaatgttttcgttatgttgacgggatcgttcgcgacggtaatcgtcgtatttattaatatcgcgtcggtttttatttttagcgtttgcgcggtatggttgggaacgtcgatgttagtatcgataattatcggtattgtggtttgttggataataatttttagtatggcgcgggtttttagtttttgattcgagttaatcggcgcgtcgagcggtattatcgttgtatagtcgattttttttagacgtttatataatatcggatcggtttcg

SEQ ID NO: 10314 - DNA, 564 bp, Artificial Sequence
  chemically treated genomic DNA (Homo sapiens) CpG-island No: 10314
cgaaaccgatccgatattatataaacgtctaaaaaaaatcgactatacaacgataataccgctcgacgcgccgattaactcgaatcaaaaactaaaaacccgcgccatactaaaaattattatccaacaaaccacaataccgataattatcgatactaacatcgacgttcccaaccataccgcgcaaacgctaaaaataaaaaccgacgcgatattaataaatacgacgattaccgtcgcgaacgatcccgtcaacataacgaaaacatttcgtctaacgataaaaacaaacctactaacacgtcaatccgaaccgaacaaccgcaattattttactcataccaccaacccgctaaccgaatttctaaaaacatcgacataaaaaccttcaacgatcgctaacgacaactaaactaaaacgacatccgcctacgtatcaacgacaaaacgactactaacgtaaaacgaacgctaaatacctcgcaactcacccgcgacgacataataacgctattatcgcctaccgccaataactatctaaaacaactaacccaacgaacgcaa

SEQ ID NO: 10315 - DNA, 564 bp, Artificial Sequence
  chemically treated genomic DNA (Homo sapiens) CpG-island No: 10315
cggggtcgattcggtattgtgtaaacgtttggaagaagtcggttgtgtagcggtgatgtcgttcggcgcgtcgattggttcgaattagggattggaaattcgcgttatgttggagattattatttagtaggttatagtgtcggtggttgtcgatgttggtatcggcgtttttagttatgtcgcgtaggcgttggaaatgggggtcgacgcggtgttagtgaatacggcgattgtcgtcgcggacgatttcgttaatatggcgaaggtatttcgtttggcggtagaagtaggtttattggtacgttagttcggatcgggtagtcgtagttattttgtttatgttattagttcgttgatcggatttttggaggtatcggtatgaaaatttttagcgatcgttggcgataattggattgggacgatattcgtttgcgtattaacggtaaaacggttgttgacgtagagcgggcgttaaatgtttcgtaatttattcgcgacgatatgatggcgttgttatcgtttgtcgttagtggttatttggaataattggtttaacgggcgtag

SEQ ID NO: 10316 - DNA, 564 bp, Artificial Sequence
  chemically treated genomic DNA (Homo sapiens) CpG-island No: 10316
ctacgcccgttaaaccaattattccaaataaccactaacgacaaacgataacaacgccatcatatcgtcgcgaataaattacgaaacatttaacgcccgctctacgtcaacaaccgttttaccgttaatacgcaaacgaatatcgtcccaatccaattatcgccaacgatcgctaaaaattttcataccgatacctccaaaaatccgatcaacgaactaataacataaacaaaataactacgactacccgatccgaactaacgtaccaataaacctacttctaccgccaaacgaaataccttcgccatattaacgaaatcgtccgcgacgacaatcgccgtattcactaacaccgcgtcgacccccatttccaacgcctacgcgacataactaaaaacgccgataccaacatcgacaaccaccgacactataacctactaaataataatctccaacataacgcgaatttccaatccctaattcgaaccaatcgacgcgccgaacgacatcaccgctacacaaccgacttcttccaaacgtttacacaataccgaatcgaccccg

SEQ ID NO: 10317 - DNA, 1053 bp, Artificial Sequence
  chemically treated genomic DNA (Homo sapiens) CpG-island No: 10317
attttcgtttggttggttggcggcgtatggttgttatggtagaaagcgattcgttggtatattttttttagttttttagtaacgttggcgttatgcgtaatgttgggttggttgtttttattagaaatattggtagtatcgcgaatttatttgttgtttggagcgattatgttcggcgtattttttattttgattgattcggttatcgtttttacgattaatcgtggttcgttttatttttcggggggtttgcgggtttagtagtttggttgattcgtagttttcgggggttattttgacggtcgtgtttttgtcgttttgtgggcgaagattacggtttttgcgagtgattattataagcgttcggcggtgtacggttatcgtaaaagggtaaattaacggtgaaaattaatgttaaaatagcggtattagtcgtggggggaattgtgtaggcggggtttaaagaggggttaagattggcggtaaggtaacgttagattgcgttaaaaacgtagcgattggtcgtaagagaggcgggtttcggtaagcgagagaggcgcggaaggtgtaacgagggcgcgtgtcgagcgggtaagcgtaagaattaagtgcgggtgcgacgaaagttggttaatttgggtaattgcgtcgagagtgtaggtaaagggggagagtcggggttgagacgcggaacgaggtgataatacgggagtcgcgttcggaagaaatcgcgcgcgagggtgtcggtgtattagcggtggcgggagttgtaaggcggggatggtcggcggtatggcgttagcgcgcggtgggggaattttgggcgttgtgggggtcggtttcgggaggagagggttggtgggggtgggggtagttcgggggtgcggcgcgtgggtcggaggtgggggcggggtttttgcgggggtgtgggcgtgtgggttgagggtcgggttcgggggtgcgggtgggcggtggtggtgtgtgtttgtgtttaggatttttttttgatgagtatcgtataggattagttttgggaaatatattatgaagatg

SEQ ID NO: 10318 - DNA, 1053 bp, Artificial Sequence
  chemically treated genomic DNA (Homo sapiens) CpG-island No: 10318
catcttcataatatatttcccaaaactaatcctatacgatactcatcaaaaaaaaatcctaaacacaaacacacaccaccaccgcccacccgcacccccgaacccgaccctcaacccacacgcccacacccccgcaaaaaccccgcccccacctccgacccacgcgccgcacccccgaactacccccacccccaccaaccctctcctcccgaaaccgacccccacaacgcccaaaattcccccaccgcgcgctaacgccataccgccgaccatccccgccttacaactcccgccaccgctaatacaccgacaccctcgcgcgcgatttcttccgaacgcgactcccgtattatcacctcgttccgcgtctcaaccccgactctccccctttacctacactctcgacgcaattacccaaattaaccaactttcgtcgcacccgcacttaattcttacgcttacccgctcgacacgcgccctcgttacaccttccgcgcctctctcgcttaccgaaacccgcctctcttacgaccaatcgctacgtttttaacgcaatctaacgttaccttaccgccaatcttaacccctctttaaaccccgcctacacaattccccccacgactaataccgctattttaacattaattttcaccgttaatttacccttttacgataaccgtacaccgccgaacgcttataataatcactcgcaaaaaccgtaatcttcgcccacaaaacgacaaaaacacgaccgtcaaaataacccccgaaaactacgaatcaaccaaactactaaacccgcaaaccccccgaaaaataaaacgaaccacgattaatcgtaaaaacgataaccgaatcaatcaaaataaaaaatacgccgaacataatcgctccaaacaacaaataaattcgcgatactaccaatatttctaataaaaacaaccaacccaacattacgcataacgccaacgttactaaaaaactaaaaaaaatataccaacgaatcgctttctaccataacaaccatacgccgccaaccaaccaaacgaaaat

SEQ ID NO: 10319 - DNA, 1053 bp, Artificial Sequence
  chemically treated genomic DNA (Homo sapiens) CpG-island No: 10319
tatttttatagtatgttttttaaaattagttttatgcgatgtttattagaaaaaaattttgagtataggtatatattattatcgtttattcgtattttcgaattcgatttttaatttatacgtttatattttcgtaaaaatttcgtttttattttcgatttacgcgtcgtattttcggattgtttttatttttattagtttttttttttcgaagtcgatttttataacgtttagggtttttttatcgcgcgttggcgttatatcgtcggttattttcgttttatagttttcgttatcgttagtgtatcggtattttcgcgcgcggtttttttcgaacgcggttttcgtgttgttatttcgtttcgcgttttaatttcggttttttttttttatttatattttcggcgtagttatttaggttggttaattttcgtcgtattcgtatttggtttttgcgtttgttcgttcggtacgcgttttcgttgtatttttcgcgtttttttcgtttgtcgaggttcgttttttttgcgattaatcgttgcgtttttggcgtaatttggcgttgttttgtcgttagttttaatttttttttgaatttcgtttgtataattttttttacggttaatgtcgttgttttggtattagtttttatcgttggtttatttttttgcgatggtcgtatatcgtcggacgtttgtagtaattattcgtaggaatcgtgattttcgtttataggacggtaaaagtacggtcgttaggatagttttcgaaaattgcggattaattagattattaagttcgtaagtttttcggaaaataagacggattacgattggtcgtagaagcggtaatcgggttagttaaaataaagaatgcgtcgagtatggtcgttttagatagtagatgaattcgcggtgttgttagtgtttttggtgagaataattagtttaatattgcgtataacgttagcgttattaagaagttgaggggaatatgttagcgaatcgttttttgttatagtaattatacgtcgttagttagttaggcggagat

SEQ ID NO: 10320 - DNA, 1053 bp, Artificial Sequence
  chemically treated genomic DNA (Homo sapiens) CpG-island No: 10320
atctccgcctaactaactaacgacgtataattactataacaaaaaacgattcgctaacatattcccctcaacttcttaataacgctaacgttatacgcaatattaaactaattattctcaccaaaaacactaacaacaccgcgaattcatctactatctaaaacgaccatactcgacgcattctttattttaactaacccgattaccgcttctacgaccaatcgtaatccgtcttattttccgaaaaacttacgaacttaataatctaattaatccgcaattttcgaaaactatcctaacgaccgtacttttaccgtcctataaacgaaaatcacgattcctacgaataattactacaaacgtccgacgatatacgaccatcgcaaaaaaataaaccaacgataaaaactaataccaaaacaacgacattaaccgtaaaaaaaattatacaaacgaaattcaaaaaaaaattaaaactaacgacaaaacaacgccaaattacgccaaaaacgcaacgattaatcgcaaaaaaaacgaacctcgacaaacgaaaaaaacgcgaaaaatacaacgaaaacgcgtaccgaacgaacaaacgcaaaaaccaaatacgaatacgacgaaaattaaccaacctaaataactacgccgaaaatataaataaaaaaaaaaaaccgaaattaaaacgcgaaacgaaataacaacacgaaaaccgcgttcgaaaaaaaccgcgcgcgaaaataccgatacactaacgataacgaaaactataaaacgaaaataaccgacgatataacgccaacgcgcgataaaaaaaccctaaacgttataaaaatcgacttcgaaaaaaaaaaactaataaaaataaaaacaatccgaaaatacgacgcgtaaatcgaaaataaaaacgaaatttttacgaaaatataaacgtataaattaaaaatcgaattcgaaaatacgaataaacgataataatatatacctatactcaaaatttttttctaataaacatcgcataaaactaattttaaaaaacatactataaaaata

SEQ ID NO: 10321 - DNA, 633 bp, Artificial Sequence
  chemically treated genomic DNA (Homo sapiens) CpG-island No: 10321
gtatagttatcgttgtaaattgtaaattcgtgtttcgagcgttgtttttttttgtggagcggaggaggggaggtttggggtcgcggcggtgtgcgtttcgttttgatcgtagagtttttttttcgaggaaagcggttggttcggtttcggttggtgattacgcggggtttttgtttgtttggtgcgtaggtgagggtttgttttttcgttgcgtttcggatagtttggaggtgagtacgcgttgggttttggatcgcgagtagcgggagaagtacgagttggtggtcgtgtgtatcgtgtacgtcggcgcgcgcgaggaggtggtgatggtgtttttttcggtgatcgtgtacgacgaggacgattcggcgtttatttttttcgcgggcgtcgatatcgttagcgtcgtggtggagtttaagcggaaggaggtgtttgttcgcgcgtgttgtggtttatttagtgtttgttttcggttatagttcgtttttcggtcggtttagtgttcgtgtagttatttaatcgtgtggtcgattattcgcgtttttatttgtttttcgttttcgtttgcgtcgtttgttttagggggaggggaagggggagttttgttagtatttagttgggttttgtttt

SEQ ID NO: 10322 - DNA, 633 bp, Artificial Sequence
  chemically treated genomic DNA (Homo sapiens) CpG-island No: 10322
aaaacaaaacccaactaaatactaacaaaactcccccttcccctccccctaaaacaaacgacgcaaacgaaaacgaaaaacaaataaaaacgcgaataatcgaccacacgattaaataactacacgaacactaaaccgaccgaaaaacgaactataaccgaaaacaaacactaaataaaccacaacacgcgcgaacaaacacctccttccgcttaaactccaccacgacgctaacgatatcgacgcccgcgaaaaaaataaacgccgaatcgtcctcgtcgtacacgatcaccgaaaaaaacaccatcaccacctcctcgcgcgcgccgacgtacacgatacacacgaccaccaactcgtacttctcccgctactcgcgatccaaaacccaacgcgtactcacctccaaactatccgaaacgcaacgaaaaaacaaaccctcacctacgcaccaaacaaacaaaaaccccgcgtaatcaccaaccgaaaccgaaccaaccgctttcctcgaaaaaaaaactctacgatcaaaacgaaacgcacaccgccgcgaccccaaacctcccctcctccgctccacaaaaaaaaacaacgctcgaaacacgaatttacaatttacaacgataactatac

SEQ ID NO: 10323 - DNA, 633 bp, Artificial Sequence
  chemically treated genomic DNA (Homo sapiens) CpG-island No: 10323
gaggtaaggtttagttgggtgttggtaggattttttttttttttttttttaggatagacggcgtagacggaggcgaaggataaatgaaagcgcgaatggtcggttatacggttgggtggttatacggatattaaatcgatcgagaaacgaattgtggtcggagatagatattgggtagattatagtacgcgcggataagtattttttttcgtttgaattttattacggcgttggcggtgtcgacgttcgcggggaaggtgggcgtcgagtcgttttcgtcgtatacggttatcgggaagggtattattattattttttcgcgcgcgtcggcgtgtacggtgtatacggttattagttcgtatttttttcgttgttcgcggtttaaggtttagcgcgtgtttatttttaggttgttcggggcgtagcggaagggtagatttttatttgcgtattaagtagataggggtttcgcgtgattattagtcgggatcgggttagtcgtttttttcgggaagggggttttgcggttagagcggggcgtatatcgtcgcggttttaggttttttttttttcgttttataggggagggtagcgttcggagtacgagtttgtagtttgtagcgatgattgtgt

SEQ ID NO: 10324 - DNA, 633 bp, Artificial Sequence
  chemically treated genomic DNA (Homo sapiens) CpG-island No: 10324
acacaatcatcgctacaaactacaaactcgtactccgaacgctaccctcccctataaaacgaaaaaaaaaaaacctaaaaccgcgacgatatacgccccgctctaaccgcaaaacccccttcccgaaaaaaacgactaacccgatcccgactaataatcacgcgaaacccctatctacttaatacgcaaataaaaatctacccttccgctacgccccgaacaacctaaaaataaacacgcgctaaaccttaaaccgcgaacaacgaaaaaaatacgaactaataaccgtatacaccgtacacgccgacgcgcgcgaaaaaataataataatacccttcccgataaccgtatacgacgaaaacgactcgacgcccaccttccccgcgaacgtcgacaccgccaacgccgtaataaaattcaaacgaaaaaaaatacttatccgcgcgtactataatctacccaatatctatctccgaccacaattcgtttctcgatcgatttaatatccgtataaccacccaaccgtataaccgaccattcgcgctttcatttatccttcgcctccgtctacgccgtctatcctaaaaaaaaaaaaaaaaaaaatcctaccaacacccaactaaaccttacctc

SEQ ID NO: 10325 - DNA, 697 bp, Artificial Sequence
  chemically treated genomic DNA (Homo sapiens) CpG-island No: 10325
cgagaggtggcggggagagagtaggacgacggaacgatagttaggtcggttagtagtaggagcgtgtgatgcgtacgtaggtagcgacgtgggggttttaggagggcggtacggtattattaagtaagcggcgtgtattcgcggcgtcgtagtggtcgtgggttagggtggtcgcgcggacggcgggagtagcgggttttttgttcggattgtggggtacgttatgggggtaggggatgcggttgacgcgtttagcgcgaggttaagacggtcgatttagcgggtcgatggagcgtgatttcggcgtcgatcgagtcggtcggatgtggggaggggggtgagcggcgggcgggcgtatgcgtggcgggtgttcgggggcgaaaggatttgcgggagtcgcgttgtaggaggggtagcgtggggacggagcgggagagtgaggcgggggttagtgggggggagatcgcgggggggagaaggggagggtagagtagggtggcgagaagttcgggagtaggatggggggcgcgtggggggggggttgttcgaggcgttgagcgggttgggggagagaagcggcggaggtgtttcgggggggtttcgggatgagggaatagggggtgtttagcggggcgggttcggtttgttagaaggggagatttcgtagaaggtatcgagttaaggaggggaaaggttt

SEQ ID NO: 10326 - DNA, 697 bp, Artificial Sequence
  chemically treated genomic DNA (Homo sapiens) CpG-island No: 10326
aaacctttcccctccttaactcgataccttctacgaaatctccccttctaacaaaccgaacccgccccgctaaacaccccctattccctcatcccgaaacccccccgaaacacctccgccgcttctctcccccaacccgctcaacgcctcgaacaaccccccccccacgcgccccccatcctactcccgaacttctcgccaccctactctaccctccccttctcccccccgcgatctcccccccactaacccccgcctcactctcccgctccgtccccacgctacccctcctacaacgcgactcccgcaaatcctttcgcccccgaacacccgccacgcatacgcccgcccgccgctcacccccctccccacatccgaccgactcgatcgacgccgaaatcacgctccatcgacccgctaaatcgaccgtcttaacctcgcgctaaacgcgtcaaccgcatcccctacccccataacgtaccccacaatccgaacaaaaaacccgctactcccgccgtccgcgcgaccaccctaacccacgaccactacgacgccgcgaatacacgccgcttacttaataataccgtaccgccctcctaaaacccccacgtcgctacctacgtacgcatcacacgctcctactactaaccgacctaactatcgttccgtcgtcctactctctccccgccacctctcg

SEQ ID NO: 10327 - DNA, 697 bp, Artificial Sequence
  chemically treated genomic DNA (Homo sapiens) CpG-island No: 10327
agattttttttttttttggttcggtattttttgcggaatttttttttttggtaagtcggattcgtttcgttgagtattttttatttttttatttcggggttttttcgggatattttcgtcgttttttttttttaattcgtttaacgtttcgagtaattttttttttacgcgttttttattttgttttcggatttttcgttattttattttgttttttttttttttttttcgcgattttttttttattggttttcgttttattttttcgtttcgtttttacgttgttttttttgtagcgcgattttcgtagattttttcgttttcgagtattcgttacgtatgcgttcgttcgtcgtttatttttttttttatattcggtcgattcgatcggcgtcgaaattacgttttatcgattcgttaagtcggtcgttttggtttcgcgttagacgcgttagtcgtattttttgtttttatagcgtgttttatagttcggataagaagttcgttgttttcgtcgttcgcgcgattattttaatttacgattattgcggcgtcgcgagtgtacgtcgtttatttggtaatatcgtgtcgtttttttgaggtttttacgtcgttatttgcgtgcgtattatacgtttttgttgttgatcggtttagttatcgtttcgtcgttttgtttttttttcgttatttttcg

SEQ ID NO: 10328 - DNA, 697 bp, Artificial Sequence
  chemically treated genomic DNA (Homo sapiens) CpG-island No: 10328
cgaaaaataacgaaaaaaaaacaaaacgacgaaacgataactaaaccgatcaacaacaaaaacgtataatacgcacgcaaataacgacgtaaaaacctcaaaaaaacgacacgatattaccaaataaacgacgtacactcgcgacgccgcaataatcgtaaattaaaataatcgcgcgaacgacgaaaacaacgaacttcttatccgaactataaaacacgctataaaaacaaaaaatacgactaacgcgtctaacgcgaaaccaaaacgaccgacttaacgaatcgataaaacgtaatttcgacgccgatcgaatcgaccgaatataaaaaaaaaaataaacgacgaacgaacgcatacgtaacgaatactcgaaaacgaaaaaatctacgaaaatcgcgctacaaaaaaaacaacgtaaaaacgaaacgaaaaaataaaacgaaaaccaataaaaaaaaaatcgcgaaaaaaaaaaaaaaaaaacaaaataaaataacgaaaaatccgaaaacaaaataaaaaacgcgtaaaaaaaaaattactcgaaacgttaaacgaattaaaaaaaaaaaacgacgaaaatatcccgaaaaaaccccgaaataaaaaaataaaaaatactcaacgaaacgaatccgacttaccaaaaaaaaaaattccgcaaaaaataccgaaccaaaaaaaaaaaaaatct

SEQ ID NO: 10329 - DNA, 500 bp, Artificial Sequence
  chemically treated genomic DNA (Homo sapiens) CpG-island No: 10329
gattggtcgtcgttgtaatatttcgagtttatggtaggcggatttttagcggggagtgtattcgtttcggtcgttttcgttatttttttttaggcggtgtgatttcggatggcgcggttaagtgtttagagattgtcgttcgatcggagaatttaacgggtgcggagggtaagaaagcggtagcggtaaaggcgaattttttgatttggaagtttcggcggaaaagtcgtattcggtaggttggcgggcgggtaggtatgcgagtcggcgttttattttttagaagtatcgttggggttaaaatggcgtttgtttacgatttttaaaggaatgtagcgcgtaggcgtcgtaattcgttaatcggttaatgagaagacgtaatagtaatgacgttaggtacggtcggaaaggagatttttgggaaaattgagttggaattcgggttttagttaaatatttttttcgggtggattttggtttgattttcgtggtaataacgt

SEQ ID NO: 10330 - DNA, 500 bp, Artificial Sequence
  chemically treated genomic DNA (Homo sapiens) CpG-island No: 10330
acgttattaccacgaaaatcaaaccaaaatccacccgaaaaaaatatttaactaaaacccgaattccaactcaattttcccaaaaatctcctttccgaccgtacctaacgtcattactattacgtcttctcattaaccgattaacgaattacgacgcctacgcgctacattcctttaaaaatcgtaaacaaacgccattttaaccccaacgatacttctaaaaaataaaacgccgactcgcatacctacccgcccgccaacctaccgaatacgacttttccgccgaaacttccaaatcaaaaaattcgcctttaccgctaccgctttcttaccctccgcacccgttaaattctccgatcgaacgacaatctctaaacacttaaccgcgccatccgaaatcacaccgcctaaaaaaaaataacgaaaacgaccgaaacgaatacactccccgctaaaaatccgcctaccataaactcgaaatattacaacgacgaccaatc

SEQ ID NO: 10331 - DNA, 500 bp, Artificial Sequence
  chemically treated genomic DNA (Homo sapiens) CpG-island No: 10331
acgttattattacgggggttagattaggatttattcgaggaaggtatttaattaaagttcgagttttagtttaatttttttaggagtttttttttcggtcgtgtttggcgttattgttgttgcgtttttttattggtcggttgacgggttgcggcgtttgcgcgttgtatttttttgagggtcgtgggtagacgttattttggttttagcggtgtttttaggaagtagaacgtcggttcgtatgtttgttcgttcgttagtttgtcgggtacgattttttcgtcggggtttttaggttaaagaattcgtttttgtcgttatcgtttttttatttttcgtattcgttaagtttttcggtcgggcggtagtttttgaatatttagtcgcgttattcggggttatatcgtttggaaggaggtgacgggggcggtcggggcggatgtatttttcgttgagagttcgtttgttatggattcggaatattatagcggcgattagtt

SEQ ID NO: 10332 - DNA, 500 bp, Artificial Sequence
  chemically treated genomic DNA (Homo sapiens) CpG-island No: 10332
aactaatcgccgctataatattccgaatccataacaaacgaactctcaacgaaaaatacatccgccccgaccgcccccgtcacctccttccaaacgatataaccccgaataacgcgactaaatattcaaaaactaccgcccgaccgaaaaacttaacgaatacgaaaaataaaaaaacgataacgacaaaaacgaattctttaacctaaaaaccccgacgaaaaaatcgtacccgacaaactaacgaacgaacaaacatacgaaccgacgttctacttcctaaaaacaccgctaaaaccaaaataacgtctacccacgaccctcaaaaaaatacaacgcgcaaacgccgcaacccgtcaaccgaccaataaaaaaacgcaacaacaataacgccaaacacgaccgaaaaaaaaactcctaaaaaaattaaactaaaactcgaactttaattaaataccttcctcgaataaatcctaatctaacccccgtaataataacgt

SEQ ID NO: 10333 - DNA, 1427 bp, Artificial Sequence
  chemically treated genomic DNA (Homo sapiens) CpG-island No: 10333
gtcgtcggagatggagaggcggttgaagattggtaggcggcggttagggtcgaggttgggagatttagagtcgttgaggttgtcggagtttagggagtcgtttaggtagttgtcgcggttcgatagcgagttcggggggttggggggcgcgtcgaatacgggcgagtcggataggcggcgcggtagttggaagttgaagggcggcgagggaggtgcggcggtttcggcggggagggtcgcgttgggcggttcggcgttcgcgggggcgttaggttttgttgttgttgttgttgttgattgcggtagtaggcggcggcggttacggcggtaaagttgtgggtttggatggcgagcggcgtgatgaggttgttgagtttcggatcgaaggcgaaggcgttgttggcgtacgaggtcgacgagtaggtcgcgtacggggttttcggcgttagtaggttttcggcgttttcggtgtcgtatagtagagcggtcgtagtcgcggtcggcgcggaggcgtagtatgtcggggcgttcgagggcgtggaggtcgcggaggtcgaggaataggaggaggcggaggaggagtaggacgaggtcgaagagtaggagggcggcggcggcgtgcgcgacgtggggttgtcgagtagtagcggcgattcgaggtcgttcgggggttgatggtggttcgacgggaagttcgagaagttgaggttgtggtgtaatttgggtcgcggttttcgcgggaagtttaggtgtaacgtatcgcgcgtgttaaaggtacgtaggttttcggagggtttttcgacggcgcgggtcgtcgttcgttcgcgttgtggatgaagtggtagcgcggtttataggggtagaagtcgatggtatgaaaggtgcggtatagttcggttttgtatttcggatggcgagttaggttgcgtagttcgtggaagttatgcgcgaattggtatttttcgtcgtatttgtacgtgtcgtttttttcgaagggtcggtatagttcggttttgtagcgcgtggagttgatttgggagtcgtcgttttttttttgttgttgttgtaggtgtaggaggtgttggttgcgatcgtcgttttcgttaaacgagcggtttcggaatttgttttttttgttgagtagggttgtgcgtcgtttttcgacggttttttaagggtgtcgtaggaggtcggatcgtcggtcgtcgcgttgtcgtagttgttgtcgttagcggcgttcgggaatttgggcgagtagttgtcggggttgggcgcggggtgggcgagtgtatgtaggttgttggtcgagtgtcgtcggaggaatttcggcgcgaagttcgagttgggggcggcggtataggcgtttttatcgtttttttgtttagtatgttgtttaggttgaggttggttagggatttttttgtttg

SEQ ID NO: 10334 - DNA, 1427 bp, Artificial Sequence
  chemically treated genomic DNA (Homo sapiens) CpG-island No: 10334
caaacaaaaaaatccctaaccaacctcaacctaaacaacatactaaacaaaaaaacgataaaaacgcctataccgccgcccccaactcgaacttcgcgccgaaattcctccgacgacactcgaccaacaacctacatacactcgcccaccccgcgcccaaccccgacaactactcgcccaaattcccgaacgccgctaacgacaacaactacgacaacgcgacgaccgacgatccgacctcctacgacacccttaaaaaaccgtcgaaaaacgacgcacaaccctactcaacaaaaaaaacaaattccgaaaccgctcgtttaacgaaaacgacgatcgcaaccaacacctcctacacctacaacaacaacaaaaaaaaaacgacgactcccaaatcaactccacgcgctacaaaaccgaactataccgacccttcgaaaaaaacgacacgtacaaatacgacgaaaaataccaattcgcgcataacttccacgaactacgcaacctaactcgccatccgaaatacaaaaccgaactataccgcacctttcataccatcgacttctacccctataaaccgcgctaccacttcatccacaacgcgaacgaacgacgacccgcgccgtcgaaaaaccctccgaaaacctacgtacctttaacacgcgcgatacgttacacctaaacttcccgcgaaaaccgcgacccaaattacaccacaacctcaacttctcgaacttcccgtcgaaccaccatcaacccccgaacgacctcgaatcgccgctactactcgacaaccccacgtcgcgcacgccgccgccgccctcctactcttcgacctcgtcctactcctcctccgcctcctcctattcctcgacctccgcgacctccacgccctcgaacgccccgacatactacgcctccgcgccgaccgcgactacgaccgctctactatacgacaccgaaaacgccgaaaacctactaacgccgaaaaccccgtacgcgacctactcgtcgacctcgtacgccaacaacgccttcgccttcgatccgaaactcaacaacctcatcacgccgctcgccatccaaacccacaactttaccgccgtaaccgccgccgcctactaccgcaatcaacaacaacaacaacaacaaaacctaacgcccccgcgaacgccgaaccgcccaacgcgaccctccccgccgaaaccgccgcacctccctcgccgcccttcaacttccaactaccgcgccgcctatccgactcgcccgtattcgacgcgccccccaaccccccgaactcgctatcgaaccgcgacaactacctaaacgactccctaaactccgacaacctcaacgactctaaatctcccaacctcgaccctaaccgccgcctaccaatcttcaaccgcctctccatctccgacgac

SEQ ID NO: 10335 - DNA, 1427 bp, Artificial Sequence
  chemically treated genomic DNA (Homo sapiens) CpG-island No: 10335
tagatagagaaatttttggttaattttaatttgaataatatgttggataagaaggcggtggggacgtttgtgtcgtcgtttttagttcgggtttcgcgtcgggattttttcgacggtattcggttagtaatttgtatgtattcgtttatttcgcgtttagtttcggtagttgttcgtttaagttttcgggcgtcgttaacggtagtagttgcggtagcgcggcggtcggcggttcgattttttacggtatttttaaggagtcgtcggggggcggcgtatagttttgtttaataaggagaataaatttcgggatcgttcgtttagcgagaacggcgatcgtagttagtattttttgtatttgtagtagtagtagaaggggggcggcggtttttagattaattttacgcgttataagatcgagttgtgtcggtttttcgaggagagcggtacgtgtaagtacggcgaaaagtgttagttcgcgtatggtttttacgagttgcgtagtttgattcgttattcgaagtataagatcgagttgtgtcgtattttttatattatcggtttttgtttttatgggtcgcgttgttattttatttataacgcggacgagcggcggttcgcgtcgtcggggggtttttcggggatttgcgtgtttttggtacgcgcgatgcgttgtatttgggtttttcgcgggagtcgcggtttaagttgtattatagttttagtttttcgggtttttcgtcgggttattattagttttcgggcggtttcgagtcgtcgttgttgttcgatagttttacgtcgcgtacgtcgtcgtcgtttttttgtttttcggtttcgttttgtttttttttcgtttttttttgtttttcggttttcgcggtttttacgttttcgggcgtttcgatatgttgcgttttcgcgtcggtcgcggttgcggtcgttttgttgtacggtatcgggggcgtcgaggatttgttggcgtcgggggtttcgtgcgcggtttgttcgtcggtttcgtgcgttaataacgttttcgttttcggttcggagtttagtagttttattacgtcgttcgttatttagatttataattttgtcgtcgtggtcgtcgtcgtttattatcgtagttagtagtagtagtagtagtagggtttggcgttttcgcgagcgtcgggtcgtttagcgcgatttttttcgtcggggtcgtcgtatttttttcgtcgttttttagtttttagttgtcgcgtcgtttgttcgattcgttcgtgttcgacgcgttttttagtttttcggattcgttgtcggatcgcgatagttatttaagcggttttttgagtttcggtagttttagcggttttgagttttttagtttcgattttggtcgtcgtttgttaatttttagtcgtttttttattttcgacgat

SEQ ID NO: 10336 - DNA, 1427 bp, Artificial Sequence
  chemically treated genomic DNA (Homo sapiens) CpG-island No: 10336
atcgtcgaaaataaaaaaacgactaaaaattaacaaacgacgaccaaaatcgaaactaaaaaactcaaaaccgctaaaactaccgaaactcaaaaaaccgcttaaataactatcgcgatccgacaacgaatccgaaaaactaaaaaacgcgtcgaacacgaacgaatcgaacaaacgacgcgacaactaaaaactaaaaaacgacgaaaaaaatacgacgaccccgacgaaaaaaatcgcgctaaacgacccgacgctcgcgaaaacgccaaaccctactactactactactactaactacgataataaacgacgacgaccacgacgacaaaattataaatctaaataacgaacgacgtaataaaactactaaactccgaaccgaaaacgaaaacgttattaacgcacgaaaccgacgaacaaaccgcgcacgaaacccccgacgccaacaaatcctcgacgcccccgataccgtacaacaaaacgaccgcaaccgcgaccgacgcgaaaacgcaacatatcgaaacgcccgaaaacgtaaaaaccgcgaaaaccgaaaaacaaaaaaaaacgaaaaaaaaacaaaacgaaaccgaaaaacaaaaaaacgacgacgacgtacgcgacgtaaaactatcgaacaacaacgacgactcgaaaccgcccgaaaactaataataacccgacgaaaaacccgaaaaactaaaactataatacaacttaaaccgcgactcccgcgaaaaacccaaatacaacgcatcgcgcgtaccaaaaacacgcaaatccccgaaaaaccccccgacgacgcgaaccgccgctcgtccgcgttataaataaaataacaacgcgacccataaaaacaaaaaccgataatataaaaaatacgacacaactcgatcttatacttcgaataacgaatcaaactacgcaactcgtaaaaaccatacgcgaactaacacttttcgccgtacttacacgtaccgctctcctcgaaaaaccgacacaactcgatcttataacgcgtaaaattaatctaaaaaccgccgccccccttctactactactacaaatacaaaaaatactaactacgatcgccgttctcgctaaacgaacgatcccgaaatttattctccttattaaacaaaactatacgccgccccccgacgactccttaaaaataccgtaaaaaatcgaaccgccgaccgccgcgctaccgcaactactaccgttaacgacgcccgaaaacttaaacgaacaactaccgaaactaaacgcgaaataaacgaatacatacaaattactaaccgaataccgtcgaaaaaatcccgacgcgaaacccgaactaaaaacgacgacacaaacgtccccaccgccttcttatccaacatattattcaaattaaaattaaccaaaaatttctctatcta

SEQ ID NO: 10337 - DNA, 1042 bp, Artificial Sequence
  chemically treated genomic DNA (Homo sapiens) CpG-island No: 10337
atatcgtagaaggcggatagaagtgtggtcgatatgtttttggatttcgtagtggtcggagcggtaggtcgggaggtcgggaggagtttttggggggcgtggtcggtttgagttacgacgaataacgggcgagggcggggaggggtcgaaagtttgtcgaggggcgagaggagagggcgagtgtagcgatacgagtcgtcgggagggttcggcggagtgcggtaggggggaaggagagaagcgaggagcgttttttcgcgtttcggggtgttcggttcgtttttttcgcggagtcgacggtagttcgcggattgttggaattcggcggttttcgagcgcgcgttttatatagagttcgggagtgcggttgcggcggggcgggcgcgtcgggggaggggatagaattcggttttcgtcggggtttttaggtaacgtcgttcgttcgttcgcggacgttaggcgttttttcggttttttattggtcgtcgttaatttttttttttcgggggagggtgttggaggttttcgggcggggtcggcggttcgggcggtcggtgtggcgtgtagttttcggttttagtggatgtcgtcgggtggcggcgggaaggtacggttgttttttttcggggttgcgcggtcggagagtttcggtacgtttagcgtggtcgggattttgtagttttggacgtgtttttttttgttttgtttttcgaggcggatttgtggagttttaagtttttattttcggttttgtattgggcgcgggaattgtaaaatgttagaatatcgtaattattttcgcggttcggcgggtttgtaaagggtgtttcggttaggaggcgggggttcggggtttgcgtttagtcggtggcggttttagttcgattgtacgtggagtcgcggtgggggtgggggtggttacgcgggcggtcgtcgcggtagttttgtcggtggagttcgggttcgttttttcgtttttttttcgtttaggtttagtaaatagggtttgagcgtcggggtttgtcgggtagggttgagtgtt

SEQ ID NO: 10338 - DNA, 1042 bp, Artificial Sequence
  chemically treated genomic DNA (Homo sapiens) CpG-island No: 10338
aacactcaaccctacccgacaaaccccgacgctcaaaccctatttactaaacctaaacgaaaaaaaaacgaaaaaacgaacccgaactccaccgacaaaactaccgcgacgaccgcccgcgtaaccacccccacccccaccgcgactccacgtacaatcgaactaaaaccgccaccgactaaacgcaaaccccgaacccccgcctcctaaccgaaacaccctttacaaacccgccgaaccgcgaaaataattacgatattctaacattttacaattcccgcgcccaatacaaaaccgaaaataaaaacttaaaactccacaaatccgcctcgaaaaacaaaacaaaaaaaaacacgtccaaaactacaaaatcccgaccacgctaaacgtaccgaaactctccgaccgcgcaaccccgaaaaaaaacaaccgtaccttcccgccgccacccgacgacatccactaaaaccgaaaactacacgccacaccgaccgcccgaaccgccgaccccgcccgaaaacctccaacaccctcccccgaaaaaaaaaaattaacgacgaccaataaaaaaccgaaaaaacgcctaacgtccgcgaacgaacgaacgacgttacctaaaaaccccgacgaaaaccgaattctatcccctcccccgacgcgcccgccccgccgcaaccgcactcccgaactctatataaaacgcgcgctcgaaaaccgccgaattccaacaatccgcgaactaccgtcgactccgcgaaaaaaacgaaccgaacaccccgaaacgcgaaaaaacgctcctcgcttctctccttcccccctaccgcactccgccgaaccctcccgacgactcgtatcgctacactcgccctctcctctcgcccctcgacaaactttcgacccctccccgccctcgcccgttattcgtcgtaactcaaaccgaccacgccccccaaaaactcctcccgacctcccgacctaccgctccgaccactacgaaatccaaaaacatatcgaccacacttctatccgccttctacgatat

SEQ ID NO: 10339 - DNA, 1042 bp, Artificial Sequence
  chemically treated genomic DNA (Homo sapiens) CpG-island No: 10339
gatatttagttttgttcggtaggtttcggcgtttaagttttgtttattgagtttgggcggggagggggcggagaaacgagttcgggttttatcggtaagattgtcgcggcggtcgttcgcgtggttatttttatttttatcgcgattttacgtgtagtcgggttggagtcgttatcgattggacgtaggtttcgagttttcgttttttggtcggggtattttttgtaaattcgtcgggtcgcggggatggttgcgatattttggtattttgtaattttcgcgtttagtataaaatcgaaggtgggagtttaaagttttataggttcgtttcggagaatagggtagggaaagatacgtttagggttgtagaatttcggttacgttaaacgtatcggggtttttcgatcgcgtagtttcggaggagaatagtcgtgttttttcgtcgttattcggcggtatttattggggtcgagagttatacgttatatcggtcgttcgggtcgtcggtttcgttcggaggtttttagtattttttttcggaggaaaaaaattggcggcggttaatgggaggtcgggaaggcgtttgacgttcgcgagcgggcgggcggcgttgtttggagatttcggcgggggtcgagttttgttttttttttcggcgcgttcgtttcgtcgtagtcgtattttcgggttttatatagggcgcgcgttcggaggtcgtcgagttttagtagttcgcgagttgtcgtcggtttcgcggggggggcgggtcgggtatttcggggcgcggaggagcgtttttcgttttttttttttttttttgtcgtatttcgtcggattttttcgacggttcgtgtcgttgtattcgtttttttttttcgtttttcggtaaattttcggttttttttcgttttcgttcgttattcgtcgtggtttaagtcggttacgttttttaagggtttttttcgatttttcggtttgtcgtttcggttattgcgggatttagaaatatgtcgattatatttttgttcgttttttacgatgt

SEQ ID NO: 10340 - DNA, 1042 bp, Artificial Sequence
  chemically treated genomic DNA (Homo sapiens) CpG-island No: 10340
acatcgtaaaaaacgaacaaaaatataatcgacatatttctaaatcccgcaataaccgaaacgacaaaccgaaaaatcgaaaaaaacccttaaaaaacgtaaccgacttaaaccacgacgaataacgaacgaaaacgaaaaaaaaccgaaaatttaccgaaaaacgaaaaaaaaaaacgaatacaacgacacgaaccgtcgaaaaaatccgacgaaatacgacaaaaaaaaaaaaaaaaaacgaaaaacgctcctccgcgccccgaaatacccgacccgccccccccgcgaaaccgacgacaactcgcgaactactaaaactcgacgacctccgaacgcgcgccctatataaaacccgaaaatacgactacgacgaaacgaacgcgccgaaaaaaaaaacaaaactcgacccccgccgaaatctccaaacaacgccgcccgcccgctcgcgaacgtcaaacgccttcccgacctcccattaaccgccgccaatttttttcctccgaaaaaaaatactaaaaacctccgaacgaaaccgacgacccgaacgaccgatataacgtataactctcgaccccaataaataccgccgaataacgacgaaaaaacacgactattctcctccgaaactacgcgatcgaaaaaccccgatacgtttaacgtaaccgaaattctacaaccctaaacgtatctttccctaccctattctccgaaacgaacctataaaactttaaactcccaccttcgattttatactaaacgcgaaaattacaaaataccaaaatatcgcaaccatccccgcgacccgacgaatttacaaaaaataccccgaccaaaaaacgaaaactcgaaacctacgtccaatcgataacgactccaacccgactacacgtaaaatcgcgataaaaataaaaataaccacgcgaacgaccgccgcgacaatcttaccgataaaacccgaactcgtttctccgccccctccccgcccaaactcaataaacaaaacttaaacgccgaaacctaccgaacaaaactaaatatc

SEQ ID NO: 10341 - DNA, 540 bp, Artificial Sequence
  chemically treated genomic DNA (Homo sapiens) CpG-island No: 10341
gaagaggaaaaaaaattggatattttttacggcggttattattttgtgggagtagggaagtcggaagtttcgtttcggaggatcgcggttgggaggtttttagtcggtagggcggggtcgggtattttggggtttcgaggttggaggagggggcggggattgaaggcggggttggggaacgtgtggttcggaggttcgaggttgtgggtggggtttgagggcgggacggagattttgggtttaaggtttttggaaatgggcggggttcgagggcgggaagcggttcgttttgttggaagttcggggttgggggcggggtttgaaggcggggttgggagggagcggggtttgaaggcggggcgggggcggggtttcgcggtcggcgaggggttgagttgatagggtcgtatcggtttattttattttattttatcggaacgtgtttaagttgttgtagttggtattcggttgcgttcggcgaagagggttgggggcgggagatgacggtggttttttttttgtttggtattttgcgagtat

SEQ ID NO: 10342 - DNA, 540 bp, Artificial Sequence
  chemically treated genomic DNA (Homo sapiens) CpG-island No: 10342
atactcgcaaaataccaaacaaaaaaaaaaccaccgtcatctcccgcccccaaccctcttcgccgaacgcaaccgaataccaactacaacaacttaaacacgttccgataaaataaaataaaataaaccgatacgaccctatcaactcaacccctcgccgaccgcgaaaccccgcccccgccccgccttcaaaccccgctccctcccaaccccgccttcaaaccccgcccccaaccccgaacttccaacaaaacgaaccgcttcccgccctcgaaccccgcccatttccaaaaaccttaaacccaaaatctccgtcccgccctcaaaccccacccacaacctcgaacctccgaaccacacgttccccaaccccgccttcaatccccgccccctcctccaacctcgaaaccccaaaatacccgaccccgccctaccgactaaaaacctcccaaccgcgatcctccgaaacgaaacttccgacttccctactcccacaaaataataaccgccgtaaaaaatatccaattttttttcctcttc

SEQ ID NO: 10343 - DNA, 540 bp, Artificial Sequence
  chemically treated genomic DNA (Homo sapiens) CpG-island No: 10343
gtgttcgtagggtgttaagtagggagaagattatcgttatttttcgtttttagtttttttcgtcgagcgtaatcgggtgttagttgtagtagtttaggtacgtttcgataaagtaaggtggggtaagtcgatgcggttttgttagtttagtttttcgtcggtcgcgaggtttcgttttcgtttcgtttttaggtttcgtttttttttagtttcgtttttagatttcgtttttagtttcgaatttttagtaagacgggtcgtttttcgttttcgagtttcgtttatttttaggagttttgagtttagagttttcgtttcgtttttaggttttatttatagtttcgggttttcgagttatacgttttttaatttcgtttttagttttcgtttttttttttagtttcggagttttagggtattcggtttcgttttgtcggttgggagttttttagtcgcgatttttcggggcgggattttcggtttttttgtttttataaaatggtagtcgtcgtgggggatgtttagttttttttttttttt

SEQ ID NO: 10344 - DNA, 540 bp, Artificial Sequence
  chemically treated genomic DNA (Homo sapiens) CpG-island No: 10344
aaaaaaaaaaaaaaactaaacatcccccacgacgactaccattttataaaaacaaaaaaaccgaaaatcccgccccgaaaaatcgcgactaaaaaactcccaaccgacaaaacgaaaccgaataccctaaaactccgaaactaaaaaaaaaaacgaaaactaaaaacgaaattaaaaaacgtataactcgaaaacccgaaactataaataaaacctaaaaacgaaacgaaaactctaaactcaaaactcctaaaaataaacgaaactcgaaaacgaaaaacgacccgtcttactaaaaattcgaaactaaaaacgaaatctaaaaacgaaactaaaaaaaaacgaaacctaaaaacgaaacgaaaacgaaacctcgcgaccgacgaaaaactaaactaacaaaaccgcatcgacttaccccaccttactttatcgaaacgtacctaaactactacaactaacacccgattacgctcgacgaaaaaaactaaaaacgaaaaataacgataatcttctccctacttaacaccctacgaacac

SEQ ID NO: 10345 - DNA, 828 bp, Artificial Sequence
  chemically treated genomic DNA (Homo sapiens) CpG-island No: 10345
cgacgattcgtttatgttttcgttcgttttcgcgcggtggtcgcgtcggatattcgtcgtcgttcgtttggtttgttttcgtcgttttcgttttggtatagcggcggtcgttttggatgcgtatagttaggacgtttcgagtagtatgggggaggcgtcgtagcggtttcgcgcgttgtttaggttcggggtcgggtggagttcgttattcgtagttagtattaggattggggagtcgggttcgtcgtgattttttttatttcggttggtggttcgatgttagggttgtggcggtgcgaagtggtttatcgatcggtttgcgtggcggggacggttagtcgagttcgtttagttttgagcgtaggattgcggttgcgggttatatttgtttcgtcgtaagttcgtttcgcgcgggatcgggggtgttgtcgggtacgaagtttaacgggttttgtgttgtaagcggcggttcgcgtttgggagattagcggtaggaagtgcgggtagcggtcggttaggttttcggggaggtcggggcgcggcgtgtacgttttttcgcgtagttggcgagtcgtatcgttttcgcggtatttttatgcgtttttggtttgttcgttagtcgttgttttttagaggatttagtaggatcgttttttttttttagtcgcgagtacgtgcgcgggggtgcgcgcggaggttacggttattgcggggtttagggaaggaggcgtcgtgtttgtaggattttttttcgtttgggcgtaagtcggcgattagtttggttttttaggatatttttagggtttcggggaattttttttgcgtagg

SEQ ID NO: 10346 - DNA, 828 bp, Artificial Sequence
  chemically treated genomic DNA (Homo sapiens) CpG-island No: 10346
cctacgcaaaaaaaattccccgaaaccctaaaaatatcctaaaaaaccaaactaatcgccgacttacgcccaaacgaaaaaaaatcctacaaacacgacgcctccttccctaaaccccgcaataaccgtaacctccgcgcgcacccccgcgcacgtactcgcgactaaaaaaaaaaaacgatcctactaaatcctctaaaaaacaacgactaacgaacaaaccaaaaacgcataaaaataccgcgaaaacgatacgactcgccaactacgcgaaaaaacgtacacgccgcgccccgacctccccgaaaacctaaccgaccgctacccgcacttcctaccgctaatctcccaaacgcgaaccgccgcttacaacacaaaacccgttaaacttcgtacccgacaacacccccgatcccgcgcgaaacgaacttacgacgaaacaaatataacccgcaaccgcaatcctacgctcaaaactaaacgaactcgactaaccgtccccgccacgcaaaccgatcgataaaccacttcgcaccgccacaaccctaacatcgaaccaccaaccgaaataaaaaaaatcacgacgaacccgactccccaatcctaatactaactacgaataacgaactccacccgaccccgaacctaaacaacgcgcgaaaccgctacgacgcctcccccatactactcgaaacgtcctaactatacgcatccaaaacgaccgccgctataccaaaacgaaaacgacgaaaacaaaccaaacgaacgacgacgaatatccgacgcgaccaccgcgcgaaaacgaacgaaaacataaacgaatcgtcg

SEQ ID NO: 10347 - DNA, 828 bp, Artificial Sequence
  chemically treated genomic DNA (Homo sapiens) CpG-island No: 10347
tttgcgtaggagaggtttttcggagttttggagatgttttaggggattaggttaatcgtcggtttgcgtttaagcgaagggaagttttgtaggtacggcgtttttttttttgagtttcgtagtgatcgtgattttcgcgcgtattttcgcgtacgtgttcgcggttgaggaagaggaacggttttgttgaattttttggaggatagcgattagcgagtaggttaggggcgtatggaggtgtcgcgggggcggtgcggttcgttagttgcgcggaggagcgtgtacgtcgcgtttcggttttttcggggatttggtcggtcgttgttcgtattttttgtcgttggttttttaggcgcgagtcgtcgtttgtagtatagaattcgttgagtttcgtgttcggtagtattttcggtttcgcgcggggcggatttgcggcgggataggtgtagttcgtagtcgtagttttgcgtttaggattgggcgggttcggttggtcgttttcgttacgtaggtcggtcggtgagttatttcgtatcgttatagttttagtatcgggttattagtcggggtgaagaaagttacggcgagttcggttttttagttttgatgttggttgcgggtggcgggttttattcggtttcggatttaggtagcgcgcgagatcgttgcggcgttttttttatgttgttcggagcgttttggttgtgcgtatttaaggcggtcgtcgttgtgttagagcgagggcgacgaggataggttaggcgagcgacggcggatgttcggcgcggttatcgcgcgggggcgggcgaggatatggacgagtcgtcg

SEQ ID NO: 10348 - DNA, 828 bp, Artificial Sequence
  chemically treated genomic DNA (Homo sapiens) CpG-island No: 10348
cgacgactcgtccatatcctcgcccgcccccgcgcgataaccgcgccgaacatccgccgtcgctcgcctaacctatcctcgtcgccctcgctctaacacaacgacgaccgccttaaatacgcacaaccaaaacgctccgaacaacataaaaaaaacgccgcaacgatctcgcgcgctacctaaatccgaaaccgaataaaacccgccacccgcaaccaacatcaaaactaaaaaaccgaactcgccgtaactttcttcaccccgactaataacccgatactaaaactataacgatacgaaataactcaccgaccgacctacgtaacgaaaacgaccaaccgaacccgcccaatcctaaacgcaaaactacgactacgaactacacctatcccgccgcaaatccgccccgcgcgaaaccgaaaatactaccgaacacgaaactcaacgaattctatactacaaacgacgactcgcgcctaaaaaaccaacgacaaaaaatacgaacaacgaccgaccaaatccccgaaaaaaccgaaacgcgacgtacacgctcctccgcgcaactaacgaaccgcaccgcccccgcgacacctccatacgcccctaacctactcgctaatcgctatcctccaaaaaattcaacaaaaccgttcctcttcctcaaccgcgaacacgtacgcgaaaatacgcgcgaaaatcacgatcactacgaaactcaaaaaaaaaaacgccgtacctacaaaacttcccttcgcttaaacgcaaaccgacgattaacctaatcccctaaaacatctccaaaactccgaaaaacctctcctacgcaaa

SEQ ID NO: 10349 - DNA, 709 bp, Artificial Sequence
  chemically treated genomic DNA (Homo sapiens) CpG-island No: 10349
gttcgcggttagcggttcggtgaggcggggaggcggcggtcggtcggttcggtttagtttagttcgtagttgcggcggcgtttagagttggtttttgatcgttttttgtcgcggtcgggtttgttattaggttttggggtttgtatcggttcggttagatttcgtttttcgttttttcgttatggttttggtgcggggcgcggagtcggcggcggggttttttcgttggttgtttacgtacgtttaggtgacggtgttgcgggttcgcgggttgcgggcgaagagttcgggagcgtgtagtattagcgacgcgtatacggtgatttaggtgggtcgcgagaagtatagtacgtcggtggtggagaagacgtacggttgtttcgagtggcgtgaggagtgttttttcgagttgtcgtcgggggttttgggatggtttgttgcgggcgtaggaggatcgacgcgggttcggcgttttgggtcgcgaggtttcgtcgtcgtttgcgagttggtgtttattattatgtatcgttcgtttatcggcgtcgataagtttttgggttaggttacggtggcgttggacgaggttttcggcgtaggtcgcgtttagtatacgtagtaggtgagggtgcgcggggtatagaaatcgttaaaggtttaatagggcggggttggtgggggattaggatttcgaattttagtcgggttagtg

SEQ ID NO: 10350 - DNA, 709 bp, Artificial Sequence
  chemically treated genomic DNA (Homo sapiens) CpG-island No: 10350
cactaacccgactaaaattcgaaatcctaatcccccaccaaccccgccctattaaacctttaacgatttctataccccgcgcaccctcacctactacgtatactaaacgcgacctacgccgaaaacctcgtccaacgccaccgtaacctaacccaaaaacttatcgacgccgataaacgaacgatacataataataaacaccaactcgcaaacgacgacgaaacctcgcgacccaaaacgccgaacccgcgtcgatcctcctacgcccgcaacaaaccatcccaaaacccccgacgacaactcgaaaaaacactcctcacgccactcgaaacaaccgtacgtcttctccaccaccgacgtactatacttctcgcgacccacctaaatcaccgtatacgcgtcgctaatactacacgctcccgaactcttcgcccgcaacccgcgaacccgcaacaccgtcacctaaacgtacgtaaacaaccaacgaaaaaaccccgccgccgactccgcgccccgcaccaaaaccataacgaaaaaacgaaaaacgaaatctaaccgaaccgatacaaaccccaaaacctaataacaaacccgaccgcgacaaaaaacgatcaaaaaccaactctaaacgccgccgcaactacgaactaaactaaaccgaaccgaccgaccgccgcctccccgcctcaccgaaccgctaaccgcgaac

SEQ ID NO: 10351 - DNA, 709 bp, Artificial Sequence
  chemically treated genomic DNA (Homo sapiens) CpG-island No: 10351
tattggttcggttgaagttcggggttttgattttttattagtttcgttttgttaggtttttagcggtttttgtgtttcgcgtatttttatttattgcgtgtgttgggcgcggtttgcgtcgaagatttcgtttagcgttatcgtggtttggtttaggaatttgtcgacgtcgatgagcgagcggtgtatggtggtgagtattagttcgtaggcggcggcggagtttcgcggtttagggcgtcgggttcgcgtcggtttttttgcgttcgtagtaggttattttagggttttcggcggtagttcgaaggagtattttttacgttattcggggtagtcgtgcgttttttttattatcgacgtattgtatttttcgcggtttatttggattatcgtgtacgcgtcgttggtgttgtacgttttcgagtttttcgttcgtagttcgcgggttcgtagtatcgttatttggacgtgcgtgggtagttagcgggaaggtttcgtcgtcggtttcgcgtttcgtattagggttatggcggagaagcggggggcgaggtttggtcgagtcggtgtagattttaggatttggtgataaattcggtcgcggtagaaggcggttaggaattaattttgagcgtcgtcgtagttgcgggttgggttgggtcgggtcgatcggtcgtcgttttttcgttttatcgggtcgttggtcgcgggt

SEQ ID NO: 10352 - DNA, 709 bp, Artificial Sequence
  chemically treated genomic DNA (Homo sapiens) CpG-island No: 10352
acccgcgaccaacgacccgataaaacgaaaaaacgacgaccgatcgacccgacccaacccaacccgcaactacgacgacgctcaaaattaattcctaaccgccttctaccgcgaccgaatttatcaccaaatcctaaaatctacaccgactcgaccaaacctcgccccccgcttctccgccataaccctaatacgaaacgcgaaaccgacgacgaaaccttcccgctaactacccacgcacgtccaaataacgatactacgaacccgcgaactacgaacgaaaaactcgaaaacgtacaacaccaacgacgcgtacacgataatccaaataaaccgcgaaaaatacaatacgtcgataataaaaaaaacgcacgactaccccgaataacgtaaaaaatactccttcgaactaccgccgaaaaccctaaaataacctactacgaacgcaaaaaaaccgacgcgaacccgacgccctaaaccgcgaaactccgccgccgcctacgaactaatactcaccaccatacaccgctcgctcatcgacgtcgacaaattcctaaaccaaaccacgataacgctaaacgaaatcttcgacgcaaaccgcgcccaacacacgcaataaataaaaatacgcgaaacacaaaaaccgctaaaaacctaacaaaacgaaactaataaaaaatcaaaaccccgaacttcaaccgaaccaata

SEQ ID NO: 10353 - DNA, 787 bp, Artificial Sequence
  chemically treated genomic DNA (Homo sapiens) CpG-island No: 10353
tcgtagcgtcgtcgcggcggatttttttaaatttttggtggcggatatttttggaagtagtggcgtggttgtattattcgtgtcgtcgtcgtcgtttattttttttttttaggttaaggcgcgacgtaaggggcgtcgcggcggcgaaatgtagtacgcgttgtttttgttcgcggtcgtacgttaaggttttcgtttgttcggtggagagttgtgtgcggagttttgcgcgtttcgacgagtttaatcgttatttgcgtatttatacgggttataaatttttttagtgtcgtatttgttttcgtaattttagtcgtagcgattattttattacgtacgtgcgtatttatatcggcgagaagttttttgtttgcgacgtgtgcggtcgtcgtttcggcgtagcgatgagaagaaacggtatagtaaggtgtattttaagtagaaggcgcgcgtcgaggagcggtttaagggtttcggtttttattcgttgggtttttttttcgtttttttttgagtaagagatgggtttatgggttggggcgtcgtcgttcggcgcgtacgagtttcgggtcgttttttttttcgttttttttttaattttttttcgtacgttcgagggtcggttttcggtttcgtttttagtttttttgaagcgttcgtcgtatacgttttatttagtattagtttcgcggatagttttcgcggtttaggcgttgttatttttgttagtcgcgttttgggggaagttttttgagattatttagtgaataggtattattttgggatt

SEQ ID NO: 10354 - DNA, 787 bp, Artificial Sequence
  chemically treated genomic DNA (Homo sapiens) CpG-island No: 10354
aatcccaaaataatacctattcactaaataatctcaaaaaacttcccccaaaacgcgactaacaaaaataacaacgcctaaaccgcgaaaactatccgcgaaactaatactaaataaaacgtatacgacgaacgcttcaaaaaaactaaaaacgaaaccgaaaaccgaccctcgaacgtacgaaaaaaaattaaaaaaaaaacgaaaaaaaaaacgacccgaaactcgtacgcgccgaacgacgacgccccaacccataaacccatctcttactcaaaaaaaaacgaaaaaaaaacccaacgaataaaaaccgaaacccttaaaccgctcctcgacgcgcgccttctacttaaaatacaccttactataccgtttcttctcatcgctacgccgaaacgacgaccgcacacgtcgcaaacaaaaaacttctcgccgatataaatacgcacgtacgtaataaaataatcgctacgactaaaattacgaaaacaaatacgacactaaaaaaatttataacccgtataaatacgcaaataacgattaaactcgtcgaaacgcgcaaaactccgcacacaactctccaccgaacaaacgaaaaccttaacgtacgaccgcgaacaaaaacaacgcgtactacatttcgccgccgcgacgccccttacgtcgcgccttaacctaaaaaaaaaaaataaacgacgacgacgacacgaataatacaaccacgccactacttccaaaaatatccgccaccaaaaatttaaaaaaatccgccgcgacgacgctacga

SEQ ID NO: 10355 - DNA, 787 bp, Artificial Sequence
  chemically treated genomic DNA (Homo sapiens) CpG-island No: 10355
aattttagggtagtgtttatttattgggtggttttagaagattttttttaaagcgcggttgataagggtgatagcgtttggatcgcgggaattgttcgcggagttggtgttgaatagggcgtgtgcggcgggcgttttaaggaaattggaagcgggatcggaggtcggttttcgggcgtgcgaggaggagttggaagaagagcggggaggggaacggttcggaattcgtgcgcgtcgaacggcggcgttttaatttataaatttattttttgtttagagagaagcgaaggagaggtttagcgagtaaaagtcgaggtttttgagtcgtttttcggcgcgcgttttttgtttgaggtgtattttgttgtgtcgtttttttttatcgttgcgtcgaagcggcggtcgtatacgtcgtaagtaaaaggtttttcgtcggtgtgggtgcgtacgtgcgtggtgaggtggtcgttgcggttgaagttgcggaggtagatgcggtattggaagggtttgtggttcgtgtggatgcgtaggtggcgattgagttcgtcggagcgcgtaaagtttcgtatataattttttatcgggtaagcgaaggttttggcgtgcggtcgcgggtagaagtagcgcgtgttgtatttcgtcgtcgcgacgttttttgcgtcgcgttttggtttgggggaaaggggtgggcggcggcggcggtacgggtggtgtagttacgttattgtttttagggatgttcgttattagaggtttagggaagttcgtcgcggcggcgttgcga

SEQ ID NO: 10356 - DNA, 787 bp, Artificial Sequence
  chemically treated genomic DNA (Homo sapiens) CpG-island No: 10356
tcgcaacgccgccgcgacgaacttccctaaacctctaataacgaacatccctaaaaacaataacgtaactacaccacccgtaccgccgccgccgcccacccctttcccccaaaccaaaacgcgacgcaaaaaacgtcgcgacgacgaaatacaacacgcgctacttctacccgcgaccgcacgccaaaaccttcgcttacccgataaaaaattatatacgaaactttacgcgctccgacgaactcaatcgccacctacgcatccacacgaaccacaaacccttccaataccgcatctacctccgcaacttcaaccgcaacgaccacctcaccacgcacgtacgcacccacaccgacgaaaaaccttttacttacgacgtatacgaccgccgcttcgacgcaacgataaaaaaaaacgacacaacaaaatacacctcaaacaaaaaacgcgcgccgaaaaacgactcaaaaacctcgacttttactcgctaaacctctccttcgcttctctctaaacaaaaaataaatttataaattaaaacgccgccgttcgacgcgcacgaattccgaaccgttcccctccccgctcttcttccaactcctcctcgcacgcccgaaaaccgacctccgatcccgcttccaatttccttaaaacgcccgccgcacacgccctattcaacaccaactccgcgaacaattcccgcgatccaaacgctatcacccttatcaaccgcgctttaaaaaaaatcttctaaaaccacccaataaataaacactaccctaaaatt

SEQ ID NO: 10357 - DNA, 674 bp, Artificial Sequence
  chemically treated genomic DNA (Homo sapiens) CpG-island No: 10357
gcgtgcgggcgtcgggatcgtagtatttgtgacgtcgaagtttagtaggtcgtagacgggagttacgcgcggttttggtatagggtaaaaatttacgtttaggtaggcgggtagttacgatgtcgggtaagtttaggtagattttcggtggcgtatagggaagtagcggtttagaaggtcgggtggacgtaggcggagttcgacggttgggaggtcgtcggcgcgtaggggtcgggtttcgttaggatggtttcgatcgagaaaggggattcgaagcgttcgggagcgcggggcgtgttcgggttagtaggggatttgggcgtcgagagagcggttagagcgcggaggtcggattcgagagttcgagggagcgggtggcgggttgtttcgcggtttggggttaggtatgacgcggtcgttgttcggacggacgtaaggaagggagttcgggagaagtgagaagattttgtaaaaggtagcgagtaagatcggttgtttgggaattttttgcgcgttcggcgaaggtttttaaatttggcgggggcggggtatggggcggtttttttttattgcggtcgcggcggggtttttaaagtttgtgagcgttcgttttgtgcgaggtaaggtgggtatagtattaaagagtgtgtttttttttttttttcgtttttaaa

SEQ ID NO: 10358 - DNA, 674 bp, Artificial Sequence
  chemically treated genomic DNA (Homo sapiens) CpG-island No: 10358
tttaaaaacgaaaaaaaaaaaaaaacacactctttaatactatacccaccttacctcgcacaaaacgaacgctcacaaactttaaaaaccccgccgcgaccgcaataaaaaaaaaccgccccataccccgcccccgccaaatttaaaaaccttcgccgaacgcgcaaaaaattcccaaacaaccgatcttactcgctaccttttacaaaatcttctcacttctcccgaactcccttccttacgtccgtccgaacaacgaccgcgtcatacctaaccccaaaccgcgaaacaacccgccacccgctccctcgaactctcgaatccgacctccgcgctctaaccgctctctcgacgcccaaatcccctactaacccgaacacgccccgcgctcccgaacgcttcgaatcccctttctcgatcgaaaccatcctaacgaaacccgacccctacgcgccgacgacctcccaaccgtcgaactccgcctacgtccacccgaccttctaaaccgctacttccctatacgccaccgaaaatctacctaaacttacccgacatcgtaactacccgcctacctaaacgtaaatttttaccctataccaaaaccgcgcgtaactcccgtctacgacctactaaacttcgacgtcacaaatactacgatcccgacgcccgcacgc

SEQ ID NO: 10359 - DNA, 674 bp, Artificial Sequence
  chemically treated genomic DNA (Homo sapiens) CpG-island No: 10359
tttaaaagcggaggaagggagggaatatattttttggtgttgtgtttattttgtttcgtatagagcgggcgtttataggttttgggggtttcgtcgcgatcgtagtggggagaggtcgttttatgtttcgttttcgttaaatttaagagttttcgtcgagcgcgtaggaggtttttagataatcggttttgttcgttgttttttgtagaatttttttatttttttcgagtttttttttttgcgttcgttcgggtaacggtcgcgttatgtttagttttaggtcgcgaggtagttcgttattcgttttttcgggttttcgggttcgattttcgcgttttggtcgttttttcggcgtttaggttttttattggttcgaatacgtttcgcgttttcggacgtttcgagttttttttttcggtcgaggttattttggcgaggttcgatttttgcgcgtcggcggttttttagtcgtcgggtttcgtttgcgtttattcggttttttggatcgttgtttttttgtgcgttatcgggggtttgtttgggtttgttcgatatcgtggttgttcgtttatttgagcgtaggtttttattttgtgttagggtcgcgcgtggttttcgtttgcggtttgttgggtttcggcgttataggtattgcggtttcggcgttcgtacgt

SEQ ID NO: 10360 - DNA, 674 bp, Artificial Sequence
  chemically treated genomic DNA (Homo sapiens) CpG-island No: 10360
acgtacgaacgccgaaaccgcaatacctataacgccgaaacccaacaaaccgcaaacgaaaaccacgcgcgaccctaacacaaaataaaaacctacgctcaaataaacgaacaaccacgatatcgaacaaacccaaacaaacccccgataacgcacaaaaaaacaacgatccaaaaaaccgaataaacgcaaacgaaacccgacgactaaaaaaccgccgacgcgcaaaaatcgaacctcgccaaaataacctcgaccgaaaaaaaaaactcgaaacgtccgaaaacgcgaaacgtattcgaaccaataaaaaacctaaacgccgaaaaaacgaccaaaacgcgaaaatcgaacccgaaaacccgaaaaaacgaataacgaactacctcgcgacctaaaactaaacataacgcgaccgttacccgaacgaacgcaaaaaaaaaaactcgaaaaaaataaaaaaattctacaaaaaacaacgaacaaaaccgattatctaaaaacctcctacgcgctcgacgaaaactcttaaatttaacgaaaacgaaacataaaacgacctctccccactacgatcgcgacgaaacccccaaaacctataaacgcccgctctatacgaaacaaaataaacacaacaccaaaaaatatattccctcccttcctccgcttttaaa

SEQ ID NO: 10361 - DNA, 521 bp, Artificial Sequence
  chemically treated genomic DNA (Homo sapiens) CpG-island No: 10361
aggtgcgtcgtcgcgggtacggttcggttcgtttgttttttgttttggaaggaagtgttttcgaagatttttcgtcgggcgtcgggtacggtaggtagggcggcgggttcgggagttagcgggaatttcgaggtagcggcggcggcggcggcggcggggcgtttaaaaatgcgtgttggttttggagaggatgtagagcgtttcgtaggtgtggttgtattttaggtgcgtcgtagcgtacgataggtttcgaaagcgtttgtgtttttcgtagcgggggtagcggtacggtaggtttagcgaggttatggtttcgtcgttttcgcggtacgcgggttttatcgcggtcgtttcgtcggttagtcgggcgcgtttatgggggatcgcgggcgaggttttttgcggggttaggaaggtttagggcgttcgcggtttggggcgaggaggttggaagagacgcgatgagttttaggaagagggtatcgttgtttttattttggtttttagttcggagtttttat

SEQ ID NO: 10362 - DNA, 521 bp, Artificial Sequence
  chemically treated genomic DNA (Homo sapiens) CpG-island No: 10362
ataaaaactccgaactaaaaaccaaaataaaaacaacgataccctcttcctaaaactcatcgcgtctcttccaacctcctcgccccaaaccgcgaacgccctaaaccttcctaaccccgcaaaaaacctcgcccgcgatcccccataaacgcgcccgactaaccgacgaaacgaccgcgataaaacccgcgtaccgcgaaaacgacgaaaccataacctcgctaaacctaccgtaccgctacccccgctacgaaaaacacaaacgctttcgaaacctatcgtacgctacgacgcacctaaaatacaaccacacctacgaaacgctctacatcctctccaaaaccaacacgcatttttaaacgccccgccgccgccgccgccgccgctacctcgaaattcccgctaactcccgaacccgccgccctacctaccgtacccgacgcccgacgaaaaatcttcgaaaacacttccttccaaaacaaaaaacaaacgaaccgaaccgtacccgcgacgacgcacct

SEQ ID NO: 10363 - DNA, 521 bp, Artificial Sequence
  chemically treated genomic DNA (Homo sapiens) CpG-island No: 10363
atgagggtttcgggttgggagttagggtgggagtagcgatattttttttttaagatttatcgcgttttttttagttttttcgttttaggtcgcgggcgttttgagtttttttgatttcgtagggggtttcgttcgcggttttttatgagcgcgttcggttgatcggcggggcggtcgcggtggagttcgcgtgtcgcgggggcggcggggttatggtttcgttggatttgtcgtgtcgttgttttcgttgcggggagtataagcgttttcggagtttgtcgtgcgttacggcgtatttggagtatagttatatttacgagacgttttatattttttttaagattaatacgtatttttgagcgtttcgtcgtcgtcgtcgtcgtcgttgtttcggggttttcgttggttttcgagttcgtcgttttgtttgtcgtgttcggcgttcggcgagaggttttcgagagtatttttttttagggtaaggagtaggcggatcgggtcgtgttcgcggcgacgtattt

SEQ ID NO: 10364 - DNA, 521 bp, Artificial Sequence
  chemically treated genomic DNA (Homo sapiens) CpG-island No: 10364
aaatacgtcgccgcgaacacgacccgatccgcctactccttaccctaaaaaaaaatactctcgaaaacctctcgccgaacgccgaacacgacaaacaaaacgacgaactcgaaaaccaacgaaaaccccgaaacaacgacgacgacgacgacgacgaaacgctcaaaaatacgtattaatcttaaaaaaaatataaaacgtctcgtaaatataactatactccaaatacgccgtaacgcacgacaaactccgaaaacgcttatactccccgcaacgaaaacaacgacacgacaaatccaacgaaaccataaccccgccgcccccgcgacacgcgaactccaccgcgaccgccccgccgatcaaccgaacgcgctcataaaaaaccgcgaacgaaaccccctacgaaatcaaaaaaactcaaaacgcccgcgacctaaaacgaaaaaactaaaaaaaacgcgataaatcttaaaaaaaaaatatcgctactcccaccctaactcccaacccgaaaccctcat

SEQ ID NO: 10365 - DNA, 542 bp, Artificial Sequence
  chemically treated genomic DNA (Homo sapiens) CpG-island No: 10365
gacggcgcggcgaggtgtgtttgaggatggggcgaaaggagatcgtgttcgggtggtttttttcgaaggaaaaattcgtcgttttttattcggtgtttgttttttcgagtatttttcggggtgggcgtcgagggtattcgggcgttgggagcggggtcgttttttttttttattatcgagttattgtcgggtaggtatcgcgcgggcggaatcgagtattggggattgaggcggtcgtcgcgtgtttgtttagcgttcgttttcgtcgtcgcgggttttaattttcgatatatttgcgagttggttttttgtttcggggtttcggttttgtaagtaaataggtcgagcgcggcgttgtattcgaaatgcggtatttgagtagcgcggcgaaggcgagcgggggagcggtttattcgggtaattgtttttttcggtttttaattttttcgtcgggtttttttcgtcggttgtagtttattgattagtttaggagtcgtcggtttaatttagttttcgaggggttattataatttttattttgg

SEQ ID NO: 10366 - DNA, 542 bp, Artificial Sequence
  chemically treated genomic DNA (Homo sapiens) CpG-island No: 10366
ccaaaataaaaattataataacccctcgaaaactaaattaaaccgacgactcctaaactaatcaataaactacaaccgacgaaaaaaacccgacgaaaaaattaaaaaccgaaaaaaacaattacccgaataaaccgctcccccgctcgccttcgccgcgctactcaaataccgcatttcgaatacaacgccgcgctcgacctatttacttacaaaaccgaaaccccgaaacaaaaaaccaactcgcaaatatatcgaaaattaaaacccgcgacgacgaaaacgaacgctaaacaaacacgcgacgaccgcctcaatccccaatactcgattccgcccgcgcgatacctacccgacaataactcgataataaaaaaaaaaaacgaccccgctcccaacgcccgaataccctcgacgcccaccccgaaaaatactcgaaaaaacaaacaccgaataaaaaacgacgaatttttccttcgaaaaaaaccacccgaacacgatctcctttcgccccatcctcaaacacacctcgccgcgccgtc

SEQ ID NO: 10367 - DNA, 542 bp, Artificial Sequence
  chemically treated genomic DNA (Homo sapiens) CpG-island No: 10367
ttagggtggggattgtgatggtttttcgggagttgggttgagtcggcggtttttgagttaattaatgggttgtagtcggcggaaggggttcggcggggggattaggagtcgagaagggtaattattcgggtgggtcgttttttcgttcgttttcgtcgcgttgtttaaatgtcgtatttcggatgtagcgtcgcgttcggtttgtttgtttgtagagtcggggtttcggggtaggaagttaattcgtaagtgtatcggagattagggttcgcggcggcgggggcgggcgttgggtaaatacgcggcggtcgttttaatttttagtgttcgatttcgttcgcgcggtgtttgttcggtagtgattcggtggtgggggaagggggcggtttcgtttttagcgttcgggtgttttcgacgtttatttcgggggatattcggggaggtaggtatcggatggggagcgacgggtttttttttcgggagaggttattcgggtacggttttttttcgttttatttttaggtatatttcgtcgcgtcgtt

SEQ ID NO: 10368 - DNA, 542 bp, Artificial Sequence
  chemically treated genomic DNA (Homo sapiens) CpG-island No: 10368
aacgacgcgacgaaatatacctaaaaataaaacgaaaaaaaaccgtacccgaataacctctcccgaaaaaaaaacccgtcgctccccatccgatacctacctccccgaatatcccccgaaataaacgtcgaaaacacccgaacgctaaaaacgaaaccgcccccttcccccaccaccgaatcactaccgaacaaacaccgcgcgaacgaaatcgaacactaaaaattaaaacgaccgccgcgtatttacccaacgcccgcccccgccgccgcgaaccctaatctccgatacacttacgaattaacttcctaccccgaaaccccgactctacaaacaaacaaaccgaacgcgacgctacatccgaaatacgacatttaaacaacgcgacgaaaacgaacgaaaaaacgacccacccgaataattacccttctcgactcctaatccccccgccgaaccccttccgccgactacaacccattaattaactcaaaaaccgccgactcaacccaactcccgaaaaaccatcacaatccccaccctaa

SEQ ID NO: 10369 - DNA, 900 bp, Artificial Sequence
  chemically treated genomic DNA (Homo sapiens) CpG-island No: 10369
tattgtcggttattagtatcgcgtttataattttttataattttagggcggttcgggcgtcggtttcggcgttcgggggtgcgtagcggggaggtcgggtcggggttcgagtttcgggcgcggtgtgcggaggttttcgttcggtttagttttttcggattcgagggtttcgtagtcgttttcgggaggggtagcgttttcgcgtttcgcgcgtttcgggaggtcgtagcggggcgtgagagtcgcgtgggggcgggaagcgggttttgttcgaggcggtttttttttcgatgtcgagaaggaagtcgtatttatcgcgtcgggtttcggaggcggtcgtgggttacggcgggtcggggcggttaggcgggaggagcgggggaggcgggggtcggggtcggcgagttgagtgggatgttcggtttttcgcgcgtttttagattcgttcgggtagttttattttcggcgtcggtcggttcggagcgagttattttcgtttcgttaggcggcgttaggtcggggggttagagttttcgggtggtttcggagggggcgggcgagtaggtgggggtaggggatcggttagttcgttagtttcggcgcggcgtagtcggttgttcgtttcgttttttttcgttaggtttcgttttttcgtcgggtcgcgcgttcggagaggtcgcggtcgttattgtttcgtcgggggtttttttgtttttttgcgcggcgtggggacggttcgagtcggggaagggggtgggggaaggggagcgtttgtggtaagaggagttagtgggggaaggggacgttaggttgggcggggttttggcgaggagggggcgtggcgtagaggatttgataaagattttggttgtttttcgttttttgaaattggggttaggg

SEQ ID NO: 10370 - DNA, 900 bp, Artificial Sequence
  chemically treated genomic DNA (Homo sapiens) CpG-island No: 10370
ccctaaccccaatttcaaaaaacgaaaaacaaccaaaatctttatcaaatcctctacgccacgccccctcctcgccaaaaccccgcccaacctaacgtccccttcccccactaactcctcttaccacaaacgctccccttcccccacccccttccccgactcgaaccgtccccacgccgcgcaaaaaaacaaaaaaacccccgacgaaacaataacgaccgcgacctctccgaacgcgcgacccgacgaaaaaacgaaacctaacgaaaaaaaacgaaacgaacaaccgactacgccgcgccgaaactaacgaactaaccgatcccctacccccacctactcgcccgccccctccgaaaccacccgaaaactctaaccccccgacctaacgccgcctaacgaaacgaaaataactcgctccgaaccgaccgacgccgaaaataaaactacccgaacgaatctaaaaacgcgcgaaaaaccgaacatcccactcaactcgccgaccccgacccccgcctcccccgctcctcccgcctaaccgccccgacccgccgtaacccacgaccgcctccgaaacccgacgcgataaatacgacttccttctcgacatcgaaaaaaaaaccgcctcgaacaaaacccgcttcccgcccccacgcgactctcacgccccgctacgacctcccgaaacgcgcgaaacgcgaaaacgctacccctcccgaaaacgactacgaaaccctcgaatccgaaaaaactaaaccgaacgaaaacctccgcacaccgcgcccgaaactcgaaccccgacccgacctccccgctacgcacccccgaacgccgaaaccgacgcccgaaccgccctaaaattataaaaaattataaacgcgatactaataaccgacaata

SEQ ID NO: 10371 - DNA, 900 bp, Artificial Sequence
  chemically treated genomic DNA (Homo sapiens) CpG-island No: 10371
ttttaattttagttttaaggggcggggaataattagaatttttgttaggttttttacgttacgtttttttttcgttagagtttcgtttagtttgacgttttttttttttattagttttttttgttatagacgtttttttttttttattttttttttcggttcgggtcgtttttacgtcgcgtaggagagtaaagaaattttcggcggggtagtggcggtcgcggttttttcgaacgcgcgattcggcgagggggcggggtttggcgggagggggcggggcgggtagtcgattgcgtcgcgtcgggattgacgggttaatcggttttttatttttatttattcgttcgtttttttcggggttattcggggattttgatttttcggtttggcgtcgtttgacggagcgggagtggttcgtttcgggtcggtcggcgtcggggatgaggttgttcggacgggtttaggggcgcgcgaggggtcgagtattttatttagttcgtcggtttcggttttcgtttttttcgtttttttcgtttggtcgtttcggttcgtcgtgatttacggtcgttttcggagttcgacgcggtaagtgcgatttttttttcggtatcggggagggggtcgtttcgggtagggttcgtttttcgtttttacgcgatttttacgtttcgttgcggtttttcggagcgcgcggggcgcgaagacgttgtttttttcggaggcggttgcgaggttttcgggttcggaggggttgggtcgggcgggggttttcgtatatcgcgttcggggttcgaatttcggttcggttttttcgttgcgtattttcgagcgtcggagtcggcgttcgggtcgttttggagttgtggaaagttgtggacgcggtgttggtggtcggtagtg

SEQ ID NO: 10372 - DNA, 900 bp, Artificial Sequence
  chemically treated genomic DNA (Homo sapiens) CpG-island No: 10372
cactaccgaccaccaacaccgcgtccacaactttccacaactccaaaacgacccgaacgccgactccgacgctcgaaaatacgcaacgaaaaaaccgaaccgaaattcgaaccccgaacgcgatatacgaaaacccccgcccgacccaacccctccgaacccgaaaacctcgcaaccgcctccgaaaaaaacaacgtcttcgcgccccgcgcgctccgaaaaaccgcaacgaaacgtaaaaatcgcgtaaaaacgaaaaacgaaccctacccgaaacgaccccctccccgataccgaaaaaaaaatcgcacttaccgcgtcgaactccgaaaacgaccgtaaatcacgacgaaccgaaacgaccaaacgaaaaaaacgaaaaaaacgaaaaccgaaaccgacgaactaaataaaatactcgacccctcgcgcgcccctaaacccgtccgaacaacctcatccccgacgccgaccgacccgaaacgaaccactcccgctccgtcaaacgacgccaaaccgaaaaatcaaaatccccgaataaccccgaaaaaaacgaacgaataaataaaaataaaaaaccgattaacccgtcaatcccgacgcgacgcaatcgactacccgccccgccccctcccgccaaaccccgccccctcgccgaatcgcgcgttcgaaaaaaccgcgaccgccactaccccgccgaaaatttctttactctcctacgcgacgtaaaaacgacccgaaccgaaaaaaaaaataaaaaaaaaaaaacgtctataacaaaaaaaactaataaaaaaaaaaaacgtcaaactaaacgaaactctaacgaaaaaaaaacgtaacgtaaaaaacctaacaaaaattctaattattccccgccccttaaaactaaaattaaaa

SEQ ID NO: 10373 - DNA, 557 bp, Artificial Sequence
  chemically treated genomic DNA (Homo sapiens) CpG-island No: 10373
  unsure (124, 452, 472, 479, 488, 491, 529)
tcggcgtaggattcggattcgtatgttatcgcgattttattattcgtttaacgtttagtatttagagggtattcgttaattaatcgcggcgcggagaaaagtcgtgttgcgaggatattttttngtttcgtttattcgagttttaggcgttgaagtttttttatttttttttattttatcgtttttcggtttagttcgtttaggtgtatttcgttttttttttcgtttatttatcgtttttatttggaggtggttcgtcgtcgtttcgtacgttattgttttgtaaattgttttagtagttgggtagttagtaagcgggtcgggaggttggagcggttagttaattagcgatcggcgttataagttgatatgacggtagatcgcgcgaagggtttgcgcgtagtttttcgcggttacgtgggcgtcgcgcgttcggttacgttttttttgtntttttgattaaggggagggncgggcgnttttatttngangtatttttgcggtggaggatgcggtttcgggttttgtngtttgtttttttgttttttttttaaatt

SEQ ID NO: 10374 - DNA, 557 bp, Artificial Sequence
  chemically treated genomic DNA (Homo sapiens) CpG-island No: 10374
  unsure (29, 67, 70, 79, 86, 106, 434)
aatttaaaaaaaaaacaaaaaaacaaacnacaaaacccgaaaccgcatcctccaccgcaaaaatacntcnaaataaaancgcccgnccctccccttaatcaaaaanacaaaaaaaacgtaaccgaacgcgcgacgcccacgtaaccgcgaaaaactacgcgcaaacccttcgcgcgatctaccgtcatatcaacttataacgccgatcgctaattaactaaccgctccaacctcccgacccgcttactaactacccaactactaaaacaatttacaaaacaataacgtacgaaacgacgacgaaccacctccaaataaaaacgataaataaacgaaaaaaaaaacgaaatacacctaaacgaactaaaccgaaaaacgataaaataaaaaaaaataaaaaaacttcaacgcctaaaactcgaataaacgaaacnaaaaaatatcctcgcaacacgacttttctccgcgccgcgattaattaacgaataccctctaaatactaaacgttaaacgaataataaaatcgcgataacatacgaatccgaatcctacgccga

SEQ ID NO: 10375 - DNA, 557 bp, Artificial Sequence
  chemically treated genomic DNA (Homo sapiens) CpG-island No: 10375
  unsure (29, 67, 70, 79, 86, 106, 434)
agtttaaaaagaaagtaaagaaataaatngtaaaattcgaaatcgtattttttatcgtaaaggtatnttnggatggggncgttcgnttttttttttagttagaggnataaagggggcgtggtcgagcgcgcggcgtttacgtgatcgcggagagttgcgcgtaggtttttcgcgcgatttgtcgttatattagtttatggcgtcggtcgttgattggttggtcgttttagtttttcggttcgtttgttggttgtttagttgttaggatagtttgtagagtagtggcgtgcggagcggcggcggattatttttaggtggggacggtgggtgggcggggaaggaagcggaatatatttgagcgggttgggtcggggggcgatggaataaaagaagatggagagattttagcgtttgggattcgggtgggcgaggtnggaaggtgttttcgtagtacggttttttttcgcgtcgcggttggttagcgagtgttttttgggtgttaggcgttgggcggatggtaggatcgcggtagtatacggattcgagttttgcgtcga

SEQ ID NO: 10376 - DNA, 557 bp, Artificial Sequence
  chemically treated genomic DNA (Homo sapiens) CpG-island No: 10376
  unsure (124, 452, 472, 479, 488, 491, 529)
tcgacgcaaaactcgaatccgtatactaccgcgatcctaccatccgcccaacgcctaacacccaaaaaacactcgctaaccaaccgcgacgcgaaaaaaaaccgtactacgaaaacaccttccnacctcgcccacccgaatcccaaacgctaaaatctctccatcttcttttattccatcgccccccgacccaacccgctcaaatatattccgcttccttccccgcccacccaccgtccccacctaaaaataatccgccgccgctccgcacgccactactctacaaactatcctaacaactaaacaaccaacaaacgaaccgaaaaactaaaacgaccaaccaatcaacgaccgacgccataaactaatataacgacaaatcgcgcgaaaaacctacgcgcaactctccgcgatcacgtaaacgccgcgcgctcgaccacgccccctttatncctctaactaaaaaaaaaancgaacgnccccatccnaanatacctttacgataaaaaatacgatttcgaattttacnatttatttctttactttctttttaaact

SEQ ID NO: 10377 - DNA, 1010 bp, Artificial Sequence
  chemically treated genomic DNA (Homo sapiens) CpG-island No: 10377
gggggcgtcggttaagcgggtgttggagtcggcgtttgggtttgggtttgcgttagtaaatttttatttttttttttttttttttttttcgttttaatttcgtcgtttttttcgtttagaatcggtggttttaagattacggtgttatcggggatttgaagttgttattgtaggcgaggcgtagggtggtcgtcggcgatgtagtgtaatacgaacgttagttttgcgcgtagtggggtgtcgggtgttttaagcggtggttcggtatttagatgtacgttgggcggtgtatagggtagggcgggtaggcggtatatcggtattttttgtagcgcgggaggcgaggtataagtaatggagtcgggttcgggtaaggatattcgggtgttcgcggtttaggtttgtagttatataaggtcgtagtcgtagtggaagggattgtgatagagttgtaagtgtgatagcgcgttaagcgcgtcgaaggtgttaggcgttagcgtacgtagtcggttgttgttgatgcgtagggaacgtaggtcgggtagcgtatcgagtgcgtttcggggtagagagtttaggcggttgtggtttattttgagtagttgtagcgcgtttaggttgcgtaggtcgttttacggaaagttggatatgaagttgtggtttagatcgaggtttttgagttgatttagtacggttagtgcgtttggttttacggtgcgtattttattgtgcgttagttatagcgacgtgatttgtgtgacgtcggcgaaggtttcgcgtcgtagtatagtgattttgttcgcggatagattaagcgtcgttacgttggtaggtagttttttcggtattttacgtaattttttgtaagcgtagttcgcgaattggtgagcgtatttgtttacgtaggcgtacggtttcgggtatgattcggttatttttagaagcgtttagattaattatagggttcgaagggggaatatcgcggtttttgtagatggaagttaggtgaa

SEQ ID NO: 10378 - DNA, 1010 bp, Artificial Sequence
  chemically treated genomic DNA (Homo sapiens) CpG-island No: 10378
ttcacctaacttccatctacaaaaaccgcgatattcccccttcgaaccctataattaatctaaacgcttctaaaaataaccgaatcatacccgaaaccgtacgcctacgtaaacaaatacgctcaccaattcgcgaactacgcttacaaaaaattacgtaaaataccgaaaaaactacctaccaacgtaacgacgcttaatctatccgcgaacaaaatcactatactacgacgcgaaaccttcgccgacgtcacacaaatcacgtcgctataactaacgcacaataaaatacgcaccgtaaaaccaaacgcactaaccgtactaaatcaactcaaaaacctcgatctaaaccacaacttcatatccaactttccgtaaaacgacctacgcaacctaaacgcgctacaactactcaaaataaaccacaaccgcctaaactctctaccccgaaacgcactcgatacgctacccgacctacgttccctacgcatcaacaacaaccgactacgtacgctaacgcctaacaccttcgacgcgcttaacgcgctatcacacttacaactctatcacaatcccttccactacgactacgaccttatataactacaaacctaaaccgcgaacacccgaatatccttacccgaacccgactccattacttatacctcgcctcccgcgctacaaaaaataccgatataccgcctacccgccctaccctatacaccgcccaacgtacatctaaataccgaaccaccgcttaaaacacccgacaccccactacgcgcaaaactaacgttcgtattacactacatcgccgacgaccaccctacgcctcgcctacaataacaacttcaaatccccgataacaccgtaatcttaaaaccaccgattctaaacgaaaaaaacgacgaaattaaaacgaaaaaaaaaaaaaaaaaaaaaaataaaaatttactaacgcaaacccaaacccaaacgccgactccaacacccgcttaaccgacgccccc

SEQ ID NO: 10379 - DNA, 1010 bp, Artificial Sequence
  chemically treated genomic DNA (Homo sapiens) CpG-island No: 10379
tttatttggtttttatttgtaggagtcgcgatgtttttttttcgggttttgtggttggtttgggcgtttttaggagtggtcggattatgttcggagtcgtgcgtttgcgtggataagtacgtttattagttcgcggattgcgtttataaagagttgcgtgaggtgtcggaaggattgtttgttaacgtgacgacgtttagtttgttcgcgaataagattattgtgttgcggcgcggggttttcgtcgacgttatataggttacgtcgttgtggttggcgtataatgaggtgcgtatcgtggagttaggcgtattggtcgtgttgagttagtttaagaatttcgatttgagttataattttatatttagtttttcgtggagcgatttgcgtaatttgagcgcgttgtagttgtttaaaatgaattataatcgtttgggttttttgtttcgggacgtattcggtgcgttattcgatttgcgttttttgcgtattaataataatcggttgcgtacgttggcgtttggtattttcgacgcgtttagcgcgttgttatatttgtaattttattataattttttttattgcggttgcggttttgtgtggttgtaggtttgggtcgcgagtattcgggtgtttttattcgagttcgattttattgtttgtgtttcgtttttcgcgttgtagggggtgtcggtgtatcgtttgttcgttttgttttgtgtatcgtttagcgtgtatttgagtgtcgagttatcgtttgaagtattcggtattttattgcgcgtaggattggcgttcgtgttatattgtatcgtcgacggttattttacgtttcgtttgtaatggtaattttagattttcggtggtatcgtagttttagagttatcggttttgagcggggaggacgacggggttggggcggaggaaggagagggagaaggagatggggatttgttgacgtagatttaagtttaaacgtcgattttagtattcgtttggtcggcgttttt

SEQ ID NO: 10380 - DNA, 1010 bp, Artificial Sequence
  chemically treated genomic DNA (Homo sapiens) CpG-island No: 10380
aaaaacgccgaccaaacgaatactaaaatcgacgtttaaacttaaatctacgtcaacaaatccccatctccttctccctctccttcctccgccccaaccccgtcgtcctccccgctcaaaaccgataactctaaaactacgataccaccgaaaatctaaaattaccattacaaacgaaacgtaaaataaccgtcgacgatacaatataacacgaacgccaatcctacgcgcaataaaataccgaatacttcaaacgataactcgacactcaaatacacgctaaacgatacacaaaacaaaacgaacaaacgatacaccgacaccccctacaacgcgaaaaacgaaacacaaacaataaaatcgaactcgaataaaaacacccgaatactcgcgacccaaacctacaaccacacaaaaccgcaaccgcaataaaaaaaattataataaaattacaaatataacaacgcgctaaacgcgtcgaaaataccaaacgccaacgtacgcaaccgattattattaatacgcaaaaaacgcaaatcgaataacgcaccgaatacgtcccgaaacaaaaaacccaaacgattataattcattttaaacaactacaacgcgctcaaattacgcaaatcgctccacgaaaaactaaatataaaattataactcaaatcgaaattcttaaactaactcaacacgaccaatacgcctaactccacgatacgcacctcattatacgccaaccacaacgacgtaacctatataacgtcgacgaaaaccccgcgccgcaacacaataatcttattcgcgaacaaactaaacgtcgtcacgttaacaaacaatccttccgacacctcacgcaactctttataaacgcaatccgcgaactaataaacgtacttatccacgcaaacgcacgactccgaacataatccgaccactcctaaaaacgcccaaaccaaccacaaaacccgaaaaaaaaacatcgcgactcctacaaataaaaaccaaataaa

SEQ ID NO: 10381 - DNA, 728 bp, Artificial Sequence
  chemically treated genomic DNA (Homo sapiens) CpG-island No: 10381
agggtacgggtttcggggggttatttcgttttaggttcgcgtttgtgttgcgtttcgcggagagggttgatttcgaggattgaaattttttttattttaatttcgacgtttttttttaaaatggaaaaaagaatttcgtttcgagtcgtcgcgtcgcgttttttttttttttttttttttcgtttattcgttttttcgttcgtttttttatattatacggttatattttataggatatagattttttttttatagggtacgtttgttagggattatacgtcgggtaaatacgattttcgtcgaagtaggggcggggggggcggggcgacgcgaggatcgagacgcgaggacggaggggttcggttttattcggatttcgtcgtatagtcgtatagttacgagtaggttttgtgcgaattagggcgcgagttttttagagagtcgcggttcgggaggttatagttagtttttttcgttttcggcgttttttagttagggtttgggtcgggtggagtcgcgggagcggcgttgttgggcgtatagattttcggaaagtttaatatacggataacgaaattggttcgcgattaagtttataggtttagtcgttaaggggcgcgcggttttgcggcgttttaagttaggagagagacgatagaaaacgtattttttttttatttttcgatatatatattcgatttttttagaggttgggaagggggtgttag

SEQ ID NO: 10382 - DNA, 728 bp, Artificial Sequence
  chemically treated genomic DNA (Homo sapiens) CpG-island No: 10382
ctaacacccccttcccaacctctaaaaaaatcgaatatatatatcgaaaaataaaaaaaaaatacgttttctatcgtctctctcctaacttaaaacgccgcaaaaccgcgcgccccttaacgactaaacctataaacttaatcgcgaaccaatttcgttatccgtatattaaactttccgaaaatctatacgcccaacaacgccgctcccgcgactccacccgacccaaaccctaactaaaaaacgccgaaaacgaaaaaaactaactataacctcccgaaccgcgactctctaaaaaactcgcgccctaattcgcacaaaacctactcgtaactatacgactatacgacgaaatccgaataaaaccgaacccctccgtcctcgcgtctcgatcctcgcgtcgccccgccccccccgcccctacttcgacgaaaatcgtatttacccgacgtataatccctaacaaacgtaccctataaaaaaaaaatctatatcctataaaatataaccgtataatataaaaaaacgaacgaaaaaacgaataaacgaaaaaaaaaaaaaaaaaaaaaacgcgacgcgacgactcgaaacgaaattcttttttccattttaaaaaaaaacgtcgaaattaaaataaaaaaaatttcaatcctcgaaatcaaccctctccgcgaaacgcaacacaaacgcgaacctaaaacgaaataaccccccgaaacccgtaccct

SEQ ID NO: 10383 - DNA, 728 bp, Artificial Sequence
  chemically treated genomic DNA (Homo sapiens) CpG-island No: 10383
ttaatattttttttttagtttttgggaaaatcgagtgtgtgtgtcggggggtagggagggaatgcgttttttgtcgttttttttttaatttaaagcgtcgtaggatcgcgcgttttttggcggttgagtttgtggatttggtcgcgggttaatttcgttgttcgtgtgttgggtttttcggaggtttgtgcgtttaatagcgtcgttttcgcggttttattcgatttagattttagttggaaagcgtcggaggcggaggaagttgattgtggtttttcgggtcgcggttttttggagggttcgcgttttagttcgtataaagtttgttcgtgattgtgcgattgtgcgacgggattcggatggagtcgagttttttcgttttcgcgtttcggttttcgcgtcgtttcgtttttttcgtttttgtttcggcgggaatcgtgtttgttcggcgtgtagtttttgataagcgtgttttgtaggagaaaagtttgtgttttgtgaagtgtgatcgtgtagtgtaggggggcgggcgggggggcggatgggcggggagggagggaaggggaggggcgcggcgcggcgattcggggcggggtttttttttttattttgaaagaaagcgtcggggttggggtggggggagttttagttttcgggattagtttttttcgcgaagcgtagtataagcgcgggtttgggacggagtagtttttcggagttcgtgtttt

SEQ ID NO: 10384 - DNA, 728 bp, Artificial Sequence
  chemically treated genomic DNA (Homo sapiens) CpG-island No: 10384
aaaacacgaactccgaaaaactactccgtcccaaacccgcgcttatactacgcttcgcgaaaaaaactaatcccgaaaactaaaactccccccaccccaaccccgacgctttctttcaaaataaaaaaaaaaaccccgccccgaatcgccgcgccgcgcccctccccttccctccctccccgcccatccgcccccccgcccgcccccctacactacacgatcacacttcacaaaacacaaacttttctcctacaaaacacgcttatcaaaaactacacgccgaacaaacacgattcccgccgaaacaaaaacgaaaaaaacgaaacgacgcgaaaaccgaaacgcgaaaacgaaaaaactcgactccatccgaatcccgtcgcacaatcgcacaatcacgaacaaactttatacgaactaaaacgcgaaccctccaaaaaaccgcgacccgaaaaaccacaatcaacttcctccgcctccgacgctttccaactaaaatctaaatcgaataaaaccgcgaaaacgacgctattaaacgcacaaacctccgaaaaacccaacacacgaacaacgaaattaacccgcgaccaaatccacaaactcaaccgccaaaaaacgcgcgatcctacgacgctttaaattaaaaaaaaaacgacaaaaaacgcattccctccctaccccccgacacacacactcgattttcccaaaaactaaaaaaaaaatattaa

SEQ ID NO: 10385 - DNA, 621 bp, Artificial Sequence
  chemically treated genomic DNA (Homo sapiens) CpG-island No: 10385
gtggtagcgtggacgagttataagatagcggcgggagtggaaatttttttttttttggagtggggtagggtttggttttttcgaatcgtttagcgggtcgggcgttttcgttagggtttttcgggtcggagcgtttcgtataaaggaggttcgggggttcggtttttgtattttcggggttcggtttcgggtaggggttttcggttttcggcgtcgcgtcgggcgggaggttcgggtagtacgtgcgtttcgtttttagtagggagggaggaattagcgcggttcggtcgggttgttcgcgggtttcgttgtttcgggagcgagttgcggttagttcggtcggttcggggagtaatgaatggggtcgtattgcgtcgtcgtcgttcgggttagggtcgggcggtcgggagtttcggcgttgggagtcgtttttcgttttttcgtttttattagatcgcgttcggcgttttcggggatcgaggtcgggtttcggacgtttagttgttgttcgtttattttagtttttggcggtggcgtttttagaaatttcgcggattttttttttatagtgagtcgtattagcggtcgtaaatttattagagtaatatagttttataatgt

SEQ ID NO: 10386 - DNA, 621 bp, Artificial Sequence
  chemically treated genomic DNA (Homo sapiens) CpG-island No: 10386
acattataaaactatattactctaataaatttacgaccgctaatacgactcactataaaaaaaaaatccgcgaaatttctaaaaacgccaccgccaaaaactaaaataaacgaacaacaactaaacgtccgaaacccgacctcgatccccgaaaacgccgaacgcgatctaataaaaacgaaaaaacgaaaaacgactcccaacgccgaaactcccgaccgcccgaccctaacccgaacgacgacgacgcaatacgaccccattcattactccccgaaccgaccgaactaaccgcaactcgctcccgaaacaacgaaacccgcgaacaacccgaccgaaccgcgctaattcctccctccctactaaaaacgaaacgcacgtactacccgaacctcccgcccgacgcgacgccgaaaaccgaaaacccctacccgaaaccgaaccccgaaaatacaaaaaccgaacccccgaacctcctttatacgaaacgctccgacccgaaaaaccctaacgaaaacgcccgacccgctaaacgattcgaaaaaaccaaaccctaccccactccaaaaaaaaaaaaatttccactcccgccgctatcttataactcgtccacgctaccac

SEQ ID NO: 10387 - DNA, 621 bp, Artificial Sequence
  chemically treated genomic DNA (Homo sapiens) CpG-island No: 10387
atattgtaggattatattgttttaataaatttgcggtcgttaatacgatttattatagggagaggattcgcggaatttttgggggcgttatcgttaagagttggggtgagcgggtagtagttgggcgttcggggttcggtttcggttttcgggggcgtcgggcgcggtttggtgggaacggaaaggcgggaggcggtttttagcgtcggggttttcgatcgttcgattttaattcgggcggcggcggcgtagtgcggttttatttattgtttttcgggtcggtcggattggtcgtagttcgttttcgaagtagcggggttcgcgggtagttcggtcgggtcgcgttggtttttttttttttgttgggagcggggcgtacgtgttgttcgggtttttcgttcggcgcggcgtcggaagtcggggatttttgttcgaagtcgggtttcgagagtgtaggagtcgagttttcgggttttttttgtacggagcgtttcggttcgagaggttttggcggaggcgttcggttcgttgagcggttcggagaagttagattttgttttattttaggggagaggaaatttttattttcgtcgttattttgtgattcgtttacgttgttat

SEQ ID NO: 10388 - DNA, 621 bp, Artificial Sequence
  chemically treated genomic DNA (Homo sapiens) CpG-island No: 10388
ataacaacgtaaacgaatcacaaaataacgacgaaaataaaaatttcctctcccctaaaataaaacaaaatctaacttctccgaaccgctcaacgaaccgaacgcctccgccaaaacctctcgaaccgaaacgctccgtacaaaaaaaacccgaaaactcgactcctacactctcgaaacccgacttcgaacaaaaatccccgacttccgacgccgcgccgaacgaaaaacccgaacaacacgtacgccccgctcccaacaaaaaaaaaaaaaccaacgcgacccgaccgaactacccgcgaaccccgctacttcgaaaacgaactacgaccaatccgaccgacccgaaaaacaataaataaaaccgcactacgccgccgccgcccgaattaaaatcgaacgatcgaaaaccccgacgctaaaaaccgcctcccgcctttccgttcccaccaaaccgcgcccgacgcccccgaaaaccgaaaccgaaccccgaacgcccaactactacccgctcaccccaactcttaacgataacgcccccaaaaattccgcgaatcctctccctataataaatcgtattaacgaccgcaaatttattaaaacaatataatcctacaatat

SEQ ID NO: 10389 - DNA, 790 bp, Artificial Sequence
  chemically treated genomic DNA (Homo sapiens) CpG-island No: 10389
ggatagcgggttgagagtcgatttcgtttttgggtttttttcggtttttttggcgtttgttttttgttcgtttcgtcgggcggttttgtgcgggcggagagagtagtaaggcggtttttcgtattgtttggattttaagggcgggggtcgggcgcggggttagttcggttagggttaggagattcgggaaggggtcgttagcgagtggttttcgcggagttgtttttatttcgtttgtttggagtcgggagttcggcgtgtattgacgtttggggtacgttgggggcgattttcgtggtcgggcggttgatttcggcgattcggcgtagtgtttagaagtgcgttggggggtaatgaagggtagcgttcgttgaggttgaaaggagcgagggtcggcgttgtgtaggttagattttttgttgacgtttgggagtcgttttttgaagaatgagaacggggtcgttattgtaagtaggatgggttttatcgtgggtttcgaaggattaggggtgggcgcgtcggttgttagggttttttttacgttacgtcgcgtgtaggcgaggggaagcgcgtgtcgtgacgatttgcgatgagattagtttgagtaattatagtcgtcggggttgagaaatgtagttagttacgtagcgtagcgtagtttagcgttggttttggtcgggtggtcgtagtcgtttcgcgtttcgtagagggaggtgggggtggattagttttttttaggtggtcgtcggtgggggcgttagaattattttaagagggtggggagttagag

SEQ ID NO: 10390 - DNA, 790 bp, Artificial Sequence
  chemically treated genomic DNA (Homo sapiens) CpG-island No: 10390
ctctaactccccaccctcttaaaataattctaacgcccccaccgacgaccacctaaaaaaaactaatccacccccacctccctctacgaaacgcgaaacgactacgaccacccgaccaaaaccaacgctaaactacgctacgctacgtaactaactacatttctcaaccccgacgactataattactcaaactaatctcatcgcaaatcgtcacgacacgcgcttcccctcgcctacacgcgacgtaacgtaaaaaaaaccctaacaaccgacgcgcccacccctaatccttcgaaacccacgataaaacccatcctacttacaataacgaccccgttctcattcttcaaaaaacgactcccaaacgtcaacaaaaaatctaacctacacaacgccgaccctcgctcctttcaacctcaacgaacgctacccttcattaccccccaacgcacttctaaacactacgccgaatcgccgaaatcaaccgcccgaccacgaaaatcgcccccaacgtaccccaaacgtcaatacacgccgaactcccgactccaaacaaacgaaataaaaacaactccgcgaaaaccactcgctaacgaccccttcccgaatctcctaaccctaaccgaactaaccccgcgcccgacccccgcccttaaaatccaaacaatacgaaaaaccgccttactactctctccgcccgcacaaaaccgcccgacgaaacgaacaaaaaacaaacgccaaaaaaaccgaaaaaaacccaaaaacgaaatcgactctcaacccgctatcc

SEQ ID NO: 10391 - DNA, 790 bp, Artificial Sequence
  chemically treated genomic DNA (Homo sapiens) CpG-island No: 10391
ttttggttttttatttttttagaatagttttgacgtttttatcggcgattatttggaaggggttgatttatttttatttttttttgcgaagcgcggagcggttgcggttattcggttagagttagcgttgagttgcgttgcgttgcgtgattggttgtattttttagtttcgacggttgtggttatttaaattgattttatcgtaggtcgttacgatacgcgttttttttcgtttgtacgcggcgtggcgtgagaggggttttggtagtcggcgcgtttatttttgatttttcgaggtttacgatgaagtttattttatttgtaataacggtttcgtttttattttttaaaagacggtttttagacgttaataaagaatttaatttatatagcgtcggttttcgttttttttagttttagcgagcgttgttttttattattttttagcgtatttttggatattgcgtcgggtcgtcggggttagtcgttcggttacgaaagtcgtttttagcgtgttttaagcgttagtgtacgtcgggttttcggttttaggtaggcggggtggaggtagtttcgcgaaggttattcgttggcgattttttttcgggttttttagttttggtcgggttggtttcgcgttcggttttcgtttttgaaatttaggtagtgcgggaggtcgttttgttgtttttttcgttcgtatagggtcgttcgacggagcgggtagggagtaggcgttaaggaggtcgagaggggtttaggggcgaggtcgatttttagttcgttgttt

SEQ ID NO: 10392 - DNA, 790 bp, Artificial Sequence
  chemically treated genomic DNA (Homo sapiens) CpG-island No: 10392
aaacaacgaactaaaaatcgacctcgcccctaaacccctctcgacctccttaacgcctactccctacccgctccgtcgaacgaccctatacgaacgaaaaaaacaacaaaacgacctcccgcactacctaaatttcaaaaacgaaaaccgaacgcgaaaccaacccgaccaaaactaaaaaacccgaaaaaaaatcgccaacgaataaccttcgcgaaactacctccaccccgcctacctaaaaccgaaaacccgacgtacactaacgcttaaaacacgctaaaaacgactttcgtaaccgaacgactaaccccgacgacccgacgcaatatccaaaaatacgctaaaaaataataaaaaacaacgctcgctaaaactaaaaaaaacgaaaaccgacgctatataaattaaattctttattaacgtctaaaaaccgtcttttaaaaaataaaaacgaaaccgttattacaaataaaataaacttcatcgtaaacctcgaaaaatcaaaaataaacgcgccgactaccaaaacccctctcacgccacgccgcgtacaaacgaaaaaaaacgcgtatcgtaacgacctacgataaaatcaatttaaataaccacaaccgtcgaaactaaaaaatacaaccaatcacgcaacgcaacgcaactcaacgctaactctaaccgaataaccgcaaccgctccgcgcttcgcaaaaaaaaataaaaataaatcaaccccttccaaataatcgccgataaaaacgtcaaaactattctaaaaaaataaaaaaccaaaa

SEQ ID NO: 10393 - DNA, 825 bp, Artificial Sequence
  chemically treated genomic DNA (Homo sapiens) CpG-island No: 10393
ttcgtgacgttggggttttgcggtattttcggttaaaagtatttttcgaaaaaatcgtcgttttaaagtttgttcgttcgtcgtcgcgcgatatttcggcgtcgagttcgggttcgagtgacgttttttgttggtcgcggcggtttgtttagtttttggtttcgggtcgcgttaatttcgcgtagtgtagttgaggcgtcgttcggttttgtaatttcgggtgttttcgggcgttttcgttttcgttttttttttagtaggcgtttgggcgttttttaatttttgtttagtttttttcggattaacgattcgtttcggtttttttgtattttagagattattcgcggcgttttttttttttaatttttttttatttttttagtttatttttcgaggagcgtttaacgggttttgggggttcgtagaattgagtcgcgaagcgcgggggaaaggcggcgagcgtttttcgcggcggcggggaggaagacgaagatttgtgcgtttttaaagttaatgtgaaaatattttttaaatttttgggttgtagttcgaaacgcggggtagtcggaaggttttcgtagttgtcgtgtttttttttttcggggtttgggaagggtttttaggcgttttagagtattcggggtcggttcgcgggggaggtcgtatagacgcgtttttattttgacgaacggggaaggggtaggcgtttgcgattttaattaaatttttcggcgtttcggtttgatgtatatatttgttataggttttaagtgtttaagaagtgtaaattaattttatttttatgttgacgggattcgagtgaat

SEQ ID NO: 10394 - DNA, 825 bp, Artificial Sequence
  chemically treated genomic DNA (Homo sapiens) CpG-island No: 10394
attcactcgaatcccgtcaacataaaaataaaattaatttacacttcttaaacacttaaaacctataacaaatatatacatcaaaccgaaacgccgaaaaatttaattaaaatcgcaaacgcctaccccttccccgttcgtcaaaataaaaacgcgtctatacgacctcccccgcgaaccgaccccgaatactctaaaacgcctaaaaacccttcccaaaccccgaaaaaaaaaaacacgacaactacgaaaaccttccgactaccccgcgtttcgaactacaacccaaaaatttaaaaaatattttcacattaactttaaaaacgcacaaatcttcgtcttcctccccgccgccgcgaaaaacgctcgccgcctttcccccgcgcttcgcgactcaattctacgaacccccaaaacccgttaaacgctcctcgaaaaataaactaaaaaaataaaaaaaaattaaaaaaaaaaaacgccgcgaataatctctaaaatacaaaaaaaccgaaacgaatcgttaatccgaaaaaaactaaacaaaaattaaaaaacgcccaaacgcctactaaaaaaaaaacgaaaacgaaaacgcccgaaaacacccgaaattacaaaaccgaacgacgcctcaactacactacgcgaaattaacgcgacccgaaaccaaaaactaaacaaaccgccgcgaccaacaaaaaacgtcactcgaacccgaactcgacgccgaaatatcgcgcgacgacgaacgaacaaactttaaaacgacgattttttcgaaaaatacttttaaccgaaaataccgcaaaaccccaacgtcacgaa

SEQ ID NO: 10395 - DNA, 825 bp, Artificial Sequence
  chemically treated genomic DNA (Homo sapiens) CpG-island No: 10395
atttattcgggtttcgttagtatgaagatggaattggtttatattttttaggtatttagagtttgtggtaggtgtatatattagatcgaggcgtcgaaggatttagttggggtcgtaggcgtttgtttttttttcgttcgttagggtgggggcgcgtttatgcggtttttttcgcgggtcgatttcgggtgttttgaggcgtttaggagttttttttagatttcggggggggagggtacggtagttacgggagtttttcggttatttcgcgtttcgggttgtagtttagaagtttggaagatgtttttatattaattttgagagcgtataagttttcgttttttttttcgtcgtcgcgggaagcgttcgtcgtttttttttcgcgtttcgcggtttagttttgcgagtttttaagattcgttggacgtttttcgggaggtgagttgagggggtaaagaagaattagagagagaaggcgtcgcgagtagtttttgggatgtagggaggtcggggcgggtcgttggttcgaaggaggttggataggagttggggggcgtttaggcgtttgttgaggggaaggcgggggcggggacgttcgggaatattcggaattgtagagtcgggcggcgttttagttgtattgcgcggagttggcgcggttcgggattaggagttgagtaaatcgtcgcggttaataggaggcgttattcggattcgggttcggcgtcggggtgtcgcgcggcggcgggcgggtaggttttggagcggcggttttttcggaaagtgtttttggtcgggagtgtcgtagaattttagcgttacgag

SEQ ID NO: 10396 - DNA, 825 bp, Artificial Sequence
  chemically treated genomic DNA (Homo sapiens) CpG-island No: 10396
ctcgtaacgctaaaattctacgacactcccgaccaaaaacactttccgaaaaaaccgccgctccaaaacctacccgcccgccgccgcgcgacaccccgacgccgaacccgaatccgaataacgcctcctattaaccgcgacgatttactcaactcctaatcccgaaccgcgccaactccgcgcaatacaactaaaacgccgcccgactctacaattccgaatattcccgaacgtccccgcccccgccttcccctcaacaaacgcctaaacgccccccaactcctatccaacctccttcgaaccaacgacccgccccgacctccctacatcccaaaaactactcgcgacgccttctctctctaattcttctttaccccctcaactcacctcccgaaaaacgtccaacgaatcttaaaaactcgcaaaactaaaccgcgaaacgcgaaaaaaaaacgacgaacgcttcccgcgacgacgaaaaaaaaaacgaaaacttatacgctctcaaaattaatataaaaacatcttccaaacttctaaactacaacccgaaacgcgaaataaccgaaaaactcccgtaactaccgtaccctccccccccgaaatctaaaaaaaactcctaaacgcctcaaaacacccgaaatcgacccgcgaaaaaaaccgcataaacgcgcccccaccctaacgaacgaaaaaaaaacaaacgcctacgaccccaactaaatccttcgacgcctcgatctaatatatacacctaccacaaactctaaatacctaaaaaatataaaccaattccatcttcatactaacgaaacccgaataaat

SEQ ID NO: 10397 - DNA, 558 bp, Artificial Sequence
  chemically treated genomic DNA (Homo sapiens) CpG-island No: 10397
tttttcgattttttttttttttttttatagtatttcgcgtaagattagtttagtttttcgagttttattattagtttttttattttcgttcggcgcgtgagattttgggcggtgtaggggagcgttgacgatagacgtgggtcgtgacgtcgtcgcgttttgacgtttagtcgattggcggcgcggtcgttcgggagatcgggaaagtcgttttatattcgttttagtcgaagtcgaggtgagggacgatggttttttttagtttgggatgattcggttttttaaatgtagtttcggagtggaggcgtgttcgtattcggggagagagttagaaagttgagtcgcggcgttttagcgagagtacgaggtttcgggtttggatttcgttattacgtttttttgcggtttttttttggtgtttgttagttcgcggggtttaggcgcggttcgttttttttttagtttcggggaacgcgcggttttgtttttttattttcgtattttttttttttttttttttcggttattgtaggtttagggggaacggggttagaaagg

SEQ ID NO: 10398 - DNA, 558 bp, Artificial Sequence
  chemically treated genomic DNA (Homo sapiens) CpG-island No: 10398
cctttctaaccccgttccccctaaacctacaataaccgaaaaaaaaaaaaaaaaaaaatacgaaaataaaaaaacaaaaccgcgcgttccccgaaactaaaaaaaaaacgaaccgcgcctaaaccccgcgaactaacaaacaccaaaaaaaaaccgcaaaaaaacgtaataacgaaatccaaacccgaaacctcgtactctcgctaaaacgccgcgactcaactttctaactctctccccgaatacgaacacgcctccactccgaaactacatttaaaaaaccgaatcatcccaaactaaaaaaaaccatcgtccctcacctcgacttcgactaaaacgaatataaaacgactttcccgatctcccgaacgaccgcgccgccaatcgactaaacgtcaaaacgcgacgacgtcacgacccacgtctatcgtcaacgctcccctacaccgcccaaaatctcacgcgccgaacgaaaataaaaaaactaataataaaactcgaaaaactaaactaatcttacgcgaaatactataaaaaaaaaaaaaaaaaatcgaaaaa

SEQ ID NO: 10399 - DNA, 558 bp, Artificial Sequence
  chemically treated genomic DNA (Homo sapiens) CpG-island No: 10399
tttttttaatttcgttttttttggatttgtagtggtcggaagaggaggaggaggagggtgcgggggtgaggaagtagagtcgcgcgtttttcggggttgggaggaaggcggatcgcgtttgggtttcgcgggttggtagatattaggaaggggtcgtagaggagcgtggtggcggagtttagattcggggtttcgtgttttcgttggggcgtcgcggtttagttttttggtttttttttcgggtgcgagtacgtttttatttcggaattgtatttggaggatcgggttattttaggttgaggaaagttatcgttttttatttcgatttcgattaggacgggtgtgaaacggttttttcggtttttcgggcgatcgcgtcgttagtcggttggacgttagggcgcggcgacgttacggtttacgtttgtcgttaacgtttttttgtatcgtttagggttttacgcgtcgggcggaagtgggaaaattggtggtggggttcggaaggttgggttagttttacgcggaatgttgtgagagggagggaaggggatcgaggga

SEQ ID NO: 10400 - DNA, 558 bp, Artificial Sequence
  chemically treated genomic DNA (Homo sapiens) CpG-island No: 10400
tccctcgatccccttccctccctctcacaacattccgcgtaaaactaacccaaccttccgaaccccaccaccaattttcccacttccgcccgacgcgtaaaaccctaaacgatacaaaaaaacgttaacgacaaacgtaaaccgtaacgtcgccgcgccctaacgtccaaccgactaacgacgcgatcgcccgaaaaaccgaaaaaaccgtttcacacccgtcctaatcgaaatcgaaataaaaaacgataactttcctcaacctaaaataacccgatcctccaaatacaattccgaaataaaaacgtactcgcacccgaaaaaaaaaccaaaaaactaaaccgcgacgccccaacgaaaacacgaaaccccgaatctaaactccgccaccacgctcctctacgaccccttcctaatatctaccaacccgcgaaacccaaacgcgatccgccttcctcccaaccccgaaaaacgcgcgactctacttcctcacccccgcaccctcctcctcctcctcttccgaccactacaaatccaaaaaaaacgaaattaaaaaaa

SEQ ID NO: 10401 - DNA, 573 bp, Artificial Sequence
  chemically treated genomic DNA (Homo sapiens) CpG-island No: 10401
gggcgtcgtgcgtattgtattttttttggcggattattcgttgggtcggtaggcgcgcgtatttaggtgttattttttagcgtcgtgcgcggataggtaggcgcgtgtttcggcgcgtcgtttcgtatttatttacgcgcggtttttttgtatttcggttagtattcgtagcgcgttgggcgagtcggatcggaagttgaagaagtgaagcgtcgcgcgcgtcgtttgttgtaggagtttgcgcgggattttagtattttgaggttgtttagggtcgtcggggttttcggatttcgcgggcgtcgttatcggggcgagtaatagtagtagcgcgagtagcggggcggtggggcgcgggtttttgggttcggattagggagtaggtagtcgttgtcggcggggttgtatggacgtaggaaagttggttcggtattcgatagatacgggttcggagcgggtagtgtcggcgttcgcggaaataaggtcgtggtgggtttttttttttcgtttttagggcgaaggtttgtagcgagttcgggtttttatggggttattttttttttacgtttttcg

SEQ ID NO: 10402 - DNA, 573 bp, Artificial Sequence
  chemically treated genomic DNA (Homo sapiens) CpG-island No: 10402
cgaaaaacgtaaaaaaaaaataaccccataaaaacccgaactcgctacaaaccttcgccctaaaaacgaaaaaaaaaaacccaccacgaccttatttccgcgaacgccgacactacccgctccgaacccgtatctatcgaataccgaaccaactttcctacgtccatacaaccccgccgacaacgactacctactccctaatccgaacccaaaaacccgcgccccaccgccccgctactcgcgctactactattactcgccccgataacgacgcccgcgaaatccgaaaaccccgacgaccctaaacaacctcaaaatactaaaatcccgcgcaaactcctacaacaaacgacgcgcgcgacgcttcacttcttcaacttccgatccgactcgcccaacgcgctacgaatactaaccgaaatacaaaaaaaccgcgcgtaaataaatacgaaacgacgcgccgaaacacgcgcctacctatccgcgcacgacgctaaaaaataacacctaaatacgcgcgcctaccgacccaacgaataatccgccaaaaaaaatacaatacgcacgacgccc

SEQ ID NO: 10403 - DNA, 573 bp, Artificial Sequence
  chemically treated genomic DNA (Homo sapiens) CpG-island No: 10403
cgggaaacgtggaaaaggagtggttttatggggattcgggttcgttatagattttcgttttgggggcggaggggaggggtttattacggttttattttcgcgagcgtcggtattgttcgtttcgagttcgtgtttgtcgggtgtcgagttaatttttttgcgtttatgtagtttcgtcggtaacggttgtttgttttttggttcgggtttaggggttcgcgttttatcgtttcgttgttcgcgttgttgttgttgttcgtttcggtggcggcgttcgcggggttcggggatttcgacgattttgggtagttttaggatgttggggtttcgcgtaggtttttgtagtaggcggcgcgcgcggcgttttatttttttaattttcggttcggttcgtttagcgcgttacgagtgttggtcgaggtgtaggagggtcgcgcgtgggtgagtgcggagcgacgcgtcggggtacgcgtttgtttgttcgcgtacggcgttgggaggtgatatttgggtacgcgcgtttgtcggtttaacggatggttcgttagggaaggtgtagtgcgtacgacgttt

SEQ ID NO: 10404 - DNA, 573 bp, Artificial Sequence
  chemically treated genomic DNA (Homo sapiens) CpG-island No: 10404
aaacgtcgtacgcactacaccttccctaacgaaccatccgttaaaccgacaaacgcgcgtacccaaatatcacctcccaacgccgtacgcgaacaaacaaacgcgtaccccgacgcgtcgctccgcactcacccacgcgcgaccctcctacacctcgaccaacactcgtaacgcgctaaacgaaccgaaccgaaaattaaaaaaataaaacgccgcgcgcgccgcctactacaaaaacctacgcgaaaccccaacatcctaaaactacccaaaatcgtcgaaatccccgaaccccgcgaacgccgccaccgaaacgaacaacaacaacaacgcgaacaacgaaacgataaaacgcgaacccctaaacccgaaccaaaaaacaaacaaccgttaccgacgaaactacataaacgcaaaaaaattaactcgacacccgacaaacacgaactcgaaacgaacaataccgacgctcgcgaaaataaaaccgtaataaacccctcccctccgcccccaaaacgaaaatctataacgaacccgaatccccataaaaccactccttttccacgtttcccg

SEQ ID NO: 10405 - DNA, 575 bp, Artificial Sequence
  chemically treated genomic DNA (Homo sapiens) CpG-island No: 10405
gttaagtgggacgttttttttttttttttcgggcgtcgttggatggggcgtttcgtttgaagcggcgggtcggatgcggggcgcgtcgttgtggggacggagttttttttcgttaaatttcgttcgcggcgcggcgacgcgaagtcgtcggcggggttttgcgcggggcggtagggtcggatttgtttcgtggcgttcgcggttcgattagcggggtttattcgcgttttttcgacggattatgcgtaagtcgattcgtttgttattggtttatcgatcgcgttttaatagttggttagggggtcgggggcggcgcgtcgtttcgtgtacgttggtattgtcgggtcgcggtacgatcgtttcgcgtttcgttgagtaattttgatatcggtcgtgtagacgtgggcgcgggtttcgcgttttttcggagattgtataacgatataatataacggacgttcgtttattatcgcggttttcgtcgtttcgcgtcggcgtcggtcgtcgtcgttgcgagtttcgaggatttattaatagtattgatgtttgatttaaaggtaggaggaatttaaagt

SEQ ID NO: 10406 - DNA, 575 bp, Artificial Sequence
  chemically treated genomic DNA (Homo sapiens) CpG-island No: 10406
actttaaattcctcctacctttaaatcaaacatcaatactattaataaatcctcgaaactcgcaacgacgacgaccgacgccgacgcgaaacgacgaaaaccgcgataataaacgaacgtccgttatattatatcgttatacaatctccgaaaaaacgcgaaacccgcgcccacgtctacacgaccgatatcaaaattactcaacgaaacgcgaaacgatcgtaccgcgacccgacaataccaacgtacacgaaacgacgcgccgcccccgaccccctaaccaactattaaaacgcgatcgataaaccaataacaaacgaatcgacttacgcataatccgtcgaaaaaacgcgaataaaccccgctaatcgaaccgcgaacgccacgaaacaaatccgaccctaccgccccgcgcaaaaccccgccgacgacttcgcgtcgccgcgccgcgaacgaaatttaacgaaaaaaaactccgtccccacaacgacgcgccccgcatccgacccgccgcttcaaacgaaacgccccatccaacgacgcccgaaaaaaaaaaaaaaaacgtcccacttaac

SEQ ID NO: 10407 - DNA, 575 bp, Artificial Sequence
  chemically treated genomic DNA (Homo sapiens) CpG-island No: 10407
attttgggttttttttatttttaagttaaatattagtgttgttggtgagttttcggggttcgtagcgacggcgatcggcgtcgacgcggggcggcgggggtcgcggtgataggcgggcgttcgttgtgttgtgtcgttgtatagttttcggaggggcgcggggttcgcgtttacgtttgtacggtcggtgttagagttgtttaacggggcgcggggcggtcgtgtcgcggttcgataatgttagcgtgtacggggcggcgcgtcgttttcgattttttggttagttgttggggcgcggtcggtgagttagtggtaggcgggtcggtttacgtatagttcgtcgggagggcgcggatgggtttcgttggtcgggtcgcgggcgttacggggtaggttcggttttgtcgtttcgcgtagggtttcgtcggcggtttcgcgtcgtcgcgtcgcgggcggggtttggcgggggggggtttcgtttttatagcgacgcgtttcgtattcgattcgtcgttttagacgaggcgttttatttagcggcgttcggggggaaaaaaaaaagcgttttatttagt

SEQ ID NO: 10408 - DNA, 575 bp, Artificial Sequence
  chemically treated genomic DNA (Homo sapiens) CpG-island No: 10408
actaaataaaacgcttttttttttccccccgaacgccgctaaataaaacgcctcgtctaaaacgacgaatcgaatacgaaacgcgtcgctataaaaacgaaacccccccccgccaaaccccgcccgcgacgcgacgacgcgaaaccgccgacgaaaccctacgcgaaacgacaaaaccgaacctaccccgtaacgcccgcgacccgaccaacgaaacccatccgcgccctcccgacgaactatacgtaaaccgacccgcctaccactaactcaccgaccgcgccccaacaactaaccaaaaaatcgaaaacgacgcgccgccccgtacacgctaacattatcgaaccgcgacacgaccgccccgcgccccgttaaacaactctaacaccgaccgtacaaacgtaaacgcgaaccccgcgcccctccgaaaactatacaacgacacaacacaacgaacgcccgcctatcaccgcgacccccgccgccccgcgtcgacgccgatcgccgtcgctacgaaccccgaaaactcaccaacaacactaatatttaacttaaaaataaaaaaaacccaaaat

SEQ ID NO: 10409 - DNA, 560 bp, Artificial Sequence
  chemically treated genomic DNA (Homo sapiens) CpG-island No: 10409
atgtcgtcgtagtttacggtggttatggagatgacggtttattaatagttggcgggtacgttggagaagtcgcggcgcgcgtttagttcgcgttcggttaggtgtattagtggcgcgaagagcgttatggttacgtagaggaatagtagtagtagttcgaattcgcgcgcgtagcggcgtatggttaggtttagcgaacgtagttttagcgagtggcgcgttaggcgtattacgtagagtacgcgtagcgtacgtagtagtcgtagtattagtttcgcgcgttttaggagtttggtttcgttcgggtttgtcgttagttttagtagtagcgatacgtagaacggtaggagcgttaggatgttaatgatgttgagtggcgcgcgtaggaaggcgtatttgttttcggtttgtagggagcgtagtaggaattcgaaggagaattaggttacgtatacggtttttagtacgaataggttgcggtatttgggggagtattcgttttgcggggagaggggatacggggttgggggcgtaggttttttggagggtcgggggcgttt

SEQ ID NO: 10410 - DNA, 560 bp, Artificial Sequence
  chemically treated genomic DNA (Homo sapiens) CpG-island No: 10410
aaacgcccccgaccctccaaaaaacctacgcccccaaccccgtatcccctctccccgcaaaacgaatactcccccaaataccgcaacctattcgtactaaaaaccgtatacgtaacctaattctccttcgaattcctactacgctccctacaaaccgaaaacaaatacgccttcctacgcgcgccactcaacatcattaacatcctaacgctcctaccgttctacgtatcgctactactaaaactaacgacaaacccgaacgaaaccaaactcctaaaacgcgcgaaactaatactacgactactacgtacgctacgcgtactctacgtaatacgcctaacgcgccactcgctaaaactacgttcgctaaacctaaccatacgccgctacgcgcgcgaattcgaactactactactattcctctacgtaaccataacgctcttcgcgccactaatacacctaaccgaacgcgaactaaacgcgcgccgcgacttctccaacgtacccgccaactattaataaaccgtcatctccataaccaccgtaaactacgacgacat

SEQ ID NO: 10411 - DNA, 560 bp, Artificial Sequence
  chemically treated genomic DNA (Homo sapiens) CpG-island No: 10411
aggcgttttcggttttttaagaggtttgcgtttttaatttcgtgtttttttttttcgtagggcgagtgtttttttaagtgtcgtagtttgttcgtgttggagatcgtgtgcgtggtttggttttttttcgagtttttgttgcgttttttgtaggtcgagagtaagtgcgtttttttgcgcgcgttatttaatattattgatattttggcgtttttgtcgttttacgtgtcgttgttgttggggttggcggtaggttcgggcgggattaagtttttggagcgcgcggggttggtgttgcggttgttgcgtgcgttgcgcgtgttttacgtgatgcgtttggcgcgttattcgttggggttgcgttcgttgggtttgattatgcgtcgttgcgcgcgcgagttcgggttgttgttgttgtttttttgcgtggttatggcgtttttcgcgttattggtgtatttggtcgagcgcgagttgggcgcgcgtcgcgatttttttagcgtgttcgttagttattggtgggtcgttatttttatgattatcgtgggttacggcgatat

SEQ ID NO: 10412 - DNA, 560 bp, Artificial Sequence
  chemically treated genomic DNA (Homo sapiens) CpG-island No: 10412
atatcgccgtaacccacgataatcataaaaataacgacccaccaataactaacgaacacgctaaaaaaatcgcgacgcgcgcccaactcgcgctcgaccaaatacaccaataacgcgaaaaacgccataaccacgcaaaaaaacaacaacaacaacccgaactcgcgcgcgcaacgacgcataatcaaacccaacgaacgcaaccccaacgaataacgcgccaaacgcatcacgtaaaacacgcgcaacgcacgcaacaaccgcaacaccaaccccgcgcgctccaaaaacttaatcccgcccgaacctaccgccaaccccaacaacaacgacacgtaaaacgacaaaaacgccaaaatatcaataatattaaataacgcgcgcaaaaaaacgcacttactctcgacctacaaaaaacgcaacaaaaactcgaaaaaaaaccaaaccacgcacacgatctccaacacgaacaaactacgacacttaaaaaaacactcgccctacgaaaaaaaaaaacacgaaattaaaaacgcaaacctcttaaaaaaccgaaaacgcct

SEQ ID NO: 10413 - DNA, 877 bp, Artificial Sequence
  chemically treated genomic DNA (Homo sapiens) CpG-island No: 10413
cgtttttattcgtggttggaggatagttcgggcggcggcgggcggtttcggggcgggagcgtgggggtagggtacggcgagttcggggttttttaggattattaggtcgtttggacgttggggaggaatttttatttcgatagttgttatgacggaattaacggcgttttacggtgtttaggtcgtcgtcgttttattcggttaattatacgttcgcgcggcgtttatacgtatatgtcgttagtacgtacggcgttagcgcgcgcgtatgtcgttagtacgtacggcgtcggtgcgtgcgcgtttagacgttttgtcgggtggtagttttagcggagtttgcgtgtgcgggcgggatcggatttcgttcgtgggttcgggggcggcgggggtcggggagtgaggggtcggttgagtttatttcgttgggttttttttggcgtttcgttttgggcggcggcgagcgcgcgggtcgttatgtcgtatatgttttcgtatttgtataacggttggtaggtggattaggttattttttcggaggaggatcgcgtggtcgttattcgtttcggttacgattgggattttacgtgtatgaagatggacgaggttttgtatagtatcgtcgagaaggtagcgcgtcggattttttcgttttgcgggttgtgttttcgtatttgtttcgcgtttttgttttgtcggcgtcgtttgggggcgcgagttgtttttcgaggaggggtcgcggtttcgtcgtttaggcgattttttttttcgttgcggtcgagcgttttcggggattgtgtcggcgttttacgtttttttttgcggggagtttttgtagttttttatattttaaagggtttatgattttttttttttt

SEQ ID NO: 10414 - DNA, 877 bp, Artificial Sequence
  chemically treated genomic DNA (Homo sapiens) CpG-island No: 10414
aaaaaaaaaaaaatcataaaccctttaaaatataaaaaactacaaaaactccccgcaaaaaaaaacgtaaaacgccgacacaatccccgaaaacgctcgaccgcaacgaaaaaaaaaatcgcctaaacgacgaaaccgcgacccctcctcgaaaaacaactcgcgcccccaaacgacgccgacaaaacaaaaacgcgaaacaaatacgaaaacacaacccgcaaaacgaaaaaatccgacgcgctaccttctcgacgatactatacaaaacctcgtccatcttcatacacgtaaaatcccaatcgtaaccgaaacgaataacgaccacgcgatcctcctccgaaaaaataacctaatccacctaccaaccgttatacaaatacgaaaacatatacgacataacgacccgcgcgctcgccgccgcccaaaacgaaacgccaaaaaaaacccaacgaaataaactcaaccgacccctcactccccgacccccgccgcccccgaacccacgaacgaaatccgatcccgcccgcacacgcaaactccgctaaaactaccacccgacaaaacgtctaaacgcgcacgcaccgacgccgtacgtactaacgacatacgcgcgcgctaacgccgtacgtactaacgacatatacgtataaacgccgcgcgaacgtataattaaccgaataaaacgacgacgacctaaacaccgtaaaacgccgttaattccgtcataacaactatcgaaataaaaattcctccccaacgtccaaacgacctaataatcctaaaaaaccccgaactcgccgtaccctacccccacgctcccgccccgaaaccgcccgccgccgcccgaactatcctccaaccacgaataaaaacg

SEQ ID NO: 10415 - DNA, 877 bp, Artificial Sequence
  chemically treated genomic DNA (Homo sapiens) CpG-island No: 10415
gagaggagggggattataaattttttaaaatatgaaaaattataagagtttttcgtagaaaaaggcgtgaaacgtcggtatagttttcgagagcgttcgatcgtagcgaggggaggaatcgtttgaacgacggagtcgcggttttttttcggggaatagttcgcgtttttaggcgacgtcggtagggtagaggcgcggggtagatgcggaagtatagttcgtagagcgggagagttcggcgcgttattttttcggcgatgttgtataggatttcgtttatttttatgtacgtaggattttagtcgtggtcgaagcggatgacgattacgcggttttttttcgagaggatggtttggtttatttgttagtcgttgtgtaggtgcgggagtatgtacgatatggcggttcgcgcgttcgtcgtcgtttaaggcggggcgttagggagggtttagcgaggtgggtttagtcggttttttatttttcggttttcgtcgttttcgggtttacggacgaaattcggtttcgttcgtatacgtaaatttcgttgggattgttattcggtagaacgtttgggcgcgtacgtatcgacgtcgtgcgtgttgacggtatgcgcgcgcgttagcgtcgtgcgtgttgacggtatgtgcgtataggcgtcgcgcgaacgtgtagttggtcgggtggagcggcggcgatttgggtatcgtggagcgtcgttggtttcgttatagtagttgtcggagtgggggtttttttttagcgtttaggcggtttggtggttttgagaagtttcgggttcgtcgtgttttgtttttacgttttcgtttcgaggtcgttcgtcgtcgttcgggttgttttttagttacggatggggacg

SEQ ID NO: 10416 - DNA, 877 bp, Artificial Sequence
  chemically treated genomic DNA (Homo sapiens) CpG-island No: 10416
cgtccccatccgtaactaaaaaacaacccgaacgacgacgaacgacctcgaaacgaaaacgtaaaaacaaaacacgacgaacccgaaacttctcaaaaccaccaaaccgcctaaacgctaaaaaaaaacccccactccgacaactactataacgaaaccaacgacgctccacgatacccaaatcgccgccgctccacccgaccaactacacgttcgcgcgacgcctatacgcacataccgtcaacacgcacgacgctaacgcgcgcgcataccgtcaacacgcacgacgtcgatacgtacgcgcccaaacgttctaccgaataacaatcccaacgaaatttacgtatacgaacgaaaccgaatttcgtccgtaaacccgaaaacgacgaaaaccgaaaaataaaaaaccgactaaacccacctcgctaaaccctccctaacgccccgccttaaacgacgacgaacgcgcgaaccgccatatcgtacatactcccgcacctacacaacgactaacaaataaaccaaaccatcctctcgaaaaaaaaccgcgtaatcgtcatccgcttcgaccacgactaaaatcctacgtacataaaaataaacgaaatcctatacaacatcgccgaaaaaataacgcgccgaactctcccgctctacgaactatacttccgcatctaccccgcgcctctaccctaccgacgtcgcctaaaaacgcgaactattccccgaaaaaaaaccgcgactccgtcgttcaaacgattcctcccctcgctacgatcgaacgctctcgaaaactataccgacgtttcacgcctttttctacgaaaaactcttataatttttcatattttaaaaaatttataatccccctcctctc

SEQ ID NO: 10417 - DNA, 586 bp, Artificial Sequence
  chemically treated genomic DNA (Homo sapiens) CpG-island No: 10417
taatttcgcggttcgttttttattcgtgtatttttcgttttatattttcgcgttttttatttacgcgttttttattttatatatattcgtttattattcgcgtattttttattttttatttacgttttttttattttttatcggcgcgttttttattttttattttttatttaggcgttttttattttttattcgcgtattatttattttttattttttatttacgttttttttattttttattttttattcgcgttttttttattttttattcgcgcgttttttattttttattcgcgttttttttatattttattcgcgttttttttattttttattcgcgcgttttttatttacgcgtttttcgtttttagtttttattcgcgcgggttaagagggtttcgggcgagggtagtttttcgcgggcgggtgtggggttcggagttggtttggtacgcgaggtcggtagtagggttcgggttttacgtacgtttggttttcgagtttgttttgaggtttaggagttgttttttttgtaaataggcgtttaacggtttagttcggagaattatacggggatggggag

SEQ ID NO: 10418 - DNA, 586 bp, Artificial Sequence
  chemically treated genomic DNA (Homo sapiens) CpG-island No: 10418
ctccccatccccgtataattctccgaactaaaccgttaaacgcctatttacaaaaaaaacaactcctaaacctcaaaacaaactcgaaaaccaaacgtacgtaaaacccgaaccctactaccgacctcgcgtaccaaaccaactccgaaccccacacccgcccgcgaaaaactaccctcgcccgaaaccctcttaacccgcgcgaataaaaactaaaaacgaaaaacgcgtaaataaaaaacgcgcgaataaaaaataaaaaaaacgcgaataaaatataaaaaaaacgcgaataaaaaataaaaaacgcgcgaataaaaaataaaaaaaacgcgaataaaaaataaaaaataaaaaaaacgtaaataaaaaataaaaaataaataatacgcgaataaaaaataaaaaacgcctaaataaaaaataaaaaataaaaaacgcgccgataaaaaataaaaaaaacgtaaataaaaaataaaaaatacgcgaataataaacgaatatatataaaataaaaaacgcgtaaataaaaaacgcgaaaatataaaacgaaaaatacacgaataaaaaacgaaccgcgaaatta

SEQ ID NO: 10419 - DNA, 586 bp, Artificial Sequence
  chemically treated genomic DNA (Homo sapiens) CpG-island No: 10419
ttttttattttcgtgtagtttttcgggttgaatcgttgggcgtttatttgtagaaaaggtagtttttgagttttaagatagattcgggggttaggcgtgcgtgaagttcgggttttgttgtcggtttcgcgtgttaagttaatttcgagttttatattcgttcgcggggagttgttttcgttcgggatttttttggttcgcgcgggtgaggattgagggcgaggggcgcgtggatgaggggcgcgcgggtgaagagtgaggggagcgcgggtgaagtgtgaggggagcgcgggtgaggggtgaggggcgcgcgggtgaggggtgaggggagcgcgggtgaggggtgaggggtgaggggagcgtgggtgaggggtgaggggtgagtgatgcgcgagtgaagggtgaggggcgtttgggtgaggggtgaggggtgaggggcgcgtcggtgaagggtgaggggagcgtgggtgaggggtgaagggtgcgcgagtgatgggcgggtgtgtgtagggtgagggacgcgtgggtgaggggcgcgggggtgtgaggcgaggggtgtacgggtaaggggcgagtcgcgaggttg

SEQ ID NO: 10420 - DNA, 586 bp, Artificial Sequence
  chemically treated genomic DNA (Homo sapiens) CpG-island No: 10420
caacctcgcgactcgccccttacccgtacacccctcgcctcacacccccgcgcccctcacccacgcgtccctcaccctacacacacccgcccatcactcgcgcacccttcacccctcacccacgctcccctcacccttcaccgacgcgcccctcacccctcacccctcacccaaacgcccctcacccttcactcgcgcatcactcacccctcacccctcacccacgctcccctcacccctcacccctcacccgcgctcccctcacccctcacccgcgcgcccctcacccctcacccgcgctcccctcacacttcacccgcgctcccctcactcttcacccgcgcgcccctcatccacgcgcccctcgccctcaatcctcacccgcgcgaaccaaaaaaatcccgaacgaaaacaactccccgcgaacgaatataaaactcgaaattaacttaacacgcgaaaccgacaacaaaacccgaacttcacgcacgcctaacccccgaatctatcttaaaactcaaaaactaccttttctacaaataaacgcccaacgattcaacccgaaaaactacacgaaaataaaaaa

SEQ ID NO: 10421 - DNA, 917 bp, Artificial Sequence
  chemically treated genomic DNA (Homo sapiens) CpG-island No: 10421
ggtcgtttcgcgtttttgtagcgatagcgatcgtggtcgtaattacgataatgataatggttacggtgacggtcgcgcgtttagtcggtttttcggcgacggtttcggcgtatttgttcgtggggtatttgtatcggagcggagattcgcggggggcgtttcgtttttcgagatttcggtcgtttttgggcgttgtaaatttcgagtcgggttttcgggttttttgggttaggatagagttggacgagattcgttttcgggtggttcgtatttaggatacgcgtgagaggggcgttcggatttcgcgttttcggttttttaggacgacgtttttcgtttggatggtcgcgcgtcgggatagttggagacgggttaacgtgggcgttaggtttgagggatcggtttcgttcggttggtatttttcgatcgggcgggaggagttacgcgtttttatcgtttcgatagtttcggttttcggtttcgtttgcgttcgttttgtttagcgcgttttaggatatcgcggcgttttcgcgtagtttcggcgtgggcggggttcggtattgtgacgttacggggcggggtttttcggcgtttgagcggattgacgtcgagacgcgcgcgggttagcggcgcggggacgcggggcgttgggcgcggggttgggggcgtaggtaaggagcgcgggggcggcgcggggttttcggggggcggtttagggcggtcgaggacgtagggtcggggtagttggtcgcggtttttagttttttggtttggttttgtggggttttcggttcggtattttttttcgcgagtcgtgcgtttttattttggggtttgcgtttttttttttcgagtcgtgcgtttttatgttaggttttgtgattttttttcgaatagtgcgtttcgattttgggttt

SEQ ID NO: 10422 - DNA, 917 bp, Artificial Sequence
  chemically treated genomic DNA (Homo sapiens) CpG-island No: 10422
aaacccaaaatcgaaacgcactattcgaaaaaaaatcacaaaacctaacataaaaacgcacgactcgaaaaaaaaaaacgcaaaccccaaaataaaaacgcacgactcgcgaaaaaaaataccgaaccgaaaaccccacaaaaccaaaccaaaaaactaaaaaccgcgaccaactaccccgaccctacgtcctcgaccgccctaaaccgccccccgaaaaccccgcgccgcccccgcgctccttacctacgcccccaaccccgcgcccaacgccccgcgtccccgcgccgctaacccgcgcgcgtctcgacgtcaatccgctcaaacgccgaaaaaccccgccccgtaacgtcacaataccgaaccccgcccacgccgaaactacgcgaaaacgccgcgatatcctaaaacgcgctaaacaaaacgaacgcaaacgaaaccgaaaaccgaaactatcgaaacgataaaaacgcgtaactcctcccgcccgatcgaaaaataccaaccgaacgaaaccgatccctcaaacctaacgcccacgttaacccgtctccaactatcccgacgcgcgaccatccaaacgaaaaacgtcgtcctaaaaaaccgaaaacgcgaaatccgaacgcccctctcacgcgtatcctaaatacgaaccacccgaaaacgaatctcgtccaactctatcctaacccaaaaaacccgaaaacccgactcgaaatttacaacgcccaaaaacgaccgaaatctcgaaaaacgaaacgccccccgcgaatctccgctccgatacaaataccccacgaacaaatacgccgaaaccgtcgccgaaaaaccgactaaacgcgcgaccgtcaccgtaaccattatcattatcgtaattacgaccacgatcgctatcgctacaaaaacgcgaaacgacc

SEQ ID NO: 10423 - DNA, 917 bp, Artificial Sequence
  chemically treated genomic DNA (Homo sapiens) CpG-island No: 10423
gggtttaggatcggggcgtattgttcgggggagggttatagggtttagtatgggggcgtacggttcgggggaagggggcgtaggttttaggatgggggcgtacggttcgcgggaggaggtgtcgggtcggggattttataggattaagttaggggattgaaggtcgcgattaattgtttcggttttgcgttttcggtcgttttaggtcgtttttcgaggatttcgcgtcgttttcgcgttttttatttgcgtttttagtttcgcgtttagcgtttcgcgttttcgcgtcgttgattcgcgcgcgtttcggcgttagttcgtttaggcgtcgggaaatttcgtttcgtgacgttataatgtcgggtttcgtttacgtcggagttgcgcggaggcgtcgcggtgttttagagcgcgttgggtagggcgggcgtaggcggggtcgggagtcggggttgtcggggcggtgggggcgcgtggtttttttcgttcggtcgggaaatattagtcgggcggggtcggttttttaggtttggcgtttacgttaattcgtttttagttgtttcggcgcgcggttatttaagcggagggcgtcgttttggagggtcgggggcgcggggttcggacgttttttttacgcgtgttttgaatgcgggttattcggggacgagtttcgtttagttttgttttgatttaggagattcggggattcggttcggagtttgtagcgtttagaggcggtcggggtttcgggaaacggagcgtttttcgcgggttttcgtttcgatgtaagtgttttacgagtagatgcgtcggggtcgtcgtcggggggtcggttggacgcgcggtcgttatcgtggttattgttattatcgtggttgcggttacggtcgttgtcgttgtagaaacgcggggcggtt

SEQ ID NO: 10424 - DNA, 917 bp, Artificial Sequence
  chemically treated genomic DNA (Homo sapiens) CpG-island No: 10424
aaccgccccgcgtttctacaacgacaacgaccgtaaccgcaaccacgataataacaataaccacgataacgaccgcgcgtccaaccgaccccccgacgacgaccccgacgcatctactcgtaaaacacttacatcgaaacgaaaacccgcgaaaaacgctccgtttcccgaaaccccgaccgcctctaaacgctacaaactccgaaccgaatccccgaatctcctaaatcaaaacaaaactaaacgaaactcgtccccgaataacccgcattcaaaacacgcgtaaaaaaaacgtccgaaccccgcgcccccgaccctccaaaacgacgccctccgcttaaataaccgcgcgccgaaacaactaaaaacgaattaacgtaaacgccaaacctaaaaaaccgaccccgcccgactaatatttcccgaccgaacgaaaaaaaccacgcgcccccaccgccccgacaaccccgactcccgaccccgcctacgcccgccctacccaacgcgctctaaaacaccgcgacgcctccgcgcaactccgacgtaaacgaaacccgacattataacgtcacgaaacgaaatttcccgacgcctaaacgaactaacgccgaaacgcgcgcgaatcaacgacgcgaaaacgcgaaacgctaaacgcgaaactaaaaacgcaaataaaaaacgcgaaaacgacgcgaaatcctcgaaaaacgacctaaaacgaccgaaaacgcaaaaccgaaacaattaatcgcgaccttcaatcccctaacttaatcctataaaatccccgacccgacacctcctcccgcgaaccgtacgcccccatcctaaaacctacgcccccttcccccgaaccgtacgcccccatactaaaccctataaccctcccccgaacaatacgccccgatcctaaaccc

SEQ ID NO: 10425 - DNA, 579 bp, Artificial Sequence
  chemically treated genomic DNA (Homo sapiens) CpG-island No: 10425
cgagaggtttttgattgtttatttttatattagagtcgtgatcgagatttagaggttcgttttcggttacggtcgaatagttgtatcgtgcgtatcgggaacggttaaggcgtagtttggaatcgttgtaaaaggttttcgggcgtatcggataggtcgtaagggcgggggtttttatttagcggaaatgtacggaggttaatttttttttttgttttcgcgaggagcggggcggattcggtagtcgttattttttaggtttataggaagaaattgggacgttgcggacgcggaattggttagattcgcggcgcgtggtacggcgagttttttcgcgtatgttttattcgtcgtttttagttcgcgtttcgggtttcgtttttttttttgtttttttttttttttcgttagttttttttcgagtttggttttttcggtcgggcgatcgacgtttcgcgtgcgtgcgggcgtttgattttattttcggttaacgcgttcggtttgttttttggtttcggatggtgattggtggtggtgttgtatttttcgggattgttattgagtcgttttttagtgtga

SEQ ID NO: 10426 - DNA, 579 bp, Artificial Sequence
  chemically treated genomic DNA (Homo sapiens) CpG-island No: 10426
tcacactaaaaaacgactcaataacaatcccgaaaaatacaacaccaccaccaatcaccatccgaaaccaaaaaacaaaccgaacgcgttaaccgaaaataaaatcaaacgcccgcacgcacgcgaaacgtcgatcgcccgaccgaaaaaaccaaactcgaaaaaaaactaacgaaaaaaaaaaaaaaacaaaaaaaaaaacgaaacccgaaacgcgaactaaaaacgacgaataaaacatacgcgaaaaaactcgccgtaccacgcgccgcgaatctaaccaattccgcgtccgcaacgtcccaatttcttcctataaacctaaaaaataacgactaccgaatccgccccgctcctcgcgaaaacaaaaaaaaaaattaacctccgtacatttccgctaaataaaaacccccgcccttacgacctatccgatacgcccgaaaaccttttacaacgattccaaactacgccttaaccgttcccgatacgcacgatacaactattcgaccgtaaccgaaaacgaacctctaaatctcgatcacgactctaatataaaaataaacaatcaaaaacctctcg

SEQ ID NO: 10427 - DNA, 579 bp, Artificial Sequence
  chemically treated genomic DNA (Homo sapiens) CpG-island No: 10427
ttatattgggaagcggtttagtgatagtttcgggaggtgtagtattattattagttattattcggggttagggggtaagtcgagcgcgttagtcggaagtgaagttaggcgttcgtacgtacgcggaacgtcgatcgttcggtcggaggggttaaattcggagggaggttgacgggagagggggagaagtagggagggaggcggggttcggggcgcgggttggaggcggcgggtggagtatgcgcgggagggttcgtcgtgttacgcgtcgcgggtttggttagtttcgcgttcgtagcgttttagtttttttttgtgagtttggggagtggcggttgtcgagttcgtttcgtttttcgcgggggtagggggaggggttggttttcgtgtattttcgttaggtggggattttcgtttttgcgatttgttcggtacgttcggaggttttttgtagcggttttaagttgcgttttgatcgttttcggtacgtacggtgtagttgttcggtcgtggtcggaagcggatttttgggtttcggttacggttttggtgtgagaataaataattagaagtttttcg

SEQ ID NO: 10428 - DNA, 579 bp, Artificial Sequence
  chemically treated genomic DNA (Homo sapiens) CpG-island No: 10428
cgaaaaacttctaattatttattctcacaccaaaaccgtaaccgaaacccaaaaatccgcttccgaccacgaccgaacaactacaccgtacgtaccgaaaacgatcaaaacgcaacttaaaaccgctacaaaaaacctccgaacgtaccgaacaaatcgcaaaaacgaaaatccccacctaacgaaaatacacgaaaaccaacccctccccctacccccgcgaaaaacgaaacgaactcgacaaccgccactccccaaactcacaaaaaaaaactaaaacgctacgaacgcgaaactaaccaaacccgcgacgcgtaacacgacgaaccctcccgcgcatactccacccgccgcctccaacccgcgccccgaaccccgcctccctccctacttctccccctctcccgtcaacctccctccgaatttaacccctccgaccgaacgatcgacgttccgcgtacgtacgaacgcctaacttcacttccgactaacgcgctcgacttaccccctaaccccgaataataactaataataatactacacctcccgaaactatcactaaaccgcttcccaatataa

SEQ ID NO: 10429 - DNA, 1525 bp, Artificial Sequence
  chemically treated genomic DNA (Homo sapiens) CpG-island No: 10429
tcgacgcggcgcgagttttattaggttttcgaggtcgatcgggtaggagaggggggcggggaggttcgggggcgttggttgcgtttcgatttcgcgtcgtattcgatcgcgtcgggggttcggattttaaggtgcgcgttcgaggggatttaatttggtcgcggaggaggggaggagggtggttttttcggtgtcgagttttttcgaggatagggttttttttttcgaggtttcgatcgaataaagagtacggtagggttaaggggtaaaggtcgtggcggcgtggagtggatagcggttttcggttcgtcgtttcgagttcgttcgttcgcgcggttttcgggtttgcgttcggttcgttcgttgtaggtgtcgtttttttagcgcggttttttcgcggcggtcggatttttgcgttttatttatttgtcgtatttttgtgttatcgcgttcgttcgtcgttgtcgggtcgtagaattggattttcgggttgggatagtatattcgattcggggggaggaggcggcggcggcggttgcgggttcggagcggcggtttcgacgggttgggtttgtttttttcgttttgagtcggtttcgcgcgggttgtcgtattgggcgtcgggttcggtcgtttattggttggcgatgcgtcggttgggggcgaggtttcggggttgggaggtcggtcgcgttttttgattggtcggcgagaagagcgtcggggcggggttgacggggacgagcggcgcgtgagttggggggcgggggttcgcgtttcgcgaggttgcgttcgggattgcgttttacgggttgcgcgttcgattcgcggtcgtacgcgtttgttttgataggagagggagcgttgcggttgcggttgtattcgtttaattttcgcgcgtatcgagagtttttcgttcgcgtttcgttatcgttttcgtcggtttacgtcgttttcgtcgttttcggttatttttttcgcgacgagtttcggtcgtatagtcgttttttttttcgtttatttaggttttcgcgtttcgtgtttatattgttcgttgtttcggttttagcgtttcgttgttgtttttgcgttcgttcggcgggggcgtttttgtcggtcgtcgcgtttttcggtcgcgcgttttatttttcggttttcgtaggttgttacgttcgagtttcgtggtttttttcgagagtcgttttcggaatgtttttttttttggtttatcgcggtcgcgcgtttttaggattttttgttttcgtagttttcgcggttttttcggcggtagtttttggggtttcgcgatgtttgtgtttcgtagtttttcgggcgttattttttcgcgcggtcgttttacgttgttcgtgtagtcgcgcgtttcgggtcggtttcgggtattattttatcgcgacggtttttatttgtttttttcgagttgtcgttttttttagggttcgtttattgagtttttatatgtttagcgtcggatttgattttcggataggcgcggtttagacgcggg

SEQ ID NO: 10430 - DNA, 1525 bp, Artificial Sequence
  chemically treated genomic DNA (Homo sapiens) CpG-island No: 10430
cccgcgtctaaaccgcgcctatccgaaaatcaaatccgacgctaaacatataaaaactcaataaacgaaccctaaaaaaaacgacaactcgaaaaaaacaaataaaaaccgtcgcgataaaataatacccgaaaccgacccgaaacgcgcgactacacgaacaacgtaaaacgaccgcgcgaaaaaataacgcccgaaaaactacgaaacacaaacatcgcgaaaccccaaaaactaccgccgaaaaaaccgcgaaaactacgaaaacaaaaaatcctaaaaacgcgcgaccgcgataaaccaaaaaaaaaaacattccgaaaacgactctcgaaaaaaaccacgaaactcgaacgtaacaacctacgaaaaccgaaaaataaaacgcgcgaccgaaaaacgcgacgaccgacaaaaacgcccccgccgaacgaacgcaaaaacaacaacgaaacgctaaaaccgaaacaacgaacaatataaacacgaaacgcgaaaacctaaataaacgaaaaaaaaaacgactatacgaccgaaactcgtcgcgaaaaaaataaccgaaaacgacgaaaacgacgtaaaccgacgaaaacgataacgaaacgcgaacgaaaaactctcgatacgcgcgaaaattaaacgaatacaaccgcaaccgcaacgctccctctcctatcaaaacaaacgcgtacgaccgcgaatcgaacgcgcaacccgtaaaacgcaatcccgaacgcaacctcgcgaaacgcgaacccccgccccccaactcacgcgccgctcgtccccgtcaaccccgccccgacgctcttctcgccgaccaatcaaaaaacgcgaccgacctcccaaccccgaaacctcgcccccaaccgacgcatcgccaaccaataaacgaccgaacccgacgcccaatacgacaacccgcgcgaaaccgactcaaaacgaaaaaaacaaacccaacccgtcgaaaccgccgctccgaacccgcaaccgccgccgccgcctcctccccccgaatcgaatatactatcccaacccgaaaatccaattctacgacccgacaacgacgaacgaacgcgataacacaaaaatacgacaaataaataaaacgcaaaaatccgaccgccgcgaaaaaaccgcgctaaaaaaacgacacctacaacgaacgaaccgaacgcaaacccgaaaaccgcgcgaacgaacgaactcgaaacgacgaaccgaaaaccgctatccactccacgccgccacgacctttaccccttaaccctaccgtactctttattcgatcgaaacctcgaaaaaaaaaaccctatcctcgaaaaaactcgacaccgaaaaaaccaccctcctcccctcctccgcgaccaaattaaatcccctcgaacgcgcaccttaaaatccgaacccccgacgcgatcgaatacgacgcgaaatcgaaacgcaaccaacgcccccgaacctccccgcccccctctcctacccgatcgacctcgaaaacctaataaaactcgcgccgcgtcga

SEQ ID NO: 10431 - DNA, 1525 bp, Artificial Sequence
  chemically treated genomic DNA (Homo sapiens) CpG-island No: 10431
ttcgcgtttgggtcgcgtttgttcgagggttaggttcgacgttgggtatgtggggatttagtgagcggattttgggaaagacggtagttcgggaaggataagtgggggtcgtcgcggtggagtggtgttcggggtcggttcggggcgcgcgattgtacgggtagcgtggggcggtcgcgcggggaagtggcgttcgggaggttgcggggtatagatatcgcggagttttagggattgtcgtcgaggggatcgcgggagttgcgagggtaagaaattttaaaagcgcgcggtcgcggtgggttaggagaagggatatttcggagacggttttcgggggaagttacgggattcgggcgtgatagtttgcgagaatcgagaggtgagacgcgcgatcggggagcgcggcgatcggtagaggcgttttcgtcgggcgagcgtaggggtagtagcggggcgttggggtcggaatagcgggtaatgtgggtacggggcgcggaggtttgagtgagcgaagaaggaggcggttgtacggtcggggttcgtcgcgaaggggatggtcggggacggcggggacggcgtgggtcggcgggagcggtagcggggcgcgagcgggggattttcggtgcgcgcggaggttgggcgggtgtagtcgtagtcgtagcgtttttttttttgttagggtaggcgcgtacggtcgcgagtcgggcgcgtagttcgtggagcgtagtttcgggcgtaatttcgcggaacgcgggttttcgttttttagtttacgcgtcgttcgttttcgttagtttcgtttcggcgtttttttcgtcgattaattaggaggcgcgatcggttttttagtttcgaggtttcgtttttagtcggcgtatcgttagttaatgagcggtcgagttcggcgtttagtgcggtagttcgcgcggagtcggtttagagcgagaaaagtaaatttaattcgtcggggtcgtcgtttcggattcgtagtcgtcgtcgtcgtttttttttttcggatcgggtgtattgttttaattcgaaagtttagttttgcggttcggtagcggcgagcgggcgcgatgatataggagtacgataagtgagtgaggcgtaggagttcggtcgtcgcgggggggtcgcgttgagggggcggtatttgtagcgagcgagtcgggcgtagattcgaaggtcgcgcgggcgggcgggttcggggcggcgagtcgggagtcgttgtttattttacgtcgttacggtttttgttttttagttttgtcgtgttttttgttcggtcggagtttcgggaggagagattttgttttcggggaaattcgatatcggaggggttattttttttttttttttcgcggttaggttgggttttttcgggcgcgtattttggggttcgggttttcggcgcggtcgggtgcggcgcgaggtcggggcgtagttaacgttttcgggttttttcgttttttttttttgttcggtcggtttcgggagtttggtggggttcgcgtcgcgtcgg

SEQ ID NO: 10432 - DNA, 1525 bp, Artificial Sequence
  chemically treated genomic DNA (Homo sapiens) CpG-island No: 10432
ccgacgcgacgcgaaccccaccaaactcccgaaaccgaccgaacaaaaaaaaaaaacgaaaaaacccgaaaacgttaactacgccccgacctcgcgccgcacccgaccgcgccgaaaacccgaaccccaaaatacgcgcccgaaaaaacccaacctaaccgcgaaaaaaaaaaaaaaaataacccctccgatatcgaatttccccgaaaacaaaatctctcctcccgaaactccgaccgaacaaaaaacacgacaaaactaaaaaacaaaaaccgtaacgacgtaaaataaacaacgactcccgactcgccgccccgaacccgcccgcccgcgcgaccttcgaatctacgcccgactcgctcgctacaaataccgccccctcaacgcgacccccccgcgacgaccgaactcctacgcctcactcacttatcgtactcctatatcatcgcgcccgctcgccgctaccgaaccgcaaaactaaactttcgaattaaaacaatacacccgatccgaaaaaaaaaaacgacgacgacgactacgaatccgaaacgacgaccccgacgaattaaatttacttttctcgctctaaaccgactccgcgcgaactaccgcactaaacgccgaactcgaccgctcattaactaacgatacgccgactaaaaacgaaacctcgaaactaaaaaaccgatcgcgcctcctaattaatcgacgaaaaaaacgccgaaacgaaactaacgaaaacgaacgacgcgtaaactaaaaaacgaaaacccgcgttccgcgaaattacgcccgaaactacgctccacgaactacgcgcccgactcgcgaccgtacgcgcctaccctaacaaaaaaaaaaacgctacgactacgactacacccgcccaacctccgcgcgcaccgaaaatcccccgctcgcgccccgctaccgctcccgccgacccacgccgtccccgccgtccccgaccatccccttcgcgacgaaccccgaccgtacaaccgcctccttcttcgctcactcaaacctccgcgccccgtacccacattacccgctattccgaccccaacgccccgctactacccctacgctcgcccgacgaaaacgcctctaccgatcgccgcgctccccgatcgcgcgtctcacctctcgattctcgcaaactatcacgcccgaatcccgtaacttcccccgaaaaccgtctccgaaatatcccttctcctaacccaccgcgaccgcgcgcttttaaaatttcttaccctcgcaactcccgcgatcccctcgacgacaatccctaaaactccgcgatatctataccccgcaacctcccgaacgccacttccccgcgcgaccgccccacgctacccgtacaatcgcgcgccccgaaccgaccccgaacaccactccaccgcgacgacccccacttatccttcccgaactaccgtctttcccaaaatccgctcactaaatccccacatacccaacgtcgaacctaaccctcgaacaaacgcgacccaaacgcgaa

SEQ ID NO: 10433 - DNA, 1154 bp, Artificial Sequence
  chemically treated genomic DNA (Homo sapiens) CpG-island No: 10433
ttcgtttatacgtacgtttgtttatttgattcgtttatatatacgtttgtttatttgattcgtttatatatacgtttgtttacgtgatacgttgatacgtacgtttgtttacgtgagttatttatatttacgcgtgtttatttgaattatttatatgtatatttatatgtacgtttgtttatttgattcgtttatacgtatatttatacgtatatttgtttatttgatttatttatatgtacgtttgtttatttgattcgtttatacgtatgtttgtttatttgattcgtttatacgtacgtttgtttatttgatttatttatatttaattttgtttatttgattcgttcgtacgtacgtttgtttatttgattcgtttatacgtatgtttgtttatttgattcgttcgtacgtacgtttgtttatttgattcgtttatacgtacgtttgtttatttgattcgtttataagtaattttgtttatttgatttatttataagtaattttgtttatttgattcgattatacgtacgtttgtttatttgattcgttcgtacgtaattttgtttatttgattcgttagtacgtacgtttgtttatttgattcgattataggtacgtttgtttatttgattcgttcgtacgtaattttgtttatttgattcgttcgtacgtaattttgtttatttgattcgttagtacgtacgtttgtttatttgattcgttcgtacgtaattttgtttatttgatcggttcgtatttaattttgtttatttgatttttttatatatatgtttgtttatttgattcgtttgtacgtacgtttgtttatttgattcgtttgtacgtacgtttgtttatttgattcgtttgtacgtatgtttgtttatttgattcgtttgtacgcgattttgtttatttgatttgttcgtatgtacgttaatattgtttatttgattcgttcgtacgcgattttgtttatttgattcgttcgtacgtacgttaatattgtttatttgattcgttcgtatatacgtttgtttatttgattcgttcgtatgtatgtttgtttatttgattcgtttatatatatatttgtttatttgattcgattataagaacgtttgtttatttgatcggtttatataaatgtt

SEQ ID NO: 10434 - DNA, 1154 bp, Artificial Sequence
  chemically treated genomic DNA (Homo sapiens) CpG-island No: 10434
aacatttatataaaccgatcaaataaacaaacgttcttataatcgaatcaaataaacaaatatatatataaacgaatcaaataaacaaacatacatacgaacgaatcaaataaacaaacgtatatacgaacgaatcaaataaacaatattaacgtacgtacgaacgaatcaaataaacaaaatcgcgtacgaacgaatcaaataaacaatattaacgtacatacgaacaaatcaaataaacaaaatcgcgtacaaacgaatcaaataaacaaacatacgtacaaacgaatcaaataaacaaacgtacgtacaaacgaatcaaataaacaaacgtacgtacaaacgaatcaaataaacaaacatatatataaaaaaatcaaataaacaaaattaaatacgaaccgatcaaataaacaaaattacgtacgaacgaatcaaataaacaaacgtacgtactaacgaatcaaataaacaaaattacgtacgaacgaatcaaataaacaaaattacgtacgaacgaatcaaataaacaaacgtacctataatcgaatcaaataaacaaacgtacgtactaacgaatcaaataaacaaaattacgtacgaacgaatcaaataaacaaacgtacgtataatcgaatcaaataaacaaaattacttataaataaatcaaataaacaaaattacttataaacgaatcaaataaacaaacgtacgtataaacgaatcaaataaacaaacgtacgtacgaacgaatcaaataaacaaacatacgtataaacgaatcaaataaacaaacgtacgtacgaacgaatcaaataaacaaaattaaatataaataaatcaaataaacaaacgtacgtataaacgaatcaaataaacaaacatacgtataaacgaatcaaataaacaaacgtacatataaataaatcaaataaacaaatatacgtataaatatacgtataaacgaatcaaataaacaaacgtacatataaatatacatataaataattcaaataaacacgcgtaaatataaataactcacgtaaacaaacgtacgtatcaacgtatcacgtaaacaaacgtatatataaacgaatcaaataaacaaacgtatatataaacgaatcaaataaacaaacgtacgtataaacgaa

SEQ ID NO: 10435 - DNA, 1154 bp, Artificial Sequence
  chemically treated genomic DNA (Homo sapiens) CpG-island No: 10435
ggtatttgtatgggtcggttaggtgggtaggcgtttttatggtcgggttaggtgggtaggtgtgtgtatgagcgagttaggtgggtagatatgtatacgggcgggttaggtggataggcgtgtgtacgggcgggttaggtggatagtattggcgtgcgtacgggcgggttagatggataggatcgcgtacgggcgggttaggtggatagtattggcgtgtatacgggtaggttagatggataggatcgcgtataggcgggttaggtggataggtatgcgtataggcgggttaggtggataggcgtgcgtataggcgggttaggtggataggcgtgcgtataggcgggttaggtgggtaggtatgtgtgtgggagagttaggtggataggattgagtacgggtcggttaggtggataggattgcgtacgggcgggttaggtgagtaggcgtgcgtattggcgggttaggtggataggattgcgtacgggcgggttaggtggataggattgcgtacgggcgggttaggtgggtaggcgtgtttatggtcgggttaggtgggtaggcgtgcgtattggcgggttaggtggataggattgcgtacgggcgggttaggtgggtaggcgtgcgtatggtcgggttaggtgggtaggattgtttatgggtgagttaggtggataggattgtttatgggcgggttaggtggataggcgtgcgtatgggcgagttaggtgggtaggcgtgcgtacgagcgggttaggtggataggtatgcgtatgggcgggttaggtgggtaggcgtgcgtacgagcgagttaggtggataggattgggtatgggtgagttaggtggataggcgtgcgtatgagcgggttaggtgagtaggtatgcgtatgggcgggttaggtgggtaggcgtgtatatgggtgggttaggtggataggtgtgcgtatgagtgtgcgtatgggcgagttaggtgggtagacgtgtatatgggtgtgtatatgggtgatttaggtggatacgcgtgggtatgggtggtttacgtggataggcgtgcgtgttagcgtgttacgtggataggcgtgtgtgtgggcgggttaggtgggtaggcgtgtgtatgggcgggttaggtgggtaggcgtgcgtatgggcggg

SEQ ID NO: 10436 - DNA, 1154 bp, Artificial Sequence
  chemically treated genomic DNA (Homo sapiens) CpG-island No: 10436
cccgcccatacgcacgcctacccacctaacccgcccatacacacgcctacccacctaacccgcccacacacacgcctatccacgtaacacgctaacacgcacgcctatccacgtaaaccacccatacccacgcgtatccacctaaatcacccatatacacacccatatacacgtctacccacctaactcgcccatacgcacactcatacgcacacctatccacctaacccacccatatacacgcctacccacctaacccgcccatacgcatacctactcacctaacccgctcatacgcacgcctatccacctaactcacccatacccaatcctatccacctaactcgctcgtacgcacgcctacccacctaacccgcccatacgcatacctatccacctaacccgctcgtacgcacgcctacccacctaactcgcccatacgcacgcctatccacctaacccgcccataaacaatcctatccacctaactcacccataaacaatcctacccacctaacccgaccatacgcacgcctacccacctaacccgcccgtacgcaatcctatccacctaacccgccaatacgcacgcctacccacctaacccgaccataaacacgcctacccacctaacccgcccgtacgcaatcctatccacctaacccgcccgtacgcaatcctatccacctaacccgccaatacgcacgcctactcacctaacccgcccgtacgcaatcctatccacctaaccgacccgtactcaatcctatccacctaactctcccacacacatacctacccacctaacccgcctatacgcacgcctatccacctaacccgcctatacgcacgcctatccacctaacccgcctatacgcatacctatccacctaacccgcctatacgcgatcctatccatctaacctacccgtatacacgccaatactatccacctaacccgcccgtacgcgatcctatccatctaacccgcccgtacgcacgccaatactatccacctaacccgcccgtacacacgcctatccacctaacccgcccgtatacatatctacccacctaactcgctcatacacacacctacccacctaacccgaccataaaaacgcctacccacctaaccgacccatacaaatacc

SEQ ID NO: 10437 - DNA, 621 bp, Artificial Sequence
  chemically treated genomic DNA (Homo sapiens) CpG-island No: 10437
tttttatacgtacgtttgtttatttgatttttttatacgtacgtttgtttatttgattcgtttatacgtatatttatatatatgtttgtttatttgattcgattatatgtacgtttgtttatttgattcgattataagaacgtttgtttatttgattcgtttatataaacgtttgtttatttgattcgtttgtacgtacgtttgtttagttgattcgtttatacgtatatttatacgtacgtttgtttatttgatttttttatacgtaattttgtttatttgatttgtttatacgtacgtttgtttatttgattcgtttatacgtacgtttgtttatttgatttttttatacgtacgtttgtttatttgattcgtttatacgtatatttatatttaagtttgtttatttaaatcgattatatatacgtttgtttatttgattcgtttatataaacgtttgtttatttgattcgttcgtatgtacgtttgtttagattcgtttatatttacgtttgtttatttgattcgtttatatgtacgtttgtttattttatttgtttgtttattttattcgtttatacgtacgtttggttatttgatttgtttatatatatgtttgtt

SEQ ID NO: 10438 - DNA, 621 bp, Artificial Sequence
  chemically treated genomic DNA (Homo sapiens) CpG-island No: 10438
aacaaacatatatataaacaaatcaaataaccaaacgtacgtataaacgaataaaataaacaaacaaataaaataaacaaacgtacatataaacgaatcaaataaacaaacgtaaatataaacgaatctaaacaaacgtacatacgaacgaatcaaataaacaaacgtttatataaacgaatcaaataaacaaacgtatatataatcgatttaaataaacaaacttaaatataaatatacgtataaacgaatcaaataaacaaacgtacgtataaaaaaatcaaataaacaaacgtacgtataaacgaatcaaataaacaaacgtacgtataaacaaatcaaataaacaaaattacgtataaaaaaatcaaataaacaaacgtacgtataaatatacgtataaacgaatcaactaaacaaacgtacgtacaaacgaatcaaataaacaaacgtttatataaacgaatcaaataaacaaacgttcttataatcgaatcaaataaacaaacgtacatataatcgaatcaaataaacaaacatatatataaatatacgtataaacgaatcaaataaacaaacgtacgtataaaaaaatcaaataaacaaacgtacgtataaaaa

SEQ ID NO: 10439 - DNA, 621 bp, Artificial Sequence
  chemically treated genomic DNA (Homo sapiens) CpG-island No: 10439
gataggtatgtgtatgggtaggttaggtggttaggcgtgcgtatgggcgagtgaggtgggtaggtaagtgaggtgggtaggcgtgtatgtgggcgagttaggtgggtaggcgtgggtgtgggcgagtttggataggcgtgtatacgggcgggttaggtgggtaggcgtttgtatgggcgggttaggtgggtagacgtgtgtatggtcggtttaggtggataggtttgagtatgggtgtgcgtatggacgagttaggtggataggcgtgcgtatgggagagttaggtggataggcgtgcgtatgggcgagttaggtggataggcgtgcgtatgggtaagttaggtggataggattgcgtatgggagagttaggtggataggcgtgcgtatgggtgtgcgtatggacgagttagttgggtaggcgtgcgtataggcgggttaggtgggtaggcgtttgtatgggcgggttaggtgggtaggcgtttttatggtcgggttaggtgggtaggcgtgtatatggtcgggttaggtggataggtatgtgtatgggtgtgcgtatggacgagttaggtggataggcgtgcgtatgggagagttaggtggataggcgtgcgtatgggag

SEQ ID NO: 10440 - DNA, 621 bp, Artificial Sequence
  chemically treated genomic DNA (Homo sapiens) CpG-island No: 10440
ctcccatacgcacgcctatccacctaactctcccatacgcacgcctatccacctaactcgtccatacgcacacccatacacatacctatccacctaacccgaccatatacacgcctacccacctaacccgaccataaaaacgcctacccacctaacccgcccatacaaacgcctacccacctaacccgcctatacgcacgcctacccaactaactcgtccatacgcacacccatacgcacgcctatccacctaactctcccatacgcaatcctatccacctaacttacccatacgcacgcctatccacctaactcgcccatacgcacgcctatccacctaactctcccatacgcacgcctatccacctaactcgtccatacgcacacccatactcaaacctatccacctaaaccgaccatacacacgtctacccacctaacccgcccatacaaacgcctacccacctaacccgcccgtatacacgcctatccaaactcgcccacacccacgcctacccacctaactcgcccacatacacgcctacccacctcacttacctacccacctcactcgcccatacgcacgcctaaccacctaacctacccatacacatacctatc

SEQ ID NO: 10441 - DNA, 793 bp, Artificial Sequence
  chemically treated genomic DNA (Homo sapiens) CpG-island No: 10441
gcgtgcgtatgagcgagttaggtggataggattgcgtatgggagagttaggtggataggcgtgtatatgagcgagttaggtggataggtatgcgtatgggagagttaggtggataggtatgtatatgagcgagttaggtggataggcgtgcgtatgggtgtgtatatgggtgagttaggtgggtaggcgtgtatacgggcgggttaggtgggtaggcgtttgtgtgggtcggttaggtgggtaggtgtttttatggtcgggttaggtggataggtatgtgtatgggtgtgcgtatggacgagttaggtgggtaggcgtgcgtatgggagagttaggtggataggtgtgcgtatgggtgagttaggtggataggcgtgtatatgggtgtgcgtacgggcgagttaggtgggtaggcgtgtatatgggtgtgtgtatgggtgagttaggtgggtaggtatgcgtatgagcgagttaggcgggtaggcgtgcgtatgggtgagttaggtgggtaggagtgtatatgggtgtgcgtatgggtgagttaggtgggtaggtatgcgtatgagcgagttaggtgggtaggcgtgcgtatgggtgagttaggtgggtaggagtgtatatgggtgtgcgtatgggcgagttaggtgggtaggcgtgcgtgtgggcgagttaggtgggtaggtatgtatacgggcgggttaggtgggtaggtttttttatggtcgggttaggtgggtaggtatgcgtacgggtaggttaggtgggtaggcgtgtatacgggtaggttaggtgt

SEQ ID NO: 10442 - DNA, 793 bp, Artificial Sequence
  chemically treated genomic DNA (Homo sapiens) CpG-island No: 10442
acacctaacctacccgtatacacgcctacccacctaacctacccgtacgcatacctacccacctaacccgaccataaaaaaacctacccacctaacccgcccgtatacatacctacccacctaactcgcccacacgcacgcctacccacctaactcgcccatacgcacacccatatacactcctacccacctaactcacccatacgcacgcctacccacctaactcgctcatacgcatacctacccacctaactcacccatacgcacacccatatacactcctacccacctaactcacccatacgcacgcctacccgcctaactcgctcatacgcatacctacccacctaactcacccatacacacacccatatacacgcctacccacctaactcgcccgtacgcacacccatatacacgcctatccacctaactcacccatacgcacacctatccacctaactctcccatacgcacgcctacccacctaactcgtccatacgcacacccatacacatacctatccacctaacccgaccataaaaacacctacccacctaaccgacccacacaaacgcctacccacctaacccgcccgtatacacgcctacccacctaactcacccatatacacacccatacgcacgcctatccacctaactcgctcatatacatacctatccacctaactctcccatacgcatacctatccacctaactcgctcatatacacgcctatccacctaactctcccatacgcaatcctatccacctaactcgctcatacgcacgc

SEQ ID NO: 10443 - DNA, 793 bp, Artificial Sequence
  chemically treated genomic DNA (Homo sapiens) CpG-island No: 10443
atatttgatttgttcgtatgtacgtttgtttatttgatttgttcgtacgtatgtttgtttatttgattcgattataagaaagtttgtttatttgattcgttcgtatgtatgtttgtttatttgattcgtttatacgtacgtttgtttatttgattcgtttatacgtatatttatatgtatttttgtttatttgatttatttatacgtacgtttgtttatttgattcgtttatacgtatgtttgtttatttgatttatttatacgtatatttatatgtatttttgtttatttgatttatttatacgtacgtttgttcgtttgattcgtttatacgtatgtttgtttatttgatttatttatatatatatttatatgtacgtttgtttatttgattcgttcgtacgtatatttatatgtacgtttgtttatttgatttatttatacgtatatttgtttatttaatttttttatacgtacgtttgtttatttgattcgtttatacgtatatttatatatatgtttgtttatttgattcgattataagaatatttgtttatttgatcggtttatataaacgtttgtttatttgattcgttcgtatgtacgtttgtttatttgatttatttatatgtatatttatacgtacgtttgtttatttgattcgtttatatgtatgtttgtttatttgatttttttatacgtatgtttgtttatttgattcgtttatatgtacgtttgtttatttgatttttttatacgtaattttgtttatttgattcgtttatacgtacgt

SEQ ID NO: 10444 - DNA, 793 bp, Artificial Sequence
  chemically treated genomic DNA (Homo sapiens) CpG-island No: 10444
acgtacgtataaacgaatcaaataaacaaaattacgtataaaaaaatcaaataaacaaacgtacatataaacgaatcaaataaacaaacatacgtataaaaaaatcaaataaacaaacatacatataaacgaatcaaataaacaaacgtacgtataaatatacatataaataaatcaaataaacaaacgtacatacgaacgaatcaaataaacaaacgtttatataaaccgatcaaataaacaaatattcttataatcgaatcaaataaacaaacatatatataaatatacgtataaacgaatcaaataaacaaacgtacgtataaaaaaattaaataaacaaatatacgtataaataaatcaaataaacaaacgtacatataaatatacgtacgaacgaatcaaataaacaaacgtacatataaatatatatataaataaatcaaataaacaaacatacgtataaacgaatcaaacgaacaaacgtacgtataaataaatcaaataaacaaaaatacatataaatatacgtataaataaatcaaataaacaaacatacgtataaacgaatcaaataaacaaacgtacgtataaataaatcaaataaacaaaaatacatataaatatacgtataaacgaatcaaataaacaaacgtacgtataaacgaatcaaataaacaaacatacatacgaacgaatcaaataaacaaactttcttataatcgaatcaaataaacaaacatacgtacgaacaaatcaaataaacaaacgtacatacgaacaaatcaaatat

SEQ ID NO: 10445 - DNA, 537 bp, Artificial Sequence
  chemically treated genomic DNA (Homo sapiens) CpG-island No: 10445
gtcgtttcgagattttacgtttagggttagtatagtttcgggcgtttcgcgttatttttattaggttcgtttaatttcgtcgtttcgtagatttacgtgtaggatattttgaggacggagttggttgcggaggttatcgcgtgttgtgtttcgagcggggttatatgtttgtttgcggcgatgttattatggtaattaacgttttgtagatcgtgtagcgtattttggcgacggagggcgatatggagttggacgaggtcggcgacgttatcggcgtgttgcgggtgcggaggggcgggtcgggtttgagcgtgcggggtttttgttaaggttttcgagtcgggttttgatttattgtgttttttttcgataggattagtaacgttattacgaagatattttcgggttattgcgtatttaggaggtgataagtcgatacgtatttagagtttttttttgtaggagcgttagttgcggggcgtagtgttgggcgttcgattttcggtttagatattaatagtttttgagaggtttggt

SEQ ID NO: 10446 - DNA, 537 bp, Artificial Sequence
  chemically treated genomic DNA (Homo sapiens) CpG-island No: 10446
accaaacctctcaaaaactattaatatctaaaccgaaaatcgaacgcccaacactacgccccgcaactaacgctcctacaaaaaaaaactctaaatacgtatcgacttatcacctcctaaatacgcaataacccgaaaatatcttcgtaataacgttactaatcctatcgaaaaaaaacacaataaatcaaaacccgactcgaaaaccttaacaaaaaccccgcacgctcaaacccgacccgcccctccgcacccgcaacacgccgataacgtcgccgacctcgtccaactccatatcgccctccgtcgccaaaatacgctacacgatctacaaaacgttaattaccataataacatcgccgcaaacaaacatataaccccgctcgaaacacaacacgcgataacctccgcaaccaactccgtcctcaaaatatcctacacgtaaatctacgaaacgacgaaattaaacgaacctaataaaaataacgcgaaacgcccgaaactatactaaccctaaacgtaaaatctcgaaacgac

SEQ ID NO: 10447 - DNA, 537 bp, Artificial Sequence
  chemically treated genomic DNA (Homo sapiens) CpG-island No: 10447
gttaggttttttaggggttgttggtgtttgagtcgggagtcgaacgtttagtattgcgtttcgtaattgacgtttttgtaaggaaaagttttgggtgcgtatcggtttgttattttttgggtgcgtagtgattcgaaaatgttttcgtggtagcgttgttgattttgtcggaaaagagtatagtggattagaattcgattcggagattttagtaggaatttcgtacgtttaggttcggttcgttttttcgtattcgtagtacgtcgatgacgtcgtcggtttcgtttagttttatgtcgtttttcgtcgttaggatgcgttgtacggtttgtaggacgttggttgttatggtaatatcgtcgtagataaatatgtggtttcgttcgaggtatagtacgcggtgattttcgtagttagtttcgtttttaggatgttttgtacgtaggtttgcggggcggcggggttaggcgggtttggtgggggtggcgcggggcgttcggggttgtgttggttttggacgtaaagtttcggagcggt

SEQ ID NO: 10448 - DNA, 537 bp, Artificial Sequence
  chemically treated genomic DNA (Homo sapiens) CpG-island No: 10448
accgctccgaaactttacgtccaaaaccaacacaaccccgaacgccccgcgccacccccaccaaacccgcctaaccccgccgccccgcaaacctacgtacaaaacatcctaaaaacgaaactaactacgaaaatcaccgcgtactatacctcgaacgaaaccacatatttatctacgacgatattaccataacaaccaacgtcctacaaaccgtacaacgcatcctaacgacgaaaaacgacataaaactaaacgaaaccgacgacgtcatcgacgtactacgaatacgaaaaaacgaaccgaacctaaacgtacgaaattcctactaaaatctccgaatcgaattctaatccactatactcttttccgacaaaatcaacaacgctaccacgaaaacattttcgaatcactacgcacccaaaaaataacaaaccgatacgcacccaaaacttttccttacaaaaacgtcaattacgaaacgcaatactaaacgttcgactcccgactcaaacaccaacaacccctaaaaaacctaac

SEQ ID NO: 10449 - DNA, 511 bp, Artificial Sequence
  chemically treated genomic DNA (Homo sapiens) CpG-island No: 10449
tttttaatcgagagcgcgttttatttcgcgtattttgaatttatttcgacgtttttttaagaggttgatatataaaagaataataatagcggggtatattggaattacgcgtcgcggcggggcgttcggaaaacggattcgcgttgttttttgggatttgaagtttaaggtttgttttcgcggtagaaacggagttttggagtcgagtgttgtagagagcgtgcgtagacggttgggggttgtagtttttttgttttcggtttcgggtattgcggggagatttagtcgttttaggattataagttttagaaggttttgcgcgggtagacggggcggggttggaggtttaggtgtcgttttttttgtaacgtcggggttagagttttaaaatcgagggttcgtaggttttcgcggtcgtcgcgatgtagaaatacgagaaattggaaaagattggggaaggtaatggaatttcgagatgtttttgtaagagtttttttgtagatttttcggt

SEQ ID NO: 10450 - DNA, 511 bp, Artificial Sequence
  chemically treated genomic DNA (Homo sapiens) CpG-island No: 10450
accgaaaaatctacaaaaaaactcttacaaaaacatctcgaaattccattaccttccccaatcttttccaatttctcgtatttctacatcgcgacgaccgcgaaaacctacgaaccctcgattttaaaactctaaccccgacgttacaaaaaaaacgacacctaaacctccaaccccgccccgtctacccgcgcaaaaccttctaaaacttataatcctaaaacgactaaatctccccgcaatacccgaaaccgaaaacaaaaaaactacaacccccaaccgtctacgcacgctctctacaacactcgactccaaaactccgtttctaccgcgaaaacaaaccttaaacttcaaatcccaaaaaacaacgcgaatccgttttccgaacgccccgccgcgacgcgtaattccaatataccccgctattattattcttttatatatcaacctcttaaaaaaacgtcgaaataaattcaaaatacgcgaaataaaacgcgctctcgattaaaaa

SEQ ID NO: 10451 - DNA, 511 bp, Artificial Sequence
  chemically treated genomic DNA (Homo sapiens) CpG-island No: 10451
gtcgaaggatttgtagaggagtttttgtaggaatatttcgagattttattattttttttaattttttttagtttttcgtatttttgtatcgcggcggtcgcggggatttgcgggttttcggttttaagattttggtttcggcgttgtagaggaggcggtatttgagtttttagtttcgtttcgtttgttcgcgtagggttttttggggtttgtagttttaaaacgattaggttttttcgtaatgttcgagatcgaggataagaagattataatttttagtcgtttgcgtacgttttttgtagtattcgattttagggtttcgtttttatcgcggaggtaaattttggattttaagttttaggaagtaacgcgagttcgtttttcgggcgtttcgtcgcggcgcgtggttttagtgtgtttcgttgttgttatttttttatgtgttagttttttgaaagggcgtcgggataggtttagaatgcgcgaaatggggcgcgttttcggttagggg

SEQ ID NO: 10452 - DNA, 511 bp, Artificial Sequence
  chemically treated genomic DNA (Homo sapiens) CpG-island No: 10452
cccctaaccgaaaacgcgccccatttcgcgcattctaaacctatcccgacgccctttcaaaaaactaacacataaaaaaataacaacaacgaaacacactaaaaccacgcgccgcgacgaaacgcccgaaaaacgaactcgcgttacttcctaaaacttaaaatccaaaatttacctccgcgataaaaacgaaaccctaaaatcgaatactacaaaaaacgtacgcaaacgactaaaaattataatcttcttatcctcgatctcgaacattacgaaaaaacctaatcgttttaaaactacaaaccccaaaaaaccctacgcgaacaaacgaaacgaaactaaaaactcaaataccgcctcctctacaacgccgaaaccaaaatcttaaaaccgaaaacccgcaaatccccgcgaccgccgcgatacaaaaatacgaaaaactaaaaaaaattaaaaaaaataataaaatctcgaaatattcctacaaaaactcctctacaaatccttcgac

SEQ ID NO: 10453 - DNA, 510 bp, Artificial Sequence
  chemically treated genomic DNA (Homo sapiens) CpG-island No: 10453
tttatttcgcggaggattaatttcgcgttttttttggaagtttttttaagtttttcggcgtgtttgattttagatttcgttcggaattcgagattttacgttttttatttttattttttattattttttttattttttcgtttttcgaagtcgtagagggtacggcgatttcggttcgatcggggtttgggcggcggggtgggcgcggttacggtcgggggaatttatcgttcggtttttttagttttatcgcggtttttcggatttttcgggcgggaggcgcggaggtcgtaggtatttgaagtattttttttttttcgtcgtcgcgttcggggtattgtggaatttgtagttcggcgtcgcgttgttttcgtttttcgttttgcgatttacgtgtggggttttattcgcggttttttgcgtttgtagatcgcgaaggggttggcgggggcggttttgggggttgtgttattttttagaggtttggcggtataggttcgtttttttttt

SEQ ID NO: 10454 - DNA, 510 bp, Artificial Sequence
  chemically treated genomic DNA (Homo sapiens) CpG-island No: 10454
aaaaaaaaaacgaacctataccgccaaacctctaaaaaataacacaacccccaaaaccgcccccgccaaccccttcgcgatctacaaacgcaaaaaaccgcgaataaaaccccacacgtaaatcgcaaaacgaaaaacgaaaacaacgcgacgccgaactacaaattccacaataccccgaacgcgacgacgaaaaaaaaaaaatacttcaaatacctacgacctccgcgcctcccgcccgaaaaatccgaaaaaccgcgataaaactaaaaaaaccgaacgataaattcccccgaccgtaaccgcgcccaccccgccgcccaaaccccgatcgaaccgaaatcgccgtaccctctacgacttcgaaaaacgaaaaaataaaaaaaataataaaaaataaaaataaaaaacgtaaaatctcgaattccgaacgaaatctaaaatcaaacacgccgaaaaacttaaaaaaacttccaaaaaaaacgcgaaattaatcctccgcgaaataaa

SEQ ID NO: 10455 - DNA, 510 bp, Artificial Sequence
  chemically treated genomic DNA (Homo sapiens) CpG-island No: 10455
ggggagggggcggatttgtgtcgttaaatttttagggggtagtataatttttaaaatcgttttcgttagttttttcgcgatttgtaggcgtagagaatcgcgggtggagttttatacgtgggtcgtagggcggagggcggggatagcgcggcgtcggattataagttttataatgtttcgggcgcggcggcggggaaggaggggtgttttaggtgtttgcgattttcgcgtttttcgttcggaagattcgaggggtcgcgatggagttgggggagtcgggcggtgagttttttcggtcgtgatcgcgtttatttcgtcgtttaggtttcggtcgggtcgggatcgtcgtgttttttgcggtttcggggggcgggaaggtgggaggggtgatgagaggtgggggtggggaacgtgaagtttcggatttcgggcgggatttggggttaggtacgtcggggggtttggagagatttttagaggaggcgcggagttagtttttcgcggagtggg

SEQ ID NO: 10456 - DNA, 510 bp, Artificial Sequence
  chemically treated genomic DNA (Homo sapiens) CpG-island No: 10456
cccactccgcgaaaaactaactccgcgcctcctctaaaaatctctccaaaccccccgacgtacctaaccccaaatcccgcccgaaatccgaaacttcacgttccccacccccacctctcatcacccctcccaccttcccgccccccgaaaccgcaaaaaacacgacgatcccgacccgaccgaaacctaaacgacgaaataaacgcgatcacgaccgaaaaaactcaccgcccgactcccccaactccatcgcgacccctcgaatcttccgaacgaaaaacgcgaaaatcgcaaacacctaaaacacccctccttccccgccgccgcgcccgaaacattataaaacttataatccgacgccgcgctatccccgccctccgccctacgacccacgtataaaactccacccgcgattctctacgcctacaaatcgcgaaaaaactaacgaaaacgattttaaaaattatactaccccctaaaaatttaacgacacaaatccgccccctcccc

SEQ ID NO: 10457 - DNA, 732 bp, Artificial Sequence
  chemically treated genomic DNA (Homo sapiens) CpG-island No: 10457
ggtcgcgattggtgtttcggggcgcgaggttgggaaagtgtttaagtttcgcgttgtaggaggagagcggggagcggcgggtttgcgggatttcgggttgtagtttgttcggttgtatcgtcgggagaagttgggtttgagaggagggagggttcgagcggtgttgggttttgggcgagggagagggggcgatatttttcgaattttgttaagttgtttggcgttttcggtatttcgtgggagtggcgtcgtcgataggtgagcgatgcgcgaggtagtttgcggttacgttgaagttgggttgttgcgtttagagtgcgatagatgtggggttgcgggagcgtgggtagttgggtttagataggagcgcgtatatcgagaatagttaggtcgaagcgtttagaggcgtaaaggtttcgcgttttttttttagttcgtttattggttttcgattaagttttgtagagttggaatttcgattattgattttagtcgaacggttgttttgaaagtcggggtttggaagaaagggttgcggggtcggggatttagggtgcgcgcgtttataaacgtttttttttattttttgtggttattcgggtcgtcgcggggacggtttcggagaagggtcgtcgattcgggttcggggatttgcggcgtagtagcgtttggcgtttggtatttttatttaagttgtttttaggtggtcgtttagggatttttagagttttg

SEQ ID NO: 10458 - DNA, 732 bp, Artificial Sequence
  chemically treated genomic DNA (Homo sapiens) CpG-island No: 10458
caaaactctaaaaatccctaaacgaccacctaaaaacaacttaaataaaaataccaaacgccaaacgctactacgccgcaaatccccgaacccgaatcgacgacccttctccgaaaccgtccccgcgacgacccgaataaccacaaaaaataaaaaaaaacgtttataaacgcgcgcaccctaaatccccgaccccgcaaccctttcttccaaaccccgactttcaaaacaaccgttcgactaaaatcaataatcgaaattccaactctacaaaacttaatcgaaaaccaataaacgaactaaaaaaaaaacgcgaaacctttacgcctctaaacgcttcgacctaactattctcgatatacgcgctcctatctaaacccaactacccacgctcccgcaaccccacatctatcgcactctaaacgcaacaacccaacttcaacgtaaccgcaaactacctcgcgcatcgctcacctatcgacgacgccactcccacgaaataccgaaaacgccaaacaacttaacaaaattcgaaaaatatcgccccctctccctcgcccaaaacccaacaccgctcgaaccctccctcctctcaaacccaacttctcccgacgatacaaccgaacaaactacaacccgaaatcccgcaaacccgccgctccccgctctcctcctacaacgcgaaacttaaacactttcccaacctcgcgccccgaaacaccaatcgcgacc

SEQ ID NO: 10459 - DNA, 732 bp, Artificial Sequence
  chemically treated genomic DNA (Homo sapiens) CpG-island No: 10459
tagggttttgaggatttttgagcgattatttgggaataatttgggtggaggtgttagacgttaagcgttgttgcgtcgtaagttttcgagttcgggtcggcggttttttttcggggtcgttttcgcggcgattcgaatggttatagagggtgggaaagggcgtttgtgagcgcgcgtattttggattttcgatttcgtagtttttttttttaggtttcggtttttaggataatcgttcgattagggttagtggtcggggttttagttttgtagagtttagtcgggagttagtaggcgaattggagagaggacgcgagatttttgcgtttttggacgtttcggtttggttgttttcggtgtacgcgtttttgtttagatttaattatttacgttttcgtagttttatatttatcgtattttgagcgtagtaatttagttttagcgtggtcgtaggttgtttcgcgtatcgtttatttgtcggcggcgttatttttacggggtgtcggaggcgttagataatttggtagggttcgggagatgtcgttttttttttttcgtttagaatttagtatcgttcggattttttttttttttaagtttagtttttttcgacggtgtagtcggataagttgtagttcggagtttcgtaaattcgtcgtttttcgttttttttttgtagcgcgggatttggatatttttttagtttcgcgtttcggggtattagtcgcggtt

SEQ ID NO: 10460 - DNA, 732 bp, Artificial Sequence
  chemically treated genomic DNA (Homo sapiens) CpG-island No: 10460
aaccgcgactaataccccgaaacgcgaaactaaaaaaatatccaaatcccgcgctacaaaaaaaaaacgaaaaacgacgaatttacgaaactccgaactacaacttatccgactacaccgtcgaaaaaaactaaacttaaaaaaaaaaaaaatccgaacgatactaaattctaaacgaaaaaaaaaaaacgacatctcccgaaccctaccaaattatctaacgcctccgacaccccgtaaaaataacgccgccgacaaataaacgatacgcgaaacaacctacgaccacgctaaaactaaattactacgctcaaaatacgataaatataaaactacgaaaacgtaaataattaaatctaaacaaaaacgcgtacaccgaaaacaaccaaaccgaaacgtccaaaaacgcaaaaatctcgcgtcctctctccaattcgcctactaactcccgactaaactctacaaaactaaaaccccgaccactaaccctaatcgaacgattatcctaaaaaccgaaacctaaaaaaaaaaactacgaaatcgaaaatccaaaatacgcgcgctcacaaacgccctttcccaccctctataaccattcgaatcgccgcgaaaacgaccccgaaaaaaaaccgccgacccgaactcgaaaacttacgacgcaacaacgcttaacgtctaacacctccacccaaattattcccaaataatcgctcaaaaatcctcaaaacccta

SEQ ID NO: 10461 - DNA, 703 bp, Artificial Sequence
  chemically treated genomic DNA (Homo sapiens) CpG-island No: 10461
atcggttcggttttaattttttatcgattcgggttttattttggtttcgttttttttttcgcgcgttcgtttcggttttttttcgtcgttttattttcgttcggtagtattttttttagatgtaatttttttgagttattttttttttttttggtaaggtttttttcgttttttttcgttttcgttttttttcgcgggtatttttagtttagagcgtttcgttttattggcggtcggtttaaggggacgttttggcgttcggaagtttttcgtttcgcggttcgttagggtttcgttcggttcgttatttttttttcgtttcgtgtagtagggagttttttaaataaagagcgggtttgggcgggcgtagcgcgttatcgtttcgggatttcgttcgttgtttttcggtttcgcgggcggtttacggcgaggtaagcgcggttaggcgggcgtggggcgggggttataaatttggggtcgttgggcggagttgggagcgcggcggggttcgcgggtcggggtgcgttcgggaaggggttaggagagcgggtttttttcgcgttttttcggtgttttcggttttgtcgcggtttgggcgttttcgatcgcggattgtcgggtatttttcggttttgtatttttttgttcgtttttttatttttaatttttattatcgggggtcggtttaggggcggggacgtta

SEQ ID NO: 10462 - DNA, 703 bp, Artificial Sequence
  chemically treated genomic DNA (Homo sapiens) CpG-island No: 10462
taacgtccccgcccctaaaccgacccccgataataaaaattaaaaataaaaaaacgaacaaaaaaatacaaaaccgaaaaatacccgacaatccgcgatcgaaaacgcccaaaccgcgacaaaaccgaaaacaccgaaaaaacgcgaaaaaaacccgctctcctaaccccttcccgaacgcaccccgacccgcgaaccccgccgcgctcccaactccgcccaacgaccccaaatttataacccccgccccacgcccgcctaaccgcgcttacctcgccgtaaaccgcccgcgaaaccgaaaaacaacgaacgaaatcccgaaacgataacgcgctacgcccgcccaaacccgctctttatttaaaaaactccctactacacgaaacgaaaaaaaaataacgaaccgaacgaaaccctaacgaaccgcgaaacgaaaaacttccgaacgccaaaacgtccccttaaaccgaccgccaataaaacgaaacgctctaaactaaaaatacccgcgaaaaaaaacgaaaacgaaaaaaaacgaaaaaaaccttaccaaaaaaaaaaaaaataactcaaaaaaattacatctaaaaaaaatactaccgaacgaaaataaaacgacgaaaaaaaaccgaaacgaacgcgcgaaaaaaaaaacgaaaccaaaataaaacccgaatcgataaaaaattaaaaccgaaccgat

SEQ ID NO: 10463 - DNA, 703 bp, Artificial Sequence
  chemically treated genomic DNA (Homo sapiens) CpG-island No: 10463
tggcgttttcgtttttgggtcggttttcgatggtgggggttagggatgggaaggcgggtaggaaggtgtagagtcgggaggtgttcggtagttcgcggtcgggggcgtttaggtcgcggtagggtcgagagtatcggaggggcgcggaggggattcgtttttttggttttttttcgggcgtatttcggttcgcgagtttcgtcgcgtttttaatttcgtttaacggttttaagtttgtggttttcgttttacgttcgtttagtcgcgtttatttcgtcgtgggtcgttcgcggggtcgaagggtaacgagcggggtttcggggcggtggcgcgttgcgttcgtttaagttcgttttttgtttgggaggttttttattatacggggcgggggaagaatggcgggtcgggcggaattttgacgagtcgcggggcggaaagttttcggacgttaaggcgtttttttggatcggtcgttagtagggcggggcgttttgagttgaaaatattcgcgggagggggcgagagcggggaggggcgggaggaattttattagggggggagggagtagtttaggaggattgtatttggagggagtgttgtcgggcgggagtgagacggcgaggggaggtcgaggcgagcgcgcgggaggaggaacgagattaaggtggagttcgggtcggtggaaggttggggtcgggtcggt

SEQ ID NO: 10464 - DNA, 703 bp, Artificial Sequence
  chemically treated genomic DNA (Homo sapiens) CpG-island No: 10464
accgacccgaccccaaccttccaccgacccgaactccaccttaatctcgttcctcctcccgcgcgctcgcctcgacctcccctcgccgtctcactcccgcccgacaacactccctccaaatacaatcctcctaaactactccctccccccctaataaaattcctcccgcccctccccgctctcgccccctcccgcgaatattttcaactcaaaacgccccgccctactaacgaccgatccaaaaaaacgccttaacgtccgaaaactttccgccccgcgactcgtcaaaattccgcccgacccgccattcttcccccgccccgtataataaaaaacctcccaaacaaaaaacgaacttaaacgaacgcaacgcgccaccgccccgaaaccccgctcgttacccttcgaccccgcgaacgacccacgacgaaataaacgcgactaaacgaacgtaaaacgaaaaccacaaacttaaaaccgttaaacgaaattaaaaacgcgacgaaactcgcgaaccgaaatacgcccgaaaaaaaaccaaaaaaacgaatcccctccgcgcccctccgatactctcgaccctaccgcgacctaaacgcccccgaccgcgaactaccgaacacctcccgactctacaccttcctacccgccttcccatccctaacccccaccatcgaaaaccgacccaaaaacgaaaacgcca

SEQ ID NO: 10465 - DNA, 504 bp, Artificial Sequence
  chemically treated genomic DNA (Homo sapiens) CpG-island No: 10465
cgtacgtaatttcgggcgtggggatttttttttgttttcggcgttcggttcgtgttgcgtttttagagcggagcgtttcgtagtttcgcgttatttcggcgttcgtatcgggattcgggcgcggagtttggggacgacggggggcgttttaggtgggtttcgggttttcgtttcgcgcgttcgggtttgggcgatttttgggcgggtatacggtcggtcggggaggagcgcggaggaggaggaaagcgcgagaagcggtttgtcgggggagggtcgtcgcgtcgtcgtcgtcgcgcgtcgttgtcggggatcgtaggcggacgcgcgtcgacggcggagcggagagaggtttagcgtaggagtcgcggcgtcgagcggtaggttcgtcggcggtagcgttcgtcgcgcggatggagagatagagagataagaacgcgtttgcggtacgcgatatcgcgtcgggattacgcgttttttcggtttcggacgtttaggtaagtaacg

SEQ ID NO: 10466 - DNA, 504 bp, Artificial Sequence
  chemically treated genomic DNA (Homo sapiens) CpG-island No: 10466
cgttacttacctaaacgtccgaaaccgaaaaaacgcgtaatcccgacgcgatatcgcgtaccgcaaacgcgttcttatctctctatctctccatccgcgcgacgaacgctaccgccgacgaacctaccgctcgacgccgcgactcctacgctaaacctctctccgctccgccgtcgacgcgcgtccgcctacgatccccgacaacgacgcgcgacgacgacgacgcgacgaccctcccccgacaaaccgcttctcgcgctttcctcctcctccgcgctcctccccgaccgaccgtatacccgcccaaaaatcgcccaaacccgaacgcgcgaaacgaaaacccgaaacccacctaaaacgccccccgtcgtccccaaactccgcgcccgaatcccgatacgaacgccgaaataacgcgaaactacgaaacgctccgctctaaaaacgcaacacgaaccgaacgccgaaaacaaaaaaaaatccccacgcccgaaattacgtacg

SEQ ID NO: 10467 - DNA, 504 bp, Artificial Sequence
  chemically treated genomic DNA (Homo sapiens) CpG-island No: 10467
cgttatttgtttgggcgttcggagtcgagggagcgcgtggtttcggcgcggtgtcgcgtgtcgtaagcgcgtttttgtttttttgtttttttattcgcgcggcggacgttgtcgtcggcggatttgtcgttcggcgtcgcgatttttgcgttaagttttttttcgtttcgtcgtcggcgcgcgttcgtttacgattttcggtagcggcgcgcggcggcggcggcgcggcgattttttttcggtaggtcgtttttcgcgttttttttttttttcgcgttttttttcggtcggtcgtgtattcgtttaggggtcgtttaggttcgggcgcgcggggcggggattcgagatttatttggggcgtttttcgtcgtttttaggtttcgcgttcgggtttcggtacgggcgtcgggatagcgcggggttgcgggacgtttcgttttggaggcgtagtacgggtcgggcgtcgggggtaggaaagggtttttacgttcgaaattgcgtgcg

SEQ ID NO: 10468 - DNA, 504 bp, Artificial Sequence
  chemically treated genomic DNA (Homo sapiens) CpG-island No: 10468
cgcacgcaatttcgaacgtaaaaaccctttcctacccccgacgcccgacccgtactacgcctccaaaacgaaacgtcccgcaaccccgcgctatcccgacgcccgtaccgaaacccgaacgcgaaacctaaaaacgacgaaaaacgccccaaataaatctcgaatccccgccccgcgcgcccgaacctaaacgacccctaaacgaatacacgaccgaccgaaaaaaaacgcgaaaaaaaaaaaaaacgcgaaaaacgacctaccgaaaaaaaatcgccgcgccgccgccgccgcgcgccgctaccgaaaatcgtaaacgaacgcgcgccgacgacgaaacgaaaaaaaacttaacgcaaaaatcgcgacgccgaacgacaaatccgccgacgacaacgtccgccgcgcgaataaaaaaacaaaaaaacaaaaacgcgcttacgacacgcgacaccgcgccgaaaccacgcgctccctcgactccgaacgcccaaacaaataacg

SEQ ID NO: 10469 - DNA, 613 bp, Artificial Sequence
  chemically treated genomic DNA (Homo sapiens) CpG-island No: 10469
ttgcgcgtttaggtcggtttaggtagcggtttcgagtgtttcgcgcgtttaggacggtttaggtgcggggaggtcggtttagcgttcgtttttgtttttttaggggttcgtttcgggtcgtcgtttttatcgtttttaacggagtttcgttttttttcgcgtttaagacggttttattttgtaggacgtcgttttcggtttgtacgtcggaaagttgggagcggcggggagttacgagggtgtttttatttatcgggtgtttaggggacggttcggggcgtatagttagcgcgggttgtgtttttttttattcgcgtagggcgcgcgagttcgaggcgtaagtttcggacgtcggtttttattttgaagaagtttcggagaatgtgtacgacgttgagtatggtggtcgtcgggacgttcgggagttcggtcgtagtattacgagtcgcgtcgtcgagtcggttttatcgacgttatttcgcgtttcgttttagggttcgttttcgcgttttcgttcggacgtttcgttttcgtaaatttggttattggaggtacgtgaggtttaggtttttgtttgttcgtttttgggttttggttagtcgcgggattgggt

SEQ ID NO: 10470 - DNA, 613 bp, Artificial Sequence
  chemically treated genomic DNA (Homo sapiens) CpG-island No: 10470
acccaatcccgcgactaaccaaaacccaaaaacgaacaaacaaaaacctaaacctcacgtacctccaataaccaaatttacgaaaacgaaacgtccgaacgaaaacgcgaaaacgaaccctaaaacgaaacgcgaaataacgtcgataaaaccgactcgacgacgcgactcgtaatactacgaccgaactcccgaacgtcccgacgaccaccatactcaacgtcgtacacattctccgaaacttcttcaaaataaaaaccgacgtccgaaacttacgcctcgaactcgcgcgccctacgcgaataaaaaaaaacacaacccgcgctaactatacgccccgaaccgtcccctaaacacccgataaataaaaacaccctcgtaactccccgccgctcccaactttccgacgtacaaaccgaaaacgacgtcctacaaaataaaaccgtcttaaacgcgaaaaaaaacgaaactccgttaaaaacgataaaaacgacgacccgaaacgaacccctaaaaaaacaaaaacgaacgctaaaccgacctccccgcacctaaaccgtcctaaacgcgcgaaacactcgaaaccgctacctaaaccgacctaaacgcgcaa

SEQ ID NO: 10471 - DNA, 613 bp, Artificial Sequence
  chemically treated genomic DNA (Homo sapiens) CpG-island No: 10471
gtttagtttcgcggttgattaaagtttaggggcgggtaggtaggagtttggattttacgtgtttttagtggttaggtttgcgggggcggagcgttcgggcgagggcgcgggggcggattttagggcggggcgcggggtggcgtcggtggagtcggttcggcggcgcggttcgtagtgttgcggtcgggttttcgggcgtttcggcggttattatgtttagcgtcgtgtatatttttcggagtttttttaaggtgagagtcggcgttcgggatttgcgtttcgggttcgcgcgttttgcgcgggtggggaggagtatagttcgcgttggttgtgcgtttcgggtcgttttttgggtattcggtgggtggggatattttcgtggtttttcgtcgtttttaatttttcgacgtgtagatcggaggcggcgttttgtaaagtggggtcgttttgagcgcggggaaggacggggtttcgttgggggcggtagggacggcggttcggggcgagtttttgagagggtaagggcgagcgttgagtcggttttttcgtatttggatcgttttgggcgcgcggggtattcggagtcgttgtttggatcggtttgggcgcgtag

SEQ ID NO: 10472 - DNA, 613 bp, Artificial Sequence
  chemically treated genomic DNA (Homo sapiens) CpG-island No: 10472
ctacgcgcccaaaccgatccaaacaacgactccgaataccccgcgcgcccaaaacgatccaaatacgaaaaaaccgactcaacgctcgcccttaccctctcaaaaactcgccccgaaccgccgtccctaccgcccccaacgaaaccccgtccttccccgcgctcaaaacgaccccactttacaaaacgccgcctccgatctacacgtcgaaaaattaaaaacgacgaaaaaccacgaaaatatccccacccaccgaatacccaaaaaacgacccgaaacgcacaaccaacgcgaactatactcctccccacccgcgcaaaacgcgcgaacccgaaacgcaaatcccgaacgccgactctcaccttaaaaaaactccgaaaaatatacacgacgctaaacataataaccgccgaaacgcccgaaaacccgaccgcaacactacgaaccgcgccgccgaaccgactccaccgacgccaccccgcgccccgccctaaaatccgcccccgcgccctcgcccgaacgctccgcccccgcaaacctaaccactaaaaacacgtaaaatccaaactcctacctacccgcccctaaactttaatcaaccgcgaaactaaac

SEQ ID NO: 10473 - DNA, 698 bp, Artificial Sequence
  chemically treated genomic DNA (Homo sapiens) CpG-island No: 10473
agattgtcgtcgatggtataaatgcgtcgtttaaatgtcgttcgcgttgttataaatatttcgtcgagtaatagtaacgttagtagtagaataggagtgggaacgttacggtaattatttaatagttagattgcgtttaatacgatgatagcggttaaagtttggcgatcgattattgcggtagaggtcggagattgtaaatttaaagtttgacggcgtattttttcgcgttattgttaattaataaaagttattaagttaagcgcgttaatgatgaagtcggtattggcggggagatagttttgtttaatttgtgatatcgcggcgttggtgggggatatagtcgtgtcgttggtgatgttaatgagtatgtcgcgaaatgttaatatgttcgcgagggtgataataaatgaagggattttacggtacgcgatttattattcgttttaggtatcgagaagtagttttagaattagcgttataatgatggtaagtggtaaaggttagtttaattagacgttataaatcgtcgcgacgttatttaatagttttattattgagttcgcgggaaaggtcgattttagtagaaattttgacgaatattatttttatcgcgaggatgttcggtaatcgcggttttgcgttaataggttggagaatttacgggcggtttaagtgggtaatattggtgggttagg

SEQ ID NO: 10474 - DNA, 698 bp, Artificial Sequence
  chemically treated genomic DNA (Homo sapiens) CpG-island No: 10474
cctaacccaccaatattacccacttaaaccgcccgtaaattctccaacctattaacgcaaaaccgcgattaccgaacatcctcgcgataaaaataatattcgtcaaaatttctactaaaatcgacctttcccgcgaactcaataataaaactattaaataacgtcgcgacgatttataacgtctaattaaactaacctttaccacttaccatcattataacgctaattctaaaactacttctcgatacctaaaacgaataataaatcgcgtaccgtaaaatcccttcatttattatcaccctcgcgaacatattaacatttcgcgacatactcattaacatcaccaacgacacgactatatcccccaccaacgccgcgatatcacaaattaaacaaaactatctccccgccaataccgacttcatcattaacgcgcttaacttaataacttttattaattaacaataacgcgaaaaaatacgccgtcaaactttaaatttacaatctccgacctctaccgcaataatcgatcgccaaactttaaccgctatcatcgtattaaacgcaatctaactattaaataattaccgtaacgttcccactcctattctactactaacgttactattactcgacgaaatatttataacaacgcgaacgacatttaaacgacgcatttataccatcgacgacaatct

SEQ ID NO: 10475 - DNA, 698 bp, Artificial Sequence
  chemically treated genomic DNA (Homo sapiens) CpG-island No: 10475
tttggtttattaatgttgtttatttaaatcgttcgtaagttttttaatttgttaacgtaggatcgcgattatcgggtattttcgcggtaggaatggtgttcgttaaaatttttgttgaaatcgatttttttcgcgggtttaatgatggggttgttaggtggcgtcgcggcgatttgtaacgtttggttaggttggtttttgttatttattattattgtgacgttggttttgggattgtttttcggtgtttggaacggatggtgggtcgcgtatcgtaaagtttttttatttattgttattttcgcgggtatgttggtatttcgcggtatatttattggtattattaacggtacgattgtattttttattagcgtcgcgatgttataaattgggtaaagttattttttcgttagtatcggttttattattggcgcgtttggtttaatggtttttgttggttggtaatggcgcggaagaatgcgtcgttaggttttgggtttatagttttcggtttttatcgtagtagtcggtcgttaggttttaatcgttattatcgtattaggcgtaatttggttgttgaatgattatcgtggcgtttttatttttgttttgttgttgacgttgttgttattcggcggaatgtttatggtaacgcggacggtatttggacgacgtatttatgttatcggcggtaattt

SEQ ID NO: 10476 - DNA, 698 bp, Artificial Sequence
  chemically treated genomic DNA (Homo sapiens) CpG-island No: 10476
aaattaccgccgataacataaatacgtcgtccaaataccgtccgcgttaccataaacattccgccgaataacaacaacgtcaacaacaaaacaaaaataaaaacgccacgataatcattcaacaaccaaattacgcctaatacgataataacgattaaaacctaacgaccgactactacgataaaaaccgaaaactataaacccaaaacctaacgacgcattcttccgcgccattaccaaccaacaaaaaccattaaaccaaacgcgccaataataaaaccgatactaacgaaaaaataactttacccaatttataacatcgcgacgctaataaaaaatacaatcgtaccgttaataataccaataaatataccgcgaaataccaacatacccgcgaaaataacaataaataaaaaaactttacgatacgcgacccaccatccgttccaaacaccgaaaaacaatcccaaaaccaacgtcacaataataataaataacaaaaaccaacctaaccaaacgttacaaatcgccgcgacgccacctaacaaccccatcattaaacccgcgaaaaaaatcgatttcaacaaaaattttaacgaacaccattcctaccgcgaaaatacccgataatcgcgatcctacgttaacaaattaaaaaacttacgaacgatttaaataaacaacattaataaaccaaa

SEQ ID NO: 10477 - DNA, 529 bp, Artificial Sequence
  chemically treated genomic DNA (Homo sapiens) CpG-island No: 10477
ggaattgggagtggcgggcggggaggacgcgggttgtgtgacgattatcgataattagttggtggttaacgtataagtaggataaaagagttcgttttaggttgttagtagaaaaaagttatcgtggtacgtgtttcggggagtgatgcggtggttcggtttgtacggagagcgggatatcgtttggggagtcgcgttcgtagtttgggggcgggacgcggcggtcgtttttttcgttttcgagtagttgttatcgtttggttgcgttttagtttagtagtttagacgcggtcgtatttcggtggattgtagaggcggtagcgagttagagttcgagtcgtagtttcgggtcgtagagcgttgggcgagcgcgagcgttagggtatcggtagggtaggtagttgcgcgcggttggtacgtatttggtggagcgggcgcgtgagtgggtgtttttatgcgaggagggaggagtgggatttgggaagtcgggggagattgatttagggaagatgtggtaagtgtaattttt

SEQ ID NO: 10478 - DNA, 529 bp, Artificial Sequence
  chemically treated genomic DNA (Homo sapiens) CpG-island No: 10478
aaaaattacacttaccacatcttccctaaatcaatctcccccgacttcccaaatcccactcctccctcctcgcataaaaacacccactcacgcgcccgctccaccaaatacgtaccaaccgcgcgcaactacctaccctaccgataccctaacgctcgcgctcgcccaacgctctacgacccgaaactacgactcgaactctaactcgctaccgcctctacaatccaccgaaatacgaccgcgtctaaactactaaactaaaacgcaaccaaacgataacaactactcgaaaacgaaaaaaacgaccgccgcgtcccgcccccaaactacgaacgcgactccccaaacgatatcccgctctccgtacaaaccgaaccaccgcatcactccccgaaacacgtaccacgataacttttttctactaacaacctaaaacgaactcttttatcctacttatacgttaaccaccaactaattatcgataatcgtcacacaacccgcgtcctccccgcccgccactcccaattcc

SEQ ID NO: 10479 - DNA, 529 bp, Artificial Sequence
  chemically treated genomic DNA (Homo sapiens) CpG-island No: 10479
gaaagttgtatttattatattttttttgggttagtttttttcgattttttaagttttattttttttttttcgtatagggatatttatttacgcgttcgttttattaggtacgtattagtcgcgcgtagttgtttgttttgtcggtgttttggcgttcgcgttcgtttagcgttttgcggttcggagttgcgattcgggttttagttcgttgtcgtttttatagtttatcgggatgcggtcgcgtttgagttattgggttggggcgtagttaggcggtggtagttattcgggggcggagggagcggtcgtcgcgtttcgtttttaggttacgagcgcggttttttaggcggtgtttcgtttttcgtgtaaatcgggttatcgtattatttttcggggtacgtgttacggtagtttttttttgttggtagtttggggcgagtttttttattttatttgtgcgttaattattaattaattatcggtgatcgttatataattcgcgtttttttcgttcgttatttttagtttt

SEQ ID NO: 10480 - DNA, 529 bp, Artificial Sequence
  chemically treated genomic DNA (Homo sapiens) CpG-island No: 10480
aaaactaaaaataacgaacgaaaaaaacgcgaattatataacgatcaccgataattaattaataattaacgcacaaataaaataaaaaaactcgccccaaactaccaacaaaaaaaaactaccgtaacacgtaccccgaaaaataatacgataacccgatttacacgaaaaacgaaacaccgcctaaaaaaccgcgctcgtaacctaaaaacgaaacgcgacgaccgctccctccgcccccgaataactaccaccgcctaactacgccccaacccaataactcaaacgcgaccgcatcccgataaactataaaaacgacaacgaactaaaacccgaatcgcaactccgaaccgcaaaacgctaaacgaacgcgaacgccaaaacaccgacaaaacaaacaactacgcgcgactaatacgtacctaataaaacgaacgcgtaaataaatatccctatacgaaaaaaaaaaaataaaacttaaaaaatcgaaaaaaactaacccaaaaaaaatataataaatacaactttc

SEQ ID NO: 10481 - DNA, 561 bp, Artificial Sequence
  chemically treated genomic DNA (Homo sapiens) CpG-island No: 10481
agtatgtatttcggtaggtacggttacggttataatggtatgattttagcgtcggcgttcggtttcggtattttggtttcggagagcgcgtcgtagtacgttgagcgttagcggttcgcgagtttaggtatagttagtcggttacgtttacgtattttttttagttcgattcgttgtttttttcgtcgtggttttttcgttcggtagcgatagtattacggcgggaaaaattttttaagtaattttagcgcgttttcgacgcggtagtatttatattagtagtagagagggggttggtacggcgttcggagtcgaggaggacgtttttgttagtagcgagtaggcgagtgtagaggatcgagttcgcgtcgtcgtttaattttagatttatttttggatgcgtaattgtatataagttatggtaaagttagtttttttttaaatttacgcgacgcggggacgcggttttcggtttttttttttttttttgtcgtttttttttagttttttttggttttattttttttagttttgcgagtttttttgtcgtttttttttttt

SEQ ID NO: 10482 - DNA, 561 bp, Artificial Sequence
  chemically treated genomic DNA (Homo sapiens) CpG-island No: 10482
aaaaaaaaaaaacgacaaaaaaactcgcaaaactaaaaaaaataaaaccaaaaaaaactaaaaaaaaacgacaaaaaaaaaaaaaaaaaccgaaaaccgcgtccccgcgtcgcgtaaatttaaaaaaaaactaactttaccataacttatatacaattacgcatccaaaaataaatctaaaattaaacgacgacgcgaactcgatcctctacactcgcctactcgctactaacaaaaacgtcctcctcgactccgaacgccgtaccaaccccctctctactactaatataaatactaccgcgtcgaaaacgcgctaaaattacttaaaaaatttttcccgccgtaatactatcgctaccgaacgaaaaaaccacgacgaaaaaaacaacgaatcgaactaaaaaaaatacgtaaacgtaaccgactaactatacctaaactcgcgaaccgctaacgctcaacgtactacgacgcgctctccgaaaccaaaataccgaaaccgaacgccgacgctaaaatcataccattataaccgtaaccgtacctaccgaaatacatact

SEQ ID NO: 10483 - DNA, 561 bp, Artificial Sequence
  chemically treated genomic DNA (Homo sapiens) CpG-island No: 10483
ggggagggagaacggtaaggagattcgtagggttgggagaaatgagattaagagagattgggagagggcggtagagaagagaggggggatcgagagtcgcgttttcgcgtcgcgtggatttagaaaaaggttggttttattatgatttatgtgtagttgcgtatttaggggtagatttggggttgggcggcggcgcgggttcggttttttgtattcgtttgttcgttgttggtaggggcgtttttttcggtttcggacgtcgtgttaattttttttttgttgttgatgtgggtgttgtcgcgtcggaggcgcgttggagttgtttagggagtttttttcgtcgtggtgttgtcgttgtcgggcgagggggttacggcggagagggtagcggatcgggttgaggagagtgcgtggacgtggtcggttggttgtatttgggttcgcgggtcgttggcgtttagcgtattgcggcgcgtttttcggagttaaagtgtcggagtcgagcgtcgacgttgagattatgttattgtagtcgtagtcgtatttgtcggagtgtatgtt

SEQ ID NO: 10484 - DNA, 561 bp, Artificial Sequence
  chemically treated genomic DNA (Homo sapiens) CpG-island No: 10484
aacatacactccgacaaatacgactacgactacaataacataatctcaacgtcgacgctcgactccgacactttaactccgaaaaacgcgccgcaatacgctaaacgccaacgacccgcgaacccaaatacaaccaaccgaccacgtccacgcactctcctcaacccgatccgctaccctctccgccgtaaccccctcgcccgacaacgacaacaccacgacgaaaaaaactccctaaacaactccaacgcgcctccgacgcgacaacacccacatcaacaacaaaaaaaaaattaacacgacgtccgaaaccgaaaaaaacgcccctaccaacaacgaacaaacgaatacaaaaaaccgaacccgcgccgccgcccaaccccaaatctacccctaaatacgcaactacacataaatcataataaaaccaacctttttctaaatccacgcgacgcgaaaacgcgactctcgatcccccctctcttctctaccgccctctcccaatctctcttaatctcatttctcccaaccctacgaatctccttaccgttctccctcccc

SEQ ID NO: 10485 - DNA, 579 bp, Artificial Sequence
  chemically treated genomic DNA (Homo sapiens) CpG-island No: 10485
tcgcggtcgtcgtcggttcgttcgatcgttatcgagaagttgttttttgtcgtcgtagtcgtcgggtgggggaagtttcgttttcggtttcggtagtcgcgtcgttgtagtcgttgttgacgcgtcgtcgttttttttatgtttttgttgagttcgtcggttattaggttcgtcgttgtcgtagagaaatatgacggtgggttcgatttagcgggggtggaggagtacggaggttgttatagttcgagtcgtatggagaagattttagtggcgttgttttaaaaagtttttaagaagtgaagagcgcgcggcggtcgggtagagcggggggcggatcgcggcggggtcgcgttaggcgtcgtttattggttcggttttttcgtttcgtttacggttatgtaaagcgggcggtttcgattttagttttgtacggtgtattcgtcgttttcgtcgcggttcggtcgttttcgcgtatcgcgcgttcgcgattatttattcggggggagcggaggaacgtgcgggtggggtagggaaggaagggcggttttattttcgttttttttttttttttttatttta

SEQ ID NO: 10486 - DNA, 579 bp, Artificial Sequence
  chemically treated genomic DNA (Homo sapiens) CpG-island No: 10486
taaaataaaaaaaaaaaaaaaaaacgaaaataaaaccgcccttccttccctaccccacccgcacgttcctccgctccccccgaataaataatcgcgaacgcgcgatacgcgaaaacgaccgaaccgcgacgaaaacgacgaatacaccgtacaaaactaaaatcgaaaccgcccgctttacataaccgtaaacgaaacgaaaaaaccgaaccaataaacgacgcctaacgcgaccccgccgcgatccgccccccgctctacccgaccgccgcgcgctcttcacttcttaaaaactttttaaaacaacgccactaaaatcttctccatacgactcgaactataacaacctccgtactcctccacccccgctaaatcgaacccaccgtcatatttctctacgacaacgacgaacctaataaccgacgaactcaacaaaaacataaaaaaaacgacgacgcgtcaacaacgactacaacgacgcgactaccgaaaccgaaaacgaaacttcccccacccgacgactacgacgacaaaaaacaacttctcgataacgatcgaacgaaccgacgacgaccgcga

SEQ ID NO: 10487 - DNA, 579 bp, Artificial Sequence
  chemically treated genomic DNA (Homo sapiens) CpG-island No: 10487
tgggataaaggaagggaaggggggcggagatggggtcgtttttttttttttgttttattcgtacgttttttcgtttttttcgggtgaatggtcgcgggcgcgcggtgcgcggggacggtcgggtcgcggcggggacgacgggtgtatcgtgtagagttggagtcggagtcgttcgttttgtatagtcgtgggcggagcgggggggtcgggttaatgggcggcgtttggcgcgatttcgtcgcgattcgtttttcgttttgttcggtcgtcgcgcgttttttattttttgggggttttttaaaatagcgttattggggttttttttatgcggttcgggttatgatagttttcgtgtttttttattttcgttggatcgagtttatcgttatgtttttttacgataacggcgggtttggtggtcgacgagtttaataagaatatggaaggggcggcggcgcgttagtagcggttgtagcggcgcggttgtcggggtcgggggcggggttttttttattcggcggttgcggcggtagggggtaatttttcggtggcggtcgagcgggtcggcggcggtcgcgg

SEQ ID NO: 10488 - DNA, 579 bp, Artificial Sequence
  chemically treated genomic DNA (Homo sapiens) CpG-island No: 10488
ccgcgaccgccgccgacccgctcgaccgccaccgaaaaattaccccctaccgccgcaaccgccgaataaaaaaaaccccgcccccgaccccgacaaccgcgccgctacaaccgctactaacgcgccgccgccccttccatattcttattaaactcgtcgaccaccaaacccgccgttatcgtaaaaaaacataacgataaactcgatccaacgaaaataaaaaaacacgaaaactatcataacccgaaccgcataaaaaaaaccccaataacgctattttaaaaaacccccaaaaaataaaaaacgcgcgacgaccgaacaaaacgaaaaacgaatcgcgacgaaatcgcgccaaacgccgcccattaacccgacccccccgctccgcccacgactatacaaaacgaacgactccgactccaactctacacgatacacccgtcgtccccgccgcgacccgaccgtccccgcgcaccgcgcgcccgcgaccattcacccgaaaaaaacgaaaaaacgtacgaataaaacaaaaaaaaaaaaacgaccccatctccgccccccttcccttcctttatccca

SEQ ID NO: 10489 - DNA, 596 bp, Artificial Sequence
  chemically treated genomic DNA (Homo sapiens) CpG-island No: 10489
gtacggcgtgtataaaaggtttggtgttgtcggtcggggacgagtttgggtcggggtcggagttatttttagagagcgcgttggtttaggtagggtttgtatcgtcgttttcgttttcgtcgtcgtcgtcgtcgttgtgtttattgttttttagggtagaaagcgagggcgttgtgtttatgatttattcgcgcgtatgggagtagcgggggggagggtttcgggaggcgcggggcgggttcggggttgcgcgttcgtttcgggagtaggagtagcgggaggaggaggagttggcgcggcggttacgggcgtttagcgcgttttttcggcgtttggagttagacgcgagtaattttgggtggttcgtagcggagtcgtggtcgggttagaggagtcggttggattgcgggagtgtcgggcggttcgcggtgttcgtttcgggttgtttttttgcgttgcgttttcgcggtttcgcgtcggcgttgcgttttgcgatgcgagtcgttgcgtgtttagtcggggttttggcgaggaaatttattttaaaagtagttgtattaagggggagattaaagtttttgtcgttttttaattaa

SEQ ID NO: 10490 - DNA, 596 bp, Artificial Sequence
  chemically treated genomic DNA (Homo sapiens) CpG-island No: 10490
ttaattaaaaaacgacaaaaactttaatctcccccttaatacaactacttttaaaataaatttcctcgccaaaaccccgactaaacacgcaacgactcgcatcgcaaaacgcaacgccgacgcgaaaccgcgaaaacgcaacgcaaaaaaacaacccgaaacgaacaccgcgaaccgcccgacactcccgcaatccaaccgactcctctaacccgaccacgactccgctacgaaccacccaaaattactcgcgtctaactccaaacgccgaaaaaacgcgctaaacgcccgtaaccgccgcgccaactcctcctcctcccgctactcctactcccgaaacgaacgcgcaaccccgaacccgccccgcgcctcccgaaaccctcccccccgctactcccatacgcgcgaataaatcataaacacaacgccctcgctttctaccctaaaaaacaataaacacaacgacgacgacgacgacgaaaacgaaaacgacgatacaaaccctacctaaaccaacgcgctctctaaaaataactccgaccccgacccaaactcgtccccgaccgacaacaccaaaccttttatacacgccgtac

SEQ ID NO: 10491 - DNA, 596 bp, Artificial Sequence
  chemically treated genomic DNA (Homo sapiens) CpG-island No: 10491
ttgattggaaggcggtaaaggttttaattttttttttggtgtagttgtttttgaagtgagttttttcgttagagtttcggttggatacgtagcggttcgtatcgtagagcgtagcgtcggcgcggggtcgcgagaacgtagcgtaggggagtagttcgaggcggatatcgcgagtcgttcggtattttcgtagtttagtcggtttttttagttcggttacggtttcgttgcgggttatttaggattattcgcgtttggttttaggcgtcgagaaggcgcgttgggcgttcgtggtcgtcgcgttagtttttttttttttcgttgtttttgttttcggggcgagcgcgtagtttcgagttcgtttcgcgtttttcggagttttttttttcgttgtttttatgcgcgcgggtgggttatgagtatagcgttttcgttttttgttttaagaagtagtaagtatagcggcggcggcggcggcggaggcggaggcggcggtgtagattttgtttggattagcgcgttttttggaaatagtttcggtttcggtttaggttcgttttcggtcggtagtattaagttttttgtgtacgtcgtgt

SEQ ID NO: 10492 - DNA, 596 bp, Artificial Sequence
  chemically treated genomic DNA (Homo sapiens) CpG-island No: 10492
acacgacgtacacaaaaaacttaatactaccgaccgaaaacgaacctaaaccgaaaccgaaactatttccaaaaaacgcgctaatccaaacaaaatctacaccgccgcctccgcctccgccgccgccgccgccgctatacttactacttcttaaaacaaaaaacgaaaacgctatactcataacccacccgcgcgcataaaaacaacgaaaaaaaaaactccgaaaaacgcgaaacgaactcgaaactacgcgctcgccccgaaaacaaaaacaacgaaaaaaaaaaaaactaacgcgacgaccacgaacgcccaacgcgccttctcgacgcctaaaaccaaacgcgaataatcctaaataacccgcaacgaaaccgtaaccgaactaaaaaaaccgactaaactacgaaaataccgaacgactcgcgatatccgcctcgaactactcccctacgctacgttctcgcgaccccgcgccgacgctacgctctacgatacgaaccgctacgtatccaaccgaaactctaacgaaaaaactcacttcaaaaacaactacaccaaaaaaaaaattaaaacctttaccgccttccaatcaa

SEQ ID NO: 10493 - DNA, 998 bp, Artificial Sequence
  chemically treated genomic DNA (Homo sapiens) CpG-island No: 10493
ttggcggcggtcgcggtcgggtttttgggttgtagtaagtcggtcggttttagttttttggtcggagcgttttcgtcgttcgtgatgatagttagtttgtgtcgggatttttattgttttagttattattgcgttagttatttggtaggggcggcggtcgttagcgttttttgcgtatatgattcggttgttgcggttgcggcgttgaagttcggatattcgttggtgtattttacgtattcgttgtacggtgtgtatttttcgttaacggtcgtcgcggttgttggcgttatatcgttttttttggtcggttattttttttatttttacggttttatgttttttaacgatttatttttttatatttgtaattgggtgtcggttaacgggtcgtgcgataagcgtttcgttacgttcgaagagttgttgagttatttgcggatttatacggtatttttcgggatagataaattgttgtcgggttattttagttcgtcgtttttggttagcgttgtcgcggtcgttatggtttgttatatgtatatttttatttcgggcgtatcgggtagttttgggacgttggcgttgcgtagtttttattacgcgttgggatttagtagtcgttattatttttattttaagagttcgttttttacgtttggcgttttcgtgtcggtgttcgtcgttatcggatcgtattattttttttacgttttttacggatagagattgattatcgtttcggcgttggggtattagtgagggcggtcgggagggcgagcgagggagaggagggagagggggaggggaggagtttagggagaggcgggattacggtttaggttgttgatattcgcgcgtggggaggattcgggttacgaaaggaaagaaatgtatatcgtatttatttattcgatagtagcgatcgagattcggtgggatattttttttttttttatttttatttttttatttaaattttataaaagttgaaaaaa

SEQ ID NO: 10494 - DNA, 998 bp, Artificial Sequence
  chemically treated genomic DNA (Homo sapiens) CpG-island No: 10494
ttttttcaacttttataaaatttaaataaaaaaataaaaataaaaaaaaaaaaaatatcccaccgaatctcgatcgctactatcgaataaataaatacgatatacatttctttcctttcgtaacccgaatcctccccacgcgcgaatatcaacaacctaaaccgtaatcccgcctctccctaaactcctcccctccccctctccctcctctccctcgctcgccctcccgaccgccctcactaataccccaacgccgaaacgataatcaatctctatccgtaaaaaacgtaaaaaaaataatacgatccgataacgacgaacaccgacacgaaaacgccaaacgtaaaaaacgaactcttaaaataaaaataataacgactactaaatcccaacgcgtaataaaaactacgcaacgccaacgtcccaaaactacccgatacgcccgaaataaaaatatacatataacaaaccataacgaccgcgacaacgctaaccaaaaacgacgaactaaaataacccgacaacaatttatctatcccgaaaaataccgtataaatccgcaaataactcaacaactcttcgaacgtaacgaaacgcttatcgcacgacccgttaaccgacacccaattacaaatataaaaaaataaatcgttaaaaaacataaaaccgtaaaaataaaaaaaataaccgaccaaaaaaaacgatataacgccaacaaccgcgacgaccgttaacgaaaaatacacaccgtacaacgaatacgtaaaatacaccaacgaatatccgaacttcaacgccgcaaccgcaacaaccgaatcatatacgcaaaaaacgctaacgaccgccgcccctaccaaataactaacgcaataataactaaaacaataaaaatcccgacacaaactaactatcatcacgaacgacgaaaacgctccgaccaaaaaactaaaaccgaccgacttactacaacccaaaaacccgaccgcgaccgccgccaa

SEQ ID NO: 10495 - DNA, 998 bp, Artificial Sequence
  chemically treated genomic DNA (Homo sapiens) CpG-island No: 10495
tttttttaatttttataaagtttgggtggggaggtgaaagtggggagaaggggagtgttttatcgggtttcggtcgttgttgtcgggtagatagatacggtatatattttttttttttcgtggttcgagttttttttacgcgcgggtgttagtagtttgggtcgtgatttcgtttttttttggatttttttttttttttttttttttttttttttcgttcgttttttcggtcgtttttattgatattttagcgtcgaggcggtggttagtttttgttcgtagagggcgtagggggagtagtacggttcggtggcggcgggtatcggtacgggggcgttaggcgtgggaagcgggtttttggagtaggggtggtagcggttgttgagttttagcgcgtggtgggggttgcgtagcgttagcgttttagggttgttcggtgcgttcgaggtggggatgtgtatgtggtaagttatggcggtcgcggtagcgttggttagagacgacgagttggggtagttcgatagtagtttgtttgtttcgggaaatgtcgtatgggttcgtaagtggtttagtagtttttcggacgtggcgaagcgtttgtcgtacggttcgttggtcgatatttagttgtagatgtgggggagtgggtcgttagggagtataaagtcgtaggggtagagggggtggtcggttagggagggcggtgtggcgttagtagtcgcggcggtcgttagcgaggagtgtatatcgtgtagcgggtgcgtggggtatattagcgggtattcggattttagcgtcgtagtcgtagtagtcggattatgtgcgtaagaagcgttggcggtcgtcgtttttgttaggtggttagcgtagtggtagttgaggtagtaagggtttcggtataaattggttgttattacggacggcggagacgtttcggttaaagggttggagtcggtcggtttattgtagtttagagattcggtcgcggtcgtcgttag

SEQ ID NO: 10496 - DNA, 998 bp, Artificial Sequence
  chemically treated genomic DNA (Homo sapiens) CpG-island No: 10496
ctaacgacgaccgcgaccgaatctctaaactacaataaaccgaccgactccaaccctttaaccgaaacgtctccgccgtccgtaataacaaccaatttataccgaaacccttactacctcaactaccactacgctaaccacctaacaaaaacgacgaccgccaacgcttcttacgcacataatccgactactacgactacgacgctaaaatccgaatacccgctaatataccccacgcacccgctacacgatatacactcctcgctaacgaccgccgcgactactaacgccacaccgccctccctaaccgaccaccccctctacccctacgactttatactccctaacgacccactcccccacatctacaactaaatatcgaccaacgaaccgtacgacaaacgcttcgccacgtccgaaaaactactaaaccacttacgaacccatacgacatttcccgaaacaaacaaactactatcgaactaccccaactcgtcgtctctaaccaacgctaccgcgaccgccataacttaccacatacacatccccacctcgaacgcaccgaacaaccctaaaacgctaacgctacgcaacccccaccacgcgctaaaactcaacaaccgctaccacccctactccaaaaacccgcttcccacgcctaacgcccccgtaccgatacccgccgccaccgaaccgtactactccccctacgccctctacgaacaaaaactaaccaccgcctcgacgctaaaatatcaataaaaacgaccgaaaaaacgaacgaaaaaaaaaaaaaaaaaaaaaaaaaaaaaaatccaaaaaaaaacgaaatcacgacccaaactactaacacccgcgcgtaaaaaaaactcgaaccacgaaaaaaaaaaaatatataccgtatctatctacccgacaacaacgaccgaaacccgataaaacactccccttctccccactttcacctccccacccaaactttataaaaattaaaaaaa

SEQ ID NO: 10497 - DNA, 528 bp, Artificial Sequence
  chemically treated genomic DNA (Homo sapiens) CpG-island No: 10497
gatgtagtcgtttgagattcgtttttgtagtagtttgttaggaggtgcggatgttgtcggcgtttggatcgcgcgttgagtagtgtaggtgaatagttcgtttaacgtataagttacgtttatattttttttatacgttttttcgtttattttttattgtaatttttttcgtcgcgtggataggtttagtattttcggagtcgatgttattattcgttatcgacgcgaatttcggtaaagagacgggttttatcggttttcgaatgtttttaggttttaagcgcgtagtttcgtattcgggtgtagtcggcgcggttttacgtgtttttatcgcgagtcgtttttcgcgtttttgttgtcgtcgcgcgtttaattttgtttgttcgttcgtttcgtttcgttcggtcgtttttgcgtagttttgggtcggtttcgcgtttttgtgtttaaataagtttcgtttttgtgttgtttattgtaattttaaagggaaatagggttcgttgatttcgggagggagagaaggat

SEQ ID NO: 10498 - DNA, 528 bp, Artificial Sequence
  chemically treated genomic DNA (Homo sapiens) CpG-island No: 10498
atccttctctccctcccgaaatcaacgaaccctatttccctttaaaattacaataaacaacacaaaaacgaaacttatttaaacacaaaaacgcgaaaccgacccaaaactacgcaaaaacgaccgaacgaaacgaaacgaacgaacaaacaaaattaaacgcgcgacgacaacaaaaacgcgaaaaacgactcgcgataaaaacacgtaaaaccgcgccgactacacccgaatacgaaactacgcgcttaaaacctaaaaacattcgaaaaccgataaaacccgtctctttaccgaaattcgcgtcgataacgaataataacatcgactccgaaaatactaaacctatccacgcgacgaaaaaaattacaataaaaaataaacgaaaaaacgtataaaaaaaatataaacgtaacttatacgttaaacgaactattcacctacactactcaacgcgcgatccaaacgccgacaacatccgcacctcctaacaaactactacaaaaacgaatctcaaacgactacatc

SEQ ID NO: 10499 - DNA, 528 bp, Artificial Sequence
  chemically treated genomic DNA (Homo sapiens) CpG-island No: 10499
gtttttttttttttttcgggattagcgggttttgtttttttttaaagttgtagtgggtaatataagggcgaggtttgtttaaatatagaagcgcgaggtcgatttagggttgcgtaggaacggtcgggcggggcggggcgggcgggtaggtagagttaagcgcgcggcggtagtagggacgcggggagcggttcgcggtagggatacgtgggatcgcgtcggttgtattcgggtgcggggttgcgcgtttagggtttgagaatattcggagatcggtaagattcgtttttttgtcgaggttcgcgtcgatggcgaataatgatatcgatttcgagagtgttgaatttgtttacgcggcggaaggagttgtaatgagaagtgaacgagaaagcgtgtagaaagggtgtgggcgtggtttgtgcgttaggcgagttgtttatttgtattgtttaacgcgcggtttaggcgtcggtagtattcgtattttttggtaggttgttgtaaaggcgggttttaggcggttgtatt

SEQ ID NO: 10500 - DNA, 528 bp, Artificial Sequence
  chemically treated genomic DNA (Homo sapiens) CpG-island No: 10500
aatacaaccgcctaaaacccgcctttacaacaacctaccaaaaaatacgaatactaccgacgcctaaaccgcgcgttaaacaatacaaataaacaactcgcctaacgcacaaaccacgcccacaccctttctacacgctttctcgttcacttctcattacaactccttccgccgcgtaaacaaattcaacactctcgaaatcgatatcattattcgccatcgacgcgaacctcgacaaaaaaacgaatcttaccgatctccgaatattctcaaaccctaaacgcgcaaccccgcacccgaatacaaccgacgcgatcccacgtatccctaccgcgaaccgctccccgcgtccctactaccgccgcgcgcttaactctacctacccgcccgccccgccccgcccgaccgttcctacgcaaccctaaatcgacctcgcgcttctatatttaaacaaacctcgcccttatattacccactacaactttaaaaaaaaacaaaacccgctaatcccgaaaaaaaaaaaaaaac

SEQ ID NO: 10501 - DNA, 564 bp, Artificial Sequence
  chemically treated genomic DNA (Homo sapiens) CpG-island No: 10501
gtcgatttatttatttttcgttaagggataatgggtttacggcggtattagtgtttcggttttttttcgacggtgtcgattacggtcgcgtcgtgggtgcgttcgttcggtcgttttcgtttagtacggcgtagggtgatagggggtgcgggtttcgatttagcgaaagataatagatcggtaagggatttcgatacgagcgttaagttaacggcgcgggcgtatattatatcgttttatgttattcgtgttcgcggcgatcgaaattttttcggtttaaaagtcgttcggggaagttaatcgagcggtcgttcggtcgggtagagggtggcgttatgtcgttttaggtgttttatcggtgtgttcggcgagcggtatcgtcggattcgaggcgttcgcgggttcgttacggtcgtatttttatttcggcggggttgtggatagcgtcgtcgtattacgggtttaggcgaatcggcgttttcgggggtaatagtggagtttgtatcggatttcgttagacgggttttttttttaaaagtgttttttttttaggtatgaattatt

SEQ ID NO: 10502 - DNA, 564 bp, Artificial Sequence
  chemically treated genomic DNA (Homo sapiens) CpG-island No: 10502
aataattcatacctaaaaaaaaaacacttttaaaaaaaaaacccgtctaacgaaatccgatacaaactccactattacccccgaaaacgccgattcgcctaaacccgtaatacgacgacgctatccacaaccccgccgaaataaaaatacgaccgtaacgaacccgcgaacgcctcgaatccgacgataccgctcgccgaacacaccgataaaacacctaaaacgacataacgccaccctctacccgaccgaacgaccgctcgattaacttccccgaacgacttttaaaccgaaaaaatttcgatcgccgcgaacacgaataacataaaacgatataatatacgcccgcgccgttaacttaacgctcgtatcgaaatcccttaccgatctattatctttcgctaaatcgaaacccgcaccccctatcaccctacgccgtactaaacgaaaacgaccgaacgaacgcacccacgacgcgaccgtaatcgacaccgtcgaaaaaaaaccgaaacactaataccgccgtaaacccattatcccttaacgaaaaataaataaatcgac

SEQ ID NO: 10503 - DNA, 564 bp, Artificial Sequence
  chemically treated genomic DNA (Homo sapiens) CpG-island No: 10503
ggtggtttatgtttggagggggggtatttttggaggaggagttcgtttggcgaggttcggtgtagattttattgttgttttcgggggcgtcgattcgtttgagttcgtagtgcggcggcgttgtttataatttcgtcggggtgaaggtgcggtcgtggcgagttcgcgggcgtttcgggttcggcgatatcgttcgtcggatatatcgatggagtatttggaacggtatggcgttattttttgttcggtcgaacggtcgttcggttagttttttcgggcggtttttgagtcgagagagtttcggtcgtcgcggatacgggtggtatggggcgatataatgtacgttcgcgtcgttagtttagcgttcgtgtcggggttttttgtcggtttgttgtttttcgttgaatcggagttcgtattttttattattttgcgtcgtattaaacggggacggtcggacggacgtatttacgacgcggtcgtggtcggtatcgtcggggagggatcggggtattaatgtcgtcgtgggtttattgttttttggcggggggtgagtgggtcgat

SEQ ID NO: 10504 - DNA, 564 bp, Artificial Sequence
  chemically treated genomic DNA (Homo sapiens) CpG-island No: 10504
atcgacccactcaccccccgccaaaaaacaataaacccacgacgacattaataccccgatccctccccgacgataccgaccacgaccgcgtcgtaaatacgtccgtccgaccgtccccgtttaatacgacgcaaaataataaaaaatacgaactccgattcaacgaaaaacaacaaaccgacaaaaaaccccgacacgaacgctaaactaacgacgcgaacgtacattatatcgccccataccacccgtatccgcgacgaccgaaactctctcgactcaaaaaccgcccgaaaaaactaaccgaacgaccgttcgaccgaacaaaaaataacgccataccgttccaaatactccatcgatatatccgacgaacgatatcgccgaacccgaaacgcccgcgaactcgccacgaccgcaccttcaccccgacgaaattataaacaacgccgccgcactacgaactcaaacgaatcgacgcccccgaaaacaacaataaaatctacaccgaacctcgccaaacgaactcctcctccaaaaataccccccctccaaacataaaccacc

SEQ ID NO: 10505 - DNA, 551 bp, Artificial Sequence
  chemically treated genomic DNA (Homo sapiens) CpG-island No: 10505
gttttttcgttttattgagcgtttattataagcgggttttgggttaggcgcgttattcgtgtaagttttcggggagcggcggtgtatttttcgtttcgcgcgttcgtagttattgtagggtgggcgttcgttaggtagggtgtcgatacgtttttttcgcgttgcgacgggcggtcgggggaggagagggtgcgttgtgcgtatcggagggagaggtttcggtttagcgtcgtttgttcgttagtagattagtaggtttttttttgcggcgggtgttttacgcgtttttcgggcgcgcgtttttagtttcgttcgcgtgcggcggtcgtacggtcgcgagagcgcgttttcgtttggcgggtacggtcgcgagcgcgcgtgcgttttttcgaacgttttcgggagtttagttagagcgagcgtcggggtcgggcgcgtaggagtgaaaaggaggcggcggtcgtagttgcgagtaatagattcggacgtcgcgagttgattcgttttgttgttgggcgatttttttttaattgtagaaaaatttattaaat

SEQ ID NO: 10506 - DNA, 551 bp, Artificial Sequence
  chemically treated genomic DNA (Homo sapiens) CpG-island No: 10506
atttaataaatttttctacaattaaaaaaaaatcgcccaacaacaaaacgaatcaactcgcgacgtccgaatctattactcgcaactacgaccgccgcctccttttcactcctacgcgcccgaccccgacgctcgctctaactaaactcccgaaaacgttcgaaaaaacgcacgcgcgctcgcgaccgtacccgccaaacgaaaacgcgctctcgcgaccgtacgaccgccgcacgcgaacgaaactaaaaacgcgcgcccgaaaaacgcgtaaaacacccgccgcaaaaaaaaacctactaatctactaacgaacaaacgacgctaaaccgaaacctctccctccgatacgcacaacgcaccctctcctcccccgaccgcccgtcgcaacgcgaaaaaaacgtatcgacaccctacctaacgaacgcccaccctacaataactacgaacgcgcgaaacgaaaaatacaccgccgctccccgaaaacttacacgaataacgcgcctaacccaaaacccgcttataataaacgctcaataaaacgaaaaaac

SEQ ID NO: 10507 - DNA, 551 bp, Artificial Sequence
  chemically treated genomic DNA (Homo sapiens) CpG-island No: 10507
atttaataaatttttttgtaattaaaaaaaaatcgtttaatagtagagcgggttagttcgcggcgttcggatttgttgttcgtagttgcggtcgtcgttttttttttatttttgcgcgttcggtttcggcgttcgttttggttgggttttcggggacgttcggaggggcgtacgcgcgttcgcggtcgtgttcgttaagcggaggcgcgttttcgcggtcgtgcggtcgtcgtacgcgggcggggttgggagcgcgcgttcgagaggcgcgtggggtattcgtcgtaaagaggagtttgttggtttgttggcgggtaggcggcgttgggtcggagttttttttttcggtgcgtatagcgtatttttttttttttcggtcgttcgtcgtagcgcggagagggcgtgtcggtattttgtttggcgagcgtttattttataatggttgcgagcgcgcgggacggagggtgtatcgtcgtttttcggggatttgtacgggtggcgcgtttagtttagagttcgtttgtagtgagcgtttagtagggcgggaaagt

SEQ ID NO: 10508 - DNA, 551 bp, Artificial Sequence
  chemically treated genomic DNA (Homo sapiens) CpG-island No: 10508
actttcccgccctactaaacgctcactacaaacgaactctaaactaaacgcgccacccgtacaaatccccgaaaaacgacgatacaccctccgtcccgcgcgctcgcaaccattataaaataaacgctcgccaaacaaaataccgacacgccctctccgcgctacgacgaacgaccgaaaaaaaaaaaaatacgctatacgcaccgaaaaaaaaaactccgacccaacgccgcctacccgccaacaaaccaacaaactcctctttacgacgaataccccacgcgcctctcgaacgcgcgctcccaaccccgcccgcgtacgacgaccgcacgaccgcgaaaacgcgcctccgcttaacgaacacgaccgcgaacgcgcgtacgcccctccgaacgtccccgaaaacccaaccaaaacgaacgccgaaaccgaacgcgcaaaaataaaaaaaaaacgacgaccgcaactacgaacaacaaatccgaacgccgcgaactaacccgctctactattaaacgatttttttttaattacaaaaaaatttattaaat

SEQ ID NO: 10509 - DNA, 634 bp, Artificial Sequence
  chemically treated genomic DNA (Homo sapiens) CpG-island No: 10509
cgaattttacggcggaggtatgagtcgtcgggaacgcgtatagtgtagcgcggtttgttcgcgttgtattgataaatttcgacgttacgacgtacgtcgtagtagtggtcgtaaataacgcgtcgttttattgtcggcgtgtcggtggtgttatcggaaagtcggaaataggttattgtattagtaggtgatggcgtggtagtaaaatttttagtcggatggttaatcgtattttgtaagttatgtttatcgttgtcggtgagtagttgtattacgcgaatggaggaatgtattgtgacgaaagtagttgtaggaatattatttttcggcgtatatatatgcggtattgttagttgtcgtttcgggtaatttaggtataggttgggggcgtataatttcggtatggttatatggcgttttagttttatttatcgcgcgatttggtttcgaattaattgtttagttattcgtgcggtaaacgttttagttttttagttagtcgcgatgataattggttaatattataaattttagcgaacgtttatttaggttgtattagcgcgggttttattaggttttaatgtttttgatcggtgtgaatttatacgtttagggttattttttttgtttttat

SEQ ID NO: 10510 - DNA, 634 bp, Artificial Sequence
  chemically treated genomic DNA (Homo sapiens) CpG-island No: 10510
ataaaaacaaaaaaaataaccctaaacgtataaattcacaccgatcaaaaacattaaaacctaataaaacccgcgctaatacaacctaaataaacgttcgctaaaatttataatattaaccaattatcatcgcgactaactaaaaaactaaaacgtttaccgcacgaataactaaacaattaattcgaaaccaaatcgcgcgataaataaaactaaaacgccatataaccataccgaaattatacgcccccaacctatacctaaattacccgaaacgacaactaacaataccgcatatatatacgccgaaaaataatattcctacaactactttcgtcacaatacattcctccattcgcgtaatacaactactcaccgacaacgataaacataacttacaaaatacgattaaccatccgactaaaaattttactaccacgccatcacctactaatacaataacctatttccgactttccgataacaccaccgacacgccgacaataaaacgacgcgttatttacgaccactactacgacgtacgtcgtaacgtcgaaatttatcaatacaacgcgaacaaaccgcgctacactatacgcgttcccgacgactcatacctccgccgtaaaattcg

SEQ ID NO: 10511 - DNA, 634 bp, Artificial Sequence
  chemically treated genomic DNA (Homo sapiens) CpG-island No: 10511
gtgaggataggagggataattttaggcgtgtagatttatatcgattaggggtattgagatttggtggaattcgcgttggtgtaatttgggtaaacgttcgttggaatttgtagtattaattagttattatcgcggttggttgagaaattggggcgtttatcgtacgggtggttgagtagttagttcgaggttaagtcgcgcggtaggtgaagttgaaacgttatatggttatgtcgggattatgcgtttttagtttgtgtttgaattgttcggagcgatagttaatagtgtcgtatgtatatacgtcgggggatgatatttttgtaattattttcgttatagtatatttttttattcgcgtggtgtagttgtttatcgatagcggtgagtatgatttgtaggatgcgattaattattcggttgaggattttattgttacgttattatttgttgatgtagtggtttattttcggtttttcggtggtattatcggtacgtcggtaataaaacggcgcgttgtttacggttattattgcggcgtgcgtcgtagcgtcgagatttgttagtataacgcgagtagatcgcgttatattgtgcgcgttttcggcggtttatgttttcgtcgtggggttcg

SEQ ID NO: 10512 - DNA, 634 bp, Artificial Sequence
  chemically treated genomic DNA (Homo sapiens) CpG-island No: 10512
cgaaccccacgacgaaaacataaaccgccgaaaacgcgcacaatataacgcgatctactcgcgttatactaacaaatctcgacgctacgacgcacgccgcaataataaccgtaaacaacgcgccgttttattaccgacgtaccgataataccaccgaaaaaccgaaaataaaccactacatcaacaaataataacgtaacaataaaatcctcaaccgaataattaatcgcatcctacaaatcatactcaccgctatcgataaacaactacaccacgcgaataaaaaaatatactataacgaaaataattacaaaaatatcatcccccgacgtatatacatacgacactattaactatcgctccgaacaattcaaacacaaactaaaaacgcataatcccgacataaccatataacgtttcaacttcacctaccgcgcgacttaacctcgaactaactactcaaccacccgtacgataaacgccccaatttctcaaccaaccgcgataataactaattaatactacaaattccaacgaacgtttacccaaattacaccaacgcgaattccaccaaatctcaatacccctaatcgatataaatctacacgcctaaaattatccctcctatcctcac

SEQ ID NO: 10513 - DNA, 627 bp, Artificial Sequence
  chemically treated genomic DNA (Homo sapiens) CpG-island No: 10513
  unsure (57, 91, 164, 237)
cgttttttaatttagtttcgtttttaattacgttggttttgtttttcgggaagttanggtgcgtcgttggatattttagtcggcggggttnttattagatttcggttttcgtttcgttcgtttcgttttcgggttgtttttagcgtcgtttgattgtatttgtnggattcgttgtcgtattttaggttaagcgtcgcgtttaaagtcgtgcggagattggaggtcgcgcgggttttntggtttgggttatgtttggttgtgatgttcgggagggagattgttgttttcggagatgcggcgcgtaggtaggggcggggttatcggtgttcggtatttttaggaggagaggtttaggcgggattcggcggttggagttgggcgtagggtagcgggtcgggcgtttagttgcggggcggggtttcgggtttggtcgttcgttatttcggcgtatcgcgattttggcgttcggaagtaaggttgcgaggttttaggagattagtggtttcgggcggggcgtttcgatggcgggagttgggcgttaaacgttggaaagaagtaaataattgagagaggagagcgtttaggtgattttatcgggtatttattaggaaagtaggttagagaagg

SEQ ID NO: 10514 - DNA, 627 bp, Artificial Sequence
  chemically treated genomic DNA (Homo sapiens) CpG-island No: 10514
  unsure (391, 464, 537, 571)
ccttctctaacctactttcctaataaatacccgataaaatcacctaaacgctctcctctctcaattatttacttctttccaacgtttaacgcccaactcccgccatcgaaacgccccgcccgaaaccactaatctcctaaaacctcgcaaccttacttccgaacgccaaaatcgcgatacgccgaaataacgaacgaccaaacccgaaaccccgccccgcaactaaacgcccgacccgctaccctacgcccaactccaaccgccgaatcccgcctaaacctctcctcctaaaaataccgaacaccgataaccccgcccctacctacgcgccgcatctccgaaaacaacaatctccctcccgaacatcacaaccaaacataacccaaaccanaaaacccgcgcgacctccaatctccgcacgactttaaacgcgacgcttaacctaaaatacgacaacgaatccnacaaatacaatcaaacgacgctaaaaacaacccgaaaacgaaacgaacgaaacgaaaaccgaaatctaataanaaccccgccgactaaaatatccaacgacgcaccntaacttcccgaaaaacaaaaccaacgtaattaaaaacgaaactaaattaaaaaacg

SEQ ID NO: 10515 - DNA, 627 bp, Artificial Sequence
  chemically treated genomic DNA (Homo sapiens) CpG-island No: 10515
  unsure (391, 464, 537, 571)
ttttttttggtttgtttttttgataaatattcggtgaggttatttaaacgttttttttttttagttatttgtttttttttaacgtttggcgtttagttttcgttatcggagcgtttcgttcgagattattgattttttggggtttcgtagttttgttttcgaacgttaaggtcgcggtgcgtcggggtagcgaacggttaggttcgaaatttcgtttcgtagttaaacgttcggttcgttattttgcgtttagttttagtcgtcgggtttcgtttgggtttttttttttgggaatatcgggtatcggtggtttcgtttttatttgcgcgtcgtattttcgggaataatagtttttttttcgagtattatagttagatatggtttagattangggattcgcgcggtttttaattttcgtacggttttgggcgcggcgtttagtttgggatacggtagcgagtttngtaaatgtaattaggcggcgttgagggtagttcgggggcggggcgaacggggcgggggtcggggtttggtaanggtttcgtcggttgagatatttagcggcgtattntgatttttcgggaggtaaggttaacgtggttggaggcggggttgggttggggggcg

SEQ ID NO: 10516 - DNA, 627 bp, Artificial Sequence
  chemically treated genomic DNA (Homo sapiens) CpG-island No: 10516
  unsure (57, 91, 164, 237)
cgccccccaacccaaccccgcctccaaccacgttaaccttacctcccgaaaaatcanaatacgccgctaaatatctcaaccgacgaaaccnttaccaaaccccgacccccgccccgttcgccccgcccccgaactaccctcaacgccgcctaattacatttacnaaactcgctaccgtatcccaaactaaacgccgcgcccaaaaccgtacgaaaattaaaaaccgcgcgaatcccntaatctaaaccatatctaactataatactcgaaaaaaaaactattattcccgaaaatacgacgcgcaaataaaaacgaaaccaccgatacccgatattcccaaaaaaaaaaacccaaacgaaacccgacgactaaaactaaacgcaaaataacgaaccgaacgtttaactacgaaacgaaatttcgaacctaaccgttcgctaccccgacgcaccgcgaccttaacgttcgaaaacaaaactacgaaaccccaaaaaatcaataatctcgaacgaaacgctccgataacgaaaactaaacgccaaacgttaaaaaaaaacaaataactaaaaaaaaaaaacgtttaaataacctcaccgaatatttatcaaaaaaacaaaccaaaaaaaa

SEQ ID NO: 10517 - DNA, 628 bp, Artificial Sequence
  chemically treated genomic DNA (Homo sapiens) CpG-island No: 10517
  unsure (22, 70, 79, 163, 556)
gggattagggaggatttcgttnattcgggagttgggaggtcgcgcgcgtttttgcggagcgtgacggttnacggtcgtnttagtaacgaacggggatgcgcggggcgtttgggtgggtaaggggtgtttgtcgtcgtcgtcgcgcgttttcgggttttcgggnatcgcgggaaaatttcgcggtttttcggcgttggggcgtcggcgttaggttcggtagatagagtaatgcgtttcgcgggttgagggtagaggatgcggtcgcggtttagcgttcggtcgggggagtcgcggggtggtacgcggggaaagttggcgcgcgtttgatcgcgtttggaagtcgcgcggtgttagggtcgagttgttttttaagtttttgcggcgatttgttattttttggggatttggcggtttgaatttcgcggggttttcggtttagggattttgagcgttaggagagagaagttcgcgtttttttcggggatttgcgtttgagttggtgtttggcgggttcgttttgaatggtagcgattcgagttgttttttgttttttttntttttttagatagtgagtttgtggaagtttcgttcgtattttatagtttagacgagttaggtaagtttgttt

SEQ ID NO: 10518 - DNA, 628 bp, Artificial Sequence
  chemically treated genomic DNA (Homo sapiens) CpG-island No: 10518
  unsure (73, 466, 550, 559, 607)
aaacaaacttacctaactcgtctaaactataaaatacgaacgaaacttccacaaactcactatctaaaaaaanaaaaaaaacaaaaaacaactcgaatcgctaccattcaaaacgaacccgccaaacaccaactcaaacgcaaatccccgaaaaaaacgcgaacttctctctcctaacgctcaaaatccctaaaccgaaaaccccgcgaaattcaaaccgccaaatccccaaaaaataacaaatcgccgcaaaaacttaaaaaacaactcgaccctaacaccgcgcgacttccaaacgcgatcaaacgcgcgccaactttccccgcgtaccaccccgcgactcccccgaccgaacgctaaaccgcgaccgcatcctctaccctcaacccgcgaaacgcattactctatctaccgaacctaacgccgacgccccaacgccgaaaaaccgcgaaattttcccgcgatncccgaaaacccgaaaacgcgcgacgacgacgacaaacaccccttacccacccaaacgccccgcgcatccccgttcgttactaanacgaccgtnaaccgtcacgctccgcaaaaacgcgcgcgacctcccaactcccgaatnaacgaaatcctccctaatccc

SEQ ID NO: 10519 - DNA, 628 bp, Artificial Sequence
  chemically treated genomic DNA (Homo sapiens) CpG-island No: 10519
  unsure (73, 466, 550, 559, 607)
gagtagatttatttaattcgtttgggttgtaggatgcgggcgaggtttttataaatttattgtttgggggagnaagaaaagtagaaaataattcgaatcgttattatttaggacgaattcgttaagtattagtttaagcgtaggttttcgggaaaagcgcgggttttttttttttagcgtttagaatttttgagtcggaggtttcgcgggatttagatcgttagatttttagggagtgataaatcgtcgtagaaatttgggggataattcggttttggtatcgcgcggtttttaggcgcggttaggcgcgcgttaatttttttcgcgtgttatttcgcggttttttcggtcgggcgttgggtcgcggtcgtattttttgtttttagttcgcggggcgtattgttttgtttgtcgggtttggcgtcgacgttttagcgtcgaggagtcgcgaagttttttcgcggtnttcgggggttcgagggcgcgcggcggcggcggtaagtattttttgtttatttaggcgtttcgcgtattttcgttcgttgttagngcgatcgtnggtcgttacgtttcgtagaggcgcgcgcggttttttaattttcgggtnggcggaattttttttagtttt

SEQ ID NO: 10520 - DNA, 628 bp, Artificial Sequence
  chemically treated genomic DNA (Homo sapiens) CpG-island No: 10520
  unsure (22, 70, 79, 163, 556)
aaaactaaaaaaaattccgccnacccgaaaattaaaaaaccgcgcgcgcctctacgaaacgtaacgaccnacgatcgcnctaacaacgaacgaaaatacgcgaaacgcctaaataaacaaaaaatacttaccgccgccgccgcgcgccctcgaacccccgaanaccgcgaaaaaacttcgcgactcctcgacgctaaaacgtcgacgccaaacccgacaaacaaaacaatacgccccgcgaactaaaaacaaaaaatacgaccgcgacccaacgcccgaccgaaaaaaccgcgaaataacacgcgaaaaaaattaacgcgcgcctaaccgcgcctaaaaaccgcgcgataccaaaaccgaattatcccccaaatttctacgacgatttatcactccctaaaaatctaacgatctaaatcccgcgaaacctccgactcaaaaattctaaacgctaaaaaaaaaaaacccgcgcttttcccgaaaacctacgcttaaactaatacttaacgaattcgtcctaaataataacgattcgaattattttctacttttcttnctcccccaaacaataaatttataaaaacctcgcccgcatcctacaacccaaacgaattaaataaatctactc

SEQ ID NO: 10521 - DNA, 920 bp, Artificial Sequence
  chemically treated genomic DNA (Homo sapiens) CpG-island No: 10521
gcgttttcggtttcgtattcggcgtttttcgtagttttcgttttcggggcggtgtcgggaaaacgcggcgttttcgtcggttacgtaggggtcgtttcggcgggcggcgttgtcgttttttaatcgcgtttttttagcgtcggggacgcggcgttcgcgttttcgttcgagttcggggaaacggagataaggaggcgtcgtcgtttttttttcgcggttgcgttttagttttgcgttcgtagtatgttcgtcgtcgggtcgagcgtcgtttttttttaggagttcgaggaggcgacgtcgttgtcggtcgcgggatcgcggttgcgagggtagcggggtcggagtcgggtatttcgaggcgtcgcgcggcgggcggagagggaggaggagtaggtatttttcgcggcgcgcgggcggcggttttgttgttcggcgcgtttatggttcggtcgtagggagaatgtaagttgttttttacgcgttcggcgtttttcggagtcgttcgcgtcgtcgtcgttttttagtcgttagcgttcggtcgttggttgcgttaggattcgcggtcgtcggtcgtcgagcgcgggagggtaggtaggggtaggagtcggagggttcggggcgcggcgcggtatgtagttgcgggttttcgcgttcgcgtgaggttgtcggttcggggtttcgttatggttgggatggatagtggtaatttgaagatcgcgaggttgtggcgggacgtcgttttgcgtgttaggaagttgcggagtaatttgcgttagtttacgtttatcgtcgtcggggtttgtttcggggtcggggtcgacgcgttcgagtttttcgtttttttttagttcgtgttgtcggttaatttcggggatattgaggtattgaatttggggaataacggtttggaggaggtattt

SEQ ID NO: 10522 - DNA, 920 bp, Artificial Sequence
  chemically treated genomic DNA (Homo sapiens) CpG-island No: 10522
aaatacctcctccaaaccgttattccccaaattcaatacctcaatatccccgaaattaaccgacaacacgaactaaaaaaaaacgaaaaactcgaacgcgtcgaccccgaccccgaaacaaaccccgacgacgataaacgtaaactaacgcaaattactccgcaacttcctaacacgcaaaacgacgtcccgccacaacctcgcgatcttcaaattaccactatccatcccaaccataacgaaaccccgaaccgacaacctcacgcgaacgcgaaaacccgcaactacataccgcgccgcgccccgaaccctccgactcctacccctacctaccctcccgcgctcgacgaccgacgaccgcgaatcctaacgcaaccaacgaccgaacgctaacgactaaaaaacgacgacgacgcgaacgactccgaaaaacgccgaacgcgtaaaaaacaacttacattctccctacgaccgaaccataaacgcgccgaacaacaaaaccgccgcccgcgcgccgcgaaaaatacctactcctcctccctctccgcccgccgcgcgacgcctcgaaatacccgactccgaccccgctaccctcgcaaccgcgatcccgcgaccgacaacgacgtcgcctcctcgaactcctaaaaaaaaacgacgctcgacccgacgacgaacatactacgaacgcaaaactaaaacgcaaccgcgaaaaaaaaacgacgacgcctccttatctccgtttccccgaactcgaacgaaaacgcgaacgccgcgtccccgacgctaaaaaaacgcgattaaaaaacgacaacgccgcccgccgaaacgacccctacgtaaccgacgaaaacgccgcgttttcccgacaccgccccgaaaacgaaaactacgaaaaacgccgaatacgaaaccgaaaacgc

SEQ ID NO: 10523 - DNA, 920 bp, Artificial Sequence
  chemically treated genomic DNA (Homo sapiens) CpG-island No: 10523
gggtattttttttaggtcgttgttttttaggtttagtgttttaatgttttcgaggttggtcggtagtacgagttggggggaggcgggggattcgagcgcgtcggtttcggtttcggggtaggtttcggcggcggtaagcgtgagttggcgtaggttgtttcgtagttttttggtacgtagggcggcgtttcgttatagtttcgcggtttttaggttgttattgtttattttagttatggcggggtttcgggtcgatagttttacgcggacgcgggagttcgtagttatatgtcgcgtcgcgtttcgggtttttcggtttttgtttttgtttgttttttcgcgttcggcggtcggcggtcgcgggttttagcgtagttagcggtcgagcgttggcggttagggggcggcggcgacgcgagcggtttcgggggacgtcgagcgcgtggagagtagtttgtattttttttgcggtcgggttatgggcgcgtcgggtagtagggtcgtcgttcgcgcgtcgcggaggatgtttgtttttttttttttttcgttcgtcgcgcggcgtttcggggtgttcggtttcggtttcgttattttcgtagtcgcggtttcgcggtcggtagcggcgtcgttttttcgagtttttgggggagggcggcgttcggttcggcggcgggtatgttgcgggcgtagggttggggcgtagtcgcggggagggggcggcggcgtttttttgttttcgttttttcgggttcgggcgggagcgcgggcgtcgcgttttcggcgttgggagggcgcgattgggaagcggtagcgtcgttcgtcggagcggtttttacgtgatcggcggaggcgtcgcgttttttcggtatcgtttcgggggcgggagttgcggagggcgtcgggtgcggggtcgggggcgt

SEQ ID NO: 10524 - DNA, 920 bp, Artificial Sequence
  chemically treated genomic DNA (Homo sapiens) CpG-island No: 10524
acgcccccgaccccgcacccgacgccctccgcaactcccgcccccgaaacgataccgaaaaaacgcgacgcctccgccgatcacgtaaaaaccgctccgacgaacgacgctaccgcttcccaatcgcgccctcccaacgccgaaaacgcgacgcccgcgctcccgcccgaacccgaaaaaacgaaaacaaaaaaacgccgccgccccctccccgcgactacgccccaaccctacgcccgcaacatacccgccgccgaaccgaacgccgccctcccccaaaaactcgaaaaaacgacgccgctaccgaccgcgaaaccgcgactacgaaaataacgaaaccgaaaccgaacaccccgaaacgccgcgcgacgaacgaaaaaaaaaaaaaaacaaacatcctccgcgacgcgcgaacgacgaccctactacccgacgcgcccataacccgaccgcaaaaaaaatacaaactactctccacgcgctcgacgtcccccgaaaccgctcgcgtcgccgccgccccctaaccgccaacgctcgaccgctaactacgctaaaacccgcgaccgccgaccgccgaacgcgaaaaaacaaacaaaaacaaaaaccgaaaaacccgaaacgcgacgcgacatataactacgaactcccgcgtccgcgtaaaactatcgacccgaaaccccgccataactaaaataaacaataacaacctaaaaaccgcgaaactataacgaaacgccgccctacgtaccaaaaaactacgaaacaacctacgccaactcacgcttaccgccgccgaaacctaccccgaaaccgaaaccgacgcgctcgaatcccccgcctccccccaactcgtactaccgaccaacctcgaaaacattaaaacactaaacctaaaaaacaacgacctaaaaaaaataccc

SEQ ID NO: 10525 - DNA, 542 bp, Artificial Sequence
  chemically treated genomic DNA (Homo sapiens) CpG-island No: 10525
gtcgcgaagtcgtagtacgttcgggtgtggagttcgtttttttttttaggggtttataggaggggtcgttcgcgcgtttcgtttcgcgttcgtgatgggcgcggaaatggtatcggggttcgttatattatatttgtttttcgcgttttcggggtttttttatttggttcgcgtagtgtcggggttgtttttcgttaagggtttttcgcgtaagttcgatgagttatacgtttattttcgggtatttattttcggcgtatggcgaatgggaagcgtcgttattgttgcgttatattcggtcgggatttgcgtcgcgttattagtttttagcggcgttagttgcgttttttgcgggggttaaatttgtaggtttcgttttttgcggtaggtttcgtttttattaattattatcggttacgttcgaatatggttcggttagtttcgttttcggagtttttcggttatattttcgaaggagttgtcggtggggtgtagttttagggttttaattaagtaaataagcgggggaggaaaggcgggaa

SEQ ID NO: 10526 - DNA, 542 bp, Artificial Sequence
  chemically treated genomic DNA (Homo sapiens) CpG-island No: 10526
ttcccgcctttcctcccccgcttatttacttaattaaaaccctaaaactacaccccaccgacaactccttcgaaaatataaccgaaaaactccgaaaacgaaactaaccgaaccatattcgaacgtaaccgataataattaataaaaacgaaacctaccgcaaaaaacgaaacctacaaatttaacccccgcaaaaaacgcaactaacgccgctaaaaactaataacgcgacgcaaatcccgaccgaatataacgcaacaataacgacgcttcccattcgccatacgccgaaaataaatacccgaaaataaacgtataactcatcgaacttacgcgaaaaacccttaacgaaaaacaaccccgacactacgcgaaccaaataaaaaaaccccgaaaacgcgaaaaacaaatataatataacgaaccccgataccatttccgcgcccatcacgaacgcgaaacgaaacgcgcgaacgacccctcctataaacccctaaaaaaaaaaacgaactccacacccgaacgtactacgacttcgcgac

SEQ ID NO: 10527 - DNA, 542 bp, Artificial Sequence
  chemically treated genomic DNA (Homo sapiens) CpG-island No: 10527
ttttcgttttttttttttcgtttatttatttaattaaggttttggggttgtattttatcggtagttttttcgggggtgtggtcgaagagtttcgagggcggggttgatcgagttatattcgggcgtggtcggtggtgattggtgagggcggggtttgtcgtagggggcggggtttgtaggtttggttttcgtagggagcgtagttggcgtcgttgggagttggtggcgcggcgtaggtttcggtcgagtgtggcgtagtagtggcggcgttttttattcgttatgcgtcgggggtgggtgttcgaaggtaagcgtgtggtttatcgagtttgcgcgaggaatttttggcggagaatagtttcggtattgcgcgggttaggtggagggatttcgggggcgcgggaggtaggtgtggtgtgacgggtttcggtgttattttcgcgtttattacgagcgcggggcggggcgcgcgggcggttttttttgtgaatttttgagaggagaggcgggttttatattcgggcgtgttgcgatttcgcggt

SEQ ID NO: 10528 - DNA, 542 bp, Artificial Sequence
  chemically treated genomic DNA (Homo sapiens) CpG-island No: 10528
accgcgaaatcgcaacacgcccgaatataaaacccgcctctcctctcaaaaattcacaaaaaaaaccgcccgcgcgccccgccccgcgctcgtaataaacgcgaaaataacaccgaaacccgtcacaccacacctacctcccgcgcccccgaaatccctccacctaacccgcgcaataccgaaactattctccgccaaaaattcctcgcgcaaactcgataaaccacacgcttaccttcgaacacccacccccgacgcataacgaataaaaaacgccgccactactacgccacactcgaccgaaacctacgccgcgccaccaactcccaacgacgccaactacgctccctacgaaaaccaaacctacaaaccccgccccctacgacaaaccccgccctcaccaatcaccaccgaccacgcccgaatataactcgatcaaccccgccctcgaaactcttcgaccacacccccgaaaaaactaccgataaaatacaaccccaaaaccttaattaaataaataaacgaaaaaaaaaaaacgaaaa

SEQ ID NO: 10529 - DNA, 1034 bp, Artificial Sequence
  chemically treated genomic DNA (Homo sapiens) CpG-island No: 10529
ggcgcggtgttattagaggttcgttacgttttacgtcgttttgtaggcgaacgttggaggtttcgtcgggtcgtcgtagcgttgcggttcgggtcgtttttttcgcgtcgtttttcgtttttagtttttcggcgtcgcggtagttttgggtagggagcgtcgtcgtcgtcgtcgtcgtcgtcgttttttcgtttgtagtcgttcggtcgttgcgtgacgcgtcgtttttttttaatatggcggtcggggtaggtcggcggtgatgggggttagttcgcggtcgcggcgggtgttaatttttatagtagttagggtagtttttttttcgcggtgtttttgagagtcgtcgttatttcgttttttagttttcggtagatagtcgttcgggtcgggtttttttatcgttattagggtcggagggacgagtgagaggggcggtcgggacgcgattttcgggtcgggagaagcggaggttcgacgggcgcggttttcgaggtacggttttttgggggcggcgaggatttcgacgtttttcgtcgatatcgcggttggtttcgttcgttcgtttttttttgattttgtcgttgttttttacgtttttaattttttatttttattttttttttttttttttttttttttttttttttttttttttttttttttagtcgttgggagtcgcgggtcggacgagtcgtcgtttttttttttgcgtttatgtatgaggggaagaagacgaagaatatgtttttgattcgggttttggagaagatattggtcgataaggaagtgaagaaggcgtattatttttagttgcgtaaagtttgcgaggtggcgttaggtgagcggggaggaggttcgggggatggggtgtttgttgtggggcggggaggggggcgtttgtgggggggtggggtcgttcggggtttgttcgaggttcgcgtttttgatttcgggaagttttcgcggagttttttgttttttgtttggagttgataggaattcggttggatgtggggtagaggcggggtaga

SEQ ID NO: 10530 - DNA, 1034 bp, Artificial Sequence
  chemically treated genomic DNA (Homo sapiens) CpG-island No: 10530
tctaccccgcctctaccccacatccaaccgaattcctatcaactccaaacaaaaaacaaaaaactccgcgaaaacttcccgaaatcaaaaacgcgaacctcgaacaaaccccgaacgaccccacccccccacaaacgcccccctccccgccccacaacaaacaccccatcccccgaacctcctccccgctcacctaacgccacctcgcaaactttacgcaactaaaaataatacgccttcttcacttccttatcgaccaatatcttctccaaaacccgaatcaaaaacatattcttcgtcttcttcccctcatacataaacgcaaaaaaaaaaacgacgactcgtccgacccgcgactcccaacgactaaaaaaaaaaaaaaaaaaaaaaaaaaaaaaaaaaaaaaaaaaaaaaaaaataaaaataaaaaattaaaaacgtaaaaaacaacgacaaaatcaaaaaaaaacgaacgaacgaaaccaaccgcgatatcgacgaaaaacgtcgaaatcctcgccgcccccaaaaaaccgtacctcgaaaaccgcgcccgtcgaacctccgcttctcccgacccgaaaatcgcgtcccgaccgcccctctcactcgtccctccgaccctaataacgataaaaaaacccgacccgaacgactatctaccgaaaactaaaaaacgaaataacgacgactctcaaaaacaccgcgaaaaaaaaactaccctaactactataaaaattaacacccgccgcgaccgcgaactaacccccatcaccgccgacctaccccgaccgccatattaaaaaaaaacgacgcgtcacgcaacgaccgaacgactacaaacgaaaaaacgacgacgacgacgacgacgacgacgctccctacccaaaactaccgcgacgccgaaaaactaaaaacgaaaaacgacgcgaaaaaaacgacccgaaccgcaacgctacgacgacccgacgaaacctccaacgttcgcctacaaaacgacgtaaaacgtaacgaacctctaataacaccgcgcc

SEQ ID NO: 10531 - DNA, 1034 bp, Artificial Sequence
  chemically treated genomic DNA (Homo sapiens) CpG-island No: 10531
tttatttcgtttttgttttatatttagtcgagtttttgttaattttagatagggaatagagggtttcgcgagggtttttcgaggttagaggcgcgggtttcgggtaagtttcgggcgattttatttttttataggcgttttttttttcgttttataataagtattttatttttcgggtttttttttcgtttatttaacgttatttcgtaagttttgcgtagttgggagtgatgcgttttttttatttttttgtcggttaatattttttttagagttcgggttaggaatatgtttttcgtttttttttttttatatatggacgtagagaaggaggcggcggttcgttcgattcgcggtttttagcggttggaggggaggaggaggagaggaaggaagagaagagagaaaggagagggggtggaggtgggggattggaggcgtggagggtagcggtaggattaggaaggggcgggcgagcgggattagtcgcggtgtcggcgaagggcgtcgaggttttcgtcgtttttaagaagtcgtatttcgagggtcgcgttcgtcgggttttcgtttttttcggttcgggggtcgcgtttcggtcgttttttttattcgttttttcggttttggtggcggtgagggagttcggttcgggcggttgtttgtcgggaattgagggacgaggtggcggcggtttttagaggtatcgcgagagaagggttattttggttattgtggggattagtattcgtcgcggtcgcgaattggtttttattatcgtcgatttgtttcggtcgttatgttgggaggaaacgacgcgttacgtagcggtcgaacggttgtagacgaggaagcggcggcggcggcggcggcggcggcgttttttgtttagagttgtcgcggcgtcgggaggttgggggcggagggcggcgcgggaggagcggttcgagtcgtagcgttacggcggttcggcggggtttttagcgttcgtttgtagggcggcgtggggcgtggcgggtttttggtggtatcgcgtt

SEQ ID NO: 10532 - DNA, 1034 bp, Artificial Sequence
  chemically treated genomic DNA (Homo sapiens) CpG-island No: 10532
aacgcgataccaccaaaaacccgccacgccccacgccgccctacaaacgaacgctaaaaaccccgccgaaccgccgtaacgctacgactcgaaccgctcctcccgcgccgccctccgcccccaacctcccgacgccgcgacaactctaaacaaaaaacgccgccgccgccgccgccgccgccgcttcctcgtctacaaccgttcgaccgctacgtaacgcgtcgtttcctcccaacataacgaccgaaacaaatcgacgataataaaaaccaattcgcgaccgcgacgaatactaatccccacaataaccaaaataacccttctctcgcgatacctctaaaaaccgccgccacctcgtccctcaattcccgacaaacaaccgcccgaaccgaactccctcaccgccaccaaaaccgaaaaaacgaataaaaaaaacgaccgaaacgcgacccccgaaccgaaaaaaacgaaaacccgacgaacgcgaccctcgaaatacgacttcttaaaaacgacgaaaacctcgacgcccttcgccgacaccgcgactaatcccgctcgcccgccccttcctaatcctaccgctaccctccacgcctccaatcccccacctccaccccctctcctttctctcttctcttccttcctctcctcctcctcccctccaaccgctaaaaaccgcgaatcgaacgaaccgccgcctccttctctacgtccatatataaaaaaaaaaaaacgaaaaacatattcctaacccgaactctaaaaaaaatattaaccgacaaaaaaataaaaaaaacgcatcactcccaactacgcaaaacttacgaaataacgttaaataaacgaaaaaaaaacccgaaaaataaaatacttattataaaacgaaaaaaaaaacgcctataaaaaaataaaatcgcccgaaacttacccgaaacccgcgcctctaacctcgaaaaaccctcgcgaaaccctctattccctatctaaaattaacaaaaactcgactaaatataaaacaaaaacgaaataaa

SEQ ID NO: 10533 - DNA, 678 bp, Artificial Sequence
  chemically treated genomic DNA (Homo sapiens) CpG-island No: 10533
tacgtcgtgcgggtacgttttttgcgttagttgtttgttgttttgggcggtgcggaggcgtcggtgttcgttgtagtgttagtttttggcgttcggcgagttgtatcgggtgttgtcgttgcgtagttttatttagaagttgcgagtttagtgcgattatcgcgttcgcggttgcggttattcggttaggttgtacgagttggaggcgtacgtcgagtattgcgatttcggttttgttcgtcggtttcgtagtcgcgggggttgcgtttcggggttgggcggtggtgaggtgttcgcgcgggggggttgcggttcgatatttagggttggtcggggcgggggcgcgcgcggggggtcgtcgggcggtcgttggggtcgcgggcggggattcgggtttcgggttttcgtttggaggcggcgcgagaaggcgttgttggcgtagttttgggcgttgtagggcgaggtgtagtttacggcgcgtaggtattaggagaagtttatttaatatatggtttacgttcgtaatttcgtcggcgatttcggtggcggttatcgtagggtaagtaaaggggggtgggtatcgcgggtatggtcgattggggtgggaaaaggagcggttttttttgacgttttaggatttttttggaattgggtatttttttttattatgtagtagga

SEQ ID NO: 10534 - DNA, 678 bp, Artificial Sequence
  chemically treated genomic DNA (Homo sapiens) CpG-island No: 10534
tcctactacataataaaaaaaaatacccaattccaaaaaaatcctaaaacgtcaaaaaaaaccgctccttttcccaccccaatcgaccatacccgcgatacccacccccctttacttaccctacgataaccgccaccgaaatcgccgacgaaattacgaacgtaaaccatatattaaataaacttctcctaatacctacgcgccgtaaactacacctcgccctacaacgcccaaaactacgccaacaacgccttctcgcgccgcctccaaacgaaaacccgaaacccgaatccccgcccgcgaccccaacgaccgcccgacgaccccccgcgcgcgcccccgccccgaccaaccctaaatatcgaaccgcaacccccccgcgcgaacacctcaccaccgcccaaccccgaaacgcaacccccgcgactacgaaaccgacgaacaaaaccgaaatcgcaatactcgacgtacgcctccaactcgtacaacctaaccgaataaccgcaaccgcgaacgcgataatcgcactaaactcgcaacttctaaataaaactacgcaacgacaacacccgatacaactcgccgaacgccaaaaactaacactacaacgaacaccgacgcctccgcaccgcccaaaacaacaaacaactaacgcaaaaaacgtacccgcacgacgta

SEQ ID NO: 10535 - DNA, 678 bp, Artificial Sequence
  chemically treated genomic DNA (Homo sapiens) CpG-island No: 10535
ttttgttgtatagtgaggaaggatgtttaattttaaaggaattttgaagcgttagaaagaatcgtttttttttttattttaatcgattatgttcgcggtgtttatttttttttgtttattttgcggtggtcgttatcgaggtcgtcgacgaagttgcggacgtgagttatgtattgggtgaattttttttggtatttgcgcgtcgtgagttgtatttcgttttgtagcgtttagagttgcgttagtagcgttttttcgcgtcgtttttaggcgaggattcgaggttcgggttttcgttcgcggttttagcggtcgttcggcggtttttcgcgcgcgttttcgtttcggttagttttgggtgtcggatcgtagttttttcgcgcgggtattttattatcgtttagtttcgaagcgtagttttcgcggttgcggagtcggcgggtagggtcgaagtcgtagtgttcgacgtgcgtttttagttcgtgtagtttgatcgagtggtcgtagtcgcgggcgcggtagtcgtattggattcgtagtttttggatgaggttgcgtagcggtagtattcggtatagttcgtcgggcgttaagggttggtattgtagcgggtatcggcgttttcgtatcgtttagggtaataggtagttggcgtagaagacgtgttcgtacggcgtg

SEQ ID NO: 10536 - DNA, 678 bp, Artificial Sequence
  chemically treated genomic DNA (Homo sapiens) CpG-island No: 10536
cacgccgtacgaacacgtcttctacgccaactacctattaccctaaacgatacgaaaacgccgatacccgctacaataccaacccttaacgcccgacgaactataccgaatactaccgctacgcaacctcatccaaaaactacgaatccaatacgactaccgcgcccgcgactacgaccactcgatcaaactacacgaactaaaaacgcacgtcgaacactacgacttcgaccctacccgccgactccgcaaccgcgaaaactacgcttcgaaactaaacgataataaaatacccgcgcgaaaaaactacgatccgacacccaaaactaaccgaaacgaaaacgcgcgcgaaaaaccgccgaacgaccgctaaaaccgcgaacgaaaacccgaacctcgaatcctcgcctaaaaacgacgcgaaaaaacgctactaacgcaactctaaacgctacaaaacgaaatacaactcacgacgcgcaaataccaaaaaaaattcacccaatacataactcacgtccgcaacttcgtcgacgacctcgataacgaccaccgcaaaataaacaaaaaaaaataaacaccgcgaacataatcgattaaaataaaaaaaaaaacgattctttctaacgcttcaaaattcctttaaaattaaacatccttcctcactatacaacaaaa

SEQ ID NO: 10537 - DNA, 547 bp, Artificial Sequence
  chemically treated genomic DNA (Homo sapiens) CpG-island No: 10537
tcggcgtttgttgcgacgggagtttcgagcgtttggtggatttttgtttggaatttaattttttttacgattcggtaaatttgtttcggttggcgtttcggttgcgtttgcggtttttcgcgttgttttcgcggtcggagtagtttcgttttattttcgtcgtatttttttattttttttttatgagaagttcgtttttttcggtcgggaaatagtttagcgtcgagcgttttcgttggtttttcgtcgcgggtttttttttagtttgcgcgcggttttcggttggcgttgtttttgttttcgtcggtttttgttagagtttcgcgtttcgttatcgtcgtcgttattaggttgcgtttgcgttcgcgattggtttaattgtgggttggggttgcgagcgttatttgcgttcgagttagtttttttttgcgtttttaaattgttttttattcggtagtcgtcgttttttttggagagtgtagggtttacgtttgaggttgttgatgcgtcgtagggtagcgtttttagcggttattttattttgttt

SEQ ID NO: 10538 - DNA, 547 bp, Artificial Sequence
  chemically treated genomic DNA (Homo sapiens) CpG-island No: 10538
aaacaaaataaaataaccgctaaaaacgctaccctacgacgcatcaacaacctcaaacgtaaaccctacactctccaaaaaaaacgacgactaccgaataaaaaacaatttaaaaacgcaaaaaaaaactaactcgaacgcaaataacgctcgcaaccccaacccacaattaaaccaatcgcgaacgcaaacgcaacctaataacgacgacgataacgaaacgcgaaactctaacaaaaaccgacgaaaacaaaaacaacgccaaccgaaaaccgcgcgcaaactaaaaaaaaacccgcgacgaaaaaccaacgaaaacgctcgacgctaaactatttcccgaccgaaaaaaacgaacttctcataaaaaaaaaataaaaaaatacgacgaaaataaaacgaaactactccgaccgcgaaaacaacgcgaaaaaccgcaaacgcaaccgaaacgccaaccgaaacaaatttaccgaatcgtaaaaaaaattaaattccaaacaaaaatccaccaaacgctcgaaactcccgtcgcaacaaacgccga

SEQ ID NO: 10539 - DNA, 547 bp, Artificial Sequence
  chemically treated genomic DNA (Homo sapiens) CpG-island No: 10539
gggtagggtgaggtgatcgttgggagcgttattttgcggcgtattaatagttttaggcgtgggttttgtattttttagagaaggcggcggttgtcgggtggagagtaatttggggacgtaaaagaaagttggttcgggcgtaggtggcgttcgtagttttagtttatagttgagttaatcgcgggcgtaagcgtagtttggtggcggcggcggtaacggagcgcggggttttggtaggagtcggcggaggtaaaggtagcgttaatcgagagtcgcgcgtaggttggagggagattcgcggcgaggagttagcgagagcgttcggcgttgggttgtttttcggtcgagggaggcgaattttttatggggaagaagtggagggatgcggcggaaatggagcggggttgtttcgatcgcgaggataacgcggagagtcgtagacgtagtcggagcgttagtcggggtaggtttgtcgagtcgtggaaaaggttaagttttaagtaggggtttattaaacgttcgggattttcgtcgtagtagacgtcgg

SEQ ID NO: 10540 - DNA, 547 bp, Artificial Sequence
  chemically treated genomic DNA (Homo sapiens) CpG-island No: 10540
ccgacgtctactacgacgaaaatcccgaacgtttaataaacccctacttaaaacttaaccttttccacgactcgacaaacctaccccgactaacgctccgactacgtctacgactctccgcgttatcctcgcgatcgaaacaaccccgctccatttccgccgcatccctccacttcttccccataaaaaattcgcctccctcgaccgaaaaacaacccaacgccgaacgctctcgctaactcctcgccgcgaatctccctccaacctacgcgcgactctcgattaacgctacctttacctccgccgactcctaccaaaaccccgcgctccgttaccgccgccgccaccaaactacgcttacgcccgcgattaactcaactataaactaaaactacgaacgccacctacgcccgaaccaactttcttttacgtccccaaattactctccacccgacaaccgccgccttctctaaaaaatacaaaacccacgcctaaaactattaatacgccgcaaaataacgctcccaacgatcacctcaccctaccc

SEQ ID NO: 10541 - DNA, 1203 bp, Artificial Sequence
  chemically treated genomic DNA (Homo sapiens) CpG-island No: 10541
tttttcgtttttcggcgtcgcggttttttgttatttcgggtttttgtcgtcgcggttttttgttttcgtcgtcgtggtttgttgtcgtcgttgtcgcggttttttgtggttttttattttagtttttattgttttttgtttttatcgcggcggttttttgttggttttcgtttttgtcgtcgcggttttttgttttcgttttagcggttttttttcgtcgcgattttttttattcgtatcgaggtttttgtagttttttgttttttgtcgtcgcggttttttgttttcgtcgtcgcggtttttcgttttcgtcgtcgcggtttttgcggttttttgtttgggtcgtcgcggttttttgtttttatcgtcgcggttttttgttatcgttgttttttattttcgttatcgtggttttttgttttcgttgtcgaggttttttgtcgtcgttgtcgcggttttttgtggtttttttgttttagtttttattgtttttcgttttatttcgtcgcggttttttttttcgtcgtcgcgtatttttgttatcgcggttttttgttttcgtcgtcgttttttgtcgttgtagttttttgttttcgttgtcgaggttttttgtcgtcgttgtttcggttttttgtggttttttgttttagtttttattgtttttcgttttttttttcgcggttttttgcggtttttagttttcgacgtcgcggttttttgcgttcgtcgtcgcggttttttgttgttacggttttttgtttttcgtcgtcgcggttttttgtttttcgtcgtcgcgattttttgttttcgtcgtcgcggttttttgttttcgcggtattttgttttttgtcgtcgcggttttttgttttcgtcgtcgttttttgtcgtcgcggttttttgttttcgtcgtcgcggttttgagggcgggagcggtagatttcgttgttagttttattggcgttttggtaagggtagcgtcgaggggttttttcggttcgggggttttttgtttaggcgttcgagtttcgggttttttgtttcggtcgttgtggtttgtatagggcggtattgcgcgcggaggcgatgggagagaagaaggagggcggtggcgggggtgatgtagcggtcgttgagggtggcgtaggggtttcggttagttcggggttgtagtagtgcggatagttttagaagtttatcggtatt

SEQ ID NO: 10542 - DNA, 1203 bp, Artificial Sequence
  chemically treated genomic DNA (Homo sapiens) CpG-island No: 10542
aataccgataaacttctaaaactatccgcactactacaaccccgaactaaccgaaacccctacgccaccctcaacgaccgctacatcacccccgccaccgccctccttcttctctcccatcgcctccgcgcgcaataccgccctatacaaaccacaacgaccgaaacaaaaaacccgaaactcgaacgcctaaacaaaaaacccccgaaccgaaaaaacccctcgacgctacccttaccaaaacgccaataaaactaacaacgaaatctaccgctcccgccctcaaaaccgcgacgacgaaaacaaaaaaccgcgacgacaaaaaacgacgacgaaaacaaaaaaccgcgacgacaaaaaacaaaataccgcgaaaacaaaaaaccgcgacgacgaaaacaaaaaatcgcgacgacgaaaaacaaaaaaccgcgacgacgaaaaacaaaaaaccgtaacaacaaaaaaccgcgacgacgaacgcaaaaaaccgcgacgtcgaaaactaaaaaccgcaaaaaaccgcgaaaaaaaaaacgaaaaacaataaaaactaaaacaaaaaaccacaaaaaaccgaaacaacgacgacaaaaaacctcgacaacgaaaacaaaaaactacaacgacaaaaaacgacgacgaaaacaaaaaaccgcgataacaaaaatacgcgacgacgaaaaaaaaaaccgcgacgaaataaaacgaaaaacaataaaaactaaaacaaaaaaaccacaaaaaaccgcgacaacgacgacaaaaaacctcgacaacgaaaacaaaaaaccacgataacgaaaataaaaaacaacgataacaaaaaaccgcgacgataaaaacaaaaaaccgcgacgacccaaacaaaaaaccgcaaaaaccgcgacgacgaaaacgaaaaaccgcgacgacgaaaacaaaaaaccgcgacgacaaaaaacaaaaaactacaaaaacctcgatacgaataaaaaaaatcgcgacgaaaaaaaaccgctaaaacgaaaacaaaaaaccgcgacgacaaaaacgaaaaccaacaaaaaaccgccgcgataaaaacaaaaaacaataaaaactaaaataaaaaaccacaaaaaaccgcgacaacgacgacaacaaaccacgacgacgaaaacaaaaaaccgcgacgacaaaaacccgaaataacaaaaaaccgcgacgccgaaaaacgaaaaa

SEQ ID NO: 10543 - DNA, 1203 bp, Artificial Sequence
  chemically treated genomic DNA (Homo sapiens) CpG-island No: 10543
gatgtcgatgagtttttggagttgttcgtattgttgtagtttcgggttggtcggggtttttgcgttatttttagcggtcgttgtattattttcgttatcgttttttttttttttttttatcgttttcgcgcgtagtgtcgttttatgtaggttatagcggtcgaggtagggagttcggggttcgggcgtttaggtaaggaattttcgagtcgggagagtttttcggcgttgtttttgttaggacgttagtagagttggtagcggagtttgtcgttttcgtttttagagtcgcggcggcgggagtagaaagtcgcggcggtaaaaagcggcggcgggggtaaaaagtcgcggcggtagggggtaaaatgtcgcgggagtaaaaagtcgcggcggcgggggtagaaagtcgcggcggcggggggtaaaaagtcgcggcggcggggggtaaaaagtcgtggtagtagaaagtcgcggcggcgggcgtaaaaagtcgcggcgtcgggggttaaaagtcgtaaaaagtcgcggaggggggagcgaaaagtagtgggagttggggtaaaaaattataaaaagtcgaggtagcggcggtagaaaatttcggtagcgggggtaaaaagttgtagcggtaaaaagcggcgacgggggtaaaaagtcgcggtggtaaaaatgcgcggcggcgggggaaaaagtcgcggcggagtggggcgaaaagtagtgggagttggggtaaaaaaattataaaaagtcgcggtagcggcggtagaaaatttcggtagcgggggtaaaaagttacggtggcgggggtaaaaagtagcggtggtaagaagtcgcgacggtgggggtaagaagtcgcggcggtttaggtaaaaggtcgtaaaagtcgcggcgacgggggcgaaaagtcgcggcggcggaggtaaaaagtcgcgacggtagggggtaaaaagttgtaaaagtttcggtgcgggtgaaaaaagtcgcggcgagaaaaagtcgttgaggcgggggtaaaaagtcgcggcggtaggggcgaaaattagtaaaaagtcgtcgcggtgggggtaaaaagtagtgggagttggggtaaaaaattataaaaaatcgcggtagcggcggtagtaagttacggcggcgggggtaaaaagtcgcggcggtaaaaattcggggtggtaaaaagtcgcggcgtcgggggacgaaaag

SEQ ID NO: 10544 - DNA, 1203 bp, Artificial Sequence
  chemically treated genomic DNA (Homo sapiens) CpG-island No: 10544
cttttcgtcccccgacgccgcgactttttaccaccccgaatttttaccgccgcgactttttacccccgccgccgtaacttactaccgccgctaccgcgattttttataattttttaccccaactcccactactttttacccccaccgcgacgactttttactaattttcgcccctaccgccgcgactttttacccccgcctcaacgactttttctcgccgcgacttttttcacccgcaccgaaacttttacaactttttaccccctaccgtcgcgactttttacctccgccgccgcgacttttcgcccccgtcgccgcgacttttacgaccttttacctaaaccgccgcgacttcttacccccaccgtcgcgacttcttaccaccgctactttttacccccgccaccgtaactttttacccccgctaccgaaattttctaccgccgctaccgcgactttttataatttttttaccccaactcccactacttttcgccccactccgccgcgactttttcccccgccgccgcgcatttttaccaccgcgactttttacccccgtcgccgctttttaccgctacaactttttacccccgctaccgaaattttctaccgccgctacctcgactttttataattttttaccccaactcccactacttttcgctcccccctccgcgactttttacgacttttaacccccgacgccgcgactttttacgcccgccgccgcgactttctactaccacgactttttaccccccgccgccgcgactttttaccccccgccgccgcgactttctacccccgccgccgcgactttttactcccgcgacattttaccccctaccgccgcgactttttacccccgccgccgctttttaccgccgcgactttctactcccgccgccgcgactctaaaaacgaaaacgacaaactccgctaccaactctactaacgtcctaacaaaaacaacgccgaaaaactctcccgactcgaaaattccttacctaaacgcccgaaccccgaactccctacctcgaccgctataacctacataaaacgacactacgcgcgaaaacgataaaaaaaaaaaaaaaaaacgataacgaaaataatacaacgaccgctaaaaataacgcaaaaaccccgaccaacccgaaactacaacaatacgaacaactccaaaaactcatcgacatc

SEQ ID NO: 10545 - DNA, 611 bp, Artificial Sequence
  chemically treated genomic DNA (Homo sapiens) CpG-island No: 10545
tggttcgtgcgtagatggatagttgaggttggttgaacgttcggcgatttcgcgaggttgcgggtgcgggtttcgcggcggtcggcgcgttgcgttgatattggttgtgcgggtcgcggggtaggtgggtcgcggtaggaggttggcgttttgattgtagatttttcgttttagcgttaggtagtcgtcgtagtcgtagtatattcgagcgttcggtcgttttttgtgtttgcggtagtcggtatgtatcgtagcgggacggggttttatcgcggagtcgcgggtttttagcgttgtttgtaggggcggggcggagcgcggtttagagttttgacgttattttcggggttgcgcggggttggggtcgcggcgttgcgatttatttgtagtgggggaaggaacgcgggggagggcgttgtttcgtttatgcgtatagggtttggttcgggattcggttgcgttttacgttgcggttattgtttcgatttcggttttaggcggattttgtcgggatcggtcgagcgttaggcgtaggatacggttttttaaggtcgtagttttggtgttagcggggtgagaggtttttttgtttagtttttaggtaaggttga

SEQ ID NO: 10546 - DNA, 611 bp, Artificial Sequence
  chemically treated genomic DNA (Homo sapiens) CpG-island No: 10546
tcaaccttacctaaaaactaaacaaaaaaacctctcaccccgctaacaccaaaactacgaccttaaaaaaccgtatcctacgcctaacgctcgaccgatcccgacaaaatccgcctaaaaccgaaatcgaaacaataaccgcaacgtaaaacgcaaccgaatcccgaaccaaaccctatacgcataaacgaaacaacgccctcccccgcgttccttcccccactacaaataaatcgcaacgccgcgaccccaaccccgcgcaaccccgaaaataacgtcaaaactctaaaccgcgctccgccccgcccctacaaacaacgctaaaaacccgcgactccgcgataaaaccccgtcccgctacgatacataccgactaccgcaaacacaaaaaacgaccgaacgctcgaatatactacgactacgacgactacctaacgctaaaacgaaaaatctacaatcaaaacgccaacctcctaccgcgacccacctaccccgcgacccgcacaaccaatatcaacgcaacgcgccgaccgccgcgaaacccgcacccgcaacctcgcgaaatcgccgaacgttcaaccaacctcaactatccatctacgcacgaacca

SEQ ID NO: 10547 - DNA, 611 bp, Artificial Sequence
  chemically treated genomic DNA (Homo sapiens) CpG-island No: 10547
ttagttttgtttggaggttgggtaggagagttttttatttcgttaatattaaaattgcgattttggaggatcgtgttttgcgtttggcgttcggtcgatttcggtagagttcgtttggggtcggggtcgggatagtggtcgtagcgtggagcgtagtcgggtttcgggttaaattttgtgcgtatgggcggagtagcgttttttttcgcgtttttttttttattgtaggtgagtcgtagcgtcgcggttttaatttcgcgtagtttcgggggtgacgttaggattttggatcgcgtttcgtttcgtttttgtaggtaacgttgagggttcgcgatttcgcggtggaatttcgtttcgttgcggtatatgtcggttgtcgtaagtatagggggcgatcgggcgttcgaatgtgttgcggttgcggcggttgtttgacgttaggacgaggagtttgtagttagagcgttagttttttgtcgcggtttatttgtttcgcggttcgtatagttaatgttagcgtagcgcgtcggtcgtcgcggggttcgtattcgtagtttcgcgggatcgtcgggcgtttagttagttttagttgtttatttacgtacgagtta

SEQ ID NO: 10548 - DNA, 611 bp, Artificial Sequence
  chemically treated genomic DNA (Homo sapiens) CpG-island No: 10548
taactcgtacgtaaataaacaactaaaactaactaaacgcccgacgatcccgcgaaactacgaatacgaaccccgcgacgaccgacgcgctacgctaacattaactatacgaaccgcgaaacaaataaaccgcgacaaaaaactaacgctctaactacaaactcctcgtcctaacgtcaaacaaccgccgcaaccgcaacacattcgaacgcccgatcgccccctatacttacgacaaccgacatataccgcaacgaaacgaaattccaccgcgaaatcgcgaaccctcaacgttacctacaaaaacgaaacgaaacgcgatccaaaatcctaacgtcacccccgaaactacgcgaaattaaaaccgcgacgctacgactcacctacaataaaaaaaaaaacgcgaaaaaaaacgctactccgcccatacgcacaaaatttaacccgaaacccgactacgctccacgctacgaccactatcccgaccccgaccccaaacgaactctaccgaaatcgaccgaacgccaaacgcaaaacacgatcctccaaaatcgcaattttaatattaacgaaataaaaaactctcctacccaacctccaaacaaaactaa

SEQ ID NO: 10549 - DNA, 910 bp, Artificial Sequence
  chemically treated genomic DNA (Homo sapiens) CpG-island No: 10549
ggtacgttttttaaatttagtcgcgcgttattatcgtgcgagttttcggtcgttttttttttcgtagagaggataaaggcgtttattatgtcgcggggggcggtttcgggtcgaaggttttcgtagtgttttaagaatttgtttaggatgaagttgttgaagttgcggttgagttgttcgaattcgcggaaaacggtgcgtatcgggttggggaagtattgtagttagggtattacgtttattaggttgttcgcgtttatcgtgcgttcgaatttttcgttgtggttgagtagtttacggaattcggggtcgtcgtggttgtagcggtagtcgaaatatacggtatttatgacgttggttacggttacgacggttagcggtttcgggtcgaggaaggcgtcgttcgcgttgtcgcgtattagtagcgttattagttcgcgcgtttcgtttagtacgtggttttcgaggatttggcggttgcgcggttggcgcgtgaagaagttgcgtattatgttgtgggttgcgcgtcgttgtattttttagtgtttcgagtagtggtcgaaagttatgttgcggtcgtcggatattatacggaaggaggcgaaggtcggtcggtcggcgaaggtcgagttttgttgtattagggtttggtggatggcgcgttcgttatttagtattattatggggtagttgtttaggcggatttggaaaacgtcgtcgtagcgtcgcgttaggcgagcgaacgagaggtgagtcgtttggtttatcgtcgtcgcgttttcgattagtggttacgtaaacgggttcgggggcgcggatcggagttgtcgttttcgttgttttagtagtcgttggtttatatgtatagtggttagtatcgataggagtagtaggagcgtggtttgttgga

SEQ ID NO: 10550 - DNA, 910 bp, Artificial Sequence
  chemically treated genomic DNA (Homo sapiens) CpG-island No: 10550
tccaacaaaccacgctcctactactcctatcgatactaaccactatacatataaaccaacgactactaaaacaacgaaaacgacaactccgatccgcgcccccgaacccgtttacgtaaccactaatcgaaaacgcgacgacgataaaccaaacgactcacctctcgttcgctcgcctaacgcgacgctacgacgacgttttccaaatccgcctaaacaactaccccataataatactaaataacgaacgcgccatccaccaaaccctaatacaacaaaactcgaccttcgccgaccgaccgaccttcgcctccttccgtataatatccgacgaccgcaacataactttcgaccactactcgaaacactaaaaaatacaacgacgcgcaacccacaacataatacgcaacttcttcacgcgccaaccgcgcaaccgccaaatcctcgaaaaccacgtactaaacgaaacgcgcgaactaataacgctactaatacgcgacaacgcgaacgacgccttcctcgacccgaaaccgctaaccgtcgtaaccgtaaccaacgtcataaataccgtatatttcgactaccgctacaaccacgacgaccccgaattccgtaaactactcaaccacaacgaaaaattcgaacgcacgataaacgcgaacaacctaataaacgtaataccctaactacaatacttccccaacccgatacgcaccgttttccgcgaattcgaacaactcaaccgcaacttcaacaacttcatcctaaacaaattcttaaaacactacgaaaaccttcgacccgaaaccgccccccgcgacataataaacgcctttatcctctctacgaaaaaaaaaacgaccgaaaactcgcacgataataacgcgcgactaaatttaaaaaacgtacc

SEQ ID NO: 10551 - DNA, 910 bp, Artificial Sequence
  chemically treated genomic DNA (Homo sapiens) CpG-island No: 10551
tttagtagattacgtttttgttatttttgtcggtgttggttattgtgtatgtgggttagcggttgttgaggtaacggaggcggtagtttcggttcgcgttttcgggttcgtttgcgtggttattgatcggaaacgcggcggcggtgggttaggcggtttatttttcgttcgttcgtttggcgcggcgttacggcgacgttttttagattcgtttgggtagttgttttatagtggtgttgaatggcgagcgcgttatttattaggttttggtgtagtagggttcggttttcgtcgatcggtcggttttcgttttttttcgtgtggtgttcggcggtcgtagtatggttttcggttattattcggagtattggaaggtgtagcggcgcgtagtttatagtatgatgcgtaatttttttacgcgttagtcgcgtagtcgttaagttttcgagggttacgtgttgagcgaggcgcgcgagttggtggcgttgttggtgcgcggtagcgcggacggcgtttttttcgattcgaggtcgttgatcgtcgtggtcgtggttaacgttatgagtgtcgtgtgtttcggttgtcgttatagttacgacgatttcgagtttcgtgagttgtttagttataacgaagagttcgggcgtacggtgggcgcgggtagtttggtggacgtgatgttttggttgtagtatttttttaattcggtgcgtatcgtttttcgcgaattcgagtagtttaatcgtaattttagtaattttattttggataagtttttgaggtattgcgaaagttttcggttcggggtcgtttttcgcgatatgatggacgtttttattttttttgcggaaaagaaggcggtcggggattcgtacggtggtggcgcgcggttggatttggagaacgtatt

SEQ ID NO: 10552 - DNA, 910 bp, Artificial Sequence
  chemically treated genomic DNA (Homo sapiens) CpG-island No: 10552
aatacgttctccaaatccaaccgcgcgccaccaccgtacgaatccccgaccgccttcttttccgcaaaaaaaataaaaacgtccatcatatcgcgaaaaacgaccccgaaccgaaaactttcgcaatacctcaaaaacttatccaaaataaaattactaaaattacgattaaactactcgaattcgcgaaaaacgatacgcaccgaattaaaaaaatactacaaccaaaacatcacgtccaccaaactacccgcgcccaccgtacgcccgaactcttcgttataactaaacaactcacgaaactcgaaatcgtcgtaactataacgacaaccgaaacacacgacactcataacgttaaccacgaccacgacgatcaacgacctcgaatcgaaaaaaacgccgtccgcgctaccgcgcaccaacaacgccaccaactcgcgcgcctcgctcaacacgtaaccctcgaaaacttaacgactacgcgactaacgcgtaaaaaaattacgcatcatactataaactacgcgccgctacaccttccaatactccgaataataaccgaaaaccatactacgaccgccgaacaccacacgaaaaaaaacgaaaaccgaccgatcgacgaaaaccgaaccctactacaccaaaacctaataaataacgcgctcgccattcaacaccactataaaacaactacccaaacgaatctaaaaaacgtcgccgtaacgccgcgccaaacgaacgaacgaaaaataaaccgcctaacccaccgccgccgcgtttccgatcaataaccacgcaaacgaacccgaaaacgcgaaccgaaactaccgcctccgttacctcaacaaccgctaacccacatacacaataaccaacaccgacaaaaataacaaaaacgtaatctactaaa

SEQ ID NO: 10553 - DNA, 745 bp, Artificial Sequence
  chemically treated genomic DNA (Homo sapiens) CpG-island No: 10553
cgtcgttcgttggtgggcgcggggtcgtttaggttgcgatggaagtcgttggcgtagggcggggagttaagttggggcgattgggggggtttgggggagttagcggggcgggattcgagcggggcggagagtggtaggaggaggcgaattttcgcgtttcggcgaattttatcgggttgaagtttttgttgtcgttttttttttgcgtgcggagttgggttttgcgtgcgtcgtttttggaaagtcggttttagttatatttttgggcgttgtttgcggtcgtttttttcgcgttttttacggtatttgaaacgcggaggcggcggtcgagggtggggtgtcggttattattatttttggcgtggggtgtcggtcgttattattttcggttgcgtacgtatagtcgcgtttgttaggttagcgaggcggacgtttgggttattattcgtaggtcgagttcgggcgcgtatcgttatttcgttgcgtatcggcggttttgtggtttttttgggcgcgtttgcggtcgcgaagggggttttttttttataagggaagtcggaggcgtttgggcgggggtggtttttttcgtttggcgcgtttttttttatatgttgatgtataggatttttaagatagttaagagaataaggattttacgaggcggggggaagggcgaattcgagggaagaggtgggatgtatttggttaattaggtaggaattgtattggttttattaaaggataa

SEQ ID NO: 10554 - DNA, 745 bp, Artificial Sequence
  chemically treated genomic DNA (Homo sapiens) CpG-island No: 10554
ttatcctttaataaaaccaatacaattcctacctaattaaccaaatacatcccacctcttccctcgaattcgcccttccccccgcctcgtaaaatccttattctcttaactatcttaaaaatcctatacatcaacatataaaaaaaaacgcgccaaacgaaaaaaaccacccccgcccaaacgcctccgacttcccttataaaaaaaaaacccccttcgcgaccgcaaacgcgcccaaaaaaaccacaaaaccgccgatacgcaacgaaataacgatacgcgcccgaactcgacctacgaataataacccaaacgtccgcctcgctaacctaacaaacgcgactatacgtacgcaaccgaaaataataacgaccgacaccccacgccaaaaataataataaccgacaccccaccctcgaccgccgcctccgcgtttcaaataccgtaaaaaacgcgaaaaaaacgaccgcaaacaacgcccaaaaatataactaaaaccgactttccaaaaacgacgcacgcaaaacccaactccgcacgcaaaaaaaaaacgacaacaaaaacttcaacccgataaaattcgccgaaacgcgaaaattcgcctcctcctaccactctccgccccgctcgaatcccgccccgctaactcccccaaacccccccaatcgccccaacttaactccccgccctacgccaacgacttccatcgcaacctaaacgaccccgcgcccaccaacgaacgacg

SEQ ID NO: 10555 - DNA, 745 bp, Artificial Sequence
  chemically treated genomic DNA (Homo sapiens) CpG-island No: 10555
ttattttttgatgaagttagtataatttttatttggttaattagatatattttattttttttttcgagttcgttttttttttcgtttcgtgaagtttttgtttttttagttgttttgaaaattttatgtattagtatgtaggaaagggcgcgttaggcgggggaagttattttcgtttaagcgttttcggttttttttataaagggagggtttttttcgcgatcgtaagcgcgtttaggaagattatagagtcgtcggtgcgtagcgaggtggcgatacgcgttcgggttcggtttgcgggtggtggtttaagcgttcgtttcgttggtttggtaggcgcgattgtgcgtgcgtagtcgagggtggtggcggtcggtattttacgttaagggtggtggtggtcggtattttattttcggtcgtcgttttcgcgttttaggtgtcgtgagaagcgcgggaggagcggtcgtaggtagcgtttagggatatgattggagtcgattttttagaagcggcgtacgtaaagtttagtttcgtacgtaaaggggaggcgatagtagaaattttaattcgataaagttcgtcggggcgcggagattcgtttttttttgttatttttcgtttcgttcgggtttcgtttcgttagtttttttaggtttttttagtcgttttagtttggtttttcgttttgcgttaacggtttttatcgtagtttgggcggtttcgcgtttattagcgggcggcg

SEQ ID NO: 10556 - DNA, 745 bp, Artificial Sequence
  chemically treated genomic DNA (Homo sapiens) CpG-island No: 10556
cgccgcccgctaataaacgcgaaaccgcccaaactacgataaaaaccgttaacgcaaaacgaaaaaccaaactaaaacgactaaaaaaacctaaaaaaactaacgaaacgaaacccgaacgaaacgaaaaataacaaaaaaaaacgaatctccgcgccccgacgaactttatcgaattaaaatttctactatcgcctcccctttacgtacgaaactaaactttacgtacgccgcttctaaaaaatcgactccaatcatatccctaaacgctacctacgaccgctcctcccgcgcttctcacgacacctaaaacgcgaaaacgacgaccgaaaataaaataccgaccaccaccacccttaacgtaaaataccgaccgccaccaccctcgactacgcacgcacaatcgcgcctaccaaaccaacgaaacgaacgcttaaaccaccacccgcaaaccgaacccgaacgcgtatcgccacctcgctacgcaccgacgactctataatcttcctaaacgcgcttacgatcgcgaaaaaaaccctccctttataaaaaaaaccgaaaacgcttaaacgaaaataacttcccccgcctaacgcgccctttcctacatactaatacataaaattttcaaaacaactaaaaaaacaaaaacttcacgaaacgaaaaaaaaaacgaactcgaaaaaaaaaataaaatatatctaattaaccaaataaaaattatactaacttcatcaaaaaataa

SEQ ID NO: 10557 - DNA, 736 bp, Artificial Sequence
  chemically treated genomic DNA (Homo sapiens) CpG-island No: 10557
agcgtattcgggttataggcggaggagttagttaaatttttttttcgcgttcgtagtcgcgtttttttagtcgttatttttttagtatcggggcgtatttataggtcggtattagttttaggaaaagcgttttttgcgtacggtttcgaagtcgtagttgtcgtacgatgtggcgtttttagcgcgttgcgggggtatcggggacgttcggtttcgttatggtcgcgttttttcgtttagcggcgcgtttttttcgtttaggacggcgttaggtcggggcggggtttcgcggggatttcgtgacgttagggggcgggcggcggcggggaattttcggtttgttttaagagggttttggcggggaggatcgaaggtcgacgtcgggaggatttgttttcgggaggagtcgttttcgggtttgaatcgtcggggtttcgttcgaaatgtttatttaagtgggggtttttgtggttgcgagggttataagtaggagcgaggtcggagttttcggggaggttttttttacgcgggtggagcgtttcggaggcggggtttttaaggttcgggtgttttaatttcgtcgcgttcgggtcgagttcgagagtcgttggtgttttttaggtcgtcgcgtttttggtcgcgtatttagttagggatttagaggtttttagtttcgggttttgcgcgtatattgagggcgcggcgtagtaggatagtaagataaggaagtagagat

SEQ ID NO: 10558 - DNA, 736 bp, Artificial Sequence
  chemically treated genomic DNA (Homo sapiens) CpG-island No: 10558
atctctacttccttatcttactatcctactacgccgcgccctcaatatacgcgcaaaacccgaaactaaaaacctctaaatccctaactaaatacgcgaccaaaaacgcgacgacctaaaaaacaccaacgactctcgaactcgacccgaacgcgacgaaattaaaacacccgaaccttaaaaaccccgcctccgaaacgctccacccgcgtaaaaaaaacctccccgaaaactccgacctcgctcctacttataaccctcgcaaccacaaaaacccccacttaaataaacatttcgaacgaaaccccgacgattcaaacccgaaaacgactcctcccgaaaacaaatcctcccgacgtcgaccttcgatcctccccgccaaaaccctcttaaaacaaaccgaaaattccccgccgccgcccgccccctaacgtcacgaaatccccgcgaaaccccgccccgacctaacgccgtcctaaacgaaaaaaacgcgccgctaaacgaaaaaacgcgaccataacgaaaccgaacgtccccgatacccccgcaacgcgctaaaaacgccacatcgtacgacaactacgacttcgaaaccgtacgcaaaaaacgcttttcctaaaactaataccgacctataaatacgccccgatactaaaaaaataacgactaaaaaaacgcgactacgaacgcgaaaaaaaaatttaactaactcctccgcctataacccgaatacgct

SEQ ID NO: 10559 - DNA, 736 bp, Artificial Sequence
  chemically treated genomic DNA (Homo sapiens) CpG-island No: 10559
gtttttgtttttttattttgttgttttgttgcgtcgcgtttttagtgtacgcgtagagttcggggttgagggtttttgggtttttggttgggtgcgcggttaggagcgcgacggtttgggaagtattagcggttttcgaattcggttcgggcgcggcggggttaagatattcgggttttgagggtttcgttttcggagcgttttattcgcgtgggggaagttttttcggaggtttcgatttcgtttttgtttatgattttcgtagttataggagtttttatttaggtgaatatttcggacggggtttcggcggtttagattcggaggcggtttttttcggaggtagattttttcggcgtcggttttcggtttttttcgttaaagtttttttgggataagtcggggatttttcgtcgtcgttcgttttttggcgttacggagttttcgcgaggtttcgtttcggtttggcgtcgttttgggcgggaggaacgcgtcgttaggcgggagagcgcggttatggcggggtcgggcgttttcggtgttttcgtagcgcgttggaaacgttatatcgtgcggtagttgcggtttcgggatcgtacgtaaaaggcgttttttttggagttggtgtcggtttgtgagtgcgtttcggtgttgagaggatggcggttgaggggacgcggttacgggcgcggggagagggtttggttggttttttcgtttgtgattcgagtgcgtt

SEQ ID NO: 10560 - DNA, 736 bp, Artificial Sequence
  chemically treated genomic DNA (Homo sapiens) CpG-island No: 10560
aacgcactcgaatcacaaacgaaaaaaccaaccaaaccctctccccgcgcccgtaaccgcgtcccctcaaccgccatcctctcaacaccgaaacgcactcacaaaccgacaccaactccaaaaaaaacgccttttacgtacgatcccgaaaccgcaactaccgcacgatataacgtttccaacgcgctacgaaaacaccgaaaacgcccgaccccgccataaccgcgctctcccgcctaacgacgcgttcctcccgcccaaaacgacgccaaaccgaaacgaaacctcgcgaaaactccgtaacgccaaaaaacgaacgacgacgaaaaatccccgacttatcccaaaaaaactttaacgaaaaaaaccgaaaaccgacgccgaaaaaatctacctccgaaaaaaaccgcctccgaatctaaaccgccgaaaccccgtccgaaatattcacctaaataaaaactcctataactacgaaaatcataaacaaaaacgaaatcgaaacctccgaaaaaacttcccccacgcgaataaaacgctccgaaaacgaaaccctcaaaacccgaatatcttaaccccgccgcgcccgaaccgaattcgaaaaccgctaatacttcccaaaccgtcgcgctcctaaccgcgcacccaaccaaaaacccaaaaaccctcaaccccgaactctacgcgtacactaaaaacgcgacgcaacaaaacaacaaaataaaaaaacaaaaac

SEQ ID NO: 10561 - DNA, 1329 bp, Artificial Sequence
  chemically treated genomic DNA (Homo sapiens) CpG-island No: 10561
atttcggtggtcgcggtagtagtaaggtcgttttggtgagtgtacgtggtttacgggtaggtcgcgcgttcggtcggtataggaagtttggggcgttgggtagggatcgcggggtgatatttggattttcggttgttcgaaagggcgacgattttatttttttttttttcggtgtcgaggtgtaagaggcggttgaatttaggagcgcggcgtagggcgggtttttttcggttgttttttcggggttcgtttttttttttcgtatcgtttcggtcgtcgagcgttacgttagtcgttagtgttcggttcgttgagtttacgtttttcgattcggagttttaagttttcggttttttgtagttttcggttttcggtttcgagtcgcggcgttcgcgtttttcgtttttcgttagtcggagtttcgaattcgtagagttttcgcgttttcggtttcgcgtttttagtattatatttcgtatttttgagtttcgagtttcgcgttcgtagtacgtacgtcgtagattagagtcgtcggcgtttacgtggtttcgggatttttcgttcgcggcgtttaagcgttttacgtttcgcgaagcgttaagtgcggggtagggcgtcggtttgcgcggcgttattagggcgcgaagaatatgacgaagtgcgcggcgttttggatttcgtgcgtgaatatgtcggtcgtgtataggtgtttgttgtgcgggttttgttcgttttcgtcgtttgtcgcggggggttcgttcgtcgtcgtcgtcgtcgttttttgggttcgggcgttttagcgttcgtcgtcgttatggtttagtagtagtagtagtagcgtagttagggtcgtcggtcgggttagtagcgggaggaggcgttttgggcgcgcgggtatcgcggcggggttgggcgcgttttcgtcgcggttttcggttttttcgtagcgttcgtttcgcgtttcgtttcggagaggtcgcgttttttttttttttcgttcgttcgcgtcggcgcgcgatcgttattcgttcgagtttcggtttcgcgtatcggtagggaagggttggagcgagggatcgagtttgggagagtttttcgagttcggttttttgttttttcgttatgggacggttcgtattaatttcgcgaggtttttgcgttttcgtaatttaggttcgtatttttttttttaggggttcgttttgtttagagcggcggtgaatatacgaagtaacgatgaggttagcgggaagttacggaggggtaggttagtttcggttaattttagtttatataagtatttcgcgattttaggttaaaggaaggaga

SEQ ID NO: 10562 - DNA, 1329 bp, Artificial Sequence
  chemically treated genomic DNA (Homo sapiens) CpG-island No: 10562
tctccttcctttaacctaaaatcgcgaaatacttatataaactaaaattaaccgaaactaacctacccctccgtaacttcccgctaacctcatcgttacttcgtatattcaccgccgctctaaacaaaacgaacccctaaaaaaaaaaatacgaacctaaattacgaaaacgcaaaaacctcgcgaaattaatacgaaccgtcccataacgaaaaaacaaaaaaccgaactcgaaaaactctcccaaactcgatccctcgctccaacccttccctaccgatacgcgaaaccgaaactcgaacgaataacgatcgcgcgccgacgcgaacgaacgaaaaaaaaaaaaaacgcgacctctccgaaacgaaacgcgaaacgaacgctacgaaaaaaccgaaaaccgcgacgaaaacgcgcccaaccccgccgcgatacccgcgcgcccaaaacgcctcctcccgctactaacccgaccgacgaccctaactacgctactactactactactaaaccataacgacgacgaacgctaaaacgcccgaacccaaaaaacgacgacgacgacgacgaacgaaccccccgcgacaaacgacgaaaacgaacaaaacccgcacaacaaacacctatacacgaccgacatattcacgcacgaaatccaaaacgccgcgcacttcgtcatattcttcgcgccctaataacgccgcgcaaaccgacgccctaccccgcacttaacgcttcgcgaaacgtaaaacgcttaaacgccgcgaacgaaaaatcccgaaaccacgtaaacgccgacgactctaatctacgacgtacgtactacgaacgcgaaactcgaaactcaaaaatacgaaatataatactaaaaacgcgaaaccgaaaacgcgaaaactctacgaattcgaaactccgactaacgaaaaacgaaaaacgcgaacgccgcgactcgaaaccgaaaaccgaaaactacaaaaaaccgaaaacttaaaactccgaatcgaaaaacgtaaactcaacgaaccgaacactaacgactaacgtaacgctcgacgaccgaaacgatacgaaaaaaaaaaacgaaccccgaaaaaacaaccgaaaaaaacccgccctacgccgcgctcctaaattcaaccgcctcttacacctcgacaccgaaaaaaaaaaaaataaaatcgtcgccctttcgaacaaccgaaaatccaaatatcaccccgcgatccctacccaacgccccaaacttcctataccgaccgaacgcgcgacctacccgtaaaccacgtacactcaccaaaacgaccttactactaccgcgaccaccgaaat

SEQ ID NO: 10563 - DNA, 1329 bp, Artificial Sequence
  chemically treated genomic DNA (Homo sapiens) CpG-island No: 10563
ttttttttttttggtttgaaatcgcggggtgtttgtgtgagttgagattagtcgaggttgatttgttttttcgtggtttttcgttggttttatcgttatttcgtgtgtttatcgtcgttttgagtagagcgggtttttggggaaaggggtgcgggtttgggttgcggaggcgtaggagtttcgcgggattggtgcgagtcgttttatggcgggaaggtaggaggtcggattcggaaggtttttttagattcggtttttcgttttagtttttttttgtcggtgcgcggagtcggggttcgggcgggtagcggtcgcgcgtcggcgcgggcgggcggggagaggaaggggcgcggttttttcggggcggggcgcggggcgggcgttgcgaggggatcggaggtcgcggcgagagcgcgtttagtttcgtcgcgatgttcgcgcgtttaggacgttttttttcgttgttggttcggtcggcggttttgattgcgttgttgttgttgttgttgggttatggcggcggcgggcgttggggcgttcgggtttaggaggcggcggcggcggcggcggacgggtttttcgcggtagacggcgaggacggataggattcgtatagtaagtatttgtatacggtcgatatgtttacgtacgggatttagagcgtcgcgtatttcgttatgtttttcgcgttttggtaacgtcgcgtaggtcggcgttttgtttcgtatttggcgtttcgcggggcgtggggcgtttgggcgtcgcgggcggggggtttcggggttacgtggacgtcgacggttttggtttgcggcgtgcgtgttacgggcgcggggttcggggtttaggggtgcggggtgtaatattgggggcgcggggtcgggagcgcggggattttgcgggttcggggtttcggttggcggggagcggggggcgcgggcgtcgcggttcggggtcgggagtcggggattgtaggggatcgagggtttggggtttcgggtcggggggcgtgagtttagcgggtcgggtattggcggttgacgtggcgttcggcggtcggggcggtgcgggaggagggggcggatttcgaggggatagtcgggaaaagttcgttttgcgtcgcgtttttgaatttaatcgttttttgtatttcggtatcgagggaggggaaggtggggtcgtcgttttttcgggtagtcgggagtttaaatgttatttcgcggtttttgtttagcgttttaaattttttgtgtcggtcggacgcgcggtttgttcgtgggttacgtgtatttattagagcggttttgttgttgtcgcggttatcggggt

SEQ ID NO: 10564 - DNA, 1329 bp, Artificial Sequence
  chemically treated genomic DNA (Homo sapiens) CpG-island No: 10564
accccgataaccgcgacaacaacaaaaccgctctaataaatacacgtaacccacgaacaaaccgcgcgtccgaccgacacaaaaaatttaaaacgctaaacaaaaaccgcgaaataacatttaaactcccgactacccgaaaaaacgacgaccccaccttcccctccctcgataccgaaatacaaaaaacgattaaattcaaaaacgcgacgcaaaacgaacttttcccgactatcccctcgaaatccgccccctcctcccgcaccgccccgaccgccgaacgccacgtcaaccgccaatacccgacccgctaaactcacgccccccgacccgaaaccccaaaccctcgatcccctacaatccccgactcccgaccccgaaccgcgacgcccgcgccccccgctccccgccaaccgaaaccccgaacccgcaaaatccccgcgctcccgaccccgcgcccccaatattacaccccgcacccctaaaccccgaaccccgcgcccgtaacacgcacgccgcaaaccaaaaccgtcgacgtccacgtaaccccgaaaccccccgcccgcgacgcccaaacgccccacgccccgcgaaacgccaaatacgaaacaaaacgccgacctacgcgacgttaccaaaacgcgaaaaacataacgaaatacgcgacgctctaaatcccgtacgtaaacatatcgaccgtatacaaatacttactatacgaatcctatccgtcctcgccgtctaccgcgaaaaacccgtccgccgccgccgccgccgcctcctaaacccgaacgccccaacgcccgccgccgccataacccaacaacaacaacaacaacgcaatcaaaaccgccgaccgaaccaacaacgaaaaaaaacgtcctaaacgcgcgaacatcgcgacgaaactaaacgcgctctcgccgcgacctccgatcccctcgcaacgcccgccccgcgccccgccccgaaaaaaccgcgccccttcctctccccgcccgcccgcgccgacgcgcgaccgctacccgcccgaaccccgactccgcgcaccgacaaaaaaaaactaaaacgaaaaaccgaatctaaaaaaaccttccgaatccgacctcctaccttcccgccataaaacgactcgcaccaatcccgcgaaactcctacgcctccgcaacccaaacccgcacccctttccccaaaaacccgctctactcaaaacgacgataaacacacgaaataacgataaaaccaacgaaaaaccacgaaaaaacaaatcaacctcgactaatctcaactcacacaaacaccccgcgatttcaaaccaaaaaaaaaaaa

SEQ ID NO: 10565 - DNA, 811 bp, Artificial Sequence
  chemically treated genomic DNA (Homo sapiens) CpG-island No: 10565
tttcgcgacgtcgcgttcgggaggaggtaggagcgcgacgttgcggtcgtagggtaggagcgtagtcggtttcgcgttttttcgttttttggtttcggttcgggttcgcgaggcgtttttggggcgaggtcgcggcggtcgtttcgttataggtagcgttagttttcgttcgtcgtcgtttcggcgtttcgggtaggttcgttttaggtatttggatgaattggatggtgagcgtcgatttgtttacgtcgttttcgtcgattattacgagtcggtattttttttggtcggagtcgtttcgttagtcggtcgcggttatggggacgttatagagtttagtttgattgcgtcgagtcgtcgttgtcgttcgttttaggttcggtttcggggacgtgtgcggtcggcgggttgcgggcgagcggtcgggttggggtttcgggtatcgggaggcgtttggagggtcggttagcgcggtagcgcggcgttggggattggttgggtatcgttcgaggcgcggagaagcggggtgacggtacgggttaggggcggtagcggtcggggggcgcgtttttttacgcgttttcgtagcgtttgtcgaacgtagtttttagcgtcgttataaatggtcgtttgggggtcgggttgttaggttgaggtgttgtatatgtatgagggggcggggaggggcggggtcgcgtcgtttggggttgaggttcgggaggtaattcgggttttagatttttacggatatatcgttttaatttttagttagtgagcgagtgcgtgagagtgtgggagtgggtgttagttg

SEQ ID NO: 10566 - DNA, 811 bp, Artificial Sequence
  chemically treated genomic DNA (Homo sapiens) CpG-island No: 10566
caactaacacccactcccacactctcacgcactcgctcactaactaaaaattaaaacgatatatccgtaaaaatctaaaacccgaattacctcccgaacctcaaccccaaacgacgcgaccccgcccctccccgccccctcatacatatacaacacctcaacctaacaacccgacccccaaacgaccatttataacgacgctaaaaactacgttcgacaaacgctacgaaaacgcgtaaaaaaacgcgccccccgaccgctaccgcccctaacccgtaccgtcaccccgcttctccgcgcctcgaacgatacccaaccaatccccaacgccgcgctaccgcgctaaccgaccctccaaacgcctcccgatacccgaaaccccaacccgaccgctcgcccgcaacccgccgaccgcacacgtccccgaaaccgaacctaaaacgaacgacaacgacgactcgacgcaatcaaactaaactctataacgtccccataaccgcgaccgactaacgaaacgactccgaccaaaaaaaataccgactcgtaataatcgacgaaaacgacgtaaacaaatcgacgctcaccatccaattcatccaaatacctaaaacgaacctacccgaaacgccgaaacgacgacgaacgaaaactaacgctacctataacgaaacgaccgccgcgacctcgccccaaaaacgcctcgcgaacccgaaccgaaaccaaaaaacgaaaaaacgcgaaaccgactacgctcctaccctacgaccgcaacgtcgcgctcctacctcctcccgaacgcgacgtcgcgaaa

SEQ ID NO: 10567 - DNA, 811 bp, Artificial Sequence
  chemically treated genomic DNA (Homo sapiens) CpG-island No: 10567
taattgatatttatttttatatttttacgtattcgtttattggttagggattagagcggtgtgttcgtgggggtttgaagttcgggttatttttcgaattttagttttaagcggcgcggtttcgttttttttcgtttttttatgtatatgtagtattttagtttggtagttcggtttttagacggttatttgtggcggcgttggaggttgcgttcggtaggcgttgcggagacgcgtagaggagcgcgtttttcggtcgttgtcgtttttggttcgtgtcgttatttcgttttttcgcgtttcgggcggtatttagttagtttttagcgtcgcgttatcgcgttgatcggttttttagacgtttttcggtattcgggattttagttcggtcgttcgttcgtagttcgtcggtcgtatacgttttcggagtcgggtttagggcgggcggtagcggcggttcggcgtagttaggttgggttttgtagcgtttttatggtcgcggtcggttggcgggacggtttcggttaggagaagtatcggttcgtggtggtcggcgggggcggcgtgggtaagtcggcgtttattatttagtttatttaggtatttggagcgggtttgttcggggcgtcggagcggcggcgggcgggggttggcgttatttgtggcggggcggtcgtcgcgatttcgttttagaggcgtttcgcgggttcgggtcggggttagggggcgggagggcgcggggtcgattacgtttttgttttgcggtcgtagcgtcgcgtttttgttttttttcgggcgcggcgtcgcggga

SEQ ID NO: 10568 - DNA, 811 bp, Artificial Sequence
  chemically treated genomic DNA (Homo sapiens) CpG-island No: 10568
tcccgcgacgccgcgcccgaaaaaaaacaaaaacgcgacgctacgaccgcaaaacaaaaacgtaatcgaccccgcgccctcccgccccctaaccccgacccgaacccgcgaaacgcctctaaaacgaaatcgcgacgaccgccccgccacaaataacgccaacccccgcccgccgccgctccgacgccccgaacaaacccgctccaaatacctaaataaactaaataataaacgccgacttacccacgccgcccccgccgaccaccacgaaccgatacttctcctaaccgaaaccgtcccgccaaccgaccgcgaccataaaaacgctacaaaacccaacctaactacgccgaaccgccgctaccgcccgccctaaacccgactccgaaaacgtatacgaccgacgaactacgaacgaacgaccgaactaaaatcccgaataccgaaaaacgtctaaaaaaccgatcaacgcgataacgcgacgctaaaaactaactaaataccgcccgaaacgcgaaaaaacgaaataacgacacgaaccaaaaacgacaacgaccgaaaaacgcgctcctctacgcgtctccgcaacgcctaccgaacgcaacctccaacgccgccacaaataaccgtctaaaaaccgaactaccaaactaaaatactacatatacataaaaaaacgaaaaaaaacgaaaccgcgccgcttaaaactaaaattcgaaaaataacccgaacttcaaacccccacgaacacaccgctctaatccctaaccaataaacgaatacgtaaaaatataaaaataaatatcaatta

SEQ ID NO: 10569 - DNA, 533 bp, Artificial Sequence
  chemically treated genomic DNA (Homo sapiens) CpG-island No: 10569
ggatttttcgcggatgagggtagcgtcggttttttgcggttaagatgttgtaaaacgtgattttttataataagtacgttttcgcgagttcgtgtgggaaggggatgttgtagggcggcggtataggggtgtggggcgtcgtgttgggagtattgagcggtttcggcgcgttgttgttgcggcgtagttgtcgattcggtcgcgcggagggaattgagcgacggttttggaacggtggtggcggttcggttattgttcgtggaggggaatataggttgttaatttatacgttattaatgtcgtcgtggtttagttttaatcgagttaggtagagttagtttgacggtggagtggagtgaggttgaatagtaggtttggcgtttggtgggtttggtatttagcggcggtttgttagttttttaggggggatttacggatatttttagcgttttgtagggttgttatggtgacggagcgtttaagggattggtaacggggatttttagagaagggtaaagggattattttttcgt

SEQ ID NO: 10570 - DNA, 533 bp, Artificial Sequence
  chemically treated genomic DNA (Homo sapiens) CpG-island No: 10570
acgaaaaaataatccctttacccttctctaaaaatccccgttaccaatcccttaaacgctccgtcaccataacaaccctacaaaacgctaaaaatatccgtaaatcccccctaaaaaactaacaaaccgccgctaaataccaaacccaccaaacgccaaacctactattcaacctcactccactccaccgtcaaactaactctacctaactcgattaaaactaaaccacgacgacattaataacgtataaattaacaacctatattcccctccacgaacaataaccgaaccgccaccaccgttccaaaaccgtcgctcaattccctccgcgcgaccgaatcgacaactacgccgcaacaacaacgcgccgaaaccgctcaatactcccaacacgacgccccacacccctataccgccgccctacaacatccccttcccacacgaactcgcgaaaacgtacttattataaaaaatcacgttttacaacatcttaaccgcaaaaaaccgacgctaccctcatccgcgaaaaatcc

SEQ ID NO: 10571 - DNA, 533 bp, Artificial Sequence
  chemically treated genomic DNA (Homo sapiens) CpG-island No: 10571
acgggagagtgatttttttatttttttttgggaattttcgttgttagttttttaagcgtttcgttattatggtaattttatagggcgttagaggtgttcgtgaattttttttaaaaggttaatagatcgtcgttagatattagatttattaaacgttaaatttgttgtttaattttattttattttatcgttaaattagttttgtttgattcggttaagattgggttacggcggtattaatagcgtataaattgataatttgtatttttttttacgagtagtagtcgagtcgttattatcgttttaaaatcgtcgtttaatttttttcgcgcgatcgagtcgatagttgcgtcgtaatagtagcgcgtcggggtcgtttagtatttttaatacggcgttttatatttttgtgtcgtcgttttgtaatattttttttttatacgggttcgcggaaacgtatttattgtggggagttacgttttgtagtattttgatcgtaaggaatcggcgttgtttttattcgcggaaagttt

SEQ ID NO: 10572 - DNA, 533 bp, Artificial Sequence
  chemically treated genomic DNA (Homo sapiens) CpG-island No: 10572
aaactttccgcgaataaaaacaacgccgattccttacgatcaaaatactacaaaacgtaactccccacaataaatacgtttccgcgaacccgtataaaaaaaaaatattacaaaacgacgacacaaaaatataaaacgccgtattaaaaatactaaacgaccccgacgcgctactattacgacgcaactatcgactcgatcgcgcgaaaaaaattaaacgacgattttaaaacgataataacgactcgactactactcgtaaaaaaaaatacaaattatcaatttatacgctattaataccgccgtaacccaatcttaaccgaatcaaacaaaactaatttaacgataaaataaaataaaattaaacaacaaatttaacgtttaataaatctaatatctaacgacgatctattaaccttttaaaaaaaattcacgaacacctctaacgccctataaaattaccataataacgaaacgcttaaaaaactaacaacgaaaattcccaaaaaaaaataaaaaaatcactctcccgt

SEQ ID NO: 10573 - DNA, 645 bp, Artificial Sequence
  chemically treated genomic DNA (Homo sapiens) CpG-island No: 10573
tttcgggcggtagggcgggagggcggtcgagcgcgggcgggaggcgtttttattttgaaggtttgtttcgtttttttcggcgcggggttttttgatcggagggcgagtttacgagaacgttagggaggcgtacgtagggtattaagggcgtcgcgttttaattttttcgcgttttagatttaggtcgtttttggaggtgtttgtagttttcgtcgtcggagttacgggaggagtcgtagtcgttttttcgggagtcgcgcgttgattgtagtgttaggcggaacgcggtttagcgcggttgtagtttcgtcgtatttttttttttggaatttcggttttcgttttgcgtatttcggtagtagtcgaatcgtagtttgggatttcgattgttatagtttttttcgtcggattcggggttttttcgttttcggcgttataataataaggaagttttttcgtaagtttgcgggcggcggaatgcgttgggtgaatggtttcgtatcgggttaatgggcgtcgttttgggatgggttcgcgttaatggcggtcgtcgtggtacgggttggaggcggggcggtaaggttcgcgggtaggaggaggggagaggtttaggttttagagttaggcgtaggttgttcgaggtga

SEQ ID NO: 10574 - DNA, 645 bp, Artificial Sequence
  chemically treated genomic DNA (Homo sapiens) CpG-island No: 10574
tcacctcgaacaacctacgcctaactctaaaacctaaacctctcccctcctcctacccgcgaaccttaccgccccgcctccaacccgtaccacgacgaccgccattaacgcgaacccatcccaaaacgacgcccattaacccgatacgaaaccattcacccaacgcattccgccgcccgcaaacttacgaaaaaacttccttattattataacgccgaaaacgaaaaaaccccgaatccgacgaaaaaaactataacaatcgaaatcccaaactacgattcgactactaccgaaatacgcaaaacgaaaaccgaaattccaaaaaaaaaaatacgacgaaactacaaccgcgctaaaccgcgttccgcctaacactacaatcaacgcgcgactcccgaaaaaacgactacgactcctcccgtaactccgacgacgaaaactacaaacacctccaaaaacgacctaaatctaaaacgcgaaaaaattaaaacgcgacgcccttaataccctacgtacgcctccctaacgttctcgtaaactcgccctccgatcaaaaaaccccgcgccgaaaaaaacgaaacaaaccttcaaaataaaaacgcctcccgcccgcgctcgaccgccctcccgccctaccgcccgaaa

SEQ ID NO: 10575 - DNA, 645 bp, Artificial Sequence
  chemically treated genomic DNA (Homo sapiens) CpG-island No: 10575
ttatttcgggtagtttgcgtttggttttggggtttgggttttttttttttttttgttcgcggattttgtcgtttcgtttttagttcgtgttacggcggtcgttattggcgcgggtttattttagaacggcgtttattggttcggtgcgaagttatttatttagcgtatttcgtcgttcgtaggtttgcggggaaatttttttattattgtgacgtcgaaaacggagaaatttcgggttcggcgagaggggttgtgatagtcggagttttaagttgcggttcggttgttgtcgaggtgcgtagggcgggggtcggggttttagggaggggggtacggcggagttgtagtcgcgttgggtcgcgtttcgtttggtattgtagttagcgcgcggttttcggaggggcggttgcggtttttttcgtggtttcggcggcgggggttgtaggtatttttagagacgatttgggtttggggcgcggggaggttggggcgcggcgtttttagtattttgcgtacgtttttttggcgttttcgtgggttcgtttttcggttagagagtttcgcgtcgggaaaggcgagataagtttttaaaatgggagcgtttttcgttcgcgttcggtcgttttttcgttttgtcgttcggga

SEQ ID NO: 10576 - DNA, 645 bp, Artificial Sequence
  chemically treated genomic DNA (Homo sapiens) CpG-island No: 10576
tcccgaacgacaaaacgaaaaaacgaccgaacgcgaacgaaaaacgctcccattttaaaaacttatctcgcctttcccgacgcgaaactctctaaccgaaaaacgaacccacgaaaacgccaaaaaaacgtacgcaaaatactaaaaacgccgcgccccaacctccccgcgccccaaacccaaatcgtctctaaaaatacctacaacccccgccgccgaaaccacgaaaaaaaccgcaaccgcccctccgaaaaccgcgcgctaactacaataccaaacgaaacgcgacccaacgcgactacaactccgccgtacccccctccctaaaaccccgacccccgccctacgcacctcgacaacaaccgaaccgcaacttaaaactccgactatcacaacccctctcgccgaacccgaaatttctccgttttcgacgtcacaataataaaaaaatttccccgcaaacctacgaacgacgaaatacgctaaataaataacttcgcaccgaaccaataaacgccgttctaaaataaacccgcgccaataacgaccgccgtaacacgaactaaaaacgaaacgacaaaatccgcgaacaaaaaaaaaaaaaaaacccaaaccccaaaaccaaacgcaaactacccgaaataa

SEQ ID NO: 10577 - DNA, 512 bp, Artificial Sequence
  chemically treated genomic DNA (Homo sapiens) CpG-island No: 10577
agttggaggggtgcgattaatttaggggagacgcgggttttttttttttattacgtatttcgtttttttttttttcgggttgatttttttttttttcgtttttttagggcgaagggcgaagagtagcgagtgtatcgcgggcgcgaggttggggaagggcgagagttcggagtttcgcggcggcgatttagtttcggcggtttatggtcggcgaagttgtttattttttcgtttggcgttcgggttcgaggggcgggagagcgggtcggcgggaggcgggcggtttcgggtataacggcggcggcggaagggttcgttgggtagttgtcgtacggatttcggttttgggcggcggaggcggtttcgtggagttcgtagtagatttttacgcgattttgtgtttcgtaaatagattgatcgatcgcggggacgcgttttttttttttattttttagtttttttggttaattgttttattttttttttttttttttttagattttttttttttt

SEQ ID NO: 10578 - DNA, 512 bp, Artificial Sequence
  chemically treated genomic DNA (Homo sapiens) CpG-island No: 10578
aaaaaaaaaaaaatctaaaaaaaaaaaaaaaaaaaataaaacaattaaccaaaaaaactaaaaaataaaaaaaaaaaacgcgtccccgcgatcgatcaatctatttacgaaacacaaaatcgcgtaaaaatctactacgaactccacgaaaccgcctccgccgcccaaaaccgaaatccgtacgacaactacccaacgaacccttccgccgccgccgttatacccgaaaccgcccgcctcccgccgacccgctctcccgcccctcgaacccgaacgccaaacgaaaaaataaacaacttcgccgaccataaaccgccgaaactaaatcgccgccgcgaaactccgaactctcgcccttccccaacctcgcgcccgcgatacactcgctactcttcgcccttcgccctaaaaaaacgaaaaaaaaaaaaatcaacccgaaaaaaaaaaaaacgaaatacgtaataaaaaaaaaaaacccgcgtctcccctaaattaatcgcacccctccaact

SEQ ID NO: 10579 - DNA, 512 bp, Artificial Sequence
  chemically treated genomic DNA (Homo sapiens) CpG-island No: 10579
ggggaaagaggagtttggagagagggagggagagagtaaggtagttggttagaagggttggggggtgggaggggggaacgcgttttcgcggtcggttagtttgtttgcggggtataggatcgcgtggaaatttgttgcgagttttacggagtcgttttcgtcgtttagagtcggggttcgtgcggtagttgtttagcgagttttttcgtcgtcgtcgttgtgttcgggatcgttcgtttttcgtcggttcgttttttcgtttttcggattcgggcgttaaacgaggaggtgggtagtttcgtcggttatggatcgtcggagttgagtcgtcgtcgcggagtttcgagttttcgtttttttttagtttcgcgttcgcggtgtattcgttgtttttcgtttttcgttttggaaaaacggggaaaagagagattaattcgaagagagaaagaacgggatacgtggtggggggggggagttcgcgttttttttgggttagtcgtatttttttagtt

SEQ ID NO: 10580 - DNA, 512 bp, Artificial Sequence
  chemically treated genomic DNA (Homo sapiens) CpG-island No: 10580
aactaaaaaaatacgactaacccaaaaaaaacgcgaactccccccccccaccacgtatcccgttctttctctcttcgaattaatctctcttttccccgtttttccaaaacgaaaaacgaaaaacaacgaatacaccgcgaacgcgaaactaaaaaaaaacgaaaactcgaaactccgcgacgacgactcaactccgacgatccataaccgacgaaactacccacctcctcgtttaacgcccgaatccgaaaaacgaaaaaacgaaccgacgaaaaacgaacgatcccgaacacaacgacgacgacgaaaaaactcgctaaacaactaccgcacgaaccccgactctaaacgacgaaaacgactccgtaaaactcgcaacaaatttccacgcgatcctataccccgcaaacaaactaaccgaccgcgaaaacgcgttcccccctcccaccccccaacccttctaaccaactaccttactctctccctccctctctccaaactcctctttcccc

SEQ ID NO: 10581 - DNA, 1254 bp, Artificial Sequence
  chemically treated genomic DNA (Homo sapiens) CpG-island No: 10581
tatagggtgggcggcgggggcggcggaggcgtttttttcgcggttatttcgtttttttcgggggtagattggaggtttttcggggttacggttgtcgttgtttttttttcgtacgatttttcgcggacggtttcgttcgggttgttaatggttttcggggttttttgttgcggttgaggcgaggaagtcgtttggggaagcgggaggggttgcgcggggtggtcgggacggcggggttggttcgggattttcgtcggggtcgaggttgcgtcggtttcgagttttttcgacgacgacgaggagtcgtcgtcgttgttgtaggggtttaatcggttagatacgttttcggcgttgggatttagattgaagttttcggtgtcggagattataggtcgtggggcgcggggcgaagagatagggtttttaacgaacggttcgtcggggttggagttcgagggcgttgggttggcgcggcgcgattattcgttcgggtcgtcgacgggtaggggtaggtcggcggggggcgcgcgcggaggtttttcgaaggtattcggcgcgtttttcgcgggcggtattttcgagtttcgcggtttcgggggcgttagtcgggggtcggtttcggggggcggtttagcgggttttcgggcggcggcggtttcgggtttttggtttagtatttttattacgtcgtcgtttttgtggtttagttgtagtaggcgggcggttatttcgtcggtcgtggtgtttagtgtgtagagtatcgggcgtaggtaggtcgaggttatgtggcggtcgaagacgtgtacgtagtcgcgttggagttggtgttttatttagtttcggttcgacggttgtagttgtagcgtttgtcggtgttttagaagtagcgtttttttgtttaggtttcgggtgtatagcgacgtcgaggtcgagtaggaggcggggaggtcggtagcgtcgggggagtgcgaggtagtagcggtcgaggacgacgacgacgaggaggcggtcgcggcggtcgcggatagatttttttttagtcgttttttttttagtaggagggagttggcgtcgtcgtcggtttcgggtacgggggtagtttcgtcggtaatgggttggggcgtttcgcgtcgttttttgcgttcggtatttttcgttttgttcggtagcggtttcggcggcgtttcgtttggggttttttttcgcgtttcgttgtcgttgtcgttttcgtcgttcggggtcgtcggggttagt

SEQ ID NO: 10582 - DNA, 1254 bp, Artificial Sequence
  chemically treated genomic DNA (Homo sapiens) CpG-island No: 10582
actaaccccgacgaccccgaacgacgaaaacgacaacgacaacgaaacgcgaaaaaaaaccccaaacgaaacgccgccgaaaccgctaccgaacaaaacgaaaaataccgaacgcaaaaaacgacgcgaaacgccccaacccattaccgacgaaactacccccgtacccgaaaccgacgacgacgccaactccctcctactaaaaaaaaaacgactaaaaaaaaatctatccgcgaccgccgcgaccgcctcctcgtcgtcgtcgtcctcgaccgctactacctcgcactcccccgacgctaccgacctccccgcctcctactcgacctcgacgtcgctatacacccgaaacctaaacaaaaaaacgctacttctaaaacaccgacaaacgctacaactacaaccgtcgaaccgaaactaaataaaacaccaactccaacgcgactacgtacacgtcttcgaccgccacataacctcgacctacctacgcccgatactctacacactaaacaccacgaccgacgaaataaccgcccgcctactacaactaaaccacaaaaacgacgacgtaataaaaatactaaaccaaaaacccgaaaccgccgccgcccgaaaacccgctaaaccgccccccgaaaccgacccccgactaacgcccccgaaaccgcgaaactcgaaaataccgcccgcgaaaaacgcgccgaataccttcgaaaaacctccgcgcgcgccccccgccgacctacccctacccgtcgacgacccgaacgaataatcgcgccgcgccaacccaacgccctcgaactccaaccccgacgaaccgttcgttaaaaaccctatctcttcgccccgcgccccacgacctataatctccgacaccgaaaacttcaatctaaatcccaacgccgaaaacgtatctaaccgattaaacccctacaacaacgacgacgactcctcgtcgtcgtcgaaaaaactcgaaaccgacgcaacctcgaccccgacgaaaatcccgaaccaaccccgccgtcccgaccaccccgcgcaacccctcccgcttccccaaacgacttcctcgcctcaaccgcaacaaaaaaccccgaaaaccattaacaacccgaacgaaaccgtccgcgaaaaatcgtacgaaaaaaaaacaacgacaaccgtaaccccgaaaaacctccaatctacccccgaaaaaaacgaaataaccgcgaaaaaaacgcctccgccgcccccgccgcccaccctata

SEQ ID NO: 10583 - DNA, 1254 bp, Artificial Sequence
  chemically treated genomic DNA (Homo sapiens) CpG-island No: 10583
gttgatttcggcggtttcgagcggcgggaacggtagcggtagcggggcgcgggaagaggttttaggcgaggcgtcgtcggggtcgttgtcgggtagagcggggggtgtcgggcgtaggaggcggcgcggggcgttttagtttattgtcggcggggttgttttcgtattcggggtcggcggcggcgttaatttttttttgttgaggagagggcggttgaagaggaatttgttcgcggtcgtcgcggtcgttttttcgtcgtcgtcgttttcggtcgttgttgtttcgtattttttcggcgttgtcggttttttcgttttttgttcggtttcggcgtcgttgtgtattcggagtttggataggaagacgttgtttttgaagtatcggtagacgttgtagttgtagtcgtcggatcgggattgggtgaggtattagttttagcgcggttgcgtgtacgttttcgatcgttatatggtttcgatttatttgcgttcggtgttttgtatattggatattacggtcggcgaggtggtcgttcgtttgttgtagttgggttataaaggcggcggcgtggtgaaggtgttgggttaggggttcggagtcgtcgtcgttcgggagttcgttgaatcgtttttcgaggtcggttttcggttggcgttttcggagtcgcgggattcggaggtatcgttcgcgaggagcgcgtcgggtgttttcggggggttttcgcgcgcgtttttcgtcgatttatttttgttcgtcggcggttcgggcgggtggtcgcgtcgcgttagtttagcgttttcggattttagtttcggcgagtcgttcgttgggggttttgttttttcgtttcgcgttttacggtttgtggttttcgatatcgagagttttagtttgagttttagcgtcgagagcgtgtttgatcggttggatttttatagtagcggcggcggtttttcgtcgtcgtcggaagagttcgaggtcgacgtagtttcggtttcgacgggggtttcgggttagtttcgtcgtttcggttatttcgcgtagtttttttcgtttttttagacggttttttcgttttagtcgtagtagaaagtttcgagggttattgatagttcgggcggggtcgttcgcgaggggtcgtgcgaggagaaggtagcggtagtcgtggtttcgggaggtttttagtttattttcgggaggagcggggtgatcgcggagaaggcgttttcgtcgttttcgtcgtttattttgta

SEQ ID NO: 10584 - DNA, 1254 bp, Artificial Sequence
  chemically treated genomic DNA (Homo sapiens) CpG-island No: 10584
tacaaaataaacgacgaaaacgacgaaaacgccttctccgcgatcaccccgctcctcccgaaaataaactaaaaacctcccgaaaccacgactaccgctaccttctcctcgcacgacccctcgcgaacgaccccgcccgaactatcaataaccctcgaaactttctactacgactaaaacgaaaaaaccgtctaaaaaaacgaaaaaaactacgcgaaataaccgaaacgacgaaactaacccgaaacccccgtcgaaaccgaaactacgtcgacctcgaactcttccgacgacgacgaaaaaccgccgccgctactataaaaatccaaccgatcaaacacgctctcgacgctaaaactcaaactaaaactctcgatatcgaaaaccacaaaccgtaaaacgcgaaacgaaaaaacaaaacccccaacgaacgactcgccgaaactaaaatccgaaaacgctaaactaacgcgacgcgaccacccgcccgaaccgccgacgaacaaaaataaatcgacgaaaaacgcgcgcgaaaaccccccgaaaacacccgacgcgctcctcgcgaacgatacctccgaatcccgcgactccgaaaacgccaaccgaaaaccgacctcgaaaaacgattcaacgaactcccgaacgacgacgactccgaacccctaacccaacaccttcaccacgccgccgcctttataacccaactacaacaaacgaacgaccacctcgccgaccgtaatatccaatatacaaaacaccgaacgcaaataaatcgaaaccatataacgatcgaaaacgtacacgcaaccgcgctaaaactaatacctcacccaatcccgatccgacgactacaactacaacgtctaccgatacttcaaaaacaacgtcttcctatccaaactccgaatacacaacgacgccgaaaccgaacaaaaaacgaaaaaaccgacaacgccgaaaaaatacgaaacaacaacgaccgaaaacgacgacgacgaaaaaacgaccgcgacgaccgcgaacaaattcctcttcaaccgccctctcctcaacaaaaaaaaattaacgccgccgccgaccccgaatacgaaaacaaccccgccgacaataaactaaaacgccccgcgccgcctcctacgcccgacaccccccgctctacccgacaacgaccccgacgacgcctcgcctaaaacctcttcccgcgccccgctaccgctaccgttcccgccgctcgaaaccgccgaaatcaac

SEQ ID NO: 10585 - DNA, 755 bp, Artificial Sequence
  chemically treated genomic DNA (Homo sapiens) CpG-island No: 10585
tcgtaaacgttggagttatcgatgtaggttgtttgttggttgatttgttttcgtgtatagattgaatttatcgtcgtagagggacggtcgttggtatacgcggggttggagcgcgcgaagagtatgtagggcgcgtgggtgtttcgggggtcggcgtgtcgggtgtttatggggaaataaggagggtcgttggtgtagacggagttgtacggtcgtttattcgagaagcgggttgtgtttagcgtaggtattgtgtggtttaagtcgtgttttagaaattagttttagtgtatgagtatgcgcgtgtagttgtggtcgggggtgacggtcgtcgcgcgcgtttatattgtggcgattagtcggggcggcgggaggggttggcgggagtttataggaaggtcgagttcgcggggcgcgcggatgtcgtttcggtaggttggttgtagtaggcgcgcgaaggcggttagcgtcgcgttttacgtgggttgttgtaggttgttgtacgtgtcgtcgtgggcgcggtatttcgtatggaaatatcggttggagtagtttggtagaggtttgcgagttgtgtatttagataaattggcgatgaggttgagggagcgcggggatattaagttattgtatcggaattttgaaaggtaagcggcgaaagtcgtgaggagggcgggtttgggagggcgcgggtaatttggaattttagatgttgcgggaattattttttatttcgttcgttttgagtgaaaaga

SEQ ID NO: 10586 - DNA, 755 bp, Artificial Sequence
  chemically treated genomic DNA (Homo sapiens) CpG-island No: 10586
tcttttcactcaaaacgaacgaaataaaaaataattcccgcaacatctaaaattccaaattacccgcgccctcccaaacccgccctcctcacgactttcgccgcttacctttcaaaattccgatacaataacttaatatccccgcgctccctcaacctcatcgccaatttatctaaatacacaactcgcaaacctctaccaaactactccaaccgatatttccatacgaaataccgcgcccacgacgacacgtacaacaacctacaacaacccacgtaaaacgcgacgctaaccgccttcgcgcgcctactacaaccaacctaccgaaacgacatccgcgcgccccgcgaactcgaccttcctataaactcccgccaacccctcccgccgccccgactaatcgccacaatataaacgcgcgcgacgaccgtcacccccgaccacaactacacgcgcatactcatacactaaaactaatttctaaaacacgacttaaaccacacaatacctacgctaaacacaacccgcttctcgaataaacgaccgtacaactccgtctacaccaacgaccctccttatttccccataaacacccgacacgccgacccccgaaacacccacgcgccctacatactcttcgcgcgctccaaccccgcgtataccaacgaccgtccctctacgacgataaattcaatctatacacgaaaacaaatcaaccaacaaacaacctacatcgataactccaacgtttacga

SEQ ID NO: 10587 - DNA, 755 bp, Artificial Sequence
  chemically treated genomic DNA (Homo sapiens) CpG-island No: 10587
tttttttatttagggcgggcggggtgggaggtggttttcgtagtatttggagttttaagttgttcgcgtttttttaggttcgttttttttacggttttcgtcgtttgttttttagaatttcggtataatgatttggtgttttcgcgtttttttagttttatcgttaatttatttggatgtatagttcgtaggtttttgttaaattgttttaatcggtgtttttatgcgaagtatcgcgtttacgacggtacgtgtaataatttgtagtagtttacgtggggcgcggcgttgatcgttttcgcgcgtttgttgtagttagtttatcgggacggtattcgcgcgtttcgcgggttcggtttttttgtgggttttcgttagtttttttcgtcgtttcggttggtcgttatagtgtgggcgcgcgcggcggtcgttattttcgattatagttatacgcgtatgtttatgtattggggttggtttttagagtacgatttggattatatagtgtttgcgttgagtatagttcgtttttcggatgggcggtcgtgtagtttcgtttgtattaacgattttttttgtttttttatgaatattcggtacgtcgattttcggggtatttacgcgttttgtatgtttttcgcgcgttttagtttcgcgtgtgttagcggtcgtttttttgcgacggtggatttagtttatgtacgagagtagattaattagtaaatagtttatatcgatggttttaacgtttacgg

SEQ ID NO: 10588 - DNA, 755 bp, Artificial Sequence
  chemically treated genomic DNA (Homo sapiens) CpG-island No: 10588
ccgtaaacgttaaaaccatcgatataaactatttactaattaatctactctcgtacataaactaaatccaccgtcgcaaaaaaacgaccgctaacacacgcgaaactaaaacgcgcgaaaaacatacaaaacgcgtaaataccccgaaaatcgacgtaccgaatattcataaaaaaacaaaaaaaatcgttaatacaaacgaaactacacgaccgcccatccgaaaaacgaactatactcaacgcaaacactatataatccaaatcgtactctaaaaaccaaccccaatacataaacatacgcgtataactataatcgaaaataacgaccgccgcgcgcgcccacactataacgaccaaccgaaacgacgaaaaaaactaacgaaaacccacaaaaaaaccgaacccgcgaaacgcgcgaataccgtcccgataaactaactacaacaaacgcgcgaaaacgatcaacgccgcgccccacgtaaactactacaaattattacacgtaccgtcgtaaacgcgatacttcgcataaaaacaccgattaaaacaatttaacaaaaacctacgaactatacatccaaataaattaacgataaaactaaaaaaacgcgaaaacaccaaatcattataccgaaattctaaaaaacaaacgacgaaaaccgtaaaaaaaacgaacctaaaaaaacgcgaacaacttaaaactccaaatactacgaaaaccacctcccaccccgcccgccctaaataaaaaaa

SEQ ID NO: 10589 - DNA, 856 bp, Artificial Sequence
  chemically treated genomic DNA (Homo sapiens) CpG-island No: 10589
gattatcgtttaattgaaggatatcgtgcgttttatcgtaattttgcgggcgattcggaaagttggaggcgtttcggggagtcgtcgtatttgtcgttcgcgttttttaatttgagtatttaaggagttttgatttggtcgttggcgtatttcgtatttatttagtcggtgttgatgcgggagggtggggtcgcggcggggcggggtaacgcgagttcgtatttcgttttttttcgtttttttttgtcggtttcgttcgcgcgcgtttttcgttcgcggttcgggcgttcggttcgtttttttttttcggcgcgtaaacgaatttcgcgacgtcgcgttcggcggcgggcgggggtcgggcgagggagggggttggtttcggtcgttttattttgtagttgtttttcgagcgttggttgcgtcgttcgagtcgttgggtcggggaagtattggtcgttcgttttcgggtcggtttcgttaggcgttcgtaggtatgtagttcgggagtaggaggcgtttttcgggtcgttgttgagtcggtcggggcggcggggattagcgttagcggagttttttttattttgtttcggggtagacgagcggcgtttcgatatttttttttttttcgtagtttcgttagcgttatttttcgcgggtcgtaggggtttatgtagtcgttaaggtaagcgcgggtcgggagtcgggtagattcggttttgatattttcgaggcgtcgtcgatatatgtcggggttacggcgttgttttggttttttttagtttcgcgttttattttgtttttattttgtttatatttggagttttgttgcgtttttatcgttttagttgttggtagt

SEQ ID NO: 10590 - DNA, 856 bp, Artificial Sequence
  chemically treated genomic DNA (Homo sapiens) CpG-island No: 10590
actaccaacaactaaaacgataaaaacgcaacaaaactccaaatataaacaaaataaaaacaaaataaaacgcgaaactaaaaaaaaccaaaacaacgccgtaaccccgacatatatcgacgacgcctcgaaaatatcaaaaccgaatctacccgactcccgacccgcgcttaccttaacgactacataaacccctacgacccgcgaaaaataacgctaacgaaactacgaaaaaaaaaaaaatatcgaaacgccgctcgtctaccccgaaacaaaataaaaaaaactccgctaacgctaatccccgccgccccgaccgactcaacaacgacccgaaaaacgcctcctactcccgaactacatacctacgaacgcctaacgaaaccgacccgaaaacgaacgaccaatacttccccgacccaacgactcgaacgacgcaaccaacgctcgaaaaacaactacaaaataaaacgaccgaaaccaaccccctccctcgcccgacccccgcccgccgccgaacgcgacgtcgcgaaattcgtttacgcgccgaaaaaaaaaaacgaaccgaacgcccgaaccgcgaacgaaaaacgcgcgcgaacgaaaccgacaaaaaaaaacgaaaaaaaacgaaatacgaactcgcgttaccccgccccgccgcgaccccaccctcccgcatcaacaccgactaaataaatacgaaatacgccaacgaccaaatcaaaactccttaaatactcaaattaaaaaacgcgaacgacaaatacgacgactccccgaaacgcctccaactttccgaatcgcccgcaaaattacgataaaacgcacgatatccttcaattaaacgataatc

SEQ ID NO: 10591 - DNA, 856 bp, Artificial Sequence
  chemically treated genomic DNA (Homo sapiens) CpG-island No: 10591
gttgttaatagttaaagcgatagaggcgtagtaaagttttaaatgtgggtaagatgggagtaagatgagacgcggggttaaggaagattaaagtagcgtcgtggtttcggtatgtgtcggcggcgtttcggagatgttagagtcgggtttgttcggttttcgattcgcgtttattttggcggttgtatgagtttttgcggttcgcggggggtggcgttggcggggttgcgggagaagagggggtgtcggggcgtcgttcgtttgtttcggggtaaggtgggaggggtttcgttggcgttggttttcgtcgtttcggtcggtttagtagcggttcggggagcgttttttgttttcgggttgtatgtttgcgagcgtttggcggagtcggttcgggagcgaacggttagtgttttttcggtttagcggttcgggcggcgtagttagcgttcgggagataattgtagagtggggcggtcgggattagttttttttttcgttcggttttcgttcgtcgtcgagcgcggcgtcgcgaggttcgtttgcgcgtcgaggggagggggcgggtcgggcgttcgggtcgcgggcggggggcgcgcgcgggcggggtcggtagggaggggcggggaggagcggggtgcgggttcgcgttgtttcgtttcgtcgcggttttattttttcgtattagtatcggttgggtgggtgcggagtgcgttagcggttaagttaagattttttgaatgtttaggttagggggcgcgggcggtaagtgcggcgatttttcggggcgtttttaatttttcgaatcgttcgtagggttgcggtggagcgtacggtgttttttagttaggcggtggtt

SEQ ID NO: 10592 - DNA, 856 bp, Artificial Sequence
  chemically treated genomic DNA (Homo sapiens) CpG-island No: 10592
aaccaccgcctaactaaaaaacaccgtacgctccaccgcaaccctacgaacgattcgaaaaattaaaaacgccccgaaaaatcgccgcacttaccgcccgcgccccctaacctaaacattcaaaaaatcttaacttaaccgctaacgcactccgcacccacccaaccgatactaatacgaaaaaataaaaccgcgacgaaacgaaacaacgcgaacccgcaccccgctcctccccgcccctccctaccgaccccgcccgcgcgcgccccccgcccgcgacccgaacgcccgacccgccccctcccctcgacgcgcaaacgaacctcgcgacgccgcgctcgacgacgaacgaaaaccgaacgaaaaaaaaaactaatcccgaccgccccactctacaattatctcccgaacgctaactacgccgcccgaaccgctaaaccgaaaaaacactaaccgttcgctcccgaaccgactccgccaaacgctcgcaaacatacaacccgaaaacaaaaaacgctccccgaaccgctactaaaccgaccgaaacgacgaaaaccaacgccaacgaaacccctcccaccttaccccgaaacaaacgaacgacgccccgacaccccctcttctcccgcaaccccgccaacgccaccccccgcgaaccgcaaaaactcatacaaccgccaaaataaacgcgaatcgaaaaccgaacaaacccgactctaacatctccgaaacgccgccgacacataccgaaaccacgacgctactttaatcttccttaaccccgcgtctcatcttactcccatcttacccacatttaaaactttactacgcctctatcgctttaactattaacaac

SEQ ID NO: 10593 - DNA, 519 bp, Artificial Sequence
  chemically treated genomic DNA (Homo sapiens) CpG-island No: 10593
ttagcgcgcgtggttgggtagattcggtatacgttttttatatcgtgtgcgggttgggagtttttttttttagttcggttcgcggagtttcggacggagtcggttattcgattgtttcgtcgtgaatttttattggttcgcgtcgttcgggttttcgtttttcgttcgacgttcggttgcggagttgtttggttattttttgttttcggggatgtcggcgtagtgtatcgcgtgggttcgcgtttcggcggttttttgtttcggcgcgtcggcgtacgggaaggtgcggattttggattgaggttcgaggatgtttattgttaagtcgtttcggtttttttaagtggacgggagggtacggcgacgatttagcgtcggttcgcgtcgtagtttaatttagggtataagttcgggtatgggggataggtgtatttaatgggagggcgggtgtgggggacgttcgggtgtaattcgggattgcgttttattaatgtaattgtattagatttgttcggaggt

SEQ ID NO: 10594 - DNA, 519 bp, Artificial Sequence
  chemically treated genomic DNA (Homo sapiens) CpG-island No: 10594
acctccgaacaaatctaatacaattacattaataaaacgcaatcccgaattacacccgaacgtcccccacacccgccctcccattaaatacacctatcccccatacccgaacttataccctaaattaaactacgacgcgaaccgacgctaaatcgtcgccgtaccctcccgtccacttaaaaaaaccgaaacgacttaacaataaacatcctcgaacctcaatccaaaatccgcaccttcccgtacgccgacgcgccgaaacaaaaaaccgccgaaacgcgaacccacgcgatacactacgccgacatccccgaaaacaaaaaataaccaaacaactccgcaaccgaacgtcgaacgaaaaacgaaaacccgaacgacgcgaaccaataaaaattcacgacgaaacaatcgaataaccgactccgtccgaaactccgcgaaccgaactaaaaaaaaaaactcccaacccgcacacgatataaaaaacgtataccgaatctacccaaccacgcgcgctaa

SEQ ID NO: 10595 - DNA, 519 bp, Artificial Sequence
  chemically treated genomic DNA (Homo sapiens) CpG-island No: 10595
attttcgagtaagtttaatataattatattaataagacgtaatttcgaattgtattcgagcgttttttatattcgtttttttattgaatatatttgttttttatgttcgggtttgtattttgggttgagttgcggcgcgagtcggcgttgaatcgtcgtcgtgttttttcgtttatttaggaaagtcggggcggtttggtaatgggtattttcgggttttaatttaaggttcgtattttttcgtacgtcggcgcgtcgaggtaaagggtcgtcgggacgcgagtttacgcggtgtattgcgtcgatattttcgagggtaggagatggttaggtagtttcgtagtcgggcgtcgagcgggaggcgggggttcgggcggcgcgggttaatgggggtttacggcgggatagtcgggtggtcggtttcgttcggggtttcgcgagtcgggttgagggaaggagtttttagttcgtatacggtgtaagggacgtgtgtcgggtttgtttaattacgcgcgttgg

SEQ ID NO: 10596 - DNA, 519 bp, Artificial Sequence
  chemically treated genomic DNA (Homo sapiens) CpG-island No: 10596
ccaacgcgcgtaattaaacaaacccgacacacgtcccttacaccgtatacgaactaaaaactccttccctcaacccgactcgcgaaaccccgaacgaaaccgaccacccgactatcccgccgtaaacccccattaacccgcgccgcccgaacccccgcctcccgctcgacgcccgactacgaaactacctaaccatctcctaccctcgaaaatatcgacgcaatacaccgcgtaaactcgcgtcccgacgaccctttacctcgacgcgccgacgtacgaaaaaatacgaaccttaaattaaaacccgaaaatacccattaccaaaccgccccgactttcctaaataaacgaaaaaacacgacgacgattcaacgccgactcgcgccgcaactcaacccaaaatacaaacccgaacataaaaaacaaatatattcaataaaaaaacgaatataaaaaacgctcgaatacaattcgaaattacgtcttattaatataattatattaaacttactcgaaaat

SEQ ID NO: 10597 - DNA, 1172 bp, Artificial Sequence
  chemically treated genomic DNA (Homo sapiens) CpG-island No: 10597
cggtttcgatcgaggggcggggcggggtgtgtgtgtgtgtgtgtggaggggggggttattattcggttaggtttaagtgcgtatgtgcgcgaggagtcgttcgggtatttattgagcgtcgattgtttacgggcggtcgggggtgtgtagtttaggcgcgttgggggcgtgttgggcgggtgcgggggcgcggaggcgcggggggcgggcgggggtgtgtttcgagtgtcgtcgttgggcgtcggttggtaggggttggcgtgttgtttcgtttttttttcgggcgggaattcgggtcgggttgtggtcgcggtcgcgtacgtgagcgtagtgtttcggggaggagggtaggtcggttaggtgggcgttaatcgagtttcggcgggcggtcggagcggagtcgggtcgcgggtcgcgtcgggagggcgggtagggtcgcggtcgttgtagttcggagttgagttagtcgttcgagtcgagtcgttcgagtcggggaagtcgggcgcgtgttgtcgttcgtggcgggtcgaggtgagttgcgcggggatttaacggcgcggtagtcggggacgggggcggtcgcgaattttttacgtttcgcgcgttcgcggttgtcgggtcggcggtttggggggttcgggggtttgggaggtcggggtcgcggcgggcggggcgcgggacgttgcggtagggtcggggtggcgggcggggtggttgtcgttttcgcgcgtcgttttgtttatttcgtttttcgtcggcgtttttattttcggagttttttttcgatttcgggtagtcgggattcgtttttcgtagggatagggatcggttcgtttgttttttttcggtttttttcggcggggtcgttcgttcggttttttcgcgttcggttttttcgcgtttcgcgcgtttttgtcggtttttgtttatttcggtcggcgcgcgaggttaggttgcgggacgggcgggatagagggatatatttttcgttcgcgggcgattcgcgtttttttcgttttggcggttatcgttttttttgttcgtacgttttcgttcggtttcgttttcgttcgcgtttttggtttttttcggcggtggtatcgtgggtttacgcgggtgttcggggggggggcggggttgtatagggagtttgttttgtgtaaataattttt

SEQ ID NO: 10598 - DNA, 1172 bp, Artificial Sequence
  chemically treated genomic DNA (Homo sapiens) CpG-island No: 10598
aaaaattatttacacaaaacaaactccctatacaaccccgccccccccccgaacacccgcgtaaacccacgataccaccgccgaaaaaaaccaaaaacgcgaacgaaaacgaaaccgaacgaaaacgtacgaacaaaaaaaacgataaccgccaaaacgaaaaaaacgcgaatcgcccgcgaacgaaaaatatatccctctatcccgcccgtcccgcaacctaacctcgcgcgccgaccgaaataaacaaaaaccgacaaaaacgcgcgaaacgcgaaaaaaccgaacgcgaaaaaaccgaacgaacgaccccgccgaaaaaaaccgaaaaaaaacaaacgaaccgatccctatccctacgaaaaacgaatcccgactacccgaaatcgaaaaaaaactccgaaaataaaaacgccgacgaaaaacgaaataaacaaaacgacgcgcgaaaacgacaaccaccccgcccgccaccccgaccctaccgcaacgtcccgcgccccgcccgccgcgaccccgacctcccaaacccccgaaccccccaaaccgccgacccgacaaccgcgaacgcgcgaaacgtaaaaaattcgcgaccgcccccgtccccgactaccgcgccgttaaatccccgcgcaactcacctcgacccgccacgaacgacaacacgcgcccgacttccccgactcgaacgactcgactcgaacgactaactcaactccgaactacaacgaccgcgaccctacccgccctcccgacgcgacccgcgacccgactccgctccgaccgcccgccgaaactcgattaacgcccacctaaccgacctaccctcctccccgaaacactacgctcacgtacgcgaccgcgaccacaacccgacccgaattcccgcccgaaaaaaaaacgaaacaacacgccaacccctaccaaccgacgcccaacgacgacactcgaaacacacccccgcccgccccccgcgcctccgcgcccccgcacccgcccaacacgcccccaacgcgcctaaactacacacccccgaccgcccgtaaacaatcgacgctcaataaatacccgaacgactcctcgcgcacatacgcacttaaacctaaccgaataataacccccccctccacacacacacacacacaccccgccccgcccctcgatcgaaaccg

SEQ ID NO: 10599 - DNA, 1172 bp, Artificial Sequence
  chemically treated genomic DNA (Homo sapiens) CpG-island No: 10599
ggaaattgtttgtataagataaattttttgtgtagtttcgtttttttttcgggtattcgcgtgagtttacggtgttatcgtcggggagggttaggggcgcgggcggaggcgggatcgggcgagagcgtgcgggtagagggggcggtggtcgttagggcgggagggacgcgggtcgttcgcgggcggagggtgtgtttttttgtttcgttcgtttcgtagtttggtttcgcgcgtcggtcggagtgggtaggaatcggtagaaacgcgcggggcgcgggagggtcgggcgcgggagggtcgggcgggcggtttcgtcggaaagggtcggggaggggtaggcgggtcggtttttgtttttgcgaggggcgagtttcgattgttcgaagtcgggagggggtttcgagagtgggggcgtcggcggagggcgaggtaaataaggcgacgcgcgggagcggtagttatttcgttcgttatttcggttttgtcgtagcgtttcgcgtttcgttcgtcgcggtttcggttttttagattttcggattttttaggtcgtcggttcgatagtcgcgggcgcgcggggcgtgggaagttcgcggtcgttttcgttttcggttgtcgcgtcgttaggttttcgcgtagtttatttcggttcgttacgagcggtagtacgcgttcggttttttcggttcggacggttcggttcggacggttagtttagtttcgggttgtagcggtcgcggttttgttcgttttttcggcgcggttcgcggttcggtttcgtttcggtcgttcgtcgaggttcggttggcgtttatttggtcggtttgttttttttttcgggatattgcgtttacgtacgcggtcgcggttataattcggttcggattttcgttcgggaagggagcggagtagtacgttagtttttgttagtcggcgtttagcggcgatattcgggatatattttcgttcgtttttcgcgttttcgcgttttcgtattcgtttagtacgtttttagcgcgtttgggttatatattttcggtcgttcgtagatagtcggcgtttaataagtgttcgagcgatttttcgcgtatatgcgtatttgaatttgatcgagtggtgatttttttttttatatatatatatatatatttcgtttcgtttttcgatcggaatcg

SEQ ID NO: 10600 - DNA, 1172 bp, Artificial Sequence
  chemically treated genomic DNA (Homo sapiens) CpG-island No: 10600
cgattccgatcgaaaaacgaaacgaaatatatatatatatatataaaaaaaaaaatcaccactcgatcaaattcaaatacgcatatacgcgaaaaatcgctcgaacacttattaaacgccgactatctacgaacgaccgaaaatatataacccaaacgcgctaaaaacgtactaaacgaatacgaaaacgcgaaaacgcgaaaaacgaacgaaaatatatcccgaatatcgccgctaaacgccgactaacaaaaactaacgtactactccgctcccttcccgaacgaaaatccgaaccgaattataaccgcgaccgcgtacgtaaacgcaatatcccgaaaaaaaaaacaaaccgaccaaataaacgccaaccgaacctcgacgaacgaccgaaacgaaaccgaaccgcgaaccgcgccgaaaaaacgaacaaaaccgcgaccgctacaacccgaaactaaactaaccgtccgaaccgaaccgtccgaaccgaaaaaaccgaacgcgtactaccgctcgtaacgaaccgaaataaactacgcgaaaacctaacgacgcgacaaccgaaaacgaaaacgaccgcgaacttcccacgccccgcgcgcccgcgactatcgaaccgacgacctaaaaaatccgaaaatctaaaaaaccgaaaccgcgacgaacgaaacgcgaaacgctacgacaaaaccgaaataacgaacgaaataactaccgctcccgcgcgtcgccttatttacctcgccctccgccgacgcccccactctcgaaaccccctcccgacttcgaacaatcgaaactcgcccctcgcaaaaacaaaaaccgacccgcctacccctccccgaccctttccgacgaaaccgcccgcccgaccctcccgcgcccgaccctcccgcgccccgcgcgtttctaccgattcctacccactccgaccgacgcgcgaaaccaaactacgaaacgaacgaaacaaaaaaacacaccctccgcccgcgaacgacccgcgtccctcccgccctaacgaccaccgccccctctacccgcacgctctcgcccgatcccgcctccgcccgcgcccctaaccctccccgacgataacaccgtaaactcacgcgaatacccgaaaaaaaaacgaaactacacaaaaaatttatcttatacaaacaatttcc

SEQ ID NO: 10601 - DNA, 747 bp, Artificial Sequence
  chemically treated genomic DNA (Homo sapiens) CpG-island No: 10601
tgtagatcggatagtttttcgggttaagggcgtttatttcgcggattatcgtagtacgtcggtcggttgggtgcggatggtagttttggtgaattgttttaggatgttcggtagtttcgggggaatgtggatttgttgagcgtagaatatggtgtcgggaagcggtatcgtttttcgtagaagggattaggttggtgaatcgcggcgcgttgcgaggaagaagggcggttgtcggttacgacgcggtggattcgttagtagcgcggggtttgcggttagggtcgttttttatttcgttttcgaggttggggtcggattcgcggggtttttattcgttttttcgcgggtttcgggagaaattcggattaattgttatttcgataatattttagattttgtagttttttagcgttagtcgttattacggacgcgttcggtatttaggtattcgggacgcgagtaggtttcgtttttggagtcgcgtacgcgtacgcggttttgagcgaggcggggttgttttcgggttggataaggaggtgttggcgtagttcgattagtagtagtcgttgtttttcggtggtttagagtcgcgcgagttgagcgtttcgtttataaaagtattttcggatcggttttttatcgtcgaatgtgagcggcgaatttacgaaggatttttttttttttttgttttggttgcgtgaggttgaggttaggggattcgggtttgttaggagggaagcgggttaa

SEQ ID NO: 10602 - DNA, 747 bp, Artificial Sequence
  chemically treated genomic DNA (Homo sapiens) CpG-island No: 10602
ttaacccgcttccctcctaacaaacccgaatcccctaacctcaacctcacgcaaccaaaacaaaaaaaaaaaaaaatccttcgtaaattcgccgctcacattcgacgataaaaaaccgatccgaaaatacttttataaacgaaacgctcaactcgcgcgactctaaaccaccgaaaaacaacgactactactaatcgaactacgccaacacctccttatccaacccgaaaacaaccccgcctcgctcaaaaccgcgtacgcgtacgcgactccaaaaacgaaacctactcgcgtcccgaatacctaaataccgaacgcgtccgtaataacgactaacgctaaaaaactacaaaatctaaaatattatcgaaataacaattaatccgaatttctcccgaaacccgcgaaaaaacgaataaaaaccccgcgaatccgaccccaacctcgaaaacgaaataaaaaacgaccctaaccgcaaaccccgcgctactaacgaatccaccgcgtcgtaaccgacaaccgcccttcttcctcgcaacgcgccgcgattcaccaacctaatcccttctacgaaaaacgataccgcttcccgacaccatattctacgctcaacaaatccacattcccccgaaactaccgaacatcctaaaacaattcaccaaaactaccatccgcacccaaccgaccgacgtactacgataatccgcgaaataaacgcccttaacccgaaaaactatccgatctaca

SEQ ID NO: 10603 - DNA, 747 bp, Artificial Sequence
  chemically treated genomic DNA (Homo sapiens) CpG-island No: 10603
ttaattcgttttttttttagtaggttcgagttttttagttttagttttacgtagttagagtaaggggaagagggagtttttcgtgagttcgtcgtttatattcggcggtgggaaatcgattcgaagatgtttttgtaggcgaaacgtttagttcgcgcggttttgaattatcggggagtagcggttgttgttagtcggattacgttagtatttttttgtttagttcgggagtagtttcgtttcgtttagggtcgcgtgcgcgtgcgcggttttaggggcggggtttgttcgcgtttcgggtgtttggatatcgagcgcgttcgtagtggcggttggcgttagggaattgtagggtttagggtgttgtcggagtggtagttggttcgaatttttttcgaagttcgcggaggagcgggtaagagtttcgcgaattcggttttaatttcgggaacgggatgggaggcggttttggtcgtaagtttcgcgttgttagcgggtttatcgcgtcgtagtcgatagtcgtttttttttttcgtagcgcgtcgcgatttattagtttggttttttttgcggagagcgatgtcgtttttcgatattatgttttgcgtttagtagatttatattttttcggagttgtcggatattttgaagtaatttattaaggttgttattcgtatttagtcggtcgacgtgttgcggtggttcgcggggtaagcgtttttggttcggggagttgttcggtttata

SEQ ID NO: 10604 - DNA, 747 bp, Artificial Sequence
  chemically treated genomic DNA (Homo sapiens) CpG-island No: 10604
tataaaccgaacaactccccgaaccaaaaacgcttaccccgcgaaccaccgcaacacgtcgaccgactaaatacgaataacaaccttaataaattacttcaaaatatccgacaactccgaaaaaatataaatctactaaacgcaaaacataatatcgaaaaacgacatcgctctccgcaaaaaaaaccaaactaataaatcgcgacgcgctacgaaaaaaaaaaacgactatcgactacgacgcgataaacccgctaacaacgcgaaacttacgaccaaaaccgcctcccatcccgttcccgaaattaaaaccgaattcgcgaaactcttacccgctcctccgcgaacttcgaaaaaaattcgaaccaactaccactccgacaacaccctaaaccctacaattccctaacgccaaccgccactacgaacgcgctcgatatccaaacacccgaaacgcgaacaaaccccgcccctaaaaccgcgcacgcgcacgcgaccctaaacgaaacgaaactactcccgaactaaacaaaaaaatactaacgtaatccgactaacaacaaccgctactccccgataattcaaaaccgcgcgaactaaacgtttcgcctacaaaaacatcttcgaatcgatttcccaccgccgaatataaacgacgaactcacgaaaaactccctcttccccttactctaactacgtaaaactaaaactaaaaaactcgaacctactaaaaaaaaaacgaattaa

SEQ ID NO: 10605 - DNA, 1157 bp, Artificial Sequence
  chemically treated genomic DNA (Homo sapiens) CpG-island No: 10605
cgggtttcgggtgggcggcggagtttttttcggttcggtttgttaggaggggcggggcgcgagggggcggaggcgagggttcgggcggggtcgatataggtgtttcgtattcggtcggggggcggtttcgaggagcggttcgtaggagttttataagttgtcggggtgcggggttgcgcgcggttcgttgtaaaaatagtgtttacgtgcgtgcgcgtttttcgttcgtcggttggtcggttagttcgttagtttcgtagggttatatcggttttatggcgttttcgttggtaagagttattcgtcgttcgtttgggcggggtcgcgtttcggtcgtagtagttaacggttcgcgcgtagtcgggttcggcgtcgcggtatttttatttttcgtttcgtgcgggcgagtttcgggcggggcgcggttacgtgttcgcgggcgtggggtttcgtggaggggtggagggcgaggggggtagggagttttttcgtgatttagggtttttgggtttaaaggcgtcgtagttttgcgggggcggtcggtggggttttcgagtcgtattgcggtttttaggcggtttcgagcgtttgtttagacgggagttgatcgaatataaaggagtatcggcgttcgtaacgttttttttttatattgtcgtcgtacgggagattagaagtcgttggcgttgaaagtttacgttttttgcgggtttttttagtattcggcgcgcggtgggggcgttcgggcgggacggggcggggttgttgacggcgtagatttcgtgttttgtggagagttttacgacggcggcggtcgcggtatttttaaggtggagggtttaagtttttcgtgcggttttttaattttgggtaggttacgtggttttatattttcgtttggcgtcggagagggagtttcgggggcggggttggttaggtagtgtggcgcgagggcggaagattggcggggtttcgtgttcgggagattcgtcgggttggcggtattgaggtgggttttggttatgggcgggagagggttaggtttgtaggtcgcggaggtggcgtaggcggggagcgattcgagtttattttgggttgtgttgttcggatttttagtttggcgagtgggtgtatgtggtttggcgttttggttattt

SEQ ID NO: 10606 - DNA, 1157 bp, Artificial Sequence
  chemically treated genomic DNA (Homo sapiens) CpG-island No: 10606
aaataaccaaaacgccaaaccacatacacccactcgccaaactaaaaatccgaacaacacaacccaaaataaactcgaatcgctccccgcctacgccacctccgcgacctacaaacctaaccctctcccgcccataaccaaaacccacctcaataccgccaacccgacgaatctcccgaacacgaaaccccgccaatcttccgccctcgcgccacactacctaaccaaccccgcccccgaaactccctctccgacgccaaacgaaaatataaaaccacgtaacctacccaaaattaaaaaaccgcacgaaaaacttaaaccctccaccttaaaaataccgcgaccgccgccgtcgtaaaactctccacaaaacacgaaatctacgccgtcaacaaccccgccccgtcccgcccgaacgcccccaccgcgcgccgaatactaaaaaaacccgcaaaaaacgtaaactttcaacgccaacgacttctaatctcccgtacgacgacaatataaaaaaaaaacgttacgaacgccgatactcctttatattcgatcaactcccgtctaaacaaacgctcgaaaccgcctaaaaaccgcaatacgactcgaaaaccccaccgaccgcccccgcaaaactacgacgcctttaaacccaaaaaccctaaatcacgaaaaaactccctacccccctcgccctccacccctccacgaaaccccacgcccgcgaacacgtaaccgcgccccgcccgaaactcgcccgcacgaaacgaaaaataaaaataccgcgacgccgaacccgactacgcgcgaaccgttaactactacgaccgaaacgcgaccccgcccaaacgaacgacgaataactcttaccaacgaaaacgccataaaaccgatataaccctacgaaactaacgaactaaccgaccaaccgacgaacgaaaaacgcgcacgcacgtaaacactatttttacaacgaaccgcgcgcaaccccgcaccccgacaacttataaaactcctacgaaccgctcctcgaaaccgccccccgaccgaatacgaaacacctatatcgaccccgcccgaaccctcgcctccgccccctcgcgccccgcccctcctaacaaaccgaaccgaaaaaaactccgccgcccacccgaaacccg

SEQ ID NO: 10607 - DNA, 1157 bp, Artificial Sequence
  chemically treated genomic DNA (Homo sapiens) CpG-island No: 10607
gaatgattagaacgttaggttatatgtatttattcgttaggttgagggttcgaatagtatagtttagagtgggttcgggtcgtttttcgtttacgttattttcgcggtttgtaagtttaattttttttcgtttatgattaggatttattttaatgtcgttagttcggcgggtttttcgggtacgaagtttcgttagtttttcgttttcgcgttatattatttggttagtttcgttttcgagatttttttttcggcgttaagcgaaggtgtgaagttacgtgatttgtttaggattgggaagtcgtacgaggggtttgagttttttattttaaaggtgtcgcgatcgtcgtcgtcgtggggttttttatagagtacggggtttacgtcgttagtagtttcgtttcgtttcgttcgggcgtttttatcgcgcgtcgggtgttaaagagattcgtagggggcgtgagtttttagcgttagcggtttttggtttttcgtgcgacggtagtgtgagaaagaaacgttacgggcgtcggtgtttttttatgttcggttagttttcgtttggatagacgttcgaggtcgtttggaggtcgtagtgcggttcggaggttttatcggtcgttttcgtagggttgcggcgtttttaagtttaaaggttttgagttacgaggaggttttttgtttttttcgttttttatttttttacgaggttttacgttcgcgggtacgtgatcgcgtttcgttcgggattcgttcgtacggggcgggggatgggggtatcgcggcgtcggattcggttgcgcgcggatcgttagttattgcggtcgggacgcggtttcgtttaggcgagcggcgggtggtttttattagcgggaacgttatggggtcggtgtggttttgcggggttgacgggttgatcggttagtcggcgggcgagagacgcgtacgtacgtgggtattatttttgtagcgggtcgcgcgtagtttcgtatttcggtagtttatgaagtttttacgagtcgtttttcggagtcgtttttcggtcggatgcggagtatttgtgtcggtttcgttcgggttttcgttttcgttttttcgcgtttcgttttttttagtaggtcgagtcgaggagggtttcgtcgtttattcggaattcg

SEQ ID NO: 10608 - DNA, 1157 bp, Artificial Sequence
  chemically treated genomic DNA (Homo sapiens) CpG-island No: 10608
cgaattccgaataaacgacgaaaccctcctcgactcgacctactaaaaaaaacgaaacgcgaaaaaacgaaaacgaaaacccgaacgaaaccgacacaaatactccgcatccgaccgaaaaacgactccgaaaaacgactcgtaaaaacttcataaactaccgaaatacgaaactacgcgcgacccgctacaaaaataatacccacgtacgtacgcgtctctcgcccgccgactaaccgatcaacccgtcaaccccgcaaaaccacaccgaccccataacgttcccgctaataaaaaccacccgccgctcgcctaaacgaaaccgcgtcccgaccgcaataactaacgatccgcgcgcaaccgaatccgacgccgcgatacccccatcccccgccccgtacgaacgaatcccgaacgaaacgcgatcacgtacccgcgaacgtaaaacctcgtaaaaaaataaaaaacgaaaaaaacaaaaaacctcctcgtaactcaaaacctttaaacttaaaaacgccgcaaccctacgaaaacgaccgataaaacctccgaaccgcactacgacctccaaacgacctcgaacgtctatccaaacgaaaactaaccgaacataaaaaaacaccgacgcccgtaacgtttctttctcacactaccgtcgcacgaaaaaccaaaaaccgctaacgctaaaaactcacgccccctacgaatctctttaacacccgacgcgcgataaaaacgcccgaacgaaacgaaacgaaactactaacgacgtaaaccccgtactctataaaaaaccccacgacgacgacgatcgcgacacctttaaaataaaaaactcaaacccctcgtacgacttcccaatcctaaacaaatcacgtaacttcacaccttcgcttaacgccgaaaaaaaaatctcgaaaacgaaactaaccaaataatataacgcgaaaacgaaaaactaacgaaacttcgtacccgaaaaacccgccgaactaacgacattaaaataaatcctaatcataaacgaaaaaaaattaaacttacaaaccgcgaaaataacgtaaacgaaaaacgacccgaacccactctaaactatactattcgaaccctcaacctaacgaataaatacatataacctaacgttctaatcattc

SEQ ID NO: 10609 - DNA, 594 bp, Artificial Sequence
  chemically treated genomic DNA (Homo sapiens) CpG-island No: 10609
gtcgaagtgtgtttcggggaggcgtttatagattcgtcggttttttcgtttaggaatttttattagaggagaacgcggaaaaagttttttacggtttagaggaggacgaggttaagggcgcggggtttgaggagacggtcgtcgcggtcgttttttttcgaaagttttatgttatggatttcgattatcggttgttgttgcgtaatattaaatttttgttgtagagtcgtagcgtcgcggtggtgatggcggtggcgtagttttatttttatttggcgtttaaggcggaagtgggcgttatcgttaaggcgttggtgcgtttgttgcgtagttataggtgcgtttcgtttttagtttcgttttttttttcgttttttgtttcgttttacgggttgttcggtttcgtttttttacgtttattagtcgtttttatttttgtttattcgttttatattgatcgtagttttgtttttcgtattggtttttttttcgtaacgatttgttttattttttttttttattcgttgatttttgttttaatcgaggggttcggggtgttttgattcgtttttttcgtagtgaggtgtagtacgt

SEQ ID NO: 10610 - DNA, 594 bp, Artificial Sequence
  chemically treated genomic DNA (Homo sapiens) CpG-island No: 10610
acgtactacacctcactacgaaaaaaacgaatcaaaacaccccgaacccctcgattaaaacaaaaatcaacgaataaaaaaaaaaaataaaacaaatcgttacgaaaaaaaaaccaatacgaaaaacaaaactacgatcaatataaaacgaataaacaaaaataaaaacgactaataaacgtaaaaaaacgaaaccgaacaacccgtaaaacgaaacaaaaaacgaaaaaaaaaacgaaactaaaaacgaaacgcacctataactacgcaacaaacgcaccaacgccttaacgataacgcccacttccgccttaaacgccaaataaaaataaaactacgccaccgccatcaccaccgcgacgctacgactctacaacaaaaatttaatattacgcaacaacaaccgataatcgaaatccataacataaaactttcgaaaaaaaacgaccgcgacgaccgtctcctcaaaccccgcgcccttaacctcgtcctcctctaaaccgtaaaaaactttttccgcgttctcctctaataaaaattcctaaacgaaaaaaccgacgaatctataaacgcctccccgaaacacacttcgac

SEQ ID NO: 10611 - DNA, 594 bp, Artificial Sequence
  chemically treated genomic DNA (Homo sapiens) CpG-island No: 10611
acgtattgtattttattgcggagaggacgggttagagtatttcgggtttttcggttggggtaagggttagcggatgaggggaaaaggtggggtaagtcgttgcggggagaggattagtgcggagggtaggattacggttagtgtggagcgggtgggtagaggtggaagcggttggtgggcgtgagggggcggagtcgggtagttcgtggggcggggtaggaggcgagggagggggcggggttgggggcggagcgtatttgtggttgcgtagtaggcgtattagcgttttggcgatgacgtttattttcgttttgggcgttaggtggaagtagagttgcgttatcgttattattatcgcggcgttgcggttttgtagtaggggtttggtgttgcgtagtagtagtcggtggtcggggtttatgatatagggttttcgggagggggcggtcgcggcggtcgtttttttagatttcgcgtttttggtttcgtttttttttgagtcgtagaaggtttttttcgcgtttttttttagtagggatttttggacggggagatcgacgggtttgtgggcgttttttcgggatatatttcggt

SEQ ID NO: 10612 - DNA, 594 bp, Artificial Sequence
  chemically treated genomic DNA (Homo sapiens) CpG-island No: 10612
accgaaatatatcccgaaaaaacgcccacaaacccgtcgatctccccgtccaaaaatccctactaaaaaaaaacgcgaaaaaaaccttctacgactcaaaaaaaaacgaaaccaaaaacgcgaaatctaaaaaaacgaccgccgcgaccgccccctcccgaaaaccctatatcataaaccccgaccaccgactactactacgcaacaccaaacccctactacaaaaccgcaacgccgcgataataataacgataacgcaactctacttccacctaacgcccaaaacgaaaataaacgtcatcgccaaaacgctaatacgcctactacgcaaccacaaatacgctccgcccccaaccccgccccctccctcgcctcctaccccgccccacgaactacccgactccgccccctcacgcccaccaaccgcttccacctctacccacccgctccacactaaccgtaatcctaccctccgcactaatcctctccccgcaacgacttaccccaccttttcccctcatccgctaacccttaccccaaccgaaaaacccgaaatactctaacccgtcctctccgcaataaaatacaatacgt

SEQ ID NO: 10613 - DNA, 513 bp, Artificial Sequence
  chemically treated genomic DNA (Homo sapiens) CpG-island No: 10613
  unsure (206)
tttttgttcgagcgtcggttttttcgtttcggttcggagtcggggttcgggggcgcggtcgttaggggaggcgtcgcggcggtggcggtttttgcggttcggagggcgggtcgagcgggagtcgttgtttgggtcgcgcgtcgtttttatttcgtttcgcgttgtcggcgtttgtagcggagggcgtagttagttcggttttcggnttggatttttttattgatataatttcggttcggtcgttttacgtagggatattttcgtttttcgtaggttgttttcgttcgtcgattcgttcgtttttttttcggtgttatttattaggagtatatattttagtcggcgtttttcgttttcgttcgtaaatatagcgttgtttacgtttttttcgggttttgtattcgtttatacgtacgttttgatatagatttcgtttttttatacgttttttttagttttttttttattttattttttagaagaattttagtatagttttcgtattttgtttgt

SEQ ID NO: 10614 - DNA, 513 bp, Artificial Sequence
  chemically treated genomic DNA (Homo sapiens) CpG-island No: 10614
  unsure (308)
acaaacaaaatacgaaaactatactaaaattcttctaaaaaataaaataaaaaaaaaactaaaaaaaacgtataaaaaaacgaaatctatatcaaaacgtacgtataaacgaatacaaaacccgaaaaaaacgtaaacaacgctatatttacgaacgaaaacgaaaaacgccgactaaaatatatactcctaataaataacaccgaaaaaaaaacgaacgaatcgacgaacgaaaacaacctacgaaaaacgaaaatatccctacgtaaaacgaccgaaccgaaattatatcaataaaaaaatccaanccgaaaaccgaactaactacgccctccgctacaaacgccgacaacgcgaaacgaaataaaaacgacgcgcgacccaaacaacgactcccgctcgacccgccctccgaaccgcaaaaaccgccaccgccgcgacgcctcccctaacgaccgcgcccccgaaccccgactccgaaccgaaacgaaaaaaccgacgctcgaacaaaaa

SEQ ID NO: 10615 - DNA, 513 bp, Artificial Sequence
  chemically treated genomic DNA (Homo sapiens) CpG-island No: 10615
  unsure (308)
gtaagtaaagtgcggaagttgtattgggatttttttagaaagtggggtgggaaaggagttagggagggcgtgtggagggacgagatttgtgttagaacgtgcgtgtgagcggatataaaattcgagagaggcgtgagtagcgttgtgtttgcgagcgggagcgaggggcgtcggttggggtgtgtgtttttggtgagtgatatcgaggggaaggcgggcgggtcggcgggcgggggtagtttgcgaggggcgggagtgtttttgcgtggggcggtcgagtcggagttgtgttagtgaaggaatttagntcgggggtcgagttggttgcgtttttcgttgtaagcgtcggtagcgcggggcgaggtggggacggcgcgcggtttaagtagcggttttcgttcggttcgtttttcgagtcgtaggggtcgttatcgtcgcggcgttttttttggcgatcgcgttttcgggtttcggtttcgggtcgggacggaggagtcggcgttcgaataaagg

SEQ ID NO: 10616 - DNA, 513 bp, Artificial Sequence
  chemically treated genomic DNA (Homo sapiens) CpG-island No: 10616
  unsure (206)
cctttattcgaacgccgactcctccgtcccgacccgaaaccgaaacccgaaaacgcgatcgccaaaaaaaacgccgcgacgataacgacccctacgactcgaaaaacgaaccgaacgaaaaccgctacttaaaccgcgcgccgtccccacctcgccccgcgctaccgacgcttacaacgaaaaacgcaaccaactcgacccccganctaaattccttcactaacacaactccgactcgaccgccccacgcaaaaacactcccgcccctcgcaaactacccccgcccgccgacccgcccgccttcccctcgatatcactcaccaaaaacacacaccccaaccgacgcccctcgctcccgctcgcaaacacaacgctactcacgcctctctcgaattttatatccgctcacacgcacgttctaacacaaatctcgtccctccacacgccctccctaactcctttcccaccccactttctaaaaaaatcccaatacaacttccgcactttacttac

SEQ ID NO: 10617 - DNA, 685 bp, Artificial Sequence
  chemically treated genomic DNA (Homo sapiens) CpG-island No: 10617
tatttcgtcggtcggtttaggcgttattatttatttttattttcgattttcgggttggttttgttttcgttttaacgggatcgggtagtcgggttaggcgcggtagggcgggtagcgttcgttaattttcgttcggtcgggggcgtagtttttattaatttttggcgtttcgtttcgcgggggcgtaggaaggggtaggaagttgacgtttcgttggaagcgatcgtatggcggggaatttcggtttttttcgagattggagtagtaggaagttagggagggggcgttttcgagttcgtatttatttttcgcgcgtcgtcgtcgtcgtcgttgtgtttcgggtttttcgcgtcgatttcgtttttatggtaggtttttattttatgttttcgagttcggggggtaagtgtgggcgcgttttatggggtcgttagtttttcgtttcgtcgcgttaggtcggtttagagcgcgcggttttcgcgtttttagcgtagtttcgcgtttaggggcgttcgagtaggtaggtagcgcggttggggtttcgcgggcgttcgcgttaggtttatggttttaggagttcgggcgtcgcgttcgtttttgtttcggtttttttttgtttttattaaaaaggaagaagaagtaagaaaaagagagagagagatgattaaatttttggaggcgggtt

SEQ ID NO: 10618 - DNA, 685 bp, Artificial Sequence
  chemically treated genomic DNA (Homo sapiens) CpG-island No: 10618
aacccgcctccaaaaatttaatcatctctctctctctttttcttacttcttcttcctttttaataaaaacaaaaaaaaaccgaaacaaaaacgaacgcgacgcccgaactcctaaaaccataaacctaacgcgaacgcccgcgaaaccccaaccgcgctacctacctactcgaacgcccctaaacgcgaaactacgctaaaaacgcgaaaaccgcgcgctctaaaccgacctaacgcgacgaaacgaaaaactaacgaccccataaaacgcgcccacacttaccccccgaactcgaaaacataaaataaaaacctaccataaaaacgaaatcgacgcgaaaaacccgaaacacaacgacgacgacgacgacgcgcgaaaaataaatacgaactcgaaaacgccccctccctaacttcctactactccaatctcgaaaaaaaccgaaattccccgccatacgatcgcttccaacgaaacgtcaacttcctaccccttcctacgcccccgcgaaacgaaacgccaaaaattaataaaaactacgcccccgaccgaacgaaaattaacgaacgctacccgccctaccgcgcctaacccgactacccgatcccgttaaaacgaaaacaaaaccaacccgaaaatcgaaaataaaaataaataataacgcctaaaccgaccgacgaaata

SEQ ID NO: 10619 - DNA, 685 bp, Artificial Sequence
  chemically treated genomic DNA (Homo sapiens) CpG-island No: 10619
agttcgtttttaaaagtttgattattttttttttttttttttttgttttttttttttttttggtggaagtagaaaaggatcgaggtaggggcgagcgcggcgttcggatttttgggattatgggtttggcgcgggcgttcgcggggttttagtcgcgttgtttgtttgttcgggcgtttttgggcgcggggttgcgttgggggcgcgggggtcgcgcgttttaagtcggtttggcgcggcggggcggggggttggcggttttatggggcgcgtttatatttgtttttcgggttcgggagtatgaagtaggggtttgttatgggagcgggatcggcgcggggggttcgaggtatagcggcggcggcggcggcgcgcggggggtgagtacgaattcggggacgttttttttttagttttttgttgttttaatttcggggagggtcggggtttttcgttatgcggtcgtttttagcggaacgttagttttttgtttttttttgcgttttcgcgaggcgggacgttaagggttaataggggttgcgttttcggtcgggcgagagttggcgaacgttgttcgttttgtcgcgtttggttcggttgttcgatttcgttggggcgggggtagagttagttcgggggtcgggggtgggggtgggtggtggcgtttggatcggtcggcggggtg

SEQ ID NO: 10620 - DNA, 685 bp, Artificial Sequence
  chemically treated genomic DNA (Homo sapiens) CpG-island No: 10620
caccccgccgaccgatccaaacgccaccacccacccccacccccgacccccgaactaactctacccccgccccaacgaaatcgaacaaccgaaccaaacgcgacaaaacgaacaacgttcgccaactctcgcccgaccgaaaacgcaacccctattaacccttaacgtcccgcctcgcgaaaacgcaaaaaaaaacaaaaaactaacgttccgctaaaaacgaccgcataacgaaaaaccccgaccctccccgaaattaaaacaacaaaaaactaaaaaaaaaacgtccccgaattcgtactcaccccccgcgcgccgccgccgccgccgctatacctcgaaccccccgcgccgatcccgctcccataacaaacccctacttcatactcccgaacccgaaaaacaaatataaacgcgccccataaaaccgccaaccccccgccccgccgcgccaaaccgacttaaaacgcgcgacccccgcgcccccaacgcaaccccgcgcccaaaaacgcccgaacaaacaaacaacgcgactaaaaccccgcgaacgcccgcgccaaacccataatcccaaaaatccgaacgccgcgctcgcccctacctcgatccttttctacttccaccaaaaaaaaaaaaaaaacaaaaaaaaaaaaaaaaaaaataatcaaacttttaaaaacgaact

SEQ ID NO: 10621 - DNA, 895 bp, Artificial Sequence
  chemically treated genomic DNA (Homo sapiens) CpG-island No: 10621
ttatttatcggtgtatatatatatttttatacgtatttattttttttttaaatttagatatacgtttatatacggttttattttggggatagttacgtattttttttaggtttatacgaaacgtatttttagatatttgggtttaggcgtacgttgatattttatattcgtagaagtatgtttacggatgtttatataggtataaatgtacgttattttggttatatcgtttttatatatgtatatatttcgggtggatatacgcgcgtatatttttatttgtatatagtttttcgagagtgtttatcgtatatgtgtatatacgtatttattttttacgcgtgtatttatttttttatacgcgtatatttttaggcgcgcgtatatataggtatataatatttcgtatcgttttaggagtttttaagtatttattgggtttttacgtgcgaggttggtcggtcggtttttttttcggcgtttaacggtatttgtatttatgggttttcgtagtcgtgggcgcgggggcggggggcgaggtttttttttttaaacggggcgcgggcgcgcggagcgtagcggtatcgggaggggtatgggcgcgcgggattgcgtcgtcgattcggttcgtttgcgttcgaatttcggtagttttgcgtttacgggtttcggcgcgggtttcgagagttgggggcggtttataggtgttggggcggcggcgttcgtcgggttttttgaagttttcgttgggggcggggagggggcgttgaaggcggttttttaaattttggttgtacgcgggttcggtcgagtaaggtgtttggttttaataaattttaggaaaagttttaagtcgagagaggggaggtaggggggttgggggagttgtatagtt

SEQ ID NO: 10622 - DNA, 895 bp, Artificial Sequence
  chemically treated genomic DNA (Homo sapiens) CpG-island No: 10622
aactatacaactcccccaacccccctacctcccctctctcgacttaaaacttttcctaaaatttattaaaaccaaacaccttactcgaccgaacccgcgtacaaccaaaatttaaaaaaccgccttcaacgccccctccccgcccccaacgaaaacttcaaaaaacccgacgaacgccgccgccccaacacctataaaccgcccccaactctcgaaacccgcgccgaaacccgtaaacgcaaaactaccgaaattcgaacgcaaacgaaccgaatcgacgacgcaatcccgcgcgcccatacccctcccgataccgctacgctccgcgcgcccgcgccccgtttaaaaaaaaaaacctcgccccccgcccccgcgcccacgactacgaaaacccataaatacaaataccgttaaacgccgaaaaaaaaaccgaccgaccaacctcgcacgtaaaaacccaataaatacttaaaaactcctaaaacgatacgaaatattatatacctatatatacgcgcgcctaaaaatatacgcgtataaaaaaataaatacacgcgtaaaaaataaatacgtatatacacatatacgataaacactctcgaaaaactatatacaaataaaaatatacgcgcgtatatccacccgaaatatatacatatataaaaacgatataaccaaaataacgtacatttatacctatataaacatccgtaaacatacttctacgaatataaaatatcaacgtacgcctaaacccaaatatctaaaaatacgtttcgtataaacctaaaaaaaatacgtaactatccccaaaataaaaccgtatataaacgtatatctaaatttaaaaaaaaaataaatacgtataaaaatatatatatacaccgataaataa

SEQ ID NO: 10623 - DNA, 895 bp, Artificial Sequence
  chemically treated genomic DNA (Homo sapiens) CpG-island No: 10623
agttatgtagtttttttaatttttttattttttttttttcggtttgggattttttttaaagtttgttgaaattagatattttgttcgatcgagttcgcgtgtagttagggtttaaaaggtcgtttttagcgtttttttttcgtttttagcggagattttaaaaggttcggcgggcgtcgtcgttttagtatttatgagtcgtttttagttttcggagttcgcgtcggagttcgtggacgtagagttgtcgaagttcgagcgtaggcggatcgggtcggcggcgtagtttcgcgcgtttatgtttttttcggtgtcgttgcgtttcgcgcgttcgcgtttcgtttagggaaggggatttcgtttttcgttttcgcgtttacggttgcggggatttatgaatataaatgtcgttaggcgtcggaggaaggatcgatcggttagtttcgtacgtagggatttagtaagtgtttgggggtttttggagcggtgcgaagtgttatatgtttgtgtgtgcgcgcgtttaaaggtgtgcgcgtatggggaggtgggtatacgcgtgaggagtgaatgcgtgtgtgtatatgtgcggtgggtattttcggagaattgtgtgtaagtgagggtgtgcgcgcgtgtgtttattcggggtgtgtatatgtgtgggggcgatatggttaggatagcgtgtatttgtgtttgtgtaagtattcgtgggtatgtttttgcgagtgtagagtattagcgtgcgtttgagtttagatatttgaggatgcgtttcgtgtgaatttaggaagggtgcgtggttgtttttagaatgggatcgtgtgtgagcgtgtgtttgagtttggggaaagggtggatacgtgtgggagtgtgtgtgtgtatcggtgaataa

SEQ ID NO: 10624 - DNA, 895 bp, Artificial Sequence
  chemically treated genomic DNA (Homo sapiens) CpG-island No: 10624
ttattcaccgatacacacacacactcccacacgtatccaccctttccccaaactcaaacacacgctcacacacgatcccattctaaaaacaaccacgcacccttcctaaattcacacgaaacgcatcctcaaatatctaaactcaaacgcacgctaatactctacactcgcaaaaacatacccacgaatacttacacaaacacaaatacacgctatcctaaccatatcgcccccacacatatacacaccccgaataaacacacgcgcgcacaccctcacttacacacaattctccgaaaatacccaccgcacatatacacacacgcattcactcctcacgcgtatacccacctccccatacgcgcacacctttaaacgcgcgcacacacaaacatataacacttcgcaccgctccaaaaacccccaaacacttactaaatccctacgtacgaaactaaccgatcgatccttcctccgacgcctaacgacatttatattcataaatccccgcaaccgtaaacgcgaaaacgaaaaacgaaatccccttccctaaacgaaacgcgaacgcgcgaaacgcaacgacaccgaaaaaaacataaacgcgcgaaactacgccgccgacccgatccgcctacgctcgaacttcgacaactctacgtccacgaactccgacgcgaactccgaaaactaaaaacgactcataaatactaaaacgacgacgcccgccgaaccttttaaaatctccgctaaaaacgaaaaaaaaacgctaaaaacgaccttttaaaccctaactacacgcgaactcgatcgaacaaaatatctaatttcaacaaactttaaaaaaaatcccaaaccgaaaaaaaaaaaataaaaaaattaaaaaaactacataact

SEQ ID NO: 10625 - DNA, 907 bp, Artificial Sequence
  chemically treated genomic DNA (Homo sapiens) CpG-island No: 10625
gagagatcggcgttgttagaatagttagtcgggggtgcgggggtgcggggtttcggcgagagatcggcgttgttagaatagttagtcgggggtgcggggttttagcgagagatcggcgttgttagaatagttagtcgggggtgcggggtttcggcgagagatcggcgttgttagaatagttcgtcgggggtgcggggttttagcgagagatcggcgttgttagaatagttagtcgggggtgcggggtttcggcgagagatcggcgttgttagaatagttagtcgggggtgcgggggtgcggggtttcggcgagagatcggcgttgttagaatagttagtcgggggtgcgggggtgcggggtttcggcgagagatcggcgttgttagaatagttagtcgggggtgcggggttttagcgagagatcggcgttgttagaatagttagtcgggggtgcggggtttcggcgagagatcggcgttgttagaatagttagtcgggggtgcggggtttcggcgagagatcggcgttgttagaatagttagtcgggggtgcggggttttagcgagagatcggcgttgttagaatagttagtcgggggtgcggggttttagtgagagatcggcgttgttagaatagttagtcgggggtgcggggtttcggcgagagatcggcgttgttagaatagttagtcgggggtgcggggtttcggcgagagatcggcgttgttagaatagttagtcgggggtgcggggtttcggcgagagatcggcgttgttagaatagttagtcgggggtgcggggttttagcgagagatcggcgttgttagaatagttagtcgggggtgcggggttttagtgagagattagtgttgttagaatagttagtttgagagtagatattttcgtt

SEQ ID NO: 10626 - DNA, 907 bp, Artificial Sequence
  chemically treated genomic DNA (Homo sapiens) CpG-island No: 10626
aacgaaaatatctactctcaaactaactattctaacaacactaatctctcactaaaaccccgcacccccgactaactattctaacaacgccgatctctcgctaaaaccccgcacccccgactaactattctaacaacgccgatctctcgccgaaaccccgcacccccgactaactattctaacaacgccgatctctcgccgaaaccccgcacccccgactaactattctaacaacgccgatctctcgccgaaaccccgcacccccgactaactattctaacaacgccgatctctcactaaaaccccgcacccccgactaactattctaacaacgccgatctctcgctaaaaccccgcacccccgactaactattctaacaacgccgatctctcgccgaaaccccgcacccccgactaactattctaacaacgccgatctctcgccgaaaccccgcacccccgactaactattctaacaacgccgatctctcgctaaaaccccgcacccccgactaactattctaacaacgccgatctctcgccgaaaccccgcacccccgcacccccgactaactattctaacaacgccgatctctcgccgaaaccccgcacccccgcacccccgactaactattctaacaacgccgatctctcgccgaaaccccgcacccccgactaactattctaacaacgccgatctctcgctaaaaccccgcacccccgacgaactattctaacaacgccgatctctcgccgaaaccccgcacccccgactaactattctaacaacgccgatctctcgctaaaaccccgcacccccgactaactattctaacaacgccgatctctcgccgaaaccccgcacccccgcacccccgactaactattctaacaacgccgatctctc

SEQ ID NO: 10627 - DNA, 907 bp, Artificial Sequence
  chemically treated genomic DNA (Homo sapiens) CpG-island No: 10627
aacgggggtgtttgtttttagattgattgttttaataatattggttttttattggagtttcgtattttcgattgattgttttaatagcgtcggtttttcgttggagtttcgtattttcgattgattgttttaatagcgtcggtttttcgtcggagtttcgtattttcgattgattgttttaatagcgtcggtttttcgtcggagtttcgtattttcgattgattgttttaataacgtcggtttttcgtcggagtttcgtattttcgattgattgttttaatagcgtcggttttttattggagtttcgtattttcgattgattgttttaatagcgtcggtttttcgttggagtttcgtattttcgattgattgttttaataacgtcggtttttcgtcggagtttcgtattttcgattgattgttttaataacgtcggtttttcgtcggagtttcgtattttcgattgattgttttaataacgtcggtttttcgttggagtttcgtattttcgattgattgttttaatagcgtcggtttttcgtcggagtttcgtattttcgtattttcgattgattgttttaatagcgtcggtttttcgtcggagtttcgtattttcgtattttcgattgattgttttaataacgtcggtttttcgtcggagtttcgtattttcgattgattgttttaataacgtcggtttttcgttggagtttcgtattttcgacggattgttttaatagcgtcggtttttcgtcggagtttcgtattttcgattgattgttttaataacgtcggtttttcgttggagtttcgtattttcgattgattgttttaatagcgtcggtttttcgtcggagtttcgtattttcgtattttcgattgattgttttaatagcgtcggtttttt

SEQ ID NO: 10628 - DNA, 907 bp, Artificial Sequence
  chemically treated genomic DNA (Homo sapiens) CpG-island No: 10628
aaaaaaccgacgctattaaaacaatcaatcgaaaatacgaaaatacgaaactccgacgaaaaaccgacgctattaaaacaatcaatcgaaaatacgaaactccaacgaaaaaccgacgttattaaaacaatcaatcgaaaatacgaaactccgacgaaaaaccgacgctattaaaacaatccgtcgaaaatacgaaactccaacgaaaaaccgacgttattaaaacaatcaatcgaaaatacgaaactccgacgaaaaaccgacgttattaaaacaatcaatcgaaaatacgaaaatacgaaactccgacgaaaaaccgacgctattaaaacaatcaatcgaaaatacgaaaatacgaaactccgacgaaaaaccgacgctattaaaacaatcaatcgaaaatacgaaactccaacgaaaaaccgacgttattaaaacaatcaatcgaaaatacgaaactccgacgaaaaaccgacgttattaaaacaatcaatcgaaaatacgaaactccgacgaaaaaccgacgttattaaaacaatcaatcgaaaatacgaaactccaacgaaaaaccgacgctattaaaacaatcaatcgaaaatacgaaactccaataaaaaaccgacgctattaaaacaatcaatcgaaaatacgaaactccgacgaaaaaccgacgttattaaaacaatcaatcgaaaatacgaaactccgacgaaaaaccgacgctattaaaacaatcaatcgaaaatacgaaactccgacgaaaaaccgacgctattaaaacaatcaatcgaaaatacgaaactccaacgaaaaaccgacgctattaaaacaatcaatcgaaaatacgaaactccaataaaaaaccaatattattaaaacaatcaatctaaaaacaaacacccccgtt

SEQ ID NO: 10629 - DNA, 551 bp, Artificial Sequence
  chemically treated genomic DNA (Homo sapiens) CpG-island No: 10629
tcgagtgttggcggggaggggatgggagtagcgggtacgttcgttcgtgtttttttattttattatttcggtacgcgcgcgggtagcgttcgtagggggcgcggagggcgtataggtgggtttcgtcgggttttgttttttgtttttttttgttattcgcggaaggttatcgcgttttttttaacgcgtttttcgttcgtttttttttttttcgtgatattttatataataatttgagttaattaaaacggaagcgacgcgcgtagtcgggagtagatgttcgcgtttcgagttagcggtttttaaattaggcgtcggggcgcgcggttgtcggcgggggaagggttcgagcgtcgatttaggtcgttttttttcggcggaggcgtcgttgttgtcggtttttattaggaagtcgcgagcgttataaattgcgttagttttttcgaatatattttatggtttttttttagttagggagtcgttgttttcgcggcggggtcgcggttaggattggaaggcgtttttttggggaagagaaagtttttcggggt

SEQ ID NO: 10630 - DNA, 551 bp, Artificial Sequence
  chemically treated genomic DNA (Homo sapiens) CpG-island No: 10630
accccgaaaaactttctcttccccaaaaaaacgccttccaatcctaaccgcgaccccgccgcgaaaacaacgactccctaactaaaaaaaaaccataaaatatattcgaaaaaactaacgcaatttataacgctcgcgacttcctaataaaaaccgacaacaacgacgcctccgccgaaaaaaaacgacctaaatcgacgctcgaacccttcccccgccgacaaccgcgcgccccgacgcctaatttaaaaaccgctaactcgaaacgcgaacatctactcccgactacgcgcgtcgcttccgttttaattaactcaaattattatataaaatatcacgaaaaaaaaaaaaacgaacgaaaaacgcgttaaaaaaaacgcgataaccttccgcgaataacaaaaaaaaacaaaaaacaaaacccgacgaaacccacctatacgccctccgcgccccctacgaacgctacccgcgcgcgtaccgaaataataaaataaaaaaacacgaacgaacgtacccgctactcccatcccctccccgccaacactcga

SEQ ID NO: 10631 - DNA, 551 bp, Artificial Sequence
  chemically treated genomic DNA (Homo sapiens) CpG-island No: 10631
gtttcgaggaatttttttttttttagaggggcgttttttagttttggtcgcggtttcgtcgcgggagtagcggttttttggttggagggagattatgaaatgtgttcgaagaagttgacgtagtttgtgacgttcgcggttttttgatggggatcggtagtagcggcgttttcgtcgaggagggacgatttgagtcggcgttcgggtttttttttcgtcggtagtcgcgcgtttcggcgtttagtttgggggtcgttggttcggggcgcgagtatttgttttcggttgcgcgcgtcgttttcgttttgattagtttaggttattatataagatgttacggagaggaaaggggcgagcgagaggcgcgttggggagggcgcggtggtttttcgcgagtggtagggaggggtaggaggtaggattcggcgggatttatttgtacgtttttcgcgttttttgcgggcgttgttcgcgcgcgtgtcggggtggtggggtgggggggtacggacggacgtgttcgttgtttttatttttttttcgttaatattcgg

SEQ ID NO: 10632 - DNA, 551 bp, Artificial Sequence
  chemically treated genomic DNA (Homo sapiens) CpG-island No: 10632
ccgaatattaacgaaaaaaaaataaaaacaacgaacacgtccgtccgtacccccccaccccaccaccccgacacgcgcgcgaacaacgcccgcaaaaaacgcgaaaaacgtacaaataaatcccgccgaatcctacctcctacccctccctaccactcgcgaaaaaccaccgcgccctccccaacgcgcctctcgctcgcccctttcctctccgtaacatcttatataataacctaaactaatcaaaacgaaaacgacgcgcgcaaccgaaaacaaatactcgcgccccgaaccaacgacccccaaactaaacgccgaaacgcgcgactaccgacgaaaaaaaaacccgaacgccgactcaaatcgtccctcctcgacgaaaacgccgctactaccgatccccatcaaaaaaccgcgaacgtcacaaactacgtcaacttcttcgaacacatttcataatctccctccaaccaaaaaaccgctactcccgcgacgaaaccgcgaccaaaactaaaaaacgcccctctaaaaaaaaaaaaattcctcgaaac

SEQ ID NO: 10633 - DNA, 847 bp, Artificial Sequence
  chemically treated genomic DNA (Homo sapiens) CpG-island No: 10633
tgttcgttcggcgttcggtttcgtcgtgtttttagttttttttcgcgcgtcgttagttcggtcgcgtcgtttatcggttcgtatcgaggttaggttaggtaatttgtgatttcggggcgttaggcggttttttttcgttcgtcgggttcgtttggttttcggggtttttttttcggtttcgcggaaaatagttacgttagaaatttttttgggtcgcgtcgggcggggaagtcgtttgggttttcgcgtatcgtttttattttgttttcgagaggttacgattcgggcgggtcgcgcggggcgcgtggtgcgcgagcgcgcgcgcgtggggcggtaggtgagggagttcgcgtcggcgggggcggggcggggtagcgggggtgcgagcggcgcggggcgggggttgggtcggttcggcgggcgggcgcgaggagagtagagttcgcggcggcggcggcggcgttggcggcggcgggcgcggggcgagcgcgtcgagggggcggaggagttatcgtgggtttgtttacgtattgttgttcggttcggggtatagttcgtattttttgattggatataaattggggtatagtttttcgtcgtcgttcgttaggttttttcgagtcgtcgtcgcgtagttttcggagcgttttgtcgggtacggtttacggcggtgtttaggtttggaggggacgagtcgcggcggttgtttcgggcgggcgtgaagttaagttttcgttcggggttcgtagttttttatttgtagtggttcgattttggtaaggagaaattcgaaattttttaggtcggagatttcgaatcgtatagtttttgagggggtatttttttt

SEQ ID NO: 10634 - DNA, 847 bp, Artificial Sequence
  chemically treated genomic DNA (Homo sapiens) CpG-island No: 10634
aaaaaaaataccccctcaaaaactatacgattcgaaatctccgacctaaaaaatttcgaatttctccttaccaaaatcgaaccactacaaataaaaaactacgaaccccgaacgaaaacttaacttcacgcccgcccgaaacaaccgccgcgactcgtcccctccaaacctaaacaccgccgtaaaccgtacccgacaaaacgctccgaaaactacgcgacgacgactcgaaaaaacctaacgaacgacgacgaaaaactataccccaatttatatccaatcaaaaaatacgaactataccccgaaccgaacaacaatacgtaaacaaacccacgataactcctccgccccctcgacgcgctcgccccgcgcccgccgccgccaacgccgccgccgccgccgcgaactctactctcctcgcgcccgcccgccgaaccgacccaacccccgccccgcgccgctcgcacccccgctaccccgccccgcccccgccgacgcgaactccctcacctaccgccccacgcgcgcgcgctcgcgcaccacgcgccccgcgcgacccgcccgaatcgtaacctctcgaaaacaaaataaaaacgatacgcgaaaacccaaacgacttccccgcccgacgcgacccaaaaaaatttctaacgtaactattttccgcgaaaccgaaaaaaaaaccccgaaaaccaaacgaacccgacgaacgaaaaaaaaccgcctaacgccccgaaatcacaaattacctaacctaacctcgatacgaaccgataaacgacgcgaccgaactaacgacgcgcgaaaaaaaactaaaaacacgacgaaaccgaacgccgaacgaaca

SEQ ID NO: 10635 - DNA, 847 bp, Artificial Sequence
  chemically treated genomic DNA (Homo sapiens) CpG-island No: 10635
ggagaaggtgtttttttagaggttgtacgattcgaagttttcggtttgagaagtttcgaatttttttttgttaaggtcgggttattataggtgggagattgcgagtttcgagcgaaagtttggttttacgttcgttcggggtagtcgtcgcggttcgttttttttaggtttgggtatcgtcgtgggtcgtgttcggtaggacgtttcgggagttgcgcggcggcggttcgaggaggtttggcgggcggcggcgagaggttgtgttttagtttgtgtttaattagggagtgcgggttgtgtttcgagtcgggtagtaatgcgtaaataaatttacggtaattttttcgttttttcggcgcgttcgtttcgcgttcgtcgtcgttagcgtcgtcgtcgtcgtcgcgggttttgtttttttcgcgttcgttcgtcgggtcggtttagttttcgtttcgcgtcgttcgtattttcgttgtttcgtttcgttttcgtcggcgcgggtttttttatttatcgttttacgcgcgcgcgttcgcgtattacgcgtttcgcgcggttcgttcggatcgtggtttttcgagagtaaggtaagggcgatgcgcggggatttaggcggttttttcgttcgacgcggtttagggaagtttttggcgtggttgtttttcgcggggtcgggggggaggtttcgggagttaggcgagttcggcgggcgggagggggtcgtttggcgtttcggggttataagttgtttaatttgatttcggtgcgggtcggtgggcggcgcggtcgggttggcggcgcgcggaaaggggttggaggtacggcggggtcgggcgtcgggcgggta

SEQ ID NO: 10636 - DNA, 847 bp, Artificial Sequence
  chemically treated genomic DNA (Homo sapiens) CpG-island No: 10636
tacccgcccgacgcccgaccccgccgtacctccaacccctttccgcgcgccgccaacccgaccgcgccgcccaccgacccgcaccgaaatcaaattaaacaacttataaccccgaaacgccaaacgaccccctcccgcccgccgaactcgcctaactcccgaaacctcccccccgaccccgcgaaaaacaaccacgccaaaaacttccctaaaccgcgtcgaacgaaaaaaccgcctaaatccccgcgcatcgcccttaccttactctcgaaaaaccacgatccgaacgaaccgcgcgaaacgcgtaatacgcgaacgcgcgcgcgtaaaacgataaataaaaaaacccgcgccgacgaaaacgaaacgaaacaacgaaaatacgaacgacgcgaaacgaaaactaaaccgacccgacgaacgaacgcgaaaaaaacaaaacccgcgacgacgacgacgacgctaacgacgacgaacgcgaaacgaacgcgccgaaaaaacgaaaaaattaccgtaaatttatttacgcattactacccgactcgaaacacaacccgcactccctaattaaacacaaactaaaacacaacctctcgccgccgcccgccaaacctcctcgaaccgccgccgcgcaactcccgaaacgtcctaccgaacacgacccacgacgatacccaaacctaaaaaaaacgaaccgcgacgactaccccgaacgaacgtaaaaccaaactttcgctcgaaactcgcaatctcccacctataataacccgaccttaacaaaaaaaaattcgaaacttctcaaaccgaaaacttcgaatcgtacaacctctaaaaaaacaccttctcc

SEQ ID NO: 10637 - DNA, 794 bp, Artificial Sequence
  chemically treated genomic DNA (Homo sapiens) CpG-island No: 10637
gagttcgcgcgtaagagatgaaatggtagtattttcgcgagcgtatattagagaaattcgtcgagatttaaagcgagttcgcgcgagatgggggtgggagcgttcgcgggggtcgttttttgcgtagtcgtagcggcggcgttaattatcgggcgtattacgttttttcgcgacggtatagttgtacgttcgtgacgtcggcggttgtcgtggagagattcgttcggtttcgatcgagagttggcgttaggagtcgtagggttatagcgtgtttttgaagttgttttcgtcgttattatgagcggtcgaagtcggggtcgaaagttttttcgcgttaaaaatcggggtaaaggtcgcgttaaagttcgagttcgttttgtttcggacgacgtttcgcgcgattcggattttttatagtattagagtttcggggaagatatttaggcggtataggtgtaggttggcgcggggtggggtggtttggaagtcgttgcgttcgcgtagttttttcggttcggggaggaggtcgtttgtcggttttttttggattgtggtttcgcgttgcgggttcgagttgcgggggattacgggtaggtcgcggttaggttcggttcggggaaggtcgtatttttttcggagcgtttggtcgtagatagtgttttcgtgggaatagcgggaatcgtgggaaggtcgaaaaatgtttttcgcgttggaaatcggcgtggttttgtcgggaagaaggttttagaaatttgtagtatcgcggggagggggttttaggttatagttggtgg

SEQ ID NO: 10638 - DNA, 794 bp, Artificial Sequence
  chemically treated genomic DNA (Homo sapiens) CpG-island No: 10638
ccaccaactataacctaaaaccccctccccgcgatactacaaatttctaaaaccttcttcccgacaaaaccacgccgatttccaacgcgaaaaacatttttcgaccttcccacgattcccgctattcccacgaaaacactatctacgaccaaacgctccgaaaaaaatacgaccttccccgaaccgaacctaaccgcgacctacccgtaatcccccgcaactcgaacccgcaacgcgaaaccacaatccaaaaaaaaccgacaaacgacctcctccccgaaccgaaaaaactacgcgaacgcaacgacttccaaaccaccccaccccgcgccaacctacacctataccgcctaaatatcttccccgaaactctaatactataaaaaatccgaatcgcgcgaaacgtcgtccgaaacaaaacgaactcgaactttaacgcgacctttaccccgatttttaacgcgaaaaaactttcgaccccgacttcgaccgctcataataacgacgaaaacaacttcaaaaacacgctataaccctacgactcctaacgccaactctcgatcgaaaccgaacgaatctctccacgacaaccgccgacgtcacgaacgtacaactataccgtcgcgaaaaaacgtaatacgcccgataattaacgccgccgctacgactacgcaaaaaacgacccccgcgaacgctcccacccccatctcgcgcgaactcgctttaaatctcgacgaatttctctaatatacgctcgcgaaaatactaccatttcatctcttacgcgcgaactc

SEQ ID NO: 10639 - DNA, 794 bp, Artificial Sequence
  chemically treated genomic DNA (Homo sapiens) CpG-island No: 10639
ttattagttatgatttgaggtttttttttcgcggtgttataggtttttggggtttttttttcggtagggttacgtcggtttttaacgcggggggtatttttcggtttttttacggttttcgttgtttttacgaagatattgtttgcggttaggcgtttcgagagagatgcggtttttttcgggtcgggtttggtcgcggtttgttcgtggtttttcgtagttcgggttcgtagcgcgaggttatagtttagggggagtcggtaggcggtttttttttcgagtcggaggagttgcgcggacgtagcggtttttaggttattttatttcgcgttagtttgtatttgtgtcgtttgggtgtttttttcgagattttggtattgtgaagggttcgggtcgcgcggggcgtcgttcggagtagggcggattcgggttttggcgcggtttttgtttcggtttttggcgcgggaggattttcgatttcgatttcggtcgtttatggtggcggcggaggtagttttaaagatacgttgtgattttgcggtttttgacgttagttttcggtcgggatcgagcgggtttttttacggtaatcgtcgacgttacgaacgtataattgtatcgtcgcgagaggacgtgatgcgttcggtgattggcgtcgtcgttgcggttgcgtaggagacgattttcgcgggcgtttttatttttatttcgcgcggattcgttttaggtttcggcgagtttttttgatatgcgttcgcgggggtgttgttattttattttttgcgcgcgggttt

SEQ ID NO: 10640 - DNA, 794 bp, Artificial Sequence
  chemically treated genomic DNA (Homo sapiens) CpG-island No: 10640
aaacccgcgcgcaaaaaataaaataacaacacccccgcgaacgcatatcaaaaaaactcgccgaaacctaaaacgaatccgcgcgaaataaaaataaaaacgcccgcgaaaatcgtctcctacgcaaccgcaacgacgacgccaatcaccgaacgcatcacgtcctctcgcgacgatacaattatacgttcgtaacgtcgacgattaccgtaaaaaaacccgctcgatcccgaccgaaaactaacgtcaaaaaccgcaaaatcacaacgtatctttaaaactacctccgccgccaccataaacgaccgaaatcgaaatcgaaaatcctcccgcgccaaaaaccgaaacaaaaaccgcgccaaaacccgaatccgccctactccgaacgacgccccgcgcgacccgaacccttcacaataccaaaatctcgaaaaaaacacccaaacgacacaaatacaaactaacgcgaaataaaataacctaaaaaccgctacgtccgcgcaactcctccgactcgaaaaaaaaaccgcctaccgactccccctaaactataacctcgcgctacgaacccgaactacgaaaaaccacgaacaaaccgcgaccaaacccgacccgaaaaaaaccgcatctctctcgaaacgcctaaccgcaaacaatatcttcgtaaaaacaacgaaaaccgtaaaaaaaccgaaaaataccccccgcgttaaaaaccgacgtaaccctaccgaaaaaaaaaccccaaaaacctataacaccgcgaaaaaaaaacctcaaatcataactaataa

SEQ ID NO: 10641 - DNA, 813 bp, Artificial Sequence
  chemically treated genomic DNA (Homo sapiens) CpG-island No: 10641
  unsure (669)
cgcgcgtatgcgtgtgtgtgtgtgtgtgtgtgtgtgtgtgtgtgtgtgtgtgtgcgcgcgcgttggaagggtgtaaggtgtgcgggtcgggggagagtgcgtgtttgggtttagggttgtcgtttgcgtgtgagggtgcgagggtgtggtcgtgcgggggattgtgtagtgttttggcgtgtggggtgtgagtgtgagatttgggcggtcgcggatagcggtcgtttcggagggggaggcgttagttttgcgagattcgcgggcgtgtcggggttcgggcgtttttagtcgggaggcgtaggaggcgcggagttaatttagtcgttttgtcgtcgttcgcgcgggtcgttcgttttttcggggttttcgggtttcgggttcgcggtttcggggggcgggcggggattttcggggttcgtcggtcgttcggggggtcgaggacgtcgtttgtcgggcgtttagtagcggtttcgggttttcgcgcggcgcgcgcgttttcggaagttcggtttggggcgtattggggtcggggtagtggtcgggttcgggagttttcgtcggtcgcggagttggtgggtagcgtcgtgtggcgcgtggagcgcgcgggggtcgggggttggcgttgggagcgcgtcgtcggcgtggattgtagcgtttcggaatcgcgtntgtttttggttgttttgttttagttatagcgatcgtcgcgcgttcgggtcgcgtcgggttagggtgagagtcgtagggtcggggtcggggtcggggtaggttttgtcggggtttgagtgggattgggttattaattttttgcgg

SEQ ID NO: 10642 - DNA, 813 bp, Artificial Sequence
  chemically treated genomic DNA (Homo sapiens) CpG-island No: 10642
  unsure (145)
ccgcaaaaaattaataacccaatcccactcaaaccccgacaaaacctaccccgaccccgaccccgaccctacgactctcaccctaacccgacgcgacccgaacgcgcgacgatcgctataactaaaacaaaacaaccaaaaacanacgcgattccgaaacgctacaatccacgccgacgacgcgctcccaacgccaacccccgacccccgcgcgctccacgcgccacacgacgctacccaccaactccgcgaccgacgaaaactcccgaacccgaccactaccccgaccccaatacgccccaaaccgaacttccgaaaacgcgcgcgccgcgcgaaaacccgaaaccgctactaaacgcccgacaaacgacgtcctcgaccccccgaacgaccgacgaaccccgaaaatccccgcccgccccccgaaaccgcgaacccgaaacccgaaaaccccgaaaaaacgaacgacccgcgcgaacgacgacaaaacgactaaattaactccgcgcctcctacgcctcccgactaaaaacgcccgaaccccgacacgcccgcgaatctcgcaaaactaacgcctccccctccgaaacgaccgctatccgcgaccgcccaaatctcacactcacaccccacacgccaaaacactacacaatcccccgcacgaccacaccctcgcaccctcacacgcaaacgacaaccctaaacccaaacacgcactctcccccgacccgcacaccttacacccttccaacgcgcgcgcacacacacacacacacacacacacacacacacacacacacacgcatacgcgcg

SEQ ID NO: 10643 - DNA, 813 bp, Artificial Sequence
  chemically treated genomic DNA (Homo sapiens) CpG-island No: 10643
  unsure (145)
tcgtagggagttggtgatttagttttatttagatttcgataaggtttgtttcggtttcggtttcggttttgcggtttttattttggttcggcgcggttcgggcgcgcggcggtcgttgtggttgaggtagggtagttagaggtangcgcggtttcggggcgttgtagtttacgtcgacggcgcgtttttagcgttagttttcggttttcgcgcgttttacgcgttatacggcgttgtttattagtttcgcggtcggcgggggttttcgggttcggttattgtttcggttttagtacgttttaggtcgggttttcggagacgcgcgcgtcgcgcgggggttcggggtcgttgttaggcgttcggtagacggcgttttcgatttttcgggcggtcggcgggtttcgggggttttcgttcgtttttcggagtcgcgggttcggggttcgggggtttcgaagggacggacggttcgcgcggacggcggtaggacggttggattggtttcgcgttttttgcgtttttcggttgaaggcgttcgagtttcgatacgttcgcgagtttcgtagggttgacgttttttttttcggggcggtcgttgttcgcggtcgtttagattttatatttatattttatacgttagggtattatatagtttttcgtacgattatattttcgtatttttatacgtagacggtagttttggatttagatacgtattttttttcggttcgtatattttgtatttttttagcgcgcgcgtatatatatatatatatatatatatatatatatatatatatacgtatacgcgcg

SEQ ID NO: 10644 - DNA, 813 bp, Artificial Sequence
  chemically treated genomic DNA (Homo sapiens) CpG-island No: 10644
  unsure (669)
cgcgcgtatacgtatatatatatatatatatatatatatatatatatatatatacgcgcgcgctaaaaaaatacaaaatatacgaaccgaaaaaaaatacgtatctaaatccaaaactaccgtctacgtataaaaatacgaaaatataatcgtacgaaaaactatataataccctaacgtataaaatataaatataaaatctaaacgaccgcgaacaacgaccgccccgaaaaaaaaaacgtcaaccctacgaaactcgcgaacgtatcgaaactcgaacgccttcaaccgaaaaacgcaaaaaacgcgaaaccaatccaaccgtcctaccgccgtccgcgcgaaccgtccgtcccttcgaaacccccgaaccccgaacccgcgactccgaaaaacgaacgaaaacccccgaaacccgccgaccgcccgaaaaatcgaaaacgccgtctaccgaacgcctaacaacgaccccgaacccccgcgcgacgcgcgcgtctccgaaaacccgacctaaaacgtactaaaaccgaaacaataaccgaacccgaaaacccccgccgaccgcgaaactaataaacaacgccgtataacgcgtaaaacgcgcgaaaaccgaaaactaacgctaaaaacgcgccgtcgacgtaaactacaacgccccgaaaccgcgcntacctctaactaccctacctcaaccacaacgaccgccgcgcgcccgaaccgcgccgaaccaaaataaaaaccgcaaaaccgaaaccgaaaccgaaacaaaccttatcgaaatctaaataaaactaaatcaccaactccctacga

SEQ ID NO: 10645 - DNA, 509 bp, Artificial Sequence
  chemically treated genomic DNA (Homo sapiens) CpG-island No: 10645
  unsure (392, 431, 459, 467, 482, 508)
cggcgttcggcgcgtttatttcgtcgggttataacgttcgtagtttttttttttttttcggtcgcgtatttacgttcggcgttcgtttatttgttttatgttgggttttgttatgtcgttttcgtcgcgtcggtttcggggggcgtagggggaggcggtttttttatgcgttttgttcgggtagttgtattcggcgatcgttaagcgtaagtagcggttggtgttagcgttcgagtttttttttcgtatcgtttcgtttcgtcggttttattttttattttatttttattattttttatttcgttcggttcgtggtagtatcgcgtatcggcgagtatacgcgtttataggtaatcgtataatcgtacgtacgtacgtgggggtatatatanttcgaatatatatataacgcgtattcgattttcgtatantttttggttagttcgtttcggtattttnttgttttngttcgttttgggggncgttgttaggggagaggagatttttng

SEQ ID NO: 10646 - DNA, 509 bp, Artificial Sequence
  chemically treated genomic DNA (Homo sapiens) CpG-island No: 10646
  unsure (2, 28, 43, 51, 79, 118)
cnaaaaatctcctctcccctaacaacgncccccaaaacgaacnaaaacaanaaaataccgaaacgaactaaccaaaaantatacgaaaatcgaatacgcgttatatatatattcgaantatatatacccccacgtacgtacgtacgattatacgattacctataaacgcgtatactcgccgatacgcgatactaccacgaaccgaacgaaataaaaaataataaaaataaaataaaaaataaaaccgacgaaacgaaacgatacgaaaaaaaaactcgaacgctaacaccaaccgctacttacgcttaacgatcgccgaatacaactacccgaacaaaacgcataaaaaaaccgcctccccctacgccccccgaaaccgacgcgacgaaaacgacataacaaaacccaacataaaacaaataaacgaacgccgaacgtaaatacgcgaccgaaaaaaaaaaaaaaactacgaacgttataacccgacgaaataaacgcgccgaacgccg

SEQ ID NO: 10647 - DNA, 509 bp, Artificial Sequence
  chemically treated genomic DNA (Homo sapiens) CpG-island No: 10647
  unsure (2, 28, 43, 51, 79, 118)
tnaggggtttttttttttttagtagcgntttttaggacgggtnagaatagnggggtgtcggagcgggttagttagggantgtgcgagggtcgggtgcgcgttgtgtgtgtgttcgagntgtgtgtgtttttacgtgcgtgcgtgcgattgtgcggttgtttgtgagcgcgtgtgttcgtcggtgcgcggtgttgttacgggtcgggcggggtgaagggtggtgggggtggaatggggggtggggtcggcggggcggggcggtgcggggagggggttcgagcgttgatattagtcgttatttgcgtttggcggtcgtcgggtgtagttgttcggatagggcgtatggaggggtcgtttttttttgcgtttttcggggtcggcgcggcgaggacggtatagtagggtttagtatggagtaggtgagcgggcgtcgggcgtgggtgcgcggtcgagaggggagagagagttgcgggcgttgtgattcggcgaggtgggcgcgtcgagcgtcg

SEQ ID NO: 10648 - DNA, 509 bp, Artificial Sequence
  chemically treated genomic DNA (Homo sapiens) CpG-island No: 10648
  unsure (392, 431, 459, 467, 482, 508)
cgacgctcgacgcgcccacctcgccgaatcacaacgcccgcaactctctctcccctctcgaccgcgcacccacgcccgacgcccgctcacctactccatactaaaccctactataccgtcctcgccgcgccgaccccgaaaaacgcaaaaaaaaacgacccctccatacgccctatccgaacaactacacccgacgaccgccaaacgcaaataacgactaatatcaacgctcgaaccccctccccgcaccgccccgccccgccgaccccaccccccattccacccccaccacccttcaccccgcccgacccgtaacaacaccgcgcaccgacgaacacacgcgctcacaaacaaccgcacaatcgcacgcacgcacgtaaaaacacacacanctcgaacacacacacaacgcgcacccgaccctcgcacantccctaactaacccgctccgacaccccnctattctnacccgtcctaaaaancgctactaaaaaaaaaaaaacccctna

SEQ ID NO: 10649 - DNA, 513 bp, Artificial Sequence
  chemically treated genomic DNA (Homo sapiens) CpG-island No: 10649
  unsure (342, 432)
tgttcgcggtcggtcgttttttcggcgtcgtcgggggattgaggcgttcgggggtttcgggggcgacggcgttaggtagcggtttttgcggtcgtttttgagttttcggcgttgtggttttcgttttagtttattgcgtcgtaaaattttagacgtcgacgttattataataaatttttcgcgtttttcgtcgttttttgcgtttgcggttgacggtcgagatgaaggagatcgttagtatttttcgggcgtacggtttttttttgggggtttacgaattttgtgtgggagataggttaggatgcggggggcgttcggattcggttttttgtcgatttcgtntttattcggtttatttttacgttacggtatttagtcgttataagttttagttaaggttagtatttacggtcgtattataaaacgtttttntttttagtttcgtgtcgtttttcgtttagagattattttcgttggtttaaatttaggtttttagtttttttttgtgaggtg

SEQ ID NO: 10650 - DNA, 513 bp, Artificial Sequence
  chemically treated genomic DNA (Homo sapiens) CpG-island No: 10650
  unsure (82, 172)
cacctcacaaaaaaaaactaaaaacctaaatttaaaccaacgaaaataatctctaaacgaaaaacgacacgaaactaaaaanaaaaacgttttataatacgaccgtaaatactaaccttaactaaaacttataacgactaaataccgtaacgtaaaaataaaccgaataaanacgaaatcgacaaaaaaccgaatccgaacgccccccgcatcctaacctatctcccacacaaaattcgtaaacccccaaaaaaaaaccgtacgcccgaaaaatactaacgatctccttcatctcgaccgtcaaccgcaaacgcaaaaaacgacgaaaaacgcgaaaaatttattataataacgtcgacgtctaaaattttacgacgcaataaactaaaacgaaaaccacaacgccgaaaactcaaaaacgaccgcaaaaaccgctacctaacgccgtcgcccccgaaacccccgaacgcctcaatcccccgacgacgccgaaaaaacgaccgaccgcgaaca

SEQ ID NO: 10651 - DNA, 513 bp, Artificial Sequence
  chemically treated genomic DNA (Homo sapiens) CpG-island No: 10651
  unsure (82, 172)
tattttataagaaagagttgagagtttagatttgggttagcgggggtagtttttggacggagggcggtacggggttggaggnaggagcgttttatgatgcggtcgtgggtgttggttttggttggggtttgtggcgattgggtgtcgtgacgtgggggtggatcgggtagangcggggtcggtagggggtcgagttcgggcgtttttcgtattttgatttgttttttatatagggttcgtgggtttttaagaaggagtcgtacgttcgggagatgttggcgattttttttatttcggtcgttaatcgtaagcgtaagaagcggcgggaggcgcggggggtttgttgtagtagcgtcgacgtttggggttttgcggcgtagtaggttggggcgggggttatagcgtcggggatttaggagcggtcgtaggggtcgttgtttggcgtcgtcgttttcgaggttttcggacgttttagtttttcggcggcgtcggaggagcggtcggtcgcggata

SEQ ID NO: 10652 - DNA, 513 bp, Artificial Sequence
  chemically treated genomic DNA (Homo sapiens) CpG-island No: 10652
  unsure (342, 432)
tatccgcgaccgaccgctcctccgacgccgccgaaaaactaaaacgtccgaaaacctcgaaaacgacgacgccaaacaacgacccctacgaccgctcctaaatccccgacgctataacccccgccccaacctactacgccgcaaaaccccaaacgtcgacgctactacaacaaaccccccgcgcctcccgccgcttcttacgcttacgattaacgaccgaaataaaaaaaatcgccaacatctcccgaacgtacgactccttcttaaaaacccacgaaccctatataaaaaacaaatcaaaatacgaaaaacgcccgaactcgaccccctaccgaccccgcntctacccgatccacccccacgtcacgacacccaatcgccacaaaccccaaccaaaaccaacacccacgaccgcatcataaaacgctcctncctccaaccccgtaccgccctccgtccaaaaactacccccgctaacccaaatctaaactctcaactctttcttataaaata

SEQ ID NO: 10653 - DNA, 579 bp, Artificial Sequence
  chemically treated genomic DNA (Homo sapiens) CpG-island No: 10653
gcggggcgtcgttcgattcgttatgataagtcgatttcgcgcgtttttcgttttttcgcgcgtcggggtcgttttcgtcgaggttggggttgcggcggatttgtaggggtttagcgcgcggcgtagggcgttgattttcgcggcgatatataggtatagtttagcgggtcggtcgttattattattcgttgtagtcgtcgtagataagtcgtcgtcgtcggtgtgcggtcgttagatttcgtcgggcgtcgggttttttttattcgggtaaggcggttttgggggcgtcggtatcggcgcgcgcgttttattgtatttgcgggtttcggttttcgggagaggttttcgggggggttatttcgttttttatattaggaatttgtatattttaatagcgattatttagttcgtttattgaagtttgcggtgcgtcggggtttcgcggtaggcggcgggatttattttgcgatagttttgatttgataggtaattcgggtgagttttgttatcgtcgtttttggattcgaaattgatagtttatatttaggaagcgagagcgaggaagaaagaaatagattt

SEQ ID NO: 10654 - DNA, 579 bp, Artificial Sequence
  chemically treated genomic DNA (Homo sapiens) CpG-island No: 10654
aaatctatttctttcttcctcgctctcgcttcctaaatataaactatcaatttcgaatccaaaaacgacgataacaaaactcacccgaattacctatcaaatcaaaactatcgcaaaataaatcccgccgcctaccgcgaaaccccgacgcaccgcaaacttcaataaacgaactaaataatcgctattaaaatatacaaattcctaatataaaaaacgaaataacccccccgaaaacctctcccgaaaaccgaaacccgcaaatacaataaaacgcgcgcgccgataccgacgcccccaaaaccgccttacccgaataaaaaaaacccgacgcccgacgaaatctaacgaccgcacaccgacgacgacgacttatctacgacgactacaacgaataataataacgaccgacccgctaaactatacctatatatcgccgcgaaaatcaacgccctacgccgcgcgctaaacccctacaaatccgccgcaaccccaacctcgacgaaaacgaccccgacgcgcgaaaaaacgaaaaacgcgcgaaatcgacttatcataacgaatcgaacgacgccccgc

SEQ ID NO: 10655 - DNA, 579 bp, Artificial Sequence
  chemically treated genomic DNA (Homo sapiens) CpG-island No: 10655
aaatttgtttttttttttttcgttttcgttttttggatatagattgttaatttcggatttaaagacggcgatggtagagtttattcgggttgtttgttaaattaaggttatcgtagaataaatttcgtcgtttgtcgcgaagtttcggcgtatcgtaaattttagtgagcgaattgggtgatcgttgttgggatatgtagatttttgatgtaaaaggcggggtggttttttcgagagtttttttcgggggtcggagttcgtaggtgtagtgaggcgcgcgcgtcggtgtcggcgtttttagagtcgttttgttcgggtagagggagttcggcgttcggcggggtttggcggtcgtatatcggcggcggcggtttgtttgcggcggttgtagcggatgatggtggcggtcggttcgttgggttgtgtttgtgtgtcgtcgcggaaattagcgttttgcgtcgcgcgttgagtttttgtaggttcgtcgtagttttagtttcggcgaggacggtttcggcgcgcgggggggcggggggcgcgcggggtcggtttattatggcggatcggacggcgtttcgt

SEQ ID NO: 10656 - DNA, 579 bp, Artificial Sequence
  chemically treated genomic DNA (Homo sapiens) CpG-island No: 10656
acgaaacgccgtccgatccgccataataaaccgaccccgcgcgccccccgcccccccgcgcgccgaaaccgtcctcgccgaaactaaaactacgacgaacctacaaaaactcaacgcgcgacgcaaaacgctaatttccgcgacgacacacaaacacaacccaacgaaccgaccgccaccatcatccgctacaaccgccgcaaacaaaccgccgccgccgatatacgaccgccaaaccccgccgaacgccgaactccctctacccgaacaaaacgactctaaaaacgccgacaccgacgcgcgcgcctcactacacctacgaactccgacccccgaaaaaaactctcgaaaaaaccaccccgccttttacatcaaaaatctacatatcccaacaacgatcacccaattcgctcactaaaatttacgatacgccgaaacttcgcgacaaacgacgaaatttattctacgataaccttaatttaacaaacaacccgaataaactctaccatcgccgtctttaaatccgaaattaacaatctatatccaaaaaacgaaaacgaaaaaaaaaaaaacaaattt

SEQ ID NO: 10657 - DNA, 548 bp, Artificial Sequence
  chemically treated genomic DNA (Homo sapiens) CpG-island No: 10657
gaatttcgggttttgttttgagtttagcgtggagaggggtcgttcgagggattcgggggatagtaattttttatagacgtatacgtttcgggggtcggcgcgttgcgcgagggatgttcgtttttaggattgttcggttcgcgcgtattgtcgttttggcggcgttttgtattttttttattttcgaattagtttcgttcgcggagtattcgcgcgttttttgtttttaatttttgttgttagcggacgttatcggcgcgtttcggatttcgcgcgggcgagcgagcgaaattttttgtttgttttttttttttcgtttttcgtattcggggatggatttcgttattggggcgtcgcgggagataggttttttttttagtcggggtttcgggggcggggttataacgtcgcgttagtgaattttagttgtcggttattaggcgagatttcgtcgtttggaaatagcgacgtttcggaggattggggtcgttttttttttttgtttgtttttgtggttttttttttcgacgtattttgggaagtgtagt

SEQ ID NO: 10658 - DNA, 548 bp, Artificial Sequence
  chemically treated genomic DNA (Homo sapiens) CpG-island No: 10658
actacacttcccaaaatacgtcgaaaaaaaaaaccacaaaaacaaacaaaaaaaaaaaacgaccccaatcctccgaaacgtcgctatttccaaacgacgaaatctcgcctaataaccgacaactaaaattcactaacgcgacgttataaccccgcccccgaaaccccgactaaaaaaaaaacctatctcccgcgacgccccaataacgaaatccatccccgaatacgaaaaacgaaaaaaaaaaaacaaacaaaaaatttcgctcgctcgcccgcgcgaaatccgaaacgcgccgataacgtccgctaacaacaaaaattaaaaacaaaaaacgcgcgaatactccgcgaacgaaactaattcgaaaataaaaaaaatacaaaacgccgccaaaacgacaatacgcgcgaaccgaacaatcctaaaaacgaacatccctcgcgcaacgcgccgacccccgaaacgtatacgtctataaaaaattactatcccccgaatccctcgaacgacccctctccacgctaaactcaaaacaaaacccgaaattc

SEQ ID NO: 10659 - DNA, 548 bp, Artificial Sequence
  chemically treated genomic DNA (Homo sapiens) CpG-island No: 10659
attatattttttaggatgcgtcgggggaagaggttatagggataggtagagggagggggcggttttagtttttcggggcgtcgttgtttttaagcggcgagatttcgtttagtaatcggtagttgaggtttattagcgcggcgttgtggtttcgttttcggagtttcggttggaggaagaatttgtttttcgcggcgttttagtgacgaagtttattttcgggtgcgggaggcggggaggggagggtaggtagaggatttcgttcgttcgttcgcgcgggattcgggacgcgtcggtggcgttcgttggtagtagaggttagaggtagagagcgcgcggatgtttcgcgggcgaggttggttcgagagtgggaggagtgtagggcgtcgttagggcggtagtgcgcgcgggtcgaatagttttgagggcgggtatttttcgcgtagcgcgtcgattttcgggacgtgtgcgtttgtggggggttgttgtttttcgggtttttcgggcgatttttttttacgttgggtttagggtaggattcgggattt

SEQ ID NO: 10660 - DNA, 548 bp, Artificial Sequence
  chemically treated genomic DNA (Homo sapiens) CpG-island No: 10660
aaatcccgaatcctaccctaaacccaacgtaaaaaaaaatcgcccgaaaaacccgaaaaacaacaaccccccacaaacgcacacgtcccgaaaatcgacgcgctacgcgaaaaatacccgccctcaaaactattcgacccgcgcgcactaccgccctaacgacgccctacactcctcccactctcgaaccaacctcgcccgcgaaacatccgcgcgctctctacctctaacctctactaccaacgaacgccaccgacgcgtcccgaatcccgcgcgaacgaacgaacgaaatcctctacctaccctcccctccccgcctcccgcacccgaaaataaacttcgtcactaaaacgccgcgaaaaacaaattcttcctccaaccgaaactccgaaaacgaaaccacaacgccgcgctaataaacctcaactaccgattactaaacgaaatctcgccgcttaaaaacaacgacgccccgaaaaactaaaaccgccccctccctctacctatccctataacctcttcccccgacgcatcctaaaaaatataat

SEQ ID NO: 10661 - DNA, 812 bp, Artificial Sequence
  chemically treated genomic DNA (Homo sapiens) CpG-island No: 10661
atacgttgaggttcgggttgaggcggtcggagtcgcggttggggaagggcggaagtcggagcgggttatagggtgtgttgtatttttgcgggggtcgagttcgtagttttaggcgttttggggttacggttaggtttgggcgagttcgtagtttttagcgttttggggttacggttaggttgggtcggtttttgggtattcggtcgtcgggatattttcgtcgtcgttttatcgggttgtcggggaagtcggggtcgtcgggatcgttaggatcgtcggattgcgaggggtcgtcgatgttggcgtcgttgttgtcgttgttgttgaagaaacgttttcggttttgcggcgggaattattgcgcggtttttcggttcggtcgtcgttgttttttgtcgttcgtagttttatatgtgcggaaaagtcggtttttaggtttcgggagcgagagtcgttatggtcggtattcgttaagaggtttaaacgtaaatatcgcgagattttcgtgcgacgcggacgcgttcgtttgtcgcggggttttagttttcggttttgcgtatgcgtatttcgttagggtcggggtcgggacgggacggaaaattggcggtttggtttgtttagcgcgtcgcggttatggttttcgttttaggtttttacggtgtgtatttggagttaggagcgcgtttgtgcgtatagttcggtttaggtaagcgcggtcgtttcgagaggttaggggagggcggagggtttgaagcgggtaacgagaggttaggagattgttttttttgggttatttttgtcggttagtgtcg

SEQ ID NO: 10662 - DNA, 812 bp, Artificial Sequence
  chemically treated genomic DNA (Homo sapiens) CpG-island No: 10662
cgacactaaccgacaaaaataacccaaaaaaaacaatctcctaacctctcgttacccgcttcaaaccctccgccctcccctaacctctcgaaacgaccgcgcttacctaaaccgaactatacgcacaaacgcgctcctaactccaaatacacaccgtaaaaacctaaaacgaaaaccataaccgcgacgcgctaaacaaaccaaaccgccaattttccgtcccgtcccgaccccgaccctaacgaaatacgcatacgcaaaaccgaaaactaaaaccccgcgacaaacgaacgcgtccgcgtcgcacgaaaatctcgcgatatttacgtttaaacctcttaacgaataccgaccataacgactctcgctcccgaaacctaaaaaccgacttttccgcacatataaaactacgaacgacaaaaaacaacgacgaccgaaccgaaaaaccgcgcaataattcccgccgcaaaaccgaaaacgtttcttcaacaacaacgacaacaacgacgccaacatcgacgacccctcgcaatccgacgatcctaacgatcccgacgaccccgacttccccgacaacccgataaaacgacgacgaaaatatcccgacgaccgaatacccaaaaaccgacccaacctaaccgtaaccccaaaacgctaaaaactacgaactcgcccaaacctaaccgtaaccccaaaacgcctaaaactacgaactcgacccccgcaaaaatacaacacaccctataacccgctccgacttccgcccttccccaaccgcgactccgaccgcctcaacccgaacctcaacgtat

SEQ ID NO: 10663 - DNA, 812 bp, Artificial Sequence
  chemically treated genomic DNA (Homo sapiens) CpG-island No: 10663
cggtattggtcggtaggggtaatttaggaaaaatagttttttggtttttcgttattcgttttaggtttttcgtttttttttggtttttcgggacggtcgcgtttatttgaatcgaattgtacgtataagcgcgtttttgattttaggtgtatatcgtggaggtttgaaacgagagttatgatcgcgacgcgttgaataaattaagtcgttagtttttcgtttcgtttcggtttcggttttggcgaggtgcgtatgcgtagggtcgggagttaggatttcgcggtaggcgggcgcgttcgcgtcgtacggaagtttcgcgatgtttgcgtttgaattttttggcgggtgtcggttatggcggttttcgttttcgggatttgggagtcggttttttcgtatatatggggttgcggacggtaggagatagcggcggtcgggtcgggaagtcgcgtagtggttttcgtcgtaggatcggaggcgtttttttaatagtagcggtagtagcgacgttagtatcggcgatttttcgtagttcgacgattttgacgatttcgacgatttcgattttttcggtagttcggtgaggcggcggcgaaggtgtttcggcggtcgagtgtttaaggatcggtttagtttgatcgtgattttaaagcgttggaagttgcgagttcgtttaagtttaatcgtgattttaagacgtttggggttgcgagttcggttttcgtagaagtgtagtatattttgtggttcgtttcgattttcgtttttttttagtcgcgatttcggtcgttttagttcggattttagcgtgt

SEQ ID NO: 10664 - DNA, 812 bp, Artificial Sequence
  chemically treated genomic DNA (Homo sapiens) CpG-island No: 10664
acacgctaaaatccgaactaaaacgaccgaaatcgcgactaaaaaaaaacgaaaatcgaaacgaaccacaaaatatactacacttctacgaaaaccgaactcgcaaccccaaacgtcttaaaatcacgattaaacttaaacgaactcgcaacttccaacgctttaaaatcacgatcaaactaaaccgatccttaaacactcgaccgccgaaacaccttcgccgccgcctcaccgaactaccgaaaaaatcgaaatcgtcgaaatcgtcaaaatcgtcgaactacgaaaaatcgccgatactaacgtcgctactaccgctactattaaaaaaacgcctccgatcctacgacgaaaaccactacgcgacttcccgacccgaccgccgctatctcctaccgtccgcaaccccatatatacgaaaaaaccgactcccaaatcccgaaaacgaaaaccgccataaccgacacccgccaaaaaattcaaacgcaaacatcgcgaaacttccgtacgacgcgaacgcgcccgcctaccgcgaaatcctaactcccgaccctacgcatacgcacctcgccaaaaccgaaaccgaaacgaaacgaaaaactaacgacttaatttattcaacgcgtcgcgatcataactctcgtttcaaacctccacgatatacacctaaaatcaaaaacgcgcttatacgtacaattcgattcaaataaacgcgaccgtcccgaaaaaccaaaaaaaaacgaaaaacctaaaacgaataacgaaaaaccaaaaaactatttttcctaaattacccctaccgaccaataccg

SEQ ID NO: 10665 - DNA, 1089 bp, Artificial Sequence
  chemically treated genomic DNA (Homo sapiens) CpG-island No: 10665
tagaagatgaagtcgtaaaggtcggtgaggtcgaggatgtcggtcgtggttttcgatagcgttgatatcgaggttcggtaataatttaggacggcggcgttgtttcgtacggtcgtttcgttgatgaacggcggtttttttcgtttggttattatcgcggttatcgtattagttcgggttcggtttttcgttttttcgcggaataacgcggagttgcggagaaaattaagttataagtggcgttcggagttcggtgagttgggtttacgtcgttttttttttttggagttttcgagatttggtattagttttgggtttcggattttttaaagacgtcgaggagattgagggttcgggtcggtcgggaggtggtggcgcgtttgcgtttttcggttacggtggtttagttatttggaatacggcgtcggatatattatttagcgtttttttagacgggtagtggaagaaatgttcgcggcgttattttgttcggaagattgtcgggaggtttcgggttgcgtacgcgtttagatttcgtttcgtttttcgcgtttgcgtcgtgggcgtttcggatacgtttcgttttttgttcgtttttttgcgtacgcgtagggattttcgaaagcggagtggcgtttcggttagtgattggttggaggtttgttaattatttatgagggggcgggtcgagcggggcggtttttgttaagtagcgagggcgcgatcgcgggtattttgttgtcggtttttcggagcggcgttgggcgattagagtagggtcgagatgttttatatttcgggttagtcggttatcgtcgtggtggtgagtgcgtttgcgcgggttttttttcgttttggtttgattttatttcgtagagcgggaaacggatattttaagtaggttgatagagtatcgaattcggggtttttgcgaatcggcggtaagggttcgggttttcgttttgtcggagcgggtcgtagtttttttagttacgaaatagggatggtcgggattcgagagtttttcgagattttggatagagtttagattgcgtgcgtagggcggggagggttacggggaaaggtttg

SEQ ID NO: 10666 - DNA, 1089 bp, Artificial Sequence
  chemically treated genomic DNA (Homo sapiens) CpG-island No: 10666
caaacctttccccgtaaccctccccgccctacgcacgcaatctaaactctatccaaaatctcgaaaaactctcgaatcccgaccatccctatttcgtaactaaaaaaactacgacccgctccgacaaaacgaaaacccgaacccttaccgccgattcgcaaaaaccccgaattcgatactctatcaacctacttaaaatatccgtttcccgctctacgaaataaaatcaaaccaaaacgaaaaaaaacccgcgcaaacgcactcaccaccacgacgataaccgactaacccgaaatataaaacatctcgaccctactctaatcgcccaacgccgctccgaaaaaccgacaacaaaatacccgcgatcgcgccctcgctacttaacaaaaaccgccccgctcgacccgccccctcataaataattaacaaacctccaaccaatcactaaccgaaacgccactccgctttcgaaaatccctacgcgtacgcaaaaaaacgaacaaaaaacgaaacgtatccgaaacgcccacgacgcaaacgcgaaaaacgaaacgaaatctaaacgcgtacgcaacccgaaacctcccgacaatcttccgaacaaaataacgccgcgaacatttcttccactacccgtctaaaaaaacgctaaataatatatccgacgccgtattccaaataactaaaccaccgtaaccgaaaaacgcaaacgcgccaccacctcccgaccgacccgaaccctcaatctcctcgacgtctttaaaaaatccgaaacccaaaactaataccaaatctcgaaaactccaaaaaaaaaaaacgacgtaaacccaactcaccgaactccgaacgccacttataacttaattttctccgcaactccgcgttattccgcgaaaaaacgaaaaaccgaacccgaactaatacgataaccgcgataataaccaaacgaaaaaaaccgccgttcatcaacgaaacgaccgtacgaaacaacgccgccgtcctaaattattaccgaacctcgatatcaacgctatcgaaaaccacgaccgacatcctcgacctcaccgacctttacgacttcatcttcta

SEQ ID NO: 10667 - DNA, 1089 bp, Artificial Sequence
  chemically treated genomic DNA (Homo sapiens) CpG-island No: 10667
taggttttttttcgtggtttttttcgttttgcgtacgtagtttgggttttgtttagggtttcgggaggttttcgggtttcggttatttttgtttcgtggttgggggaattgcggttcgtttcggtaaagcggggattcgagtttttgtcgtcggttcgtaggagtttcgggttcgatgttttgttaatttgtttggggtgttcgtttttcgttttgcgaggtggggttaggttaagacgaggaggagttcgcgtaagcgtatttattattacggcggtgatcggttggttcgggatgtaggatatttcgattttgttttggtcgtttagcgtcgtttcgagaagtcggtagtagagtattcgcggtcgcgttttcgttgtttaataaaggtcgtttcgttcggttcgtttttttatgaatagttaataaatttttagttaattattggtcggagcgttatttcgttttcggaagtttttgcgcgtgcgtagaaaagcgggtagagggcggagcgtgttcggggcgtttacggcgtaggcgcggagggcggggcgggatttgggcgcgtgcgtagttcgagatttttcggtagtttttcgagtaagatggcgtcgcgggtattttttttattgttcgtttgagggaacgttaagtagtgtgttcggcgtcgtgttttaggtaattgggttatcgtggtcggggaacgtagacgcgttattatttttcggtcggttcggatttttaattttttcggcgtttttggaagattcgaggtttaggattggtgttaggtttcggaagttttagggggagggggcggcgtgaatttaatttatcgagtttcgggcgttatttgtaatttggtttttttcgtagtttcgcgttgtttcgcgagaaagcgagaggtcgagttcgggttggtgcgatggtcgcggtggtggttaagcgggaagggtcgtcgtttattagcgaggcggtcgtgcggggtaacgtcgtcgttttggattattgtcggatttcggtgttagcgttgtcgggggttacggtcggtattttcggttttatcggtttttacggttttatttttta

SEQ ID NO: 10668 - DNA, 1089 bp, Artificial Sequence
  chemically treated genomic DNA (Homo sapiens) CpG-island No: 10668
taaaaaataaaaccgtaaaaaccgataaaaccgaaaataccgaccgtaacccccgacaacgctaacaccgaaatccgacaataatccaaaacgacgacgttaccccgcacgaccgcctcgctaataaacgacgacccttcccgcttaaccaccaccgcgaccatcgcaccaacccgaactcgacctctcgctttctcgcgaaacaacgcgaaactacgaaaaaaaccaaattacaaataacgcccgaaactcgataaattaaattcacgccgccccctccccctaaaacttccgaaacctaacaccaatcctaaacctcgaatcttccaaaaacgccgaaaaaattaaaaatccgaaccgaccgaaaaataataacgcgtctacgttccccgaccacgataacccaattacctaaaacacgacgccgaacacactacttaacgttccctcaaacgaacaataaaaaaaatacccgcgacgccatcttactcgaaaaactaccgaaaaatctcgaactacgcacgcgcccaaatcccgccccgccctccgcgcctacgccgtaaacgccccgaacacgctccgccctctacccgcttttctacgcacgcgcaaaaacttccgaaaacgaaataacgctccgaccaataattaactaaaaatttattaactattcataaaaaaacgaaccgaacgaaacgacctttattaaacaacgaaaacgcgaccgcgaatactctactaccgacttctcgaaacgacgctaaacgaccaaaacaaaatcgaaatatcctacatcccgaaccaaccgatcaccgccgtaataataaatacgcttacgcgaactcctcctcgtcttaacctaaccccacctcgcaaaacgaaaaacgaacaccccaaacaaattaacaaaacatcgaacccgaaactcctacgaaccgacgacaaaaactcgaatccccgctttaccgaaacgaaccgcaattcccccaaccacgaaacaaaaataaccgaaacccgaaaacctcccgaaaccctaaacaaaacccaaactacgtacgcaaaacgaaaaaaaccacgaaaaaaaaccta

SEQ ID NO: 10669 - DNA, 1071 bp, Artificial Sequence
  chemically treated genomic DNA (Homo sapiens) CpG-island No: 10669
gtcgggtcgaggttcgcgcgtacgtgtaggaggcgttcgggtttcgttttttttttcgaagttttcgtttttttttttttcgttgttgtggattagtatggtggcgttcgatagggattttttatggtcgtattttaagtttttcgtttttttcggtttttttcgttgtgttttttcggtgaaaacgttgggttgggagtttatcgagacggttcgcggcgttatttttgtcgtcgacgcggatagggtgcgttttttgagtcgtaggttttttaggtcgtggttgagttcggttatttcgatgttgtttcgtttgtgtagttgcgcgtggcgcgcggcggtgaggggttcgttgattttttgtagcgagtgcgttacgggtaggttgtttttttggaacgtttgtatcgagtggtgtacgcgtcgcgtgatgaggtcggggttgttgttgttgatgtaaaggtggcgggataggtttggcgtgttgttggcgggtttggggggcgggtagggtgggggtggtcggtatatttgcgttcgtatgatgttgggagacgggtagttttgcgtttgtagttgcgtattggttagtttcggtacgttgatcgcgtttattacgggtcgtcgttcggtagggtaggggtagggagacgggttgtggaagttgtagtttaggttgaacgggtagtgtgcggtcgttggcgaggggagttgtgcgtgttcgcggatttcgggttggttgtagattagcgtcgcgggtttgttgtaggcgtacgagttgtcgatgttgaggtttcgtagcgagtggttttgtcgtttcgtatgtattaggtttttgttgagttgttttattatagttttatagtttggggtggggcggtaggacgggggtattacggcgttgtgtcgatgggacgggaggtagttaggttttatgacgttattttcggtgatgttagggttggacgatatcggcgagggttgtaagtagggttgaggattatttaaggagttggtgttgtgtgtattgtagatattgttattacggattcgatcgttgaggttaatttg

SEQ ID NO: 10670 - DNA, 1071 bp, Artificial Sequence
  chemically treated genomic DNA (Homo sapiens) CpG-island No: 10670
caaattaacctcaacgatcgaatccgtaataacaatatctacaatacacacaacaccaactccttaaataatcctcaaccctacttacaaccctcgccgatatcgtccaaccctaacatcaccgaaaataacgtcataaaacctaactacctcccgtcccatcgacacaacgccgtaatacccccgtcctaccgccccaccccaaactataaaactataataaaacaactcaacaaaaacctaatacatacgaaacgacaaaaccactcgctacgaaacctcaacatcgacaactcgtacgcctacaacaaacccgcgacgctaatctacaaccaacccgaaatccgcgaacacgcacaactcccctcgccaacgaccgcacactacccgttcaacctaaactacaacttccacaacccgtctccctacccctaccctaccgaacgacgacccgtaataaacgcgatcaacgtaccgaaactaaccaatacgcaactacaaacgcaaaactacccgtctcccaacatcatacgaacgcaaatataccgaccacccccaccctacccgccccccaaacccgccaacaacacgccaaacctatcccgccacctttacatcaacaacaacaaccccgacctcatcacgcgacgcgtacaccactcgatacaaacgttccaaaaaaacaacctacccgtaacgcactcgctacaaaaaatcaacgaacccctcaccgccgcgcgccacgcgcaactacacaaacgaaacaacatcgaaataaccgaactcaaccacgacctaaaaaacctacgactcaaaaaacgcaccctatccgcgtcgacgacaaaaataacgccgcgaaccgtctcgataaactcccaacccaacgttttcaccgaaaaaacacaacgaaaaaaaccgaaaaaaacgaaaaacttaaaatacgaccataaaaaatccctatcgaacgccaccatactaatccacaacaacgaaaaaaaaaaaaacgaaaacttcgaaaaaaaaaacgaaacccgaacgcctcctacacgtacgcgcgaacctcgacccgac

SEQ ID NO: 10671 - DNA, 1071 bp, Artificial Sequence
  chemically treated genomic DNA (Homo sapiens) CpG-island No: 10671
tagattgattttaacggtcggattcgtaatggtagtgtttatagtgtatatagtattaattttttaaataatttttagttttatttgtagttttcgtcgatgtcgtttaattttagtattatcgggagtgacgttatgaggtttgattatttttcgttttatcggtatagcgtcgtgatattttcgttttatcgttttattttagattatgagattgtgatgaagtagtttaataggggtttggtgtatgcggaacggtagagttattcgttgcgaaattttaatatcggtagttcgtacgtttatagtaggttcgcggcgttggtttatagttagttcgagattcgcgagtacgtatagtttttttcgttagcggtcgtatattgttcgtttagtttgagttatagtttttatagttcgtttttttatttttattttgtcgagcggcggttcgtggtgggcgcggttagcgtgtcggagttgattaatgcgtagttgtaggcgtaggattattcgttttttaatattatgcggacgtaggtgtatcggttatttttattttattcgttttttaggttcgttaatagtacgttagatttgtttcgttatttttatattagtagtagtaatttcgattttattacgcggcgcgtgtattattcggtgtaaacgttttaggaggatagtttgttcgtggcgtattcgttgtaggaggttagcgagttttttatcgtcgcgcgttacgcgtagttgtataaacggaatagtatcgaggtggtcgggtttagttacggtttggagggtttgcggtttaaggagcgtattttattcgcgtcggcggtagaggtggcgtcgcgagtcgtttcggtgggtttttagtttagcgtttttatcgagaggatatagcgagaagggtcggaggaggcggagggtttgaggtacggttataagaagtttttgtcggacgttattatgttaatttatagtagcgaggaggaggaggacgaggatttcgaggaggagagcggggttcgggcgttttttgtacgtgcgcgcgagtttcggttcggt

SEQ ID NO: 10672 - DNA, 1071 bp, Artificial Sequence
  chemically treated genomic DNA (Homo sapiens) CpG-island No: 10672
accgaaccgaaactcgcgcgcacgtacaaaaaacgcccgaaccccgctctcctcctcgaaatcctcgtcctcctcctcctcgctactataaattaacataataacgtccgacaaaaacttcttataaccgtacctcaaaccctccgcctcctccgacccttctcgctatatcctctcgataaaaacgctaaactaaaaacccaccgaaacgactcgcgacgccacctctaccgccgacgcgaataaaatacgctccttaaaccgcaaaccctccaaaccgtaactaaacccgaccacctcgatactattccgtttatacaactacgcgtaacgcgcgacgataaaaaactcgctaacctcctacaacgaatacgccacgaacaaactatcctcctaaaacgtttacaccgaataatacacgcgccgcgtaataaaatcgaaattactactactaatataaaaataacgaaacaaatctaacgtactattaacgaacctaaaaaacgaataaaataaaaataaccgatacacctacgtccgcataatattaaaaaacgaataatcctacgcctacaactacgcattaatcaactccgacacgctaaccgcgcccaccacgaaccgccgctcgacaaaataaaaataaaaaaacgaactataaaaactataactcaaactaaacgaacaatatacgaccgctaacgaaaaaaactatacgtactcgcgaatctcgaactaactataaaccaacgccgcgaacctactataaacgtacgaactaccgatattaaaatttcgcaacgaataactctaccgttccgcatacaccaaacccctattaaactacttcatcacaatctcataatctaaaataaaacgataaaacgaaaatatcacgacgctataccgataaaacgaaaaataatcaaacctcataacgtcactcccgataatactaaaattaaacgacatcgacgaaaactacaaataaaactaaaaattatttaaaaaattaatactatatacactataaacactaccattacgaatccgaccgttaaaatcaatcta

SEQ ID NO: 10673 - DNA, 702 bp, Artificial Sequence
  chemically treated genomic DNA (Homo sapiens) CpG-island No: 10673
gtttcgcggcgtttatttttcgtagcggatttaaagcggcgtcgtgcgtcgcggtggtggttttagtcgggtttgcgtttgtttttttatttttcggcggttattttagtcgtagttacgtttcgaggtcgtaaatgtttttagggtcgaggcggtttggacgaggaggagtcgtagttcgttaggagcgtttagcggaggttaggtcgcggcgtttattcgggtttatagttttcgttatttttgataatcgttcgttcgtcgagatttggttttttattttcgatcggtacgggttttattcggattttgcggttgatttcggtgtcgatttttatggttttgcggcgtgcgggaatttagtattgcgcggcgtttggtttattcggaggttgtcgcggatttttatttcgtagtcgggatattatcgttttttttttcgtttcgttttcgggtcgcgtatacggcgtattttcgtttcggtcggtattgcgcgtcggagtgaacgcgtatgcgttcgtgttcgcgtttgcgtacgttttttattcgcgaaatttgtgtttaggtaaggagggcggcggcgtgcgcgtgcgggtggttttgtagtttcgtttttcgggtatttcggggatttttcgttagtttttttgttggtttttcgtttatttattttatttttttttggatggtaagaatgaatta

SEQ ID NO: 10674 - DNA, 702 bp, Artificial Sequence
  chemically treated genomic DNA (Homo sapiens) CpG-island No: 10674
taattcattcttaccatccaaaaaaaaataaaataaataaacgaaaaaccaacaaaaaaactaacgaaaaatccccgaaatacccgaaaaacgaaactacaaaaccacccgcacgcgcacgccgccgccctccttacctaaacacaaatttcgcgaataaaaaacgtacgcaaacgcgaacacgaacgcatacgcgttcactccgacgcgcaataccgaccgaaacgaaaatacgccgtatacgcgacccgaaaacgaaacgaaaaaaaaaacgataatatcccgactacgaaataaaaatccgcgacaacctccgaataaaccaaacgccgcgcaatactaaattcccgcacgccgcaaaaccataaaaatcgacaccgaaatcaaccgcaaaatccgaataaaacccgtaccgatcgaaaataaaaaaccaaatctcgacgaacgaacgattatcaaaaataacgaaaactataaacccgaataaacgccgcgacctaacctccgctaaacgctcctaacgaactacgactcctcctcgtccaaaccgcctcgaccctaaaaacatttacgacctcgaaacgtaactacgactaaaataaccgccgaaaaataaaaaaacaaacgcaaacccgactaaaaccaccaccgcgacgcacgacgccgctttaaatccgctacgaaaaataaacgccgcgaaac

SEQ ID NO: 10675 - DNA, 702 bp, Artificial Sequence
  chemically treated genomic DNA (Homo sapiens) CpG-island No: 10675
taatttatttttattatttaagagagaataaaatgaataagcggagggttagtagagagattaacgaaaggttttcgaggtgttcgggaggcggagttgtaagattattcgtacgcgtacgtcgtcgttttttttgtttgagtataggtttcgcgggtagaaggcgtgcgtaggcgcggatacgggcgtatgcgcgtttatttcggcgcgtagtgtcggtcggggcggggatacgtcgtgtgcgcggttcgggggcggaacggaggaggaggcggtggtgtttcggttgcggggtaggagttcgcggtagttttcgggtaagttaagcgtcgcgtagtgttgagttttcgtacgtcgtagagttatggagatcggtatcgagattagtcgtaagattcgggtgaggttcgtgtcggtcgggggtgggaagttaggtttcggcgagcgggcggttgttaggagtaacggggattgtgggttcgggtggacgtcgcggtttggttttcgttggacgtttttggcgggttgcggttttttttcgtttaggtcgtttcggttttggggatatttgcggtttcggagcgtggttgcggttgaagtagtcgtcgggaaatggaaggataggcgtaggttcggttggagttattatcgcggcgtacggcgtcgttttggattcgttgcgggaggtgggcgtcgcggggt

SEQ ID NO: 10676 - DNA, 702 bp, Artificial Sequence
  chemically treated genomic DNA (Homo sapiens) CpG-island No: 10676
accccgcgacgcccacctcccgcaacgaatccaaaacgacgccgtacgccgcgataataactccaaccgaacctacgcctatccttccatttcccgacgactacttcaaccgcaaccacgctccgaaaccgcaaatatccccaaaaccgaaacgacctaaacgaaaaaaaaccgcaacccgccaaaaacgtccaacgaaaaccaaaccgcgacgtccacccgaacccacaatccccgttactcctaacaaccgcccgctcgccgaaacctaacttcccacccccgaccgacacgaacctcacccgaatcttacgactaatctcgataccgatctccataactctacgacgtacgaaaactcaacactacgcgacgcttaacttacccgaaaactaccgcgaactcctaccccgcaaccgaaacaccaccgcctcctcctccgttccgcccccgaaccgcgcacacgacgtatccccgccccgaccgacactacgcgccgaaataaacgcgcatacgcccgtatccgcgcctacgcacgccttctacccgcgaaacctatactcaaacaaaaaaaacgacgacgtacgcgtacgaataatcttacaactccgcctcccgaacacctcgaaaacctttcgttaatctctctactaaccctccgcttattcattttattctctcttaaataataaaaataaatta

SEQ ID NO: 10677 - DNA, 688 bp, Artificial Sequence
  chemically treated genomic DNA (Homo sapiens) CpG-island No: 10677
gttgttcgcgtttttttcgcgcggttgttcgtattttaattttttgaggttacgggtcgtcgtcgttttttcggattcgttcgttcggtttagggggagggacgtttgggttcggtcgtttcgttgtttcggtcgcgcgtttcgcgtcggttcgacggtttgttcgtttttttgttatttttcgtttttacggggtttttttgtgcggcgtttttcgtcggtcggttttatttttaggtttcgtttttcgtcgtcgttatcgtcggattttgtttaggggaatggtttgcgagtcgggtttttggagataggaagtgaggcgtgcgagttttatgagcgcgtcgcggttcgggttggcgtgcgggtgcggttgcggcggtcgcgcggcggggtttcgggaggcgggtcgttgaacggggcgcgcggtttttaagatgcgggagcgggagcgggagtaggtgaagggcgcgttttcggtcggcgggaggggcgggcggttggttttagcgggggggtgtgtttatttattcggatttcggagcgcgttcgcgggtttcggaaattcgtgaaaatggggtttcggcggtttagattttttagcgggagttcgaattaaagagaaaaagtgttcggttttttagggtcggtttttttttaattcggagttatttgttaaaagggagttttg

SEQ ID NO: 10678 - DNA, 688 bp, Artificial Sequence
  chemically treated genomic DNA (Homo sapiens) CpG-island No: 10678
caaaactcccttttaacaaataactccgaattaaaaaaaaaccgaccctaaaaaaccgaacactttttctctttaattcgaactcccgctaaaaaatctaaaccgccgaaaccccattttcacgaatttccgaaacccgcgaacgcgctccgaaatccgaataaataaacacacccccccgctaaaaccaaccgcccgcccctcccgccgaccgaaaacgcgcccttcacctactcccgctcccgctcccgcatcttaaaaaccgcgcgccccgttcaacgacccgcctcccgaaaccccgccgcgcgaccgccgcaaccgcacccgcacgccaacccgaaccgcgacgcgctcataaaactcgcacgcctcacttcctatctccaaaaacccgactcgcaaaccattcccctaaacaaaatccgacgataacgacgacgaaaaacgaaacctaaaaataaaaccgaccgacgaaaaacgccgcacaaaaaaaccccgtaaaaacgaaaaataacaaaaaaacgaacaaaccgtcgaaccgacgcgaaacgcgcgaccgaaacaacgaaacgaccgaacccaaacgtccctccccctaaaccgaacgaacgaatccgaaaaaacgacgacgacccgtaacctcaaaaaattaaaatacgaacaaccgcgcgaaaaaaacgcgaacaac

SEQ ID NO: 10679 - DNA, 688 bp, Artificial Sequence
  chemically treated genomic DNA (Homo sapiens) CpG-island No: 10679
tagaatttttttttggtaagtgatttcgggttaaggagaagtcgattttggaaaatcgagtattttttttttttggttcgggttttcgttaaggagtttgggtcgtcggggttttatttttacgggttttcggggttcgcgggcgcgtttcggggttcgggtgagtggatatattttttcgttggggttagtcgttcgtttttttcgtcgatcggggacgcgttttttatttgttttcgttttcgttttcgtattttgggggtcgcgcgtttcgtttagcgattcgtttttcggggtttcgtcgcgcggtcgtcgtagtcgtattcgtacgttagttcgggtcgcggcgcgtttatggggttcgtacgttttattttttgtttttaaaaattcggttcgtagattatttttttgggtagagttcggcggtggcgacggcgaggggcgaggtttggaggtgggatcggtcggcgaggagcgtcgtataaagaagtttcgtgggggcggggggtggtaggaggacggatagatcgtcggatcgacgcgggacgcgcggtcggagtagcggggcggtcgggtttaggcgtttttttttttgagtcgggcgggcggattcggggaggcggcggcggttcgtgattttagagagttggaatgcgggtagtcgcgcgggggaggcgcggatagt

SEQ ID NO: 10680 - DNA, 688 bp, Artificial Sequence
  chemically treated genomic DNA (Homo sapiens) CpG-island No: 10680
actatccgcgcctcccccgcgcgactacccgcattccaactctctaaaatcacgaaccgccgccgcctccccgaatccgcccgcccgactcaaaaaaaaaaacgcctaaacccgaccgccccgctactccgaccgcgcgtcccgcgtcgatccgacgatctatccgtcctcctaccaccccccgcccccacgaaacttctttatacgacgctcctcgccgaccgatcccacctccaaacctcgcccctcgccgtcgccaccgccgaactctacccaaaaaaataatctacgaaccgaatttttaaaaacaaaaaataaaacgtacgaaccccataaacgcgccgcgacccgaactaacgtacgaatacgactacgacgaccgcgcgacgaaaccccgaaaaacgaatcgctaaacgaaacgcgcgacccccaaaatacgaaaacgaaaacgaaaacaaataaaaaacgcgtccccgatcgacgaaaaaaacgaacgactaaccccaacgaaaaaatatatccactcacccgaaccccgaaacgcgcccgcgaaccccgaaaacccgtaaaaataaaaccccgacgacccaaactccttaacgaaaacccgaaccaaaaaaaaaaaatactcgattttccaaaatcgacttctccttaacccgaaatcacttaccaaaaaaaaattcta

SEQ ID NO: 10681 - DNA, 564 bp, Artificial Sequence
  chemically treated genomic DNA (Homo sapiens) CpG-island No: 10681
cgttacgtttttagtatttggatcgcgtttttcggttcgttacgcgcgtatatatatatatacgcgtatatatatacgtttatatttattttgcgcgtagatttcgttcgcggtttcgtttcggtttttgcgggcgttttttttggcgttttcgggcggcgggaggttgcggtttcgggtagatttgattttttcgtagttcgggcgtttcggagtcgaagttcgagtcgaggaggtggcgttcgtagtcgcgttttagtttcgtcgtcgtcggcgttaagatttagggagaggcggcgtagttcgggcgttcgggtttcgcgttgtcggcgtttcgttattttcgtcgttagcgttttattcggcgtttttcgttttttacgtttttttttttgttttttgtattttttttatttttgtttatagacgcgcgttttttttttggtgtttttttttacgatttcgcgtttttttttcggtgtttttttttcgagttttttttttcgcgtttttttttgtttttttcgttgtgttttcgttttttgggttttttgttttttttta

SEQ ID NO: 10682 - DNA, 564 bp, Artificial Sequence
  chemically treated genomic DNA (Homo sapiens) CpG-island No: 10682
taaaaaaaaacaaaaaacccaaaaaacgaaaacacaacgaaaaaaacaaaaaaaaacgcgaaaaaaaaaactcgaaaaaaaaacaccgaaaaaaaaacgcgaaatcgtaaaaaaaaacaccaaaaaaaaaacgcgcgtctataaacaaaaataaaaaaaatacaaaaaacaaaaaaaaaaacgtaaaaaacgaaaaacgccgaataaaacgctaacgacgaaaataacgaaacgccgacaacgcgaaacccgaacgcccgaactacgccgcctctccctaaatcttaacgccgacgacgacgaaactaaaacgcgactacgaacgccacctcctcgactcgaacttcgactccgaaacgcccgaactacgaaaaaatcaaatctacccgaaaccgcaacctcccgccgcccgaaaacgccaaaaaaaacgcccgcaaaaaccgaaacgaaaccgcgaacgaaatctacgcgcaaaataaatataaacgtatatatatacgcgtatatatatatatacgcgcgtaacgaaccgaaaaacgcgatccaaatactaaaaacgtaacg

SEQ ID NO: 10683 - DNA, 564 bp, Artificial Sequence
  chemically treated genomic DNA (Homo sapiens) CpG-island No: 10683
tggggaagggtaaggagtttagggagcgggggtatagcggggaaggtagagaggggcgcggggagaggggttcggggagagggtatcgggagggaaacgcggagtcgtggagaggggtattaggagagggacgcgcgtttgtgggtagaggtagaggggatgtagaagatagggagaggggcgtgaggagcgggaggcgtcggatggggcgttggcggcgggggtggcggggcgtcggtagcgcggagttcgagcgttcgggttgcgtcgtttttttttgggttttggcgtcggcggcgacggggttgagacgcggttgcgagcgttattttttcggttcgggtttcggtttcggggcgttcgggttgcgggaaaattaaatttgttcgaagtcgtagtttttcgtcgttcgggaacgttagagggggcgttcgtaggggtcggggcggggtcgcgggcggggtttgcgcgtagggtgagtgtgagcgtgtgtgtgtgcgcgtgtgtgtgtgtgtgcgcgcgtggcgggtcgggggacgcggtttagatgttggggacgtggcg

SEQ ID NO: 10684 - DNA, 564 bp, Artificial Sequence
  chemically treated genomic DNA (Homo sapiens) CpG-island No: 10684
cgccacgtccccaacatctaaaccgcgtcccccgacccgccacgcgcgcacacacacacacacgcgcacacacacacgctcacactcaccctacgcgcaaaccccgcccgcgaccccgccccgacccctacgaacgccccctctaacgttcccgaacgacgaaaaactacgacttcgaacaaatttaattttcccgcaacccgaacgccccgaaaccgaaacccgaaccgaaaaaataacgctcgcaaccgcgtctcaaccccgtcgccgccgacgccaaaacccaaaaaaaaacgacgcaacccgaacgctcgaactccgcgctaccgacgccccgccacccccgccgccaacgccccatccgacgcctcccgctcctcacgcccctctccctatcttctacatcccctctacctctacccacaaacgcgcgtccctctcctaatacccctctccacgactccgcgtttccctcccgataccctctccccgaacccctctccccgcgcccctctctaccttccccgctatacccccgctccctaaactccttacccttcccca

SEQ ID NO: 10685 - DNA, 1085 bp, Artificial Sequence
  chemically treated genomic DNA (Homo sapiens) CpG-island No: 10685
ggtcggtcgggggtttagtttgtacgatttttttcggttttcgcggttttgttgggaggtttcgatttttattcgggtttggttatttcgttttcgttcgcggttagaggtttgagtcgaggtttagcggtcgggacgggtttggatatcgtaggggttttttcgcggggtcgtcgtaaattttttttttagttttcgtggaggggtagcgttcgtttttcgttatttcggagttgtcgcggggttcggcgggttcggtcggggggcgggggaggtcgcggcgttggatttcgggtcgcggttttagtttcgtcgtacgggggtgcggttttttcgcgtcggcgtcgcgatcgcgttcggatatacgcggacgtttgggtcggagtcgtagggatacgcgggtcgcggatacgcgcgtcgtagtttttacgcgcgtcgtagttttcgcgtatattttttgtttgtcgttttacgagagggtcgtcgtcggaggtcgtttcgcgtttatttacgggtcgttcggtttcggattttagttcggttcggttttcgtttatcgtttcgcgtcgcggggaaagttgcgtttcgatttattcgtcgtttcggggcgcgtttcgtcgtcggttatcgtcgcgtttagtcgttcgcgtcgtcgtcgtcgttcgtttcgtcgcggggtcgtcgaagtcgcgtaggtcgtttaggtcgaggtcgtcgtcgcgttcgggtttcgttgcgtggtcgcgtagtcgatgtttagtatgaatggggcgtcgagcgtcgcgcggttgcggatcggtttcgttttcgtcgttcgcggagtttcgcgtcgcgcgtatgcgtcgtttagagttcgggggcggggcgggggcggggtcggcggcggtttttagagggcgttttgtttcgcgtcgcgcgtttgtaggggtttatcgcgcgtttttaaagggcgatacggttgttcgttttaattttttgggcgtcggggtcgcgcgggtagtttcgggagtttttcgttttcgagcgggttagttcgcgattttaggaatagggtttggtttagtgtgtttaggttaggagtatgg

SEQ ID NO: 10686 - DNA, 1085 bp, Artificial Sequence
  chemically treated genomic DNA (Homo sapiens) CpG-island No: 10686
ccatactcctaacctaaacacactaaaccaaaccctattcctaaaatcgcgaactaacccgctcgaaaacgaaaaactcccgaaactacccgcgcgaccccgacgcccaaaaaattaaaacgaacaaccgtatcgccctttaaaaacgcgcgataaacccctacaaacgcgcgacgcgaaacaaaacgccctctaaaaaccgccgccgaccccgcccccgccccgcccccgaactctaaacgacgcatacgcgcgacgcgaaactccgcgaacgacgaaaacgaaaccgatccgcaaccgcgcgacgctcgacgccccattcatactaaacatcgactacgcgaccacgcaacgaaacccgaacgcgacgacgacctcgacctaaacgacctacgcgacttcgacgaccccgcgacgaaacgaacgacgacgacgacgcgaacgactaaacgcgacgataaccgacgacgaaacgcgccccgaaacgacgaataaatcgaaacgcaactttccccgcgacgcgaaacgataaacgaaaaccgaaccgaactaaaatccgaaaccgaacgacccgtaaataaacgcgaaacgacctccgacgacgaccctctcgtaaaacgacaaacaaaaaatatacgcgaaaactacgacgcgcgtaaaaactacgacgcgcgtatccgcgacccgcgtatccctacgactccgacccaaacgtccgcgtatatccgaacgcgatcgcgacgccgacgcgaaaaaaccgcacccccgtacgacgaaactaaaaccgcgacccgaaatccaacgccgcgacctcccccgccccccgaccgaacccgccgaaccccgcgacaactccgaaataacgaaaaacgaacgctacccctccacgaaaactaaaaaaaaaatttacgacgaccccgcgaaaaaacccctacgatatccaaacccgtcccgaccgctaaacctcgactcaaacctctaaccgcgaacgaaaacgaaataaccaaacccgaataaaaatcgaaacctcccaacaaaaccgcgaaaaccgaaaaaaatcgtacaaactaaacccccgaccgacc

SEQ ID NO: 10687 - DNA, 1085 bp, Artificial Sequence
  chemically treated genomic DNA (Homo sapiens) CpG-island No: 10687
ttatgtttttagtttgggtatattgagttaggttttgtttttggggtcgcgggttagttcgttcgagagcggggggttttcggaattgttcgcgcggtttcggcgtttagagagttgaggcgggtagtcgtatcgttttttgaagacgcgcggtgggtttttgtaggcgcgcggcgcggggtagagcgttttttggaggtcgtcgtcggtttcgttttcgtttcgttttcgggttttgggcggcgtatgcgcgcggcgcggggtttcgcgggcggcgagagcgaggtcggttcgtagtcgcgcggcgttcggcgttttatttatgttgggtatcggttgcgcggttacgtagcggagttcgggcgcggcggcggtttcggtttgggcggtttacgcggtttcggcggtttcgcggcggggcggacggcggcggcggcgcgggcggttgggcgcggcgatggtcggcggcggggcgcgtttcggggcggcgggtgagtcggggcgtaatttttttcgcggcgcgggacggtgggcgggggtcgggtcgggttggggttcggggtcgggcggttcgtgggtgggcgcggggcggttttcggcggcggttttttcgtgaggcggtaggtagggggtgtgcgcggggattgcggcgcgcgtggggattgcggcgcgcgtgttcgcggttcgcgtgtttttgcggtttcggtttaggcgttcgcgtgtgttcgggcgcggtcgcggcgtcgacgcggagagatcgtattttcgtgcggcggggttgggatcgcggttcgggatttagcgtcgcggtttttttcgtttttcggtcgggttcgtcgagtttcgcggtagtttcggggtggcggggggcgggcgttgtttttttacggaggttggggagaaagtttgcggcggtttcgcggggaggtttttgcggtgtttaggttcgtttcggtcgttggatttcggtttagatttttggtcgcgggcgaggacggggtggttaggttcggatagggatcggagttttttagtagggtcgcgggggtcggaggaggtcgtgtaggttaagttttcggtcggtt

SEQ ID NO: 10688 - DNA, 1085 bp, Artificial Sequence
  chemically treated genomic DNA (Homo sapiens) CpG-island No: 10688
aaccgaccgaaaacttaacctacacgacctcctccgacccccgcgaccctactaaaaaactccgatccctatccgaacctaaccaccccgtcctcgcccgcgaccaaaaatctaaaccgaaatccaacgaccgaaacgaacctaaacaccgcaaaaacctccccgcgaaaccgccgcaaactttctccccaacctccgtaaaaaaacaacgcccgccccccgccaccccgaaactaccgcgaaactcgacgaacccgaccgaaaaacgaaaaaaaccgcgacgctaaatcccgaaccgcgatcccaaccccgccgcacgaaaatacgatctctccgcgtcgacgccgcgaccgcgcccgaacacacgcgaacgcctaaaccgaaaccgcaaaaacacgcgaaccgcgaacacgcgcgccgcaatccccacgcgcgccgcaatccccgcgcacaccccctacctaccgcctcacgaaaaaaccgccgccgaaaaccgccccgcgcccacccacgaaccgcccgaccccgaaccccaacccgacccgacccccgcccaccgtcccgcgccgcgaaaaaaattacgccccgactcacccgccgccccgaaacgcgccccgccgccgaccatcgccgcgcccaaccgcccgcgccgccgccgccgtccgccccgccgcgaaaccgccgaaaccgcgtaaaccgcccaaaccgaaaccgccgccgcgcccgaactccgctacgtaaccgcgcaaccgatacccaacataaataaaacgccgaacgccgcgcgactacgaaccgacctcgctctcgccgcccgcgaaaccccgcgccgcgcgcatacgccgcccaaaacccgaaaacgaaacgaaaacgaaaccgacgacgacctccaaaaaacgctctaccccgcgccgcgcgcctacaaaaacccaccgcgcgtcttcaaaaaacgatacgactacccgcctcaactctctaaacgccgaaaccgcgcgaacaattccgaaaaccccccgctctcgaacgaactaacccgcgaccccaaaaacaaaacctaactcaatatacccaaactaaaaacataa

SEQ ID NO: 10689 - DNA, 587 bp, Artificial Sequence
  chemically treated genomic DNA (Homo sapiens) CpG-island No: 10689
  unsure (184, 204, 221)
ggcgttggagggtgcggcgggtttgggagtagggaaggtttcgagttttagggaggcggtagcgttcggttatgttttttggagattggcggggttgcggggtcgaggggattcgcgagggagtcgcgttgcggacgcgttgagcgcgggagttcgaggggttttaggtagcggtgcgggcgtngaagtttaggggttggaggntatttgggcgtatagtngcggggcgttgagtcgggcgagacgcggggttttcggtttcgggcgcggcgtttaagcgggcgcgcggggcgtggtgtatttttgaagcggcgtaggttggcgcgggaaagcggtagggcggggcggcgcggttattggttacgcgttgggagtagggtcgcgtttcgtgtttttttttcgatagtttttattcgttttattttttttaagtagagtaatttcgcggatagcggagttcgtttagtatggatgttttaggtaattattttcgatttgttttttttttcgtatgtaagcgttttttgcgtggattttaacgaagattttttttggtttagatcgaggggtggaggaggtggagagag

SEQ ID NO: 10690 - DNA, 587 bp, Artificial Sequence
  chemically treated genomic DNA (Homo sapiens) CpG-island No: 10690
  unsure (367, 384, 404)
ctctctccacctcctccacccctcgatctaaaccaaaaaaaatcttcgttaaaatccacgcaaaaaacgcttacatacgaaaaaaaaaacaaatcgaaaataattacctaaaacatccatactaaacgaactccgctatccgcgaaattactctacttaaaaaaaataaaacgaataaaaactatcgaaaaaaaaacacgaaacgcgaccctactcccaacgcgtaaccaataaccgcgccgccccgccctaccgctttcccgcgccaacctacgccgcttcaaaaatacaccacgccccgcgcgcccgcttaaacgccgcgcccgaaaccgaaaaccccgcgtctcgcccgactcaacgccccgcnactatacgcccaaatancctccaacccctaaacttcnacgcccgcaccgctacctaaaacccctcgaactcccgcgctcaacgcgtccgcaacgcgactccctcgcgaatcccctcgaccccgcaaccccgccaatctccaaaaaacataaccgaacgctaccgcctccctaaaactcgaaaccttccctactcccaaacccgccgcaccctccaacgcc

SEQ ID NO: 10691 - DNA, 587 bp, Artificial Sequence
  chemically treated genomic DNA (Homo sapiens) CpG-island No: 10691
  unsure (367, 384, 404)
ttttttttattttttttatttttcgatttggattagggagagttttcgttaaaatttacgtagaaggcgtttgtatgcggaggggagggtaggtcgggggtggttatttggaatatttatgttgggcgagtttcgttgttcgcgaagttgttttgtttagagaaaatgaggcgagtgggagttgtcgggaggaggatacggagcgcgattttgtttttagcgcgtggttaataatcgcgtcgtttcgttttgtcgttttttcgcgttagtttgcgtcgttttaggggtgtattacgtttcgcgcgttcgtttaggcgtcgcgttcgggatcgggaatttcgcgtttcgttcggtttagcgtttcgtngttgtgcgtttaggtgntttttaatttttgggttttngcgttcgtatcgttgtttggggtttttcgagttttcgcgtttagcgcgttcgtagcgcggttttttcgcgggttttttcggtttcgtagtttcgttagtttttagagggtatagtcgagcgttgtcgtttttttaggattcggaattttttttgtttttaagttcgtcgtattttttaacgtt

SEQ ID NO: 10692 - DNA, 587 bp, Artificial Sequence
  chemically treated genomic DNA (Homo sapiens) CpG-island No: 10692
  unsure (184, 204, 221)
aacgttaaaaaatacgacgaacttaaaaacaaaaaaaattccgaatcctaaaaaaacgacaacgctcgactataccctctaaaaactaacgaaactacgaaaccgaaaaaacccgcgaaaaaaccgcgctacgaacgcgctaaacgcgaaaactcgaaaaaccccaaacaacgatacgaacgcnaaaacccaaaaattaaaaancacctaaacgcacaacnacgaaacgctaaaccgaacgaaacgcgaaattcccgatcccgaacgcgacgcctaaacgaacgcgcgaaacgtaatacacccctaaaacgacgcaaactaacgcgaaaaaacgacaaaacgaaacgacgcgattattaaccacgcgctaaaaacaaaatcgcgctccgtatcctcctcccgacaactcccactcgcctcattttctctaaacaaaacaacttcgcgaacaacgaaactcgcccaacataaatattccaaataaccacccccgacctaccctcccctccgcatacaaacgccttctacgtaaattttaacgaaaactctccctaatccaaatcgaaaaataaaaaaaataaaaaaaa

SEQ ID NO: 10693 - DNA, 586 bp, Artificial Sequence
  chemically treated genomic DNA (Homo sapiens) CpG-island No: 10693
  unsure (10..11, 87, 172, 185, 216, 559, 575)
ggggacgaannggttttcggaggttgttgcgagtttcgcgcgttttttcgcgttttttcgcgtcgttcgcgtcggcgtcggtttttnattttcgcgcgtcgttttttattagtttcgatgtaggcgttcggtcgggggttattcgggttgcggttgatgatgttcgggcgtncggggggcgttgncgcgagtcgggcggttgcggattttgtttgnggggtggcgttggttttgttgttgttgttattgttcgtttgttgtttcgtgcgggcgtagaacgatacggagtttatcgtgttggagggtaagtgtttggtggtgtgcgattttagttcgtcggcggacggcgtcgttattttttttttaggtattttcgtgcgtttcggtagcgttaaggtggtttttttcgttacgcggagtattaattacgagtcgttcgagatgagtaatcgtattatgattatttatttcgattaggttagtcgtcggtttgtttatttcgtttttagttcggggagaggggcggggatttgcgcgcgcgggttggggtttaggtttntttggacgtggagttntttaggttttg

SEQ ID NO: 10694 - DNA, 586 bp, Artificial Sequence
  chemically treated genomic DNA (Homo sapiens) CpG-island No: 10694
  unsure (12, 28, 371, 402, 415, 500, 576..)
caaaacctaaanaactccacgtccaaanaaacctaaaccccaacccgcgcgcgcaaatccccgcccctctccccgaactaaaaacgaaataaacaaaccgacgactaacctaatcgaaataaataatcataatacgattactcatctcgaacgactcgtaattaatactccgcgtaacgaaaaaaaccaccttaacgctaccgaaacgcacgaaaatacctaaaaaaaaaataacgacgccgtccgccgacgaactaaaatcgcacaccaccaaacacttaccctccaacacgataaactccgtatcgttctacgcccgcacgaaacaacaaacgaacaataacaacaacaacaaaaccaacgccaccccncaaacaaaatccgcaaccgcccgactcgcgncaacgccccccgnacgcccgaacatcatcaaccgcaacccgaataacccccgaccgaacgcctacatcgaaactaataaaaaacgacgcgcgaaaatnaaaaaccgacgccgacgcgaacgacgcgaaaaaacgcgaaaaaacgcgcgaaactcgcaacaacctccgaaaaccnnttcgtcccc

SEQ ID NO: 10695 - DNA, 586 bp, Artificial Sequence
  chemically treated genomic DNA (Homo sapiens) CpG-island No: 10695
  unsure (12, 28, 371, 402, 415, 500, 576..)
tagagtttgggnaattttacgtttaagnaagtttgaattttagttcgcgcgcgtaggttttcgttttttttttcgggttgggggcggggtgggtaggtcgacggttgatttggtcgaaatagatggttatggtgcggttgtttatttcggacggttcgtggttggtgtttcgcgtggcggagaaggttattttggcgttgtcggagcgtacggagatgtttagggaggaggtgacggcgtcgttcgtcgacgggttggagtcgtatattattaggtatttgttttttagtacgatgggtttcgtgtcgttttgcgttcgtacggggtagtaggcgggtagtagtagtaatagtagggttagcgttattttntaggtaggattcgtagtcgttcggttcgcgntagcgtttttcgngcgttcgggtattattagtcgtagttcgagtggttttcggtcgggcgtttgtatcgggattggtgggaggcggcgcgcgggggtnggaggtcggcgtcggcgcgagcggcgcggaagggcgcgaaggaacgcgcggagttcgtagtagttttcgggggttnnttcgttttt

SEQ ID NO: 10696 - DNA, 586 bp, Artificial Sequence
  chemically treated genomic DNA (Homo sapiens) CpG-island No: 10696
  unsure (10..11, 87, 172, 185, 216, 559, 575)
aaaaacgaannaacccccgaaaactactacgaactccgcgcgttccttcgcgcccttccgcgccgctcgcgccgacgccgacctccnacccccgcgcgccgcctcccaccaatcccgatacaaacgcccgaccgaaaaccactcgaactacgactaataatacccgaacgcncgaaaaacgctancgcgaaccgaacgactacgaatcctacctanaaaataacgctaaccctactattactactactacccgcctactaccccgtacgaacgcaaaacgacacgaaacccatcgtactaaaaaacaaatacctaataatatacgactccaacccgtcgacgaacgacgccgtcacctcctccctaaacatctccgtacgctccgacaacgccaaaataaccttctccgccacgcgaaacaccaaccacgaaccgtccgaaataaacaaccgcaccataaccatctatttcgaccaaatcaaccgtcgacctacccaccccgcccccaacccgaaaaaaaaaacgaaaacctacgcgcgcgaactaaaattcaaacttncttaaacgtaaaattncccaaactcta

SEQ ID NO: 10697 - DNA, 1003 bp, Artificial Sequence
  chemically treated genomic DNA (Homo sapiens) CpG-island No: 10697
tcggagagtttaattgtcgcgtttcgtcgtagtttttgtttgcgcggtcgattgtaataggatgttggggttttaggcgttcgtttcgagttttgggcgacgagaaagagttaatgaggagcgagggtaaaatcgggtgtagtaaattcgaaaagggggcgaggaggttcgcgaagagagcgggggaggaggcggggaggggcgaggaggggcggggagggtcgagcgaggaggaggcggttttgggggtcgggcggcgcgtttgatagaggaggggaagtttgggggcgtaagcgtcgtagtcgaggggtcggcgcggggaggcgggcgttaggcgggggtttgtagggtcgtcgcgcgtgacgtagcgtcgggtagggcgttattagttgtcgggtcgcggcgagggacgcgcggcgatagcggacggcgttgttcgggtcgggatagtagtagtcggcggtcgcgcgtaggattcgagggtttttagttatcgttttcgttagcgtcgcgtttcgttatagggcggtatgagtttattcgcggtcgtagttttagcgttttgttttttcgtttgggcggttcggttgcggtgacggttttcgttgttcgattgggggttatgaagtcgagttcggtcgggacggcgaaggagttggagttttcggcgtcggttcgaggcgagtagcgtacggcggagttcgaggggcgttggcgggagaagggcgaggtagatatcgagcggtagcgtattcgggagcggtaggaggttacgttggtcgggttggcggagttggagtatttgcgttagcgttaagagttgttggttaggggcgttttgcgcggcgtcgggggtgcgggagtcgttgcgtttcgcgttggggagttattgggggaggcggcgtagcgtagtcgtttggaggagaagtttttggaggagaatattttgttgttaagaaagtaattggtaggtcgtgttcgaagggtggagtatcggttggtt

SEQ ID NO: 10698 - DNA, 1003 bp, Artificial Sequence
  chemically treated genomic DNA (Homo sapiens) CpG-island No: 10698
aaccaaccgatactccacccttcgaacacgacctaccaattactttcttaacaacaaaatattctcctccaaaaacttctcctccaaacgactacgctacgccgcctcccccaataactccccaacgcgaaacgcaacgactcccgcacccccgacgccgcgcaaaacgcccctaaccaacaactcttaacgctaacgcaaatactccaactccgccaacccgaccaacgtaacctcctaccgctcccgaatacgctaccgctcgatatctacctcgcccttctcccgccaacgcccctcgaactccgccgtacgctactcgcctcgaaccgacgccgaaaactccaactccttcgccgtcccgaccgaactcgacttcataacccccaatcgaacaacgaaaaccgtcaccgcaaccgaaccgcccaaacgaaaaaacaaaacgctaaaactacgaccgcgaataaactcataccgccctataacgaaacgcgacgctaacgaaaacgataactaaaaaccctcgaatcctacgcgcgaccgccgactactactatcccgacccgaacaacgccgtccgctatcgccgcgcgtccctcgccgcgacccgacaactaataacgccctacccgacgctacgtcacgcgcgacgaccctacaaacccccgcctaacgcccgcctccccgcgccgacccctcgactacgacgcttacgcccccaaacttcccctcctctatcaaacgcgccgcccgacccccaaaaccgcctcctcctcgctcgaccctccccgcccctcctcgcccctccccgcctcctcccccgctctcttcgcgaacctcctcgcccccttttcgaatttactacacccgattttaccctcgctcctcattaactctttctcgtcgcccaaaactcgaaacgaacgcctaaaaccccaacatcctattacaatcgaccgcgcaaacaaaaactacgacgaaacgcgacaattaaactctccga

SEQ ID NO: 10699 - DNA, 1003 bp, Artificial Sequence
  chemically treated genomic DNA (Homo sapiens) CpG-island No: 10699
gattagtcggtgttttatttttcgggtacgatttattaattgtttttttagtagtaagatgtttttttttaagaattttttttttaggcgattgcgttgcgtcgttttttttagtagttttttagcgcggggcgtagcggttttcgtattttcggcgtcgcgtagggcgtttttgattagtagtttttggcgttggcgtaggtattttagtttcgttagttcggttagcgtggttttttgtcgttttcgggtgcgttgtcgttcggtgtttgtttcgtttttttttcgttagcgtttttcgggtttcgtcgtgcgttgttcgtttcgggtcggcgtcggaggttttagttttttcgtcgtttcggtcggattcggttttatggtttttagtcgggtagcgagagtcgttatcgtagtcgggtcgtttaggcggaggagtagggcgttagggttgcggtcgcgggtgggtttatgtcgttttgtggcggggcgcggcgttggcggggacggtggttagaagttttcgagttttgcgcgcgatcgtcggttgttgttgtttcggttcgggtagcgtcgttcgttgtcgtcgcgcgtttttcgtcgcggttcggtagttgataacgttttgttcggcgttacgttacgcgcggcggttttgtaaattttcgtttggcgttcgttttttcgcgtcggtttttcggttgcgacgtttgcgtttttaggtttttttttttttgttaggcgcgtcgttcggtttttagagtcgtttttttttcgttcggtttttttcgttttttttcgttttttttcgttttttttttcgtttttttcgcgggttttttcgtttttttttcgggtttattgtattcgattttgttttcgttttttattggttttttttcgtcgtttaaagttcggggcgagcgtttggagttttagtattttgttatagtcggtcgcgtaggtaggggttgcgacgggacgcggtagttgggtttttcgg

SEQ ID NO: 10700 - DNA, 1003 bp, Artificial Sequence
  chemically treated genomic DNA (Homo sapiens) CpG-island No: 10700
ccgaaaaacccaactaccgcgtcccgtcgcaacccctacctacgcgaccgactataacaaaatactaaaactccaaacgctcgccccgaactttaaacgacgaaaaaaaaccaataaaaaacgaaaacaaaatcgaatacaataaacccgaaaaaaaaacgaaaaaacccgcgaaaaaaacgaaaaaaaaaacgaaaaaaaacgaaaaaaaacgaaaaaaaccgaacgaaaaaaaaacgactctaaaaaccgaacgacgcgcctaacaaaaaaaaaaaaacctaaaaacgcaaacgtcgcaaccgaaaaaccgacgcgaaaaaacgaacgccaaacgaaaatttacaaaaccgccgcgcgtaacgtaacgccgaacaaaacgttatcaactaccgaaccgcgacgaaaaacgcgcgacgacaacgaacgacgctacccgaaccgaaacaacaacaaccgacgatcgcgcgcaaaactcgaaaacttctaaccaccgtccccgccaacgccgcgccccgccacaaaacgacataaacccacccgcgaccgcaaccctaacgccctactcctccgcctaaacgacccgactacgataacgactctcgctacccgactaaaaaccataaaaccgaatccgaccgaaacgacgaaaaaactaaaacctccgacgccgacccgaaacgaacaacgcacgacgaaacccgaaaaacgctaacgaaaaaaaaacgaaacaaacaccgaacgacaacgcacccgaaaacgacaaaaaaccacgctaaccgaactaacgaaactaaaatacctacgccaacgccaaaaactactaatcaaaaacgccctacgcgacgccgaaaatacgaaaaccgctacgccccgcgctaaaaaactactaaaaaaaacgacgcaacgcaatcgcctaaaaaaaaaattcttaaaaaaaaacatcttactactaaaaaaacaattaataaatcgtacccgaaaaataaaacaccgactaatc

SEQ ID NO: 10701 - DNA, 764 bp, Artificial Sequence
  chemically treated genomic DNA (Homo sapiens) CpG-island No: 10701
ggtcgcgtcggtttattgtatggttattaggtcgcgaaggtattgcgttacgttacgcgaggggttgagacgacgtagtagtcgtcggcggtggtttcgtattagggtatacgcgtttaggtttttggtcgtttcgaaggcgcggaagcggatttatatgtcgcggcggggtttttagttgcgttcgaagtagtttacgaaggcggttgggtcgtgggcgtggagttcggttagcgtttcgtcgtaggttgcgggcgacgacgcgttagttaggcggtataggcgcgattataggttcgggttttcgcggtcggcgtcgtttagtttttgcgttttgttgaagagcgtttttaggttttgcgcgcggtagatttgtacgcgcgcgtagggtagtagttggcgtattgtaggtaattgcgtcgttatttcgggttcggcggtgaggtagcgtacgcggtttttgacgtttggcgcgttttgtagtagcgacgcgagcgcgaagcgtagtaggttcggtgtgttcgggcgcgttacgtagtaggtagtttggcgcgtacggttcgagtcgtttacgtatagtacggttagtagatttagcgcgttttgtagtttcggtagtcggtttattagtagtatgcgagggaagcgtcgtagtagcgttttggtgcgcgacgttaggaagaatatcgtttttattatagtttggttttttacgaatattagttttatttgcgggcgggggtagggaggtaaggaaagaggtt

SEQ ID NO: 10702 - DNA, 764 bp, Artificial Sequence
  chemically treated genomic DNA (Homo sapiens) CpG-island No: 10702
aacctctttccttacctccctacccccgcccgcaaataaaactaatattcgtaaaaaaccaaactataataaaaacgatattcttcctaacgtcgcgcaccaaaacgctactacgacgcttccctcgcatactactaataaaccgactaccgaaactacaaaacgcgctaaatctactaaccgtactatacgtaaacgactcgaaccgtacgcgccaaactacctactacgtaacgcgcccgaacacaccgaacctactacgcttcgcgctcgcgtcgctactacaaaacgcgccaaacgtcaaaaaccgcgtacgctacctcaccgccgaacccgaaataacgacgcaattacctacaatacgccaactactaccctacgcgcgcgtacaaatctaccgcgcgcaaaacctaaaaacgctcttcaacaaaacgcaaaaactaaacgacgccgaccgcgaaaacccgaacctataatcgcgcctataccgcctaactaacgcgtcgtcgcccgcaacctacgacgaaacgctaaccgaactccacgcccacgacccaaccgccttcgtaaactacttcgaacgcaactaaaaaccccgccgcgacatataaatccgcttccgcgccttcgaaacgaccaaaaacctaaacgcgtataccctaatacgaaaccaccgccgacgactactacgtcgtctcaacccctcgcgtaacgtaacgcaataccttcgcgacctaataaccatacaataaaccgacgcgacc

SEQ ID NO: 10703 - DNA, 764 bp, Artificial Sequence
  chemically treated genomic DNA (Homo sapiens) CpG-island No: 10703
gatttttttttttgtttttttgttttcgttcgtaggtgaagttggtgttcgtggaggattaggttgtggtggagacggtgttttttttgacgtcgcgtattagggcgttgttgcggcgtttttttcgtatgttgttggtggatcggttgtcggggttgtagggcgcgttggatttgttggtcgtgttgtgcgtggacggttcgggtcgtgcgcgttaggttgtttgttgcgtggcgcgttcgggtatatcgagtttgttgcgtttcgcgttcgcgtcgttgttgtagagcgcgttagacgttaagggtcgcgtgcgttgttttatcgtcgggttcgaggtggcggcgtagttgtttgtagtgcgttagttgttgttttgcgcgcgcgtgtagatttgtcgcgcgtagggtttggagacgttttttagtaaggcgtaggagttgggcggcgtcggtcgcgaggattcgggtttgtggtcgcgtttgtgtcgtttggttggcgcgtcgtcgttcgtagtttacgacgaggcgttggtcgagttttacgtttacggtttagtcgttttcgtggattatttcgagcgtaattgggagtttcgtcgcgatatgtgggttcgttttcgcgttttcgaggcggttagagatttggacgcgtgtgttttggtgcgaggttatcgtcggcgattgttgcgtcgttttagtttttcgcgtggcgtggcgtagtgttttcgcgatttggtggttatgtagtgggtcgacgcggtt

SEQ ID NO: 10704 - DNA, 764 bp, Artificial Sequence
  chemically treated genomic DNA (Homo sapiens) CpG-island No: 10704
aaccgcgtcgacccactacataaccaccaaatcgcgaaaacactacgccacgccacgcgaaaaactaaaacgacgcaacaatcgccgacgataacctcgcaccaaaacacacgcgtccaaatctctaaccgcctcgaaaacgcgaaaacgaacccacatatcgcgacgaaactcccaattacgctcgaaataatccacgaaaacgactaaaccgtaaacgtaaaactcgaccaacgcctcgtcgtaaactacgaacgacgacgcgccaaccaaacgacacaaacgcgaccacaaacccgaatcctcgcgaccgacgccgcccaactcctacgccttactaaaaaacgtctccaaaccctacgcgcgacaaatctacacgcgcgcgcaaaacaacaactaacgcactacaaacaactacgccgccacctcgaacccgacgataaaacaacgcacgcgacccttaacgtctaacgcgctctacaacaacgacgcgaacgcgaaacgcaacaaactcgatatacccgaacgcgccacgcaacaaacaacctaacgcgcacgacccgaaccgtccacgcacaacacgaccaacaaatccaacgcgccctacaaccccgacaaccgatccaccaacaacatacgaaaaaaacgccgcaacaacgccctaatacgcgacgtcaaaaaaaacaccgtctccaccacaacctaatcctccacgaacaccaacttcacctacgaacgaaaacaaaaaaacaaaaaaaaaaatc

SEQ ID NO: 10705 - DNA, 537 bp, Artificial Sequence
  chemically treated genomic DNA (Homo sapiens) CpG-island No: 10705
tttcggttttttgttagggagttatcgcggtcgtagagggtcgaaaggtgttcgtacgtatttgttttttcgttttttttcgaggagtttttgaggatttgtgttttttagaagtggggaaagttcgtttaaggcgtcggtgttgacggtggcgggattgtcgggttcgttgtggaatcgtttttcgttagagttgcgggttgatgacggttttcgcgggggcgggaagcggtttaggttgttttcgtcggtttgcggcggcgagtttggaagcgcggtttattcgtgcgcgggttattcggggttgtgtttcgcgcgattgtgtgtgtaggaaataagtaggaaatattttaaaatagaatgaagtgttatgttgagggtcgcggacgtcgcgagtgttgtgggaatgtgggttaaggtggagagttatggtggcgcgtgttataggtttaggggttaggaagaagtttaatcgtggaggcggtatttgaggagggttttgaacgttgggtaggtttttgttcgatagagatggag

SEQ ID NO: 10706 - DNA, 537 bp, Artificial Sequence
  chemically treated genomic DNA (Homo sapiens) CpG-island No: 10706
ctccatctctatcgaacaaaaacctacccaacgttcaaaaccctcctcaaataccgcctccacgattaaacttcttcctaacccctaaacctataacacgcgccaccataactctccaccttaacccacattcccacaacactcgcgacgtccgcgaccctcaacataacacttcattctattttaaaatatttcctacttatttcctacacacacaatcgcgcgaaacacaaccccgaataacccgcgcacgaataaaccgcgcttccaaactcgccgccgcaaaccgacgaaaacaacctaaaccgcttcccgcccccgcgaaaaccgtcatcaacccgcaactctaacgaaaaacgattccacaacgaacccgacaatcccgccaccgtcaacaccgacgccttaaacgaactttccccacttctaaaaaacacaaatcctcaaaaactcctcgaaaaaaaacgaaaaaacaaatacgtacgaacacctttcgaccctctacgaccgcgataactccctaacaaaaaaccgaaa

SEQ ID NO: 10707 - DNA, 537 bp, Artificial Sequence
  chemically treated genomic DNA (Homo sapiens) CpG-island No: 10707
ttttatttttatcgagtaaaagtttgtttagcgtttaagattttttttagatgtcgtttttacgattaggtttttttttgatttttgagtttgtaatacgcgttattataattttttattttagtttatatttttatagtattcgcgacgttcgcggtttttaatatggtattttattttattttagggtattttttgtttgttttttgtatatatagtcgcgcgaggtatagtttcgagtgattcgcgtacgagtggatcgcgtttttagattcgtcgtcgtaggtcggcgagggtagtttaagtcgtttttcgttttcgcggggatcgttattagttcgtagttttagcgggaggcggttttatagcgagttcggtagtttcgttatcgttagtatcggcgttttgggcgagttttttttatttttgggaggtataaatttttaggggtttttcgagaggaaacgagggagtagatgcgtgcggatatttttcggttttttgcggtcgcggtagttttttggtagaaaatcggaa

SEQ ID NO: 10708 - DNA, 537 bp, Artificial Sequence
  chemically treated genomic DNA (Homo sapiens) CpG-island No: 10708
ttccgattttctaccaaaaaactaccgcgaccgcaaaaaaccgaaaaatatccgcacgcatctactccctcgtttcctctcgaaaaacccctaaaaatttatacctcccaaaaataaaaaaaactcgcccaaaacgccgatactaacgataacgaaactaccgaactcgctataaaaccgcctcccgctaaaactacgaactaataacgatccccgcgaaaacgaaaaacgacttaaactaccctcgccgacctacgacgacgaatctaaaaacgcgatccactcgtacgcgaatcactcgaaactatacctcgcgcgactatatatacaaaaaacaaacaaaaaataccctaaaataaaataaaataccatattaaaaaccgcgaacgtcgcgaatactataaaaatataaactaaaataaaaaattataataacgcgtattacaaactcaaaaatcaaaaaaaaacctaatcgtaaaaacgacatctaaaaaaaatcttaaacgctaaacaaacttttactcgataaaaataaaa

SEQ ID NO: 10709 - DNA, 660 bp, Artificial Sequence
  chemically treated genomic DNA (Homo sapiens) CpG-island No: 10709
ggagggtgtatttttaggaggcggcgggtgttttcgtcggttttagcgttcgggcggagggtagggaggggagcggcgttgcgaggaatggtgtttatttcgggtcggagtttttcgtttttcgtcggagaggaggaggcggtagcggcggcggtatggagtcgggggagggcggcggtggtagcgttcggtttgtttgttttcgcggcggtagtagtagtagtcgtcgtcgtcgtcgtcgttgtatgaatttttgtattacggttgtttttcgcgtgtagcgtatttagcggcgggcgagcgggcggtttaagaggtaggcggaggtagtagcggcggcggcggcgatcggagttttcgtcggtttcgtttcgtagtcggattatatcgatatttttcggttcggttgtttcggttcggggggcgttaggaggttgtggttcggggtggagagttttaacggttggagtagtataggacgtgtttcgcggaggaaattggttgtacgttatgagttttgtttttattcggttgtcgttcgggtggggggggggtaatgtgtaagggtgggggtgtttaaagggtcgttagcgtcggggtggggtttcgtacgtggggttgaggcggggcggggttttggtaggtggtgttttggggtgg

SEQ ID NO: 10710 - DNA, 660 bp, Artificial Sequence
  chemically treated genomic DNA (Homo sapiens) CpG-island No: 10710
ccaccccaaaacaccacctaccaaaaccccgccccgcctcaaccccacgtacgaaaccccaccccgacgctaacgaccctttaaacacccccacccttacacattaccccccccccacccgaacgacaaccgaataaaaacaaaactcataacgtacaaccaatttcctccgcgaaacacgtcctatactactccaaccgttaaaactctccaccccgaaccacaacctcctaacgccccccgaaccgaaacaaccgaaccgaaaaatatcgatataatccgactacgaaacgaaaccgacgaaaactccgatcgccgccgccgccgctactacctccgcctacctcttaaaccgcccgctcgcccgccgctaaatacgctacacgcgaaaaacaaccgtaatacaaaaattcatacaacgacgacgacgacgacgactactactactaccgccgcgaaaacaaacaaaccgaacgctaccaccgccgccctcccccgactccataccgccgccgctaccgcctcctcctctccgacgaaaaacgaaaaactccgacccgaaataaacaccattcctcgcaacgccgctcccctccctaccctccgcccgaacgctaaaaccgacgaaaacacccgccgcctcctaaaaatacaccctcc

SEQ ID NO: 10711 - DNA, 660 bp, Artificial Sequence
  chemically treated genomic DNA (Homo sapiens) CpG-island No: 10711
ttattttagggtattatttattagggtttcgtttcgttttagttttacgtgcggggttttatttcggcgttagcggttttttaaatatttttatttttatatattattttttttttattcggacggtagtcgaatagggataaaatttatggcgtatagttagtttttttcgcggagtacgttttgtgttgttttagtcgttggggttttttatttcgggttatagttttttggcgtttttcgggtcgaggtagtcgggtcgaggagtgtcggtgtggttcggttacggggcggggtcggcgggagtttcggtcgtcgtcgtcgtcgttgttgttttcgtttgttttttgggtcgttcgttcgttcgtcgttgggtgcgttgtacgcggggggtagtcgtggtgtagaggtttatgtagcggcggcggcggcggcggttgttgttgttgtcgtcgcggaggtagatagatcgggcgttgttatcgtcgttttttttcggttttatgtcgtcgtcgttgtcgttttttttttttcggcgaggggcggggggtttcggttcggggtgggtattatttttcgtagcgtcgtttttttttttgtttttcgttcgggcgttggagtcggcgagggtattcgtcgttttttaggagtgtatttttt

SEQ ID NO: 10712 - DNA, 660 bp, Artificial Sequence
  chemically treated genomic DNA (Homo sapiens) CpG-island No: 10712
aaaaaatacactcctaaaaaacgacgaataccctcgccgactccaacgcccgaacgaaaaacaaaaaaaaaaacgacgctacgaaaaataatacccaccccgaaccgaaaccccccgcccctcgccgaaaaaaaaaaaacgacaacgacgacgacataaaaccgaaaaaaaacgacgataacaacgcccgatctatctacctccgcgacgacaacaacaacaaccgccgccgccgccgccgctacataaacctctacaccacgactaccccccgcgtacaacgcacccaacgacgaacgaacgaacgacccaaaaaacaaacgaaaacaacaacgacgacgacgacgaccgaaactcccgccgaccccgccccgtaaccgaaccacaccgacactcctcgacccgactacctcgacccgaaaaacgccaaaaaactataacccgaaataaaaaaccccaacgactaaaacaacacaaaacgtactccgcgaaaaaaactaactatacgccataaattttatccctattcgactaccgtccgaataaaaaaaaaataatatataaaaataaaaatatttaaaaaaccgctaacgccgaaataaaaccccgcacgtaaaactaaaacgaaacgaaaccctaataaataataccctaaaataa

SEQ ID NO: 10713 - DNA, 562 bp, Artificial Sequence
  chemically treated genomic DNA (Homo sapiens) CpG-island No: 10713
ttcgtttttttgtttggttttcgtttttttcgtcgtcgggtcggttttttcgttcgagtcgtcgtataagcggaatttgtattattttttttattcgttgtttgtaggtttcgcgttgttgcgtttggtcgttttttatttggggttttttttcgtgtggttttgttagcgtttttttcgcgtttttatggtagttaagaggagtttcggggtcgcgttagtatttgtttcggtttcggttcggcgtcggtgtcggcggcgaggtcgagcgcgttcgagttttttataaataggttttcgagtatatttttattgttttgcgtatcgatgaggatgagaaaggtaattagggggttgggggagggggcggcggcgtcgggaagaaggcggtggggtcgtcgggggagggtaatatttgcgttttttttttgcgggaggggacggtgtattttcggaattgatatgtttcgggagattgttttttcgtaggtcggagttttattttttagtatttttaaaattttttttttttagggtattgtagttgtcgattttgttttag

SEQ ID NO: 10714 - DNA, 562 bp, Artificial Sequence
  chemically treated genomic DNA (Homo sapiens) CpG-island No: 10714
ctaaaacaaaatcgacaactacaataccctaaaaaaaaaaaattttaaaaatactaaaaaataaaactccgacctacgaaaaaacaatctcccgaaacatatcaattccgaaaatacaccgtcccctcccgcaaaaaaaaaacgcaaatattaccctcccccgacgaccccaccgccttcttcccgacgccgccgccccctcccccaaccccctaattacctttctcatcctcatcgatacgcaaaacaataaaaatatactcgaaaacctatttataaaaaactcgaacgcgctcgacctcgccgccgacaccgacgccgaaccgaaaccgaaacaaatactaacgcgaccccgaaactcctcttaactaccataaaaacgcgaaaaaaacgctaacaaaaccacacgaaaaaaaaccccaaataaaaaacgaccaaacgcaacaacgcgaaacctacaaacaacgaataaaaaaaataatacaaattccgcttatacgacgactcgaacgaaaaaaccgacccgacgacgaaaaaaacgaaaaccaaacaaaaaaacgaa

SEQ ID NO: 10715 - DNA, 562 bp, Artificial Sequence
  chemically treated genomic DNA (Homo sapiens) CpG-island No: 10715
ttgaaataaagtcgatagttatagtgttttgaaagggagaggttttaagaatattagaagatgaggtttcgatttacgggaaagtagtttttcggggtatattaatttcgggggtgtatcgttttttttcgtagaaaagggacgtaggtgttgttttttttcggcgattttatcgtttttttttcggcgtcgtcgtttttttttttagttttttagttattttttttatttttatcgatgcgtagggtaatggagatgtattcgaaggtttgtttgtggaagattcggacgcgttcggtttcgtcgtcggtatcggcgtcgggtcgaggtcgaggtaggtgttggcgcggtttcggagttttttttggttgttatgagggcgcgggagaagcgttggtagagttatacgaagaggagttttaggtggaaggcgattaaacgtagtagcgcgaagtttataaatagcgggtaggagaaatagtataggtttcgtttatgcggcgattcgggcggaggggtcggttcggcggcgggaggggcgggggttaggtaagggggcgga

SEQ ID NO: 10716 - DNA, 562 bp, Artificial Sequence
  chemically treated genomic DNA (Homo sapiens) CpG-island No: 10716
tccgcccccttacctaacccccgcccctcccgccgccgaaccgacccctccgcccgaatcgccgcataaacgaaacctatactatttctcctacccgctatttataaacttcgcgctactacgtttaatcgccttccacctaaaactcctcttcgtataactctaccaacgcttctcccgcgccctcataacaaccaaaaaaaactccgaaaccgcgccaacacctacctcgacctcgacccgacgccgataccgacgacgaaaccgaacgcgtccgaatcttccacaaacaaaccttcgaatacatctccattaccctacgcatcgataaaaataaaaaaaataactaaaaaactaaaaaaaaaaacgacgacgccgaaaaaaaaacgataaaatcgccgaaaaaaaacaacacctacgtcccttttctacgaaaaaaaacgatacacccccgaaattaatataccccgaaaaactactttcccgtaaatcgaaacctcatcttctaatattcttaaaacctctccctttcaaaacactataactatcgactttatttcaa

SEQ ID NO: 10717 - DNA, 776 bp, Artificial Sequence
  chemically treated genomic DNA (Homo sapiens) CpG-island No: 10717
tttcgttatagtttatgatttaattgcgacgatatcgttagagtatttttattatattcgaagattcgttcgttataagtcgttttcggttagtttttttttaatatttggtttaaattgcgatgatgtgtttagaagtttttcgggcgacgtggttatcgtatcgtattttgagttatgggcgtcggcgagatttatatatttcgtcgttcggttagtattaggtttcgggtgtcgtcggttgtgtttcgatatttcgcgttaagcgagtacggcgcggttaagattggattggggcgtcggttttcgatggttttcggttttcgttcggatttcgggtcggtttggagtcgtttgagcgagagtcgttcgtcgcgatatatttgttttgtcgtttcgtcgaggtcggggttcgttcgtcgttttcgcgttggtttcgttcgttcgagtttcggatttttggttttcgtttgttatcgcgtcgatagtcgttttagcgttcgcggttcgggtagcgtttgcggttcggttcggtcgcggaagggttaatgcggcgcgcgttttttcggttttttcgttcgtttttcggttttttttcgtttgtcgcgcgttcgtagtatcgtttttttttttttttatttcgttttatcgcgcgcgttcgatttttttattggttgagtcgcgtcgagtgtttttttaacgttagtttttcgttttgttaaggagtttttgggattcgcgcgtttagaagagggggaagggatttttaggtaggg

SEQ ID NO: 10718 - DNA, 776 bp, Artificial Sequence
  chemically treated genomic DNA (Homo sapiens) CpG-island No: 10718
ccctacctaaaaatcccttccccctcttctaaacgcgcgaatcccaaaaactccttaacaaaacgaaaaactaacgttaaaaaaacactcgacgcgactcaaccaataaaaaaatcgaacgcgcgcgataaaacgaaataaaaaaaaaaaaaaacgatactacgaacgcgcgacaaacgaaaaaaaaccgaaaaacgaacgaaaaaaccgaaaaaacgcgcgccgcattaacccttccgcgaccgaaccgaaccgcaaacgctacccgaaccgcgaacgctaaaacgactatcgacgcgataacaaacgaaaaccaaaaatccgaaactcgaacgaacgaaaccaacgcgaaaacgacgaacgaaccccgacctcgacgaaacgacaaaacaaatatatcgcgacgaacgactctcgctcaaacgactccaaaccgacccgaaatccgaacgaaaaccgaaaaccatcgaaaaccgacgccccaatccaatcttaaccgcgccgtactcgcttaacgcgaaatatcgaaacacaaccgacgacacccgaaacctaatactaaccgaacgacgaaatatataaatctcgccgacgcccataactcaaaatacgatacgataaccacgtcgcccgaaaaacttctaaacacatcatcgcaatttaaaccaaatattaaaaaaaaactaaccgaaaacgacttataacgaacgaatcttcgaatataataaaaatactctaacgatatcgtcgcaattaaatcataaactataacgaaa

SEQ ID NO: 10719 - DNA, 776 bp, Artificial Sequence
  chemically treated genomic DNA (Homo sapiens) CpG-island No: 10719
ttttgtttaagggtttttttttttttttttgggcgcgcgagttttaggggttttttggtagagcgaggggttggcgttgggggagtattcggcgcggtttagttaatgggaaggtcgggcgcgcgcggtggggcgggatgggggggggagagggcggtgttgcgggcgcgcggtaggcgggagggggtcgggaggcgggcgaaggagtcggaggggcgcgcgtcgtattaattttttcgcggtcgggtcgagtcgtaggcgttgttcgagtcgcgggcgttggagcggttgtcggcgcggtggtaggcgggagttaggagttcggggttcgggcgggcggagttagcgcggggacggcggacgggtttcggtttcggcggggcggtaagataggtgtgtcgcggcgggcggttttcgtttaggcggttttaggtcggttcggggttcgagcggggatcgggagttatcgaggatcggcgttttagtttagttttggtcgcgtcgtgttcgtttggcgcggggtgtcgggatatagtcggcggtattcgaagtttagtgttggtcgggcggcgaggtgtgtgggtttcgtcggcgtttatggtttaggatgcggtgcgatggttacgtcgttcgagaaatttttggatatattatcgtagtttaggttaagtattggggaggggttgatcgggagcggtttgtggcgggcgaattttcgagtgtgataggggtgttttggcggtgtcgtcgtagttgagttatgagttgtggcggga

SEQ ID NO: 10720 - DNA, 776 bp, Artificial Sequence
  chemically treated genomic DNA (Homo sapiens) CpG-island No: 10720
tcccgccacaactcataactcaactacgacgacaccgccaaaacacccctatcacactcgaaaattcgcccgccacaaaccgctcccgatcaacccctccccaatacttaacctaaactacgataatatatccaaaaatttctcgaacgacgtaaccatcgcaccgcatcctaaaccataaacgccgacgaaacccacacacctcgccgcccgaccaacactaaacttcgaataccgccgactatatcccgacaccccgcgccaaacgaacacgacgcgaccaaaactaaactaaaacgccgatcctcgataactcccgatccccgctcgaaccccgaaccgacctaaaaccgcctaaacgaaaaccgcccgccgcgacacacctatcttaccgccccgccgaaaccgaaacccgtccgccgtccccgcgctaactccgcccgcccgaaccccgaactcctaactcccgcctaccaccgcgccgacaaccgctccaacgcccgcgactcgaacaacgcctacgactcgacccgaccgcgaaaaaattaatacgacgcgcgcccctccgactccttcgcccgcctcccgaccccctcccgcctaccgcgcgcccgcaacaccgccctctcccccccccatcccgccccaccgcgcgcgcccgaccttcccattaactaaaccgcgccgaatactcccccaacgccaacccctcgctctaccaaaaaacccctaaaactcgcgcgcccaaaaaaaaaaaaaaaaacccttaaacaaaa

SEQ ID NO: 10721 - DNA, 592 bp, Artificial Sequence
  chemically treated genomic DNA (Homo sapiens) CpG-island No: 10721
tttcgcgtttatttttattagggttcgttttaatttcgtcgtttcgtagatttacgtgtaggatattttgaggacggagttggttgcggaggtgtatcgcgtgttgtgtttcgagcggggttatatgtttgtttgcggcgatgttattatggtaattaacgttttgtagatcgtgtagcgtattttggcgacggagggcgatatggagttggacgaggtcggcgacgttatcggcgtgttgcgggtgcggaggggcgggtcgggtttgagcgtgcggggtttttgttaaggttttcgagtcgggttttgatttattgtgttttttttcgataggattagtaacgttattacgaagatattttcgggtttacgttgcgtatttaggaggtgataagtcgtatacgtatttagagtttttttttgtaggagcgttagttgcggggcgtagtgttttgggcgttcgattttttcggtttagatattaatagtttttgagagtcgtttggtttttttttttagtttcgggagagcggttgttcgatttaggttcgttcgattaggattagtttcgtttttttttttttgaggtggt

SEQ ID NO: 10722 - DNA, 592 bp, Artificial Sequence
  chemically treated genomic DNA (Homo sapiens) CpG-island No: 10722
accacctcaaaaaaaaaaaaacgaaactaatcctaatcgaacgaacctaaatcgaacaaccgctctcccgaaactaaaaaaaaaaaccaaacgactctcaaaaactattaatatctaaaccgaaaaaatcgaacgcccaaaacactacgccccgcaactaacgctcctacaaaaaaaaactctaaatacgtatacgacttatcacctcctaaatacgcaacgtaaacccgaaaatatcttcgtaataacgttactaatcctatcgaaaaaaaacacaataaatcaaaacccgactcgaaaaccttaacaaaaaccccgcacgctcaaacccgacccgcccctccgcacccgcaacacgccgataacgtcgccgacctcgtccaactccatatcgccctccgtcgccaaaatacgctacacgatctacaaaacgttaattaccataataacatcgccgcaaacaaacatataaccccgctcgaaacacaacacgcgatacacctccgcaaccaactccgtcctcaaaatatcctacacgtaaatctacgaaacgacgaaattaaaacgaaccctaataaaaataaacgcgaaa

SEQ ID NO: 10723 - DNA, 592 bp, Artificial Sequence
  chemically treated genomic DNA (Homo sapiens) CpG-island No: 10723
attattttaagaggggaggagcggggttgattttggtcgggcggatttgagtcgggtagtcgttttttcggaattggaagggaaagttaggcggtttttaggggttgttggtgtttgagtcgggagggtcgaacgtttagggtattgcgtttcgtaattgacgtttttgtaaggaaaagttttgggtgcgtatgcggtttgttattttttgggtgcgtagcgtgagttcgaaaatgttttcgtggtagcgttgttgattttgtcggaaaagagtatagtggattagaattcgattcggagattttagtaggaatttcgtacgtttaggttcggttcgttttttcgtattcgtagtacgtcgatgacgtcgtcggtttcgtttagttttatgtcgtttttcgtcgttaggatgcgttgtacggtttgtaggacgttggttgttatggtaatatcgtcgtagataaatatgtggtttcgttcgaggtatagtacgcggtgtattttcgtagttagtttcgtttttaggatgttttgtacgtaggtttgcggggcggcggggttagggcgggttttggtgggggtgggcgcgggg

SEQ ID NO: 10724 - DNA, 592 bp, Artificial Sequence
  chemically treated genomic DNA (Homo sapiens) CpG-island No: 10724
ccccgcgcccacccccaccaaaacccgccctaaccccgccgccccgcaaacctacgtacaaaacatcctaaaaacgaaactaactacgaaaatacaccgcgtactatacctcgaacgaaaccacatatttatctacgacgatattaccataacaaccaacgtcctacaaaccgtacaacgcatcctaacgacgaaaaacgacataaaactaaacgaaaccgacgacgtcatcgacgtactacgaatacgaaaaaacgaaccgaacctaaacgtacgaaattcctactaaaatctccgaatcgaattctaatccactatactcttttccgacaaaatcaacaacgctaccacgaaaacattttcgaactcacgctacgcacccaaaaaataacaaaccgcatacgcacccaaaacttttccttacaaaaacgtcaattacgaaacgcaataccctaaacgttcgaccctcccgactcaaacaccaacaacccctaaaaaccgcctaactttcccttccaattccgaaaaaacgactacccgactcaaatccgcccgaccaaaatcaaccccgctcctcccctcttaaaataat

SEQ ID NO: 10725 - DNA, 927 bp, Artificial Sequence
  chemically treated genomic DNA (Homo sapiens) CpG-island No: 10725
gggattgatagcgtcgcgtagggggttcgaggcgggacgtggggattttacgttttttacgcgcgttttacggcgtgttcgttaatataggcgagggtaagggtgcgttatttaagtaagggggacggtggcgttcgggttgagtagcggcgagcggtaatcgagagtggggggttgttttagcggtatatattttcggcgaaatagtttcgcggtttttggaaagtgtttcggacgggttgagggcgttttttcgtttgcgaggagatataaaggtaagagcgggtgagcgattagggtcgggatttttcgggggtggtcgcggtgtttttttattttcgagttcgagttgttgttttggtttttcgattcgttgattagggacgatttgatttcgtttaggttcgttgcgtcgaggcgaatcgttgttcggtttttgtttttcgtttttttcgttttggaaggggattagttcgtcgttcgtttcgaggtcgtttttttcgtcggtcgtttcgcgttaggagcgtcgtttttttcgttgacgtcgtcgtcgtcgtcgttttcgtcgtcgagttggggtatggtggggtcgcggtcggggcgtacgttttcggagtttttagtcgttcgcgttttgttcggttcggttcggcgtttttttcgttcgtttgcgggatattggcgttatcgtcgtaataaagtttgatagggcgtggttcgcgggaagcggcgcggcgttgttcggtcggggcgtaggcggttcggttcgggttttttcggtagcgtcgagtttagggttttttaattcgttatcgtcgtcgtttgtttcgtcggggcgttttagtttttggttcgtcggggaggggcgagcggggagggagggaggagggatcgtcgggttgggtaggggggtcggagggaggagtt

SEQ ID NO: 10726 - DNA, 927 bp, Artificial Sequence
  chemically treated genomic DNA (Homo sapiens) CpG-island No: 10726
aactcctccctccgacccccctacccaacccgacgatccctcctccctccctccccgctcgcccctccccgacgaaccaaaaactaaaacgccccgacgaaacaaacgacgacgataacgaattaaaaaaccctaaactcgacgctaccgaaaaaacccgaaccgaaccgcctacgccccgaccgaacaacgccgcgccgcttcccgcgaaccacgccctatcaaactttattacgacgataacgccaatatcccgcaaacgaacgaaaaaaacgccgaaccgaaccgaacaaaacgcgaacgactaaaaactccgaaaacgtacgccccgaccgcgaccccaccataccccaactcgacgacgaaaacgacgacgacgacgacgtcaacgaaaaaaacgacgctcctaacgcgaaacgaccgacgaaaaaaacgacctcgaaacgaacgacgaactaatccccttccaaaacgaaaaaaacgaaaaacaaaaaccgaacaacgattcgcctcgacgcaacgaacctaaacgaaatcaaatcgtccctaatcaacgaatcgaaaaaccaaaacaacaactcgaactcgaaaataaaaaaacaccgcgaccacccccgaaaaatcccgaccctaatcgctcacccgctcttacctttatatctcctcgcaaacgaaaaaacgccctcaacccgtccgaaacactttccaaaaaccgcgaaactatttcgccgaaaatatataccgctaaaacaaccccccactctcgattaccgctcgccgctactcaacccgaacgccaccgtcccccttacttaaataacgcacccttaccctcgcctatattaacgaacacgccgtaaaacgcgcgtaaaaaacgtaaaatccccacgtcccgcctcgaaccccctacgcgacgctatcaatccc

SEQ ID NO: 10727 - DNA, 927 bp, Artificial Sequence
  chemically treated genomic DNA (Homo sapiens) CpG-island No: 10727
ggttttttttttcggtttttttgtttagttcggcggtttttttttttttttttttcgttcgttttttttcggcgggttaggggttgggacgtttcggcggagtaggcggcggcggtggcgagttggggagttttaggttcggcgttgtcggaggggttcgagtcgagtcgtttgcgtttcggtcgggtagcgtcgcgtcgtttttcgcgggttacgttttgttaaattttgttgcggcggtagcgttagtgtttcgtaagcgggcgggaggggcgtcgggtcgggtcgggtagggcgcgggcggttaggggtttcgagagcgtgcgtttcggtcgcggttttattatgttttagttcggcggcgggggcggcggcggcggcggcgttagcgggggaggcggcgtttttagcgcggggcggtcggcggaggggacgatttcggggcgaacgacgagttgatttttttttaggacgaggggggcgaggagtaggagtcgagtagcgattcgtttcggcgtagcggatttagacgaggttaagtcgtttttggttaacgagtcggagaattagagtagtagttcggattcggaggtaaggaagtatcgcggttattttcgggggatttcggttttggtcgtttattcgtttttgtttttgtgttttttcgtaggcggagaggcgtttttagttcgttcgggatattttttagaagtcgcgggattatttcgtcgaaggtatgtgtcgttgggatagttttttattttcgattatcgttcgtcgttgtttagttcgggcgttatcgttttttttgtttgggtgacgtatttttgttttcgtttatattggcggatacgtcgtggggcgcgcgtggggggcgtgggatttttacgtttcgtttcgagttttttgcgcggcgttgttagtttt

SEQ ID NO: 10728 - DNA, 927 bp, Artificial Sequence
  chemically treated genomic DNA (Homo sapiens) CpG-island No: 10728
aaaactaacaacgccgcgcaaaaaactcgaaacgaaacgtaaaaatcccacgccccccacgcgcgccccacgacgtatccgccaatataaacgaaaacaaaaatacgtcacccaaacaaaaaaaacgataacgcccgaactaaacaacgacgaacgataatcgaaaataaaaaactatcccaacgacacataccttcgacgaaataatcccgcgacttctaaaaaatatcccgaacgaactaaaaacgcctctccgcctacgaaaaaacacaaaaacaaaaacgaataaacgaccaaaaccgaaatcccccgaaaataaccgcgatacttccttacctccgaatccgaactactactctaattctccgactcgttaaccaaaaacgacttaacctcgtctaaatccgctacgccgaaacgaatcgctactcgactcctactcctcgcccccctcgtcctaaaaaaaaatcaactcgtcgttcgccccgaaatcgtcccctccgccgaccgccccgcgctaaaaacgccgcctcccccgctaacgccgccgccgccgccgcccccgccgccgaactaaaacataataaaaccgcgaccgaaacgcacgctctcgaaacccctaaccgcccgcgccctacccgacccgacccgacgcccctcccgcccgcttacgaaacactaacgctaccgccgcaacaaaatttaacaaaacgtaacccgcgaaaaacgacgcgacgctacccgaccgaaacgcaaacgactcgactcgaacccctccgacaacgccgaacctaaaactccccaactcgccaccgccgccgcctactccgccgaaacgtcccaacccctaacccgccgaaaaaaaacgaacgaaaaaaaaaaaaaaaaaaaccgccgaactaaacaaaaaaaccgaaaaaaaaaacc

SEQ ID NO: 10729 - DNA, 637 bp, Artificial Sequence
  chemically treated genomic DNA (Homo sapiens) CpG-island No: 10729
gggttggaggcgtcgagtatcgagcgtcgtcgggagtcgagcgtcggtcgcggagtttttgcgatttcgttaggattcgaatagagttcgggggcggcgggtcggagtcggggacgcgggtatacgttcgttcgtataagttacggcggattttttcgaggcggaatttttacgtcgagcgaggtaagaatcgcggcgttttcggaattagggcgggtttggcgtttcgagcggttttcgcgtcggattttttcggttgcgcgttttgttcgtcgtagtttagtcggggtcggcgttttttttcgttcgtcgttcgttttttttattttttggttttttttcgggcgattcgcgttttttgggttttttttttttttttttcgttcgcgttttttgcgttttttttttgcgttcgtttcgtcgtttttttcgtcgtttaattttttttttaattcgcgttcgggagttggcgaggcggcggcggttttttagtgagtttcgggagggataggttcggggcgaaggcgcgaggttcgcggttttttggattggggaggagggcgggagtgggcggcgaggtgggatgcgttgtgtgtgttatgtgtgtgtgttgtattttattttatgtttttttggt

SEQ ID NO: 10730 - DNA, 637 bp, Artificial Sequence
  chemically treated genomic DNA (Homo sapiens) CpG-island No: 10730
accaaaaaaacataaaataaaatacaacacacacacataacacacacaacgcatcccacctcgccgcccactcccgccctcctccccaatccaaaaaaccgcgaacctcgcgccttcgccccgaacctatccctcccgaaactcactaaaaaaccgccgccgcctcgccaactcccgaacgcgaattaaaaaaaaaattaaacgacgaaaaaaacgacgaaacgaacgcaaaaaaaaaacgcaaaaaacgcgaacgaaaaaaaaaaaaaaaaaacccaaaaaacgcgaatcgcccgaaaaaaaaccaaaaaataaaaaaaacgaacgacgaacgaaaaaaaacgccgaccccgactaaactacgacgaacaaaacgcgcaaccgaaaaaatccgacgcgaaaaccgctcgaaacgccaaacccgccctaattccgaaaacgccgcgattcttacctcgctcgacgtaaaaattccgcctcgaaaaaatccgccgtaacttatacgaacgaacgtatacccgcgtccccgactccgacccgccgcccccgaactctattcgaatcctaacgaaatcgcaaaaactccgcgaccgacgctcgactcccgacgacgctcgatactcgacgcctccaaccc

SEQ ID NO: 10731 - DNA, 637 bp, Artificial Sequence
  chemically treated genomic DNA (Homo sapiens) CpG-island No: 10731
attaaaaagatatggagtggaatgtaatatatatatataatatatataacgtattttatttcgtcgtttattttcgtttttttttttagtttaggaaatcgcgggtttcgcgttttcgtttcgggtttgtttttttcgggatttattgaggagtcgtcgtcgtttcgttagttttcgagcgcgagttggaggaaaagttgggcggcgggaagagcggcgggacgagcgtagggagggggcgtaggagacgcggacggagggaagggaggggagatttaagaggcgcggatcgttcgggagggagttaggaggtgaaaggggcgggcggcgagcggagggaggcgtcggtttcggttgggttgcggcgggtaaagcgcgtagtcgggaggattcggcgcgggggtcgttcgggacgttaagttcgttttagtttcgggggcgtcgcggtttttatttcgttcggcgtggaggtttcgtttcgggagagttcgtcgtggtttgtgcgagcgggcgtgtgttcgcgttttcggtttcggttcgtcgttttcgggttttgttcgggttttggcggggtcgtaagagtttcgcggtcggcgttcgattttcggcggcgttcggtgttcggcgtttttagttt

SEQ ID NO: 10732 - DNA, 637 bp, Artificial Sequence
  chemically treated genomic DNA (Homo sapiens) CpG-island No: 10732
aaactaaaaacgccgaacaccgaacgccgccgaaaatcgaacgccgaccgcgaaactcttacgaccccgccaaaacccgaacaaaacccgaaaacgacgaaccgaaaccgaaaacgcgaacacacgcccgctcgcacaaaccacgacgaactctcccgaaacgaaacctccacgccgaacgaaataaaaaccgcgacgcccccgaaactaaaacgaacttaacgtcccgaacgacccccgcgccgaatcctcccgactacgcgctttacccgccgcaacccaaccgaaaccgacgcctccctccgctcgccgcccgcccctttcacctcctaactccctcccgaacgatccgcgcctcttaaatctcccctcccttccctccgtccgcgtctcctacgccccctccctacgctcgtcccgccgctcttcccgccgcccaacttttcctccaactcgcgctcgaaaactaacgaaacgacgacgactcctcaataaatcccgaaaaaaacaaacccgaaacgaaaacgcgaaacccgcgatttcctaaactaaaaaaaaaaacgaaaataaacgacgaaataaaatacgttatatatattatatatatatattacattccactccatatctttttaat

SEQ ID NO: 10733 - DNA, 1553 bp, Artificial Sequence
  chemically treated genomic DNA (Homo sapiens) CpG-island No: 10733
tttttttcgtttttattttgggttttttaggataaatgttttttacgtttttcgatgcgaaggtttggtcgcgagtagtcgcggttttcggtacgtgacggttacggagtcgtcgcggtttttcgcggttggggggtattcggggatgcggcgggcgttgacgtcgttttttcggttatttataagttttcgggtcgtagtagagtaggaagaggcgcgcggggtcggcgtttgtcggggaggtcgaggcgttttttcggcgagtcggcgtcgtcggtcgggttttttattgtttgtaatcgggggagggggattattcgatagtttagtcggggttgagagggagacgacgttaaggcggttttgtatcgttttcggttttttaaatgtagattttatcggaatcggagtttttttttgatagtcgtaggacgggagacggtcgaggggtcgtttggattgtttcgttttcgcgcggtgatttatcggggatcgtgcgagggtcgtttttaatttttaagagttagagagtcgagttattttgaggagcgtcgtatgaggttggttgcgcgttgttttttaattagttttattgaacgcgtcgattttagttttatttttcgggttttatttttttacgtttttttcggtttttcggggtgttttgtgtgttatttttttacgtatagttttttttcgtttttcgtttttcggttttttcgttcggtttttttagtcgtttagacgttagttgtcgcgggcgtttttggttcgcgttttcgtttttttcgtttcgtcgattcgtcgtttttttcggagttttagcgtttcgaattagggattgtatttttcggtagcgcgcggttcgcggttaatgaggggttgaggatttggcggcggcggcgtttcgagagtcggggtgggggggttttgtgcgcggcggcggcgggagaggcggcggcggcggttagtacggaggcggaggtcgagggggttgtgtataggtcgtcgcggagaggcgtgcgaatttcgagtcgagcgtcgaggatcgtgttatttaggtcgggttgttagcgtaggtttttttttggtagtagcggcggcgcggcgattttcgtttttcggttttttttttttattttatttttcgagttttttttttttcgtagtacgttcggttcggttcgtcgtggttttttttagtgtcggtcgttatggagaggcgttcgcgcggggaaaatttagttcggggattttatgcggtttagttcggtttcgtttttttttcgcgcggttttagcggttgttcgtattttagttttatttcgggttttcgtgttttttttgtgatcgtattgatacggtcggggggttagaatggaataaattgaaggtaaagtgcgtgtgcgtgtgtgtatgtgtgtgtgtgtgtgtgtgtgtgtgtgcgcgcgcgtgtgtagtgttaggaagggttgaggagggaacgacggggagggggcgatttagggatggagcgttagattttaggaggaatggaaggggaagcgggtggt

SEQ ID NO: 10734 - DNA, 1553 bp, Artificial Sequence
  chemically treated genomic DNA (Homo sapiens) CpG-island No: 10734
accacccgcttccccttccattcctcctaaaatctaacgctccatccctaaatcgccccctccccgtcgttccctcctcaacccttcctaacactacacacgcgcgcgcacacacacacacacacacacacacacatacacacacgcacacgcactttaccttcaatttattccattctaaccccccgaccgtatcaatacgatcacaaaaaaaacacgaaaacccgaaataaaactaaaatacgaacaaccgctaaaaccgcgcgaaaaaaaaacgaaaccgaactaaaccgcataaaatccccgaactaaattttccccgcgcgaacgcctctccataacgaccgacactaaaaaaaaccacgacgaaccgaaccgaacgtactacgaaaaaaaaaaaactcgaaaaataaaataaaaaaaaaaaaccgaaaaacgaaaatcgccgcgccgccgctactaccaaaaaaaaacctacgctaacaacccgacctaaataacacgatcctcgacgctcgactcgaaattcgcacgcctctccgcgacgacctatacacaaccccctcgacctccgcctccgtactaaccgccgccgccgcctctcccgccgccgccgcgcacaaaacccccccaccccgactctcgaaacgccgccgccgccaaatcctcaacccctcattaaccgcgaaccgcgcgctaccgaaaaatacaatccctaattcgaaacgctaaaactccgaaaaaaacgacgaatcgacgaaacgaaaaaaacgaaaacgcgaaccaaaaacgcccgcgacaactaacgtctaaacgactaaaaaaaccgaacgaaaaaaccgaaaaacgaaaaacgaaaaaaaactatacgtaaaaaaataacacacaaaacaccccgaaaaaccgaaaaaaacgtaaaaaaataaaacccgaaaaataaaactaaaatcgacgcgttcaataaaactaattaaaaaacaacgcgcaaccaacctcatacgacgctcctcaaaataactcgactctctaactcttaaaaattaaaaacgaccctcgcacgatccccgataaatcaccgcgcgaaaacgaaacaatccaaacgacccctcgaccgtctcccgtcctacgactatcaaaaaaaaactccgattccgataaaatctacatttaaaaaaccgaaaacgatacaaaaccgccttaacgtcgtctccctctcaaccccgactaaactatcgaataatccccctcccccgattacaaacaataaaaaacccgaccgacgacgccgactcgccgaaaaaacgcctcgacctccccgacaaacgccgaccccgcgcgcctcttcctactctactacgacccgaaaacttataaataaccgaaaaaacgacgtcaacgcccgccgcatccccgaataccccccaaccgcgaaaaaccgcgacgactccgtaaccgtcacgtaccgaaaaccgcgactactcgcgaccaaaccttcgcatcgaaaaacgtaaaaaacatttatcctaaaaaacccaaaataaaaacgaaaaaaa

SEQ ID NO: 10735 - DNA, 1553 bp, Artificial Sequence
  chemically treated genomic DNA (Homo sapiens) CpG-island No: 10735
gttattcgtttttttttttattttttttggggtttggcgttttatttttaggtcgtttttttttcgtcgttttttttttagttttttttagtattatatacgcgcgcgtatatatatatatatatatatatatatatatatatacgtatacgtattttatttttagtttgttttattttaatttttcggtcgtgttagtgcgattataggagagatacggaggttcggagtggggttggggtgcgggtagtcgttggggtcgcgcgaggaggaggcggaatcgagttaggtcgtatgaaattttcgggttagatttttttcgcgcggacgtttttttatggcggtcggtattgaggagagttacggcgggtcgggtcgggcgtgttgcgggaagaggaaggttcgggaggtgggatgggaaggggaggtcgagggacgggggtcgtcgcgtcgtcgttgttgttagagaggagtttgcgttggtagttcggtttgggtagtacggttttcggcgttcggttcggaattcgtacgttttttcgcggcgatttgtgtatagttttttcggttttcgttttcgtgttggtcgtcgtcgtcgtttttttcgtcgtcgtcgcgtataaagtttttttatttcgattttcggggcgtcgtcgtcgttaaatttttagttttttattggtcgcgggtcgcgcgttgtcgggaaatgtagtttttggttcgggacgttggggtttcggaggaagcggcgagtcggcggggcggagggggcgggagcgcgaattaggaacgttcgcggtagttagcgtttggacgattagggagatcgggcgagagggtcgaggaacgagggacggggagggattgtacgtgggagagtgatatataaaatatttcgggaagtcggaggaggcgtggaaaggtggggttcgggaggtaaaattgggatcggcgcgtttagtgaggttgattaaagaataacgcgtaattagttttatacggcgttttttagggtgattcggttttttagtttttaagggttagaagcgattttcgtacggttttcggtgggttatcgcgcgagggcggggtagtttaggcgatttttcggtcgtttttcgttttacggttgttagggaagggtttcggtttcggtagggtttgtatttggaaagtcgggggcgatgtaagatcgttttggcgtcgttttttttttagtttcggttgagttgtcggatggtttttttttttcggttgtaagtagtaggagattcggtcggcggcgtcggttcgtcgagggagcgtttcgattttttcggtaggcgtcggtttcgcgcgtttttttttgttttgttgcggttcggaggtttgtgggtaatcgggaggacgacgttagcgttcgtcgtattttcgggtgttttttagtcgcgggggatcgcgacggtttcgtgatcgttacgtgtcggaggtcgcggttgttcgcggttagattttcgtatcgagggacgtgagggatatttgttttagagggtttaagataagaacgagaggaa

SEQ ID NO: 10736 - DNA, 1553 bp, Artificial Sequence
  chemically treated genomic DNA (Homo sapiens) CpG-island No: 10736
ttcctctcgttcttatcttaaaccctctaaaacaaatatccctcacgtccctcgatacgaaaatctaaccgcgaacaaccgcgacctccgacacgtaacgatcacgaaaccgtcgcgatcccccgcgactaaaaaacacccgaaaatacgacgaacgctaacgtcgtcctcccgattacccacaaacctccgaaccgcaacaaaacaaaaaaaaacgcgcgaaaccgacgcctaccgaaaaaatcgaaacgctccctcgacgaaccgacgccgccgaccgaatctcctactacttacaaccgaaaaaaaaaaaccatccgacaactcaaccgaaactaaaaaaaaaacgacgccaaaacgatcttacatcgcccccgactttccaaatacaaaccctaccgaaaccgaaacccttccctaacaaccgtaaaacgaaaaacgaccgaaaaatcgcctaaactaccccgccctcgcgcgataacccaccgaaaaccgtacgaaaatcgcttctaacccttaaaaactaaaaaaccgaatcaccctaaaaaacgccgtataaaactaattacgcgttattctttaatcaacctcactaaacgcgccgatcccaattttacctcccgaaccccacctttccacgcctcctccgacttcccgaaatattttatatatcactctcccacgtacaatccctccccgtccctcgttcctcgaccctctcgcccgatctccctaatcgtccaaacgctaactaccgcgaacgttcctaattcgcgctcccgccccctccgccccgccgactcgccgcttcctccgaaaccccaacgtcccgaaccaaaaactacatttcccgacaacgcgcgacccgcgaccaataaaaaactaaaaatttaacgacgacgacgccccgaaaatcgaaataaaaaaactttatacgcgacgacgacgaaaaaaacgacgacgacgaccaacacgaaaacgaaaaccgaaaaaactatacacaaatcgccgcgaaaaaacgtacgaattccgaaccgaacgccgaaaaccgtactacccaaaccgaactaccaacgcaaactcctctctaacaacaacgacgacgcgacgacccccgtccctcgacctccccttcccatcccacctcccgaaccttcctcttcccgcaacacgcccgacccgacccgccgtaactctcctcaataccgaccgccataaaaaaacgtccgcgcgaaaaaaatctaacccgaaaatttcatacgacctaactcgattccgcctcctcctcgcgcgaccccaacgactacccgcaccccaaccccactccgaacctccgtatctctcctataatcgcactaacacgaccgaaaaattaaaataaaacaaactaaaaataaaatacgtatacgtatatatatatatatatatatatatatatatatatacgcgcgcgtatataatactaaaaaaaactaaaaaaaaaacgacgaaaaaaaaacgacctaaaaataaaacgccaaaccccaaaaaaaataaaaaaaaaaacgaataac

SEQ ID NO: 10737 - DNA, 1415 bp, Artificial Sequence
  chemically treated genomic DNA (Homo sapiens) CpG-island No: 10737
ttttcgagcgagttagggacgggagtaggtacgtatagtcgcgtaagtgtatgaaatgacgattttagaagggcgtttagggatatgggtttggtagtttcgagcggaggtcgttaggtagtcgtttttttcggaattcggtttttcgtagtgttttcggttgcggcgtttttgggtcgagcgttggagtcgttttgggtaattttttcgagcgcggtcggtttattttcgtcggattgcgcggggcgagggtttcgttattgcgcgtaggttcgcggatggtaattcggggtttttattgcgggtgatttcgggatattacgggtttttacggaggtcgggttaggggagagttttggttgtgggatttcgcgtgattagggcgtagggcgtcgggtttttagtttatttggcggcgtagggaggggcgttcggtagggcgggtgcgtagtatgagttttagtcgtttgtcgttttattttagtcgggcggacgggcgggagtcgggggcggggaattcggagcgtcgtttcgttagcgcgtttcgttcgtgggagaggaggggttgtagcgtagcggattattggaggcgtagtacggtcgtcgtcgtcgttgtcggtgttggagatcgcggttcggtgtaggcggcgtttatgtttttttttttttattagttcgcgcgttagttcgtttgtcggggtcggtttttcgttttttgtttttcgtcgtagtcgcgtagtcgtcgtagagttcgcggcgttatcgttcgttttttaggtaggtgttttagttgtaaagggattgtttggggcgggcgttaaggtgttcgtatcgcggttcgggggtattgtgcgttttcggcgggtcgaggatttcgagggacgcgtgggtgggtagtcgtagtttcgggtttttaggatatcgtcgtttttttggaggcgttttcggtcgatagttcgggttatagggaagtgggggcggcggtgttagtttattttcgcggtcgggatgggagggggcgtttgtatcgcggtttcggtttgtcgttttttttttttttcgttgttagggaatttcggtcgtttgttattagcgttcgtattttttcgcgcgggtcggcgttttgtttttcgtaggttgtttggggattgaagtaggggtagggagaaggattgatgtaattgttagcggaaaatcgaatcggcgcgggtgagagcgtcgcgttcgcgagagttaacgtttacgtcgtattttttagggaatcggggaagtcgagaggagcggttggggaagttgtgtattgggttttattgtgcgcgtgtattgcggattgttttcgcggggtatttttgtttattcgttgttggcgtttttgtagttttttcggtagttttcgtttattttttcggttaggg

SEQ ID NO: 10738 - DNA, 1415 bp, Artificial Sequence
  chemically treated genomic DNA (Homo sapiens) CpG-island No: 10738
ccctaaccgaaaaaataaacgaaaactaccgaaaaaactacaaaaacgccaacaacgaataaacaaaaataccccgcgaaaacaatccgcaatacacgcgcacaataaaacccaatacacaacttccccaaccgctcctctcgacttccccgattccctaaaaaatacgacgtaaacgttaactctcgcgaacgcgacgctctcacccgcgccgattcgattttccgctaacaattacatcaatccttctccctacccctacttcaatccccaaacaacctacgaaaaacaaaacgccgacccgcgcgaaaaaatacgaacgctaataacaaacgaccgaaattccctaacaacgaaaaaaaaaaaaaacgacaaaccgaaaccgcgatacaaacgccccctcccatcccgaccgcgaaaataaactaacaccgccgcccccacttccctataacccgaactatcgaccgaaaacgcctccaaaaaaacgacgatatcctaaaaacccgaaactacgactacccacccacgcgtccctcgaaatcctcgacccgccgaaaacgcacaatacccccgaaccgcgatacgaacaccttaacgcccgccccaaacaatccctttacaactaaaacacctacctaaaaaacgaacgataacgccgcgaactctacgacgactacgcgactacgacgaaaaacaaaaaacgaaaaaccgaccccgacaaacgaactaacgcgcgaactaataaaaaaaaaaaaacataaacgccgcctacaccgaaccgcgatctccaacaccgacaacgacgacgacgaccgtactacgcctccaataatccgctacgctacaacccctcctctcccacgaacgaaacgcgctaacgaaacgacgctccgaattccccgcccccgactcccgcccgtccgcccgactaaaataaaacgacaaacgactaaaactcatactacgcacccgccctaccgaacgcccctccctacgccgccaaataaactaaaaacccgacgccctacgccctaatcacgcgaaatcccacaaccaaaactctcccctaacccgacctccgtaaaaacccgtaatatcccgaaatcacccgcaataaaaaccccgaattaccatccgcgaacctacgcgcaataacgaaaccctcgccccgcgcaatccgacgaaaataaaccgaccgcgctcgaaaaaattacccaaaacgactccaacgctcgacccaaaaacgccgcaaccgaaaacactacgaaaaaccgaattccgaaaaaaacgactacctaacgacctccgctcgaaactaccaaacccatatccctaaacgcccttctaaaatcgtcatttcatacacttacgcgactatacgtacctactcccgtccctaactcgctcgaaaa

SEQ ID NO: 10739 - DNA, 1415 bp, Artificial Sequence
  chemically treated genomic DNA (Homo sapiens) CpG-island No: 10739
ttttggtcgggggagtggacggaggttgtcgggagggttgtaggggcgttagtagcgggtgggtaggggtgtttcgcgagggtagttcgtagtgtacgcgtataataaaatttaatgtataatttttttagtcgtttttttcggttttttcgattttttgaaaggtgcggcgtaggcgttagttttcgcgggcgcggcgtttttattcgcgtcggttcggtttttcgttgataattatattagtttttttttttgtttttgttttaatttttaggtagtttgcggggagtagggcgtcggttcgcgcgagggaatgcgagcgttagtggtaggcggtcggaattttttggtaacgagggggagggagggcggtaaatcgggatcgcgatatagacgtttttttttatttcggtcgcgagaatgggttgatatcgtcgtttttatttttttgtagttcgggttatcggtcgggggcgtttttagggggacggcgatgttttggggattcgaagttgcggttgtttatttacgcgtttttcggggttttcggttcgtcggaggcgtataatgttttcgggtcgcgatgcgggtattttggcgttcgttttaagtaatttttttgtagttaggatatttatttggagggcgagcggtggcgtcgcggattttgcggcggttgcgcggttgcgacgggaggtaggaggcggagagtcggtttcggtaggcggattggcgcgcgggttagtggaggagaggaggtatgggcgtcgtttgtatcgagtcgcgatttttagtatcgatagcggcggcggcgatcgtgttgcgtttttagtggttcgttgcgttgtagtttttttttttttacgggcggggcgcgttggcggggcggcgtttcgggtttttcgttttcggttttcgttcgttcgttcggttggagtggagcggtaagcggttggggtttatgttgcgtattcgttttatcgggcgtttttttttgcgtcgttagatgggttaaggattcggcgttttgcgttttggttacgcggggttttatagttagggtttttttttggttcggttttcgtgggaattcgtggtgtttcgagattattcgtagtggaaatttcgagttgttattcgcgggtttgcgcgtagtagcggagttttcgtttcgcgtagttcggcggaggtgagtcggtcgcgttcgggagggttgtttagaacggttttagcgttcggtttaggagcgtcgtagtcgggagtattgcgggagatcgaatttcgaaaggaacggttgtttggcggttttcgttcggggttgttaaatttatgtttttgggcgtttttttgaggtcgttattttatatatttacgcgattgtgcgtgtttgttttcgtttttgattcgttcgggag

SEQ ID NO: 10740 - DNA, 1415 bp, Artificial Sequence
  chemically treated genomic DNA (Homo sapiens) CpG-island No: 10740
ctcccgaacgaatcaaaaacgaaaacaaacacgcacaatcgcgtaaatatataaaataacgacctcaaaaaaacgcccaaaaacataaatttaacaaccccgaacgaaaaccgccaaacaaccgttcctttcgaaattcgatctcccgcaatactcccgactacgacgctcctaaaccgaacgctaaaaccgttctaaacaaccctcccgaacgcgaccgactcacctccgccgaactacgcgaaacgaaaactccgctactacgcgcaaacccgcgaataacaactcgaaatttccactacgaataatctcgaaacaccacgaattcccacgaaaaccgaaccaaaaaaaaaccctaactataaaaccccgcgtaaccaaaacgcaaaacgccgaatccttaacccatctaacgacgcaaaaaaaaacgcccgataaaacgaatacgcaacataaaccccaaccgcttaccgctccactccaaccgaacgaacgaacgaaaaccgaaaacgaaaaacccgaaacgccgccccgccaacgcgccccgcccgtaaaaaaaaaaaaactacaacgcaacgaaccactaaaaacgcaacacgatcgccgccgccgctatcgatactaaaaatcgcgactcgatacaaacgacgcccatacctcctctcctccactaacccgcgcgccaatccgcctaccgaaaccgactctccgcctcctacctcccgtcgcaaccgcgcaaccgccgcaaaatccgcgacgccaccgctcgccctccaaataaatatcctaactacaaaaaaattacttaaaacgaacgccaaaatacccgcatcgcgacccgaaaacattatacgcctccgacgaaccgaaaaccccgaaaaacgcgtaaataaacaaccgcaacttcgaatccccaaaacatcgccgtccccctaaaaacgcccccgaccgataacccgaactacaaaaaaataaaaacgacgatatcaacccattctcgcgaccgaaataaaaaaaaacgtctatatcgcgatcccgatttaccgccctccctccccctcgttaccaaaaaattccgaccgcctaccactaacgctcgcattccctcgcgcgaaccgacgccctactccccgcaaactacctaaaaattaaaacaaaaacaaaaaaaaaaactaatataattatcaacgaaaaaccgaaccgacgcgaataaaaacgccgcgcccgcgaaaactaacgcctacgccgcacctttcaaaaaatcgaaaaaaccgaaaaaaacgactaaaaaaattatacattaaattttattatacgcgtacactacgaactaccctcgcgaaacacccctacccacccgctactaacgcccctacaaccctcccgacaacctccgtccactcccccgaccaaaa

SEQ ID NO: 10741 - DNA, 535 bp, Artificial Sequence
  chemically treated genomic DNA (Homo sapiens) CpG-island No: 10741
ttagatagtcgttttttagtgtgatttttttttttagttgtatttttcggcggaggttttttttttagttcggattttttcgggcggttttcgtagtttttattttcgggttttcgtcgtttttgttttattatagtacgattttcgttatataggttcgttttttttttcgatagttaatcgcgcgcgatttcgtttttttcgttgggttcggggcgttagagtttcgagtgttaggggagttgaattttgcgtttttttttaggttgcggcgagataatttttagagtttcgcgtttcggtttcgggtagttatggattcgtaggaattgaaggtgagcgggtgagcgagtgagcggtgagcgggcgggcgggcggagtttttttgcggttttttggttcgggggcgcggagggagttcgggtggtttcgttaggtcgttgtttttttgcggtgtttcggttgttcgggttgcggggtgggtttgtagtttttgtttacggtcggttttcgcgggttttgttggggaagttta

SEQ ID NO: 10742 - DNA, 535 bp, Artificial Sequence
  chemically treated genomic DNA (Homo sapiens) CpG-island No: 10742
taaacttccccaacaaaacccgcgaaaaccgaccgtaaacaaaaactacaaacccaccccgcaacccgaacaaccgaaacaccgcaaaaaaacaacgacctaacgaaaccacccgaactccctccgcgcccccgaaccaaaaaaccgcaaaaaaactccgcccgcccgcccgctcaccgctcactcgctcacccgctcaccttcaattcctacgaatccataactacccgaaaccgaaacgcgaaactctaaaaattatctcgccgcaacctaaaaaaaaacgcaaaattcaactcccctaacactcgaaactctaacgccccgaacccaacgaaaaaaacgaaatcgcgcgcgattaactatcgaaaaaaaaaacgaacctatataacgaaaatcgtactataataaaacaaaaacgacgaaaacccgaaaataaaaactacgaaaaccgcccgaaaaaatccgaactaaaaaaaaaacctccgccgaaaaatacaactaaaaaaaaaaatcacactaaaaaacgactatctaa

SEQ ID NO: 10743 - DNA, 535 bp, Artificial Sequence
  chemically treated genomic DNA (Homo sapiens) CpG-island No: 10743
tgggtttttttagtagggttcgcggagatcggtcgtgagtagaggttgtaggtttatttcgtaattcgagtagtcggggtatcgtagggaaatagcggtttagcgaagttattcgagtttttttcgcgttttcgggttaaaaggtcgtaaaggaatttcgttcgttcgttcgtttatcgtttattcgtttattcgtttatttttaatttttgcgagtttatggttgttcgaggtcgggacgcggggttttggggattgtttcgtcgtagtttaaaggaagacgtagaatttagtttttttagtattcggagttttagcgtttcgggtttagcgggaggggcggggtcgcgcgcgattggttgtcggagggagaggcgggtttgtgtggcggggatcgtgttgtaatggagtaggggcggcggggattcggaggtgagggttgcgagggtcgttcgggagggttcgggttgggaaaagggttttcgtcggagagtgtagttggaaaaggaggttatattgggaaacggttgtttga

SEQ ID NO: 10744 - DNA, 535 bp, Artificial Sequence
  chemically treated genomic DNA (Homo sapiens) CpG-island No: 10744
tcaaacaaccgtttcccaatataacctccttttccaactacactctccgacgaaaacccttttcccaacccgaaccctcccgaacgaccctcgcaaccctcacctccgaatccccgccgcccctactccattacaacacgatccccgccacacaaacccgcctctccctccgacaaccaatcgcgcgcgaccccgcccctcccgctaaacccgaaacgctaaaactccgaatactaaaaaaactaaattctacgtcttcctttaaactacgacgaaacaatccccaaaaccccgcgtcccgacctcgaacaaccataaactcgcaaaaattaaaaataaacgaataaacgaataaacgataaacgaacgaacgaacgaaattcctttacgaccttttaacccgaaaacgcgaaaaaaactcgaataacttcgctaaaccgctatttccctacgataccccgactactcgaattacgaaataaacctacaacctctactcacgaccgatctccgcgaaccctactaaaaaaaccca

SEQ ID NO: 10745 - DNA, 710 bp, Artificial Sequence
  chemically treated genomic DNA (Homo sapiens) CpG-island No: 10745
ggcgtaacgtttcgtcgttggcgcgggggtggagatttgtatgtgcgaagtcgggaagagggggaattatttttcgaaaatttcggtcgtcgtttttttaggtcgggagagtcggttcgcgcgtttttaaaagttttttagcggtcggttttttttacgttattcgtattttttcgttcgtttttgaattttaaattatattcggaagaataatttggaggagggggattttttaggagttagcggtttttttacgttgttagtcgttatttttcggttatcgtcgttttttgcgttttcgaagtttattttaagttttcgttttttcgatttttttttaagttagtcgtcgtagtagcgtcgggggcgtatgcgtgggggtcggcggggagcgtgcgcggggataggtaggggcggggcgttgggggcggtcgcgcgcgcggcggtcgcgaggtcgtttcgtttacgtttcgggtgagggttgttgcgtcgggtttacgttagtcgcgggaaatttttttttcgttaggttgttcgtttttcggttgggttagtattcggtttttttcgtttcgttttttgtttttggttttcgtacggtggacggcgacgttgggtgattcggggtgtaagaatttaggggttgggaaggtgtgagtcgtaaatttagcggagggcgggaagaaggaggaggtttttagggtggtcgg

SEQ ID NO: 10746 - DNA, 710 bp, Artificial Sequence
  chemically treated genomic DNA (Homo sapiens) CpG-island No: 10746
ccgaccaccctaaaaacctcctccttcttcccgccctccgctaaatttacgactcacaccttcccaacccctaaattcttacaccccgaatcacccaacgtcgccgtccaccgtacgaaaaccaaaaacaaaaaacgaaacgaaaaaaaccgaatactaacccaaccgaaaaacgaacaacctaacgaaaaaaaaatttcccgcgactaacgtaaacccgacgcaacaaccctcacccgaaacgtaaacgaaacgacctcgcgaccgccgcgcgcgcgaccgcccccaacgccccgcccctacctatccccgcgcacgctccccgccgacccccacgcatacgcccccgacgctactacgacgactaacttaaaaaaaaatcgaaaaaacgaaaacttaaaataaacttcgaaaacgcaaaaaacgacgataaccgaaaaataacgactaacaacgtaaaaaaaccgctaactcctaaaaaatccccctcctccaaattattcttccgaatataatttaaaattcaaaaacgaacgaaaaaatacgaataacgtaaaaaaaaccgaccgctaaaaaacttttaaaaacgcgcgaaccgactctcccgacctaaaaaaacgacgaccgaaattttcgaaaaataattccccctcttcccgacttcgcacatacaaatctccacccccgcgccaacgacgaaacgttacgcc

SEQ ID NO: 10747 - DNA, 710 bp, Artificial Sequence
  chemically treated genomic DNA (Homo sapiens) CpG-island No: 10747
tcgattattttagaggtttttttttttttttcgtttttcgttgggtttgcggtttatatttttttaatttttgaatttttgtatttcgggttatttagcgtcgtcgtttatcgtacgggagttaggggtagggggcggagcggggagagtcgagtgttggtttagtcgagaggcgagtagtttggcgggaggggaatttttcgcggttgacgtaggttcgacgtagtaatttttattcggagcgtgggcggggcgatttcgcggtcgtcgcgcgcgcgatcgtttttagcgtttcgtttttgtttgttttcgcgtacgtttttcgtcggtttttacgtatacgttttcggcgttgttgcggcggttggtttgggagggggtcgagggagcgggagtttggggtgggtttcgggagcgtagggaacggcggtagtcgggaggtgacggttagtagcgtgagaaggtcgttggtttttgagaaattttttttttttaggttgttttttcgagtgtggtttaaagtttaggagcgggcgggagggtgcggatgacgtagagagggtcggtcgttggggagtttttgggggcgcgcgggtcgattttttcggtttgggagggcgacggtcggggttttcgagaggtggtttttttttttttcgatttcgtatatgtaaatttttattttcgcgttagcggcgggacgttgcgtt

SEQ ID NO: 10748 - DNA, 710 bp, Artificial Sequence
  chemically treated genomic DNA (Homo sapiens) CpG-island No: 10748
aacgcaacgtcccgccgctaacgcgaaaataaaaatttacatatacgaaatcgaaaaaaaaaaaaaccacctctcgaaaaccccgaccgtcgccctcccaaaccgaaaaaatcgacccgcgcgcccccaaaaactccccaacgaccgaccctctctacgtcatccgcaccctcccgcccgctcctaaactttaaaccacactcgaaaaaacaacctaaaaaaaaaaaatttctcaaaaaccaacgaccttctcacgctactaaccgtcacctcccgactaccgccgttccctacgctcccgaaacccaccccaaactcccgctccctcgaccccctcccaaaccaaccgccgcaacaacgccgaaaacgtatacgtaaaaaccgacgaaaaacgtacgcgaaaacaaacaaaaacgaaacgctaaaaacgatcgcgcgcgcgacgaccgcgaaatcgccccgcccacgctccgaataaaaattactacgtcgaacctacgtcaaccgcgaaaaattcccctcccgccaaactactcgcctctcgactaaaccaacactcgactctccccgctccgccccctacccctaactcccgtacgataaacgacgacgctaaataacccgaaatacaaaaattcaaaaattaaaaaaatataaaccgcaaacccaacgaaaaacgaaaaaaaaaaaaaaacctctaaaataatcga

SEQ ID NO: 10749 - DNA, 875 bp, Artificial Sequence
  chemically treated genomic DNA (Homo sapiens) CpG-island No: 10749
agtcgttagttttttggtcgcgtagttttcgcggacggtcgggcgcgatgtattttcgtagaagaggcgttgcggcggcgaggattggtcggcgcgattcgagtgcgcgcgttttatcgttatttttattcgtttgttagtcggttttttcggtcgtcgttatgtttttttttttttttttttttagggagacgtacgaggaggatcgggagtacgagagttaggttaagcgttttaagatcgaggagggggagatcgattattcggtcgaggaaggcgagaatcgtcgggaagcgacgtttcggggcggggcgatggcggcggcggcggcgcgagttttttttagtcggtaataaagcgcggtttttttgttcgttgtgtttggttgtttttcgggaagtagggtttcggtgcggggtttttcgtttgttttagttagtttttttcgttgcgtcgattcgtttggggaagcgtttatttttttttttggggttcgtattttggtttttatttgtttttcgtatttcgattgcgaattcggcgtcgttttggtcgtaggtttcgtagcgagtttattgtcgggttttgaatttggggagggtcgcggcgcggcggcggcggcggggaggcgtcgttttcgttttggggggtttcgcggttcggggagttttttgttagtttaatttttcgggttcggggttagcgtcgggattatcggttttttttagtttttttgttcgtagtagtcgcgcgttggttattatttcgggatggttgcgtcggttttatcgggagtttttttcgtttcggttttatggagattcgtaattaaataatagattatgttttggcgtttatatgttagtttttttgaa

SEQ ID NO: 10750 - DNA, 875 bp, Artificial Sequence
  chemically treated genomic DNA (Homo sapiens) CpG-island No: 10750
ttcaaaaaaactaacatataaacgccaaaacataatctattatttaattacgaatctccataaaaccgaaacgaaaaaaactcccgataaaaccgacgcaaccatcccgaaataataaccaacgcgcgactactacgaacaaaaaaactaaaaaaaaccgataatcccgacgctaaccccgaacccgaaaaattaaactaacaaaaaactccccgaaccgcgaaaccccccaaaacgaaaacgacgcctccccgccgccgccgccgcgccgcgaccctccccaaattcaaaacccgacaataaactcgctacgaaacctacgaccaaaacgacgccgaattcgcaatcgaaatacgaaaaacaaataaaaaccaaaatacgaaccccaaaaaaaaaaataaacgcttccccaaacgaatcgacgcaacgaaaaaaactaactaaaacaaacgaaaaaccccgcaccgaaaccctacttcccgaaaaacaaccaaacacaacgaacaaaaaaaccgcgctttattaccgactaaaaaaaactcgcgccgccgccgccgccatcgccccgccccgaaacgtcgcttcccgacgattctcgccttcctcgaccgaataatcgatctccccctcctcgatcttaaaacgcttaacctaactctcgtactcccgatcctcctcgtacgtctccctaaaaaaaaaaaaaaaaaaaaacataacgacgaccgaaaaaaccgactaacaaacgaataaaaataacgataaaacgcgcgcactcgaatcgcgccgaccaatcctcgccgccgcaacgcctcttctacgaaaatacatcgcgcccgaccgtccgcgaaaactacgcgaccaaaaaactaacgact

SEQ ID NO: 10751 - DNA, 875 bp, Artificial Sequence
  chemically treated genomic DNA (Homo sapiens) CpG-island No: 10751
tttaagggaattagtatgtgaacgttaaggtataatttgttatttaattacgggtttttataggatcgaggcggagagagttttcggtagaatcgacgtaattatttcgggatggtgattaacgcgcggttgttgcgggtagagggattgaagagaatcggtggtttcgacgttggtttcgagttcgaggagttaaattaataaagagtttttcgagtcgcgaaattttttagagcggaagcgacgttttttcgtcgtcgtcgtcgcgtcgcgattttttttaagtttagggttcggtagtggattcgttgcggggtttgcggttaggacggcgtcgggttcgtagtcgggatgcgggaaataggtagaggttagaatacgagttttaaagagaagagtgggcgtttttttaaacgggtcggcgtagcggaaaaggttaattgaagtaagcgggaggtttcgtatcgaggttttgtttttcggggagtagttaggtatagcggataggggggtcgcgttttgttatcggttgagagaagttcgcgtcgtcgtcgtcgttatcgtttcgtttcggggcgtcgtttttcggcggttttcgtttttttcggtcgagtagtcgattttttttttttcggttttgagacgtttggtttggttttcgtattttcggtttttttcgtacgtttttttgggggaggaagaggaggaggatatggcggcggtcggagggatcggttggtaggcgggtgggggtggcggtggggcgcgcgtattcggatcgcgtcggttagttttcgtcgtcgtagcgttttttttgcgagggtatatcgcgttcggtcgttcgcggggattgcgcggttaggagattggcggtt

SEQ ID NO: 10752 - DNA, 875 bp, Artificial Sequence
  chemically treated genomic DNA (Homo sapiens) CpG-island No: 10752
aaccgccaatctcctaaccgcgcaatccccgcgaacgaccgaacgcgatataccctcgcaaaaaaaacgctacgacgacgaaaactaaccgacgcgatccgaatacgcgcgccccaccgccacccccacccgcctaccaaccgatccctccgaccgccgccatatcctcctcctcttcctcccccaaaaaaacgtacgaaaaaaaccgaaaatacgaaaaccaaaccaaacgtctcaaaaccgaaaaaaaaaaaatcgactactcgaccgaaaaaaacgaaaaccgccgaaaaacgacgccccgaaacgaaacgataacgacgacgacgacgcgaacttctctcaaccgataacaaaacgcgacccccctatccgctatacctaactactccccgaaaaacaaaacctcgatacgaaacctcccgcttacttcaattaaccttttccgctacgccgacccgtttaaaaaaacgcccactcttctctttaaaactcgtattctaacctctacctatttcccgcatcccgactacgaacccgacgccgtcctaaccgcaaaccccgcaacgaatccactaccgaaccctaaacttaaaaaaaatcgcgacgcgacgacgacgacgaaaaaacgtcgcttccgctctaaaaaatttcgcgactcgaaaaactctttattaatttaactcctcgaactcgaaaccaacgtcgaaaccaccgattctcttcaatccctctacccgcaacaaccgcgcgttaatcaccatcccgaaataattacgtcgattctaccgaaaactctctccgcctcgatcctataaaaacccgtaattaaataacaaattataccttaacgttcacatactaattcccttaaa

SEQ ID NO: 10753 - DNA, 626 bp, Artificial Sequence
  chemically treated genomic DNA (Homo sapiens) CpG-island No: 10753
ttgtggttggggtcggttaagtcgaatatcggttatacgtaagcggcggcgggtgtggttggtgtgattaagatggtgatggcgatgcggtacgggtagttgttacgtacgttgtacgtggaatcgtcgttcggaggtggattggtcggcggggacggtttaattttttacggagaatacgttttggtttaggagtggtcgtgttcgtcgggtgggggtgtcgtcgttcgggattagtggtattaacgcgtacgttattttcgaatagttttcgggagtgtcgagttagtttgcggggtcgggttcgggttttgtcgtggatgtttcggtggtgtcgtggatggtgtcgggtaaaatattcgaagcgttattcgcgtaggtaacggcgttgatgatttatttggacgagcgatttgatgttttttcgttggatgttgggtattcgttggcgttgatacggtcggcgttggatgagcgagcggtggtgttggggtcggatcgtgaaacgttgttgtgcggtgtgaaagcgttgtttgtcggttatgagggtttttgggttgggcggatcggatttgggggggtttgggggtcggatcggggttggtgttttcgggttaggtgggtta

SEQ ID NO: 10754 - DNA, 626 bp, Artificial Sequence
  chemically treated genomic DNA (Homo sapiens) CpG-island No: 10754
taacccacctaacccgaaaacaccaaccccgatccgacccccaaacccccccaaatccgatccgcccaacccaaaaaccctcataaccgacaaacaacgctttcacaccgcacaacaacgtttcacgatccgaccccaacaccaccgctcgctcatccaacgccgaccgtatcaacgccaacgaatacccaacatccaacgaaaaaacatcaaatcgctcgtccaaataaatcatcaacgccgttacctacgcgaataacgcttcgaatattttacccgacaccatccacgacaccaccgaaacatccacgacaaaacccgaacccgaccccgcaaactaactcgacactcccgaaaactattcgaaaataacgtacgcgttaataccactaatcccgaacgacgacacccccacccgacgaacacgaccactcctaaaccaaaacgtattctccgtaaaaaattaaaccgtccccgccgaccaatccacctccgaacgacgattccacgtacaacgtacgtaacaactacccgtaccgcatcgccatcaccatcttaatcacaccaaccacacccgccgccgcttacgtataaccgatattcgacttaaccgaccccaaccacaa

SEQ ID NO: 10755 - DNA, 626 bp, Artificial Sequence
  chemically treated genomic DNA (Homo sapiens) CpG-island No: 10755
tggtttatttggttcggaaatattaatttcgattcggtttttaagtttttttagattcggttcgtttaatttagaagtttttatgatcggtagatagcgtttttatatcgtataataacgttttacggttcgattttagtattatcgttcgtttatttagcgtcgatcgtgttaacgttagcgagtatttaatatttagcgaggagatattaggtcgttcgtttagataggttattaacgtcgttgtttgcgcggatagcgtttcgggtgttttgttcgatattatttacggtattatcggaatatttacgatagaattcgaattcggtttcgtagattgattcggtattttcgggggttgttcgaggatgacgtgcgcgttagtattattgatttcgaacgacgatatttttattcgacgaatacgattatttttgggttagggcgtgtttttcgtaaggagttgaatcgttttcgtcgattaatttattttcggacggcgattttacgtgtaacgtgcgtggtagttgttcgtgtcgtatcgttattattattttgattatattagttatattcgtcgtcgtttgcgtatgatcgatgttcgatttgatcgattttaattataa

SEQ ID NO: 10756 - DNA, 626 bp, Artificial Sequence
  chemically treated genomic DNA (Homo sapiens) CpG-island No: 10756
ttataattaaaatcgatcaaatcgaacatcgatcatacgcaaacgacgacgaatataactaatataatcaaaataataataacgatacgacacgaacaactaccacgcacgttacacgtaaaatcgccgtccgaaaataaattaatcgacgaaaacgattcaactccttacgaaaaacacgccctaacccaaaaataatcgtattcgtcgaataaaaatatcgtcgttcgaaatcaataatactaacgcgcacgtcatcctcgaacaacccccgaaaataccgaatcaatctacgaaaccgaattcgaattctatcgtaaatattccgataataccgtaaataatatcgaacaaaacacccgaaacgctatccgcgcaaacaacgacgttaataacctatctaaacgaacgacctaatatctcctcgctaaatattaaatactcgctaacgttaacacgatcgacgctaaataaacgaacgataatactaaaatcgaaccgtaaaacgttattatacgatataaaaacgctatctaccgatcataaaaacttctaaattaaacgaaccgaatctaaaaaaacttaaaaaccgaatcgaaattaatatttccgaaccaaataaacca

SEQ ID NO: 10757 - DNA, 743 bp, Artificial Sequence
  chemically treated genomic DNA (Homo sapiens) CpG-island No: 10757
  unsure (219, 346, 568)
tattttgttttcgggttttaagcggcggtttgtattggttagcgtttttggttttgcggtaggcgtttgggcgtttcgagaatgggcgtcgacgtttgggaggtcgtagagatttgtacgggtttggggatttacgggtggttttcgcggcgcggtagcggttaggcgcggaagtttttttggtattgggtttcgcgttcgaagggagcgtcggagggnttggtattcgttgcgcggtcggtagttgggttcgggtcgttgtattttttaggttcggtaattttgtcgtattatcgagttcgcggggtcggaggtggagtcggagtttaggttcgggttcggtttngtttcggtcggggttcgtcgtcggttcgcgttcgtcggtaggtttaggcgttggtttcgttgttcgggtaattgtatttaattcgttttgggttggttgcgtttttatggtaatcgcgcgcgtcgaggggggcgcgagcgtcggttgcgtttgttgttgcggcggcggtggttgcggcggggcgttcgggtgttcggtggttttcgagtatttggtgaaaanttagcggtatagcgatgttcgttttgtttaattggttttagaagcgggcgatgtagtaggttttcgtgatgtacggttacgttatgatgttagttgaaaagtcggttttttttttttttttgtggttttaaagtaagtttttataatttttttttagttttcgattttgatcggt

SEQ ID NO: 10758 - DNA, 743 bp, Artificial Sequence
  chemically treated genomic DNA (Homo sapiens) CpG-island No: 10758
  unsure (176, 398, 525)
accgatcaaaatcgaaaactaaaaaaaaattataaaaacttactttaaaaccacaaaaaaaaaaaaaaaaccgacttttcaactaacatcataacgtaaccgtacatcacgaaaacctactacatcgcccgcttctaaaaccaattaaacaaaacgaacatcgctataccgctaanttttcaccaaatactcgaaaaccaccgaacacccgaacgccccgccgcaaccaccgccgccgcaacaacaaacgcaaccgacgctcgcgcccccctcgacgcgcgcgattaccataaaaacgcaaccaacccaaaacgaattaaatacaattacccgaacaacgaaaccaacgcctaaacctaccgacgaacgcgaaccgacgacgaaccccgaccgaaacnaaaccgaacccgaacctaaactccgactccacctccgaccccgcgaactcgataatacgacaaaattaccgaacctaaaaaatacaacgacccgaacccaactaccgaccgcgcaacgaataccaanccctccgacgctcccttcgaacgcgaaacccaataccaaaaaaacttccgcgcctaaccgctaccgcgccgcgaaaaccacccgtaaatccccaaacccgtacaaatctctacgacctcccaaacgtcgacgcccattctcgaaacgcccaaacgcctaccgcaaaaccaaaaacgctaaccaatacaaaccgccgcttaaaacccgaaaacaaaata

SEQ ID NO: 10759 - DNA, 743 bp, Artificial Sequence
  chemically treated genomic DNA (Homo sapiens) CpG-island No: 10759
  unsure (176, 398, 525)
gtcggttaggatcggaggttgaaggaagattatagagatttgttttagaattataagaagaaagaggaggtcggttttttagttagtattatggcgtggtcgtgtattacgagggtttgttgtatcgttcgtttttggaattagttggataaagcggatatcgttgtgtcgttggntttttattaagtattcggaggttatcgagtattcgggcgtttcgtcgtagttatcgtcgtcgtagtagtaggcgtagtcggcgttcgcgtttttttcggcgcgcgcggttgttatagagacgtagttagtttagggcgagttggatgtagttgttcgggtaacggggttagcgtttgggtttatcggcgagcgcgagtcggcggcgggtttcggtcggagtngggtcgggttcgggtttgggtttcggttttattttcggtttcgcggattcggtgatgcggtaggattatcgagtttggaaggtgtagcggttcgagtttagttgtcggtcgcgtagcgaatattagntttttcgacgtttttttcgagcgcgagatttagtattagaaggattttcgcgtttggtcgttgtcgcgtcgcggggattattcgtggatttttaagttcgtgtagatttttgcggttttttaggcgtcggcgtttattttcggggcgtttaagcgtttgtcgtagagttaggagcgttggttagtgtaggtcgtcgtttgaggttcgggagtaggatg

SEQ ID NO: 10760 - DNA, 743 bp, Artificial Sequence
  chemically treated genomic DNA (Homo sapiens) CpG-island No: 10760
  unsure (219, 346, 568)
catcctactcccgaacctcaaacgacgacctacactaaccaacgctcctaactctacgacaaacgcttaaacgccccgaaaataaacgccgacgcctaaaaaaccgcaaaaatctacacgaacttaaaaatccacgaataatccccgcgacgcgacaacgaccaaacgcgaaaatccttctaatactaaatctcgcgctcgaaaaaaacgtcgaaaaanctaatattcgctacgcgaccgacaactaaactcgaaccgctacaccttccaaactcgataatcctaccgcatcaccgaatccgcgaaaccgaaaataaaaccgaaacccaaacccgaacccgacccnactccgaccgaaacccgccgccgactcgcgctcgccgataaacccaaacgctaaccccgttacccgaacaactacatccaactcgccctaaactaactacgtctctataacaaccgcgcgcgccgaaaaaaacgcgaacgccgactacgcctactactacgacgacgataactacgacgaaacgcccgaatactcgataacctccgaatacttaataaaaanccaacgacacaacgatatccgctttatccaactaattccaaaaacgaacgatacaacaaaccctcgtaatacacgaccacgccataatactaactaaaaaaccgacctcctctttcttcttataattctaaaacaaatctctataatcttccttcaacctccgatcctaaccgac

SEQ ID NO: 10761 - DNA, 607 bp, Artificial Sequence
  chemically treated genomic DNA (Homo sapiens) CpG-island No: 10761
  unsure (1, 59, 125, 299, 354, 495, 523, 536, 598)
nagtcggagttagttcgttttttttttttagcgagtattcggggagagttgttttaggnagagtttgtagagtttttcgattatcggtcgtaaacgtttttgggagcgtagtttgttgcgagcgntcgaagggtgagacgtacggcgttttcgagttttcggcgagggtgtttgggacgcgtttttttttgcggttgcggcggcgtatagatttcggtcgagcgaggcgacgtgaggagaggtggttataggtttaagttatggcgtagagaaggggtcgggcggtgtggtcgtagggnttcgcggatcgggttcgagttttttttttgtcggcgttatagtgtagtcggttantttagtagggttgggaggttattatttttagcggagatcgagtattgttgttttcgtcgttgttcgcgaggatgtagtagtcgtcgtcgttatcgtttttttttttgggaagcgattttatttttttttgtagttttcggnttttcgtcgttgttcgcgaatgatgttngtagtcgttgttngtcgtcgtttttgtttttgttgtagggaagcggttttatttttttatgttgtttagtagtgnagaaaaaaa

SEQ ID NO: 10762 - DNA, 607 bp, Artificial Sequence
  chemically treated genomic DNA (Homo sapiens) CpG-island No: 10762
  unsure (10, 72, 85, 113, 254, 309, 483, 549, 607)
tttttttctncactactaaacaacataaaaaaataaaaccgcttccctacaacaaaaacaaaaacgacgacnaacaacgactacnaacatcattcgcgaacaacgacgaaaanccgaaaactacaaaaaaaaataaaatcgcttcccaaaaaaaaaaacgataacgacgacgactactacatcctcgcgaacaacgacgaaaacaacaatactcgatctccgctaaaaataataacctcccaaccctactaaantaaccgactacactataacgccgacaaaaaaaaaactcgaacccgatccgcgaanccctacgaccacaccgcccgaccccttctctacgccataacttaaacctataaccacctctcctcacgtcgcctcgctcgaccgaaatctatacgccgccgcaaccgcaaaaaaaaacgcgtcccaaacaccctcgccgaaaactcgaaaacgccgtacgtctcacccttcgancgctcgcaacaaactacgctcccaaaaacgtttacgaccgataatcgaaaaactctacaaactctncctaaaacaactctccccgaatactcgctaaaaaaaaaaaacgaactaactccgactn

SEQ ID NO: 10763 - DNA, 607 bp, Artificial Sequence
  chemically treated genomic DNA (Homo sapiens) CpG-island No: 10763
  unsure (10, 72, 85, 113, 254, 309, 483, 549, 607)
tttttttttntattgttgagtagtataaaagggtggggtcgtttttttgtagtaaaagtagaggcggcggtnggtagcggttgtnagtattattcgcgggtagcggcggagantcgagagttgtagaaaagggtggggtcgttttttaggagaagaggcggtggcggcggcggttgttgtattttcgcgggtagcggcggaggtagtaatgttcggttttcgttggaggtgatggttttttagttttgttaggntggtcggttgtattatgacgtcggtaggaaggagattcgagttcggttcgcgganttttgcggttatatcgttcggttttttttttgcgttatggtttaagtttgtggttatttttttttacgtcgtttcgttcgatcgaggtttgtgcgtcgtcgtagtcgtagggaggggcgcgttttagatattttcgtcggggattcgggaacgtcgtgcgttttatttttcggncgttcgtagtagattgcgtttttaaaggcgtttgcgatcggtaatcgagggattttatagattttntttaggatagtttttttcgggtgttcgttgagggaggagggcgaattagtttcggttn

SEQ ID NO: 10764 - DNA, 607 bp, Artificial Sequence
  chemically treated genomic DNA (Homo sapiens) CpG-island No: 10764
  unsure (1, 59, 125, 299, 354, 495, 523, 536, 598)
naaccgaaactaattcgccctcctccctcaacgaacacccgaaaaaaactatcctaaanaaaatctataaaatccctcgattaccgatcgcaaacgcctttaaaaacgcaatctactacgaacgnccgaaaaataaaacgcacgacgttcccgaatccccgacgaaaatatctaaaacgcgcccctccctacgactacgacgacgcacaaacctcgatcgaacgaaacgacgtaaaaaaaaataaccacaaacttaaaccataacgcaaaaaaaaaaccgaacgatataaccgcaaaantccgcgaaccgaactcgaatctccttcctaccgacgtcataatacaaccgaccancctaacaaaactaaaaaaccatcacctccaacgaaaaccgaacattactacctccgccgctacccgcgaaaatacaacaaccgccgccgccaccgcctcttctcctaaaaaacgaccccacccttttctacaactctcgantctccgccgctacccgcgaataatactnacaaccgctaccnaccgccgcctctacttttactacaaaaaaacgaccccacccttttatactactcaacaatanaaaaaaaaa

SEQ ID NO: 10765 - DNA, 627 bp, Artificial Sequence
  chemically treated genomic DNA (Homo sapiens) CpG-island No: 10765
gatatcggggtttttttcgtttattttcgttagggtattattttttttatcggttcgatttcgcgtttcgaggtttcgcggggttaggttgtacgggaggcggagttcggagttcggagttcggggcggggtcggagatgagtttgtaggcggggggttgtgcgagtgcgcggggacgggggttgttgttttcgagtcgagagttttggtagcggggttttgtgggcggagacgttttttcgagtttgggtattttcggagtgggattttcgggtcggagtttcgtcgtcggtttatttagttttagcgggtcgtttttgtttttgggtcgggtggggagttttttattttagagatttttcgattttttgtttttcgcggcgtaggggcgttttttttgcggcgtcgcggggtcgttttttttttttttcgggcggttgtagtaggggcgcgggagttcgcggattgcggggttgcggtcgtttttgttttgtgagttttcgtagttgggaagaaaaaggagaggagggaagagggaaaggtggggaaggggacgtcgcgggagattgggaagtggttgtcgtagggaggagttaggtttcgagtgaagtttgtttgtaagaaggg

SEQ ID NO: 10766 - DNA, 627 bp, Artificial Sequence
  chemically treated genomic DNA (Homo sapiens) CpG-island No: 10766
cccttcttacaaacaaacttcactcgaaacctaactcctccctacgacaaccacttcccaatctcccgcgacgtccccttccccacctttccctcttccctcctctcctttttcttcccaactacgaaaactcacaaaacaaaaacgaccgcaaccccgcaatccgcgaactcccgcgcccctactacaaccgcccgaaaaaaaaaaaaaacgaccccgcgacgccgcaaaaaaaacgcccctacgccgcgaaaaacaaaaaatcgaaaaatctctaaaataaaaaactccccacccgacccaaaaacaaaaacgacccgctaaaactaaataaaccgacgacgaaactccgacccgaaaatcccactccgaaaatacccaaactcgaaaaaacgtctccgcccacaaaaccccgctaccaaaactctcgactcgaaaacaacaacccccgtccccgcgcactcgcacaaccccccgcctacaaactcatctccgaccccgccccgaactccgaactccgaactccgcctcccgtacaacctaaccccgcgaaacctcgaaacgcgaaatcgaaccgataaaaaaaataataccctaacgaaaataaacgaaaaaaaccccgatatc

SEQ ID NO: 10767 - DNA, 627 bp, Artificial Sequence
  chemically treated genomic DNA (Homo sapiens) CpG-island No: 10767
ttttttttataagtaggttttattcgaggtttagtttttttttgcggtagttattttttagtttttcgcggcgtttttttttttattttttttttttttttttttttttttttttttttagttgcgggaatttataaagtaggggcgatcgtaatttcgtagttcgcgggttttcgcgtttttgttgtagtcgttcggggaggggagaggacggtttcgcggcgtcgtagaaagggcgtttttacgtcgcgaggggtagggagtcggggggtttttggaatgggaggttttttattcggtttagaggtaaaggcgattcgttgaaattggatgggtcggcggcggaatttcgattcgagagttttatttcgaagatgtttaggttcgggagggcgttttcgtttatagagtttcgttattagggttttcggttcggaaatagtagttttcgttttcgcgtattcgtatagtttttcgtttgtaggtttattttcggtttcgtttcgggtttcgggtttcgggtttcgtttttcgtgtagtttggtttcgcgagatttcgggacgcgggatcgggtcggtgggaaggatagtgttttggcgagggtgggcgaaagaggtttcggtatt

SEQ ID NO: 10768 - DNA, 627 bp, Artificial Sequence
  chemically treated genomic DNA (Homo sapiens) CpG-island No: 10768
aataccgaaacctctttcgcccaccctcgccaaaacactatccttcccaccgacccgatcccgcgtcccgaaatctcgcgaaaccaaactacacgaaaaacgaaacccgaaacccgaaacccgaaacgaaaccgaaaataaacctacaaacgaaaaactatacgaatacgcgaaaacgaaaactactatttccgaaccgaaaaccctaataacgaaactctataaacgaaaacgccctcccgaacctaaacatcttcgaaataaaactctcgaatcgaaattccgccgccgacccatccaatttcaacgaatcgcctttacctctaaaccgaataaaaaacctcccattccaaaaaccccccgactccctacccctcgcgacgtaaaaacgccctttctacgacgccgcgaaaccgtcctctcccctccccgaacgactacaacaaaaacgcgaaaacccgcgaactacgaaattacgatcgcccctactttataaattcccgcaactaaaaaaaaaaaaaaaaaaaaaaaaaaaaaaaaaataaaaaaaaaaacgccgcgaaaaactaaaaaataactaccgcaaaaaaaaactaaacctcgaataaaacctacttataaaaaaaa

SEQ ID NO: 10769 - DNA, 533 bp, Artificial Sequence
  chemically treated genomic DNA (Homo sapiens) CpG-island No: 10769
  unsure (87, 338, 360)
gtttcgtagggttttttcgttttttttattttttcgcgtatttttagattgttcggcgttttttcgggtcgtacgtacgtaggcgtnttttcgttttttatttgggtcgggttgggttagcgtcgggacgtgattttcgttttcgagtcgcgatacgattttatttttagttcgtttttttgttttcgggatttatatatggtagtttttatttttttttgttcgtttcgagaaatttttggaaagttggaaacgttttcggagggcgttttagtttcgttaaaaaaagttaaagattttttttaaaattttttcggttttcggtttttttttttgtncggcgtttttcggtttttgggnttttattgtttttttcggcggttcgggttgcggggcgtcgggagtttttacggggattagcgtgttttttagagtgcgagtttttttttatttttaggttttttgtataagttagtttatttcgaatcgtacgtttttttaggcgttttttttttcgtaggggttttgtttta

SEQ ID NO: 10770 - DNA, 533 bp, Artificial Sequence
  chemically treated genomic DNA (Homo sapiens) CpG-island No: 10770
  unsure (174, 196, 447)
taaaacaaaacccctacgaaaaaaaaaacgcctaaaaaaacgtacgattcgaaataaactaacttatacaaaaaacctaaaaataaaaaaaaactcgcactctaaaaaacacgctaatccccgtaaaaactcccgacgccccgcaacccgaaccgccgaaaaaaacaataaaancccaaaaaccgaaaaacgccgnacaaaaaaaaaaaccgaaaaccgaaaaaattttaaaaaaaatctttaactttttttaacgaaactaaaacgccctccgaaaacgtttccaactttccaaaaatttctcgaaacgaacaaaaaaaaataaaaactaccatatataaatcccgaaaacaaaaaaacgaactaaaaataaaatcgtatcgcgactcgaaaacgaaaatcacgtcccgacgctaacccaacccgacccaaataaaaaacgaaaanacgcctacgtacgtacgacccgaaaaaacgccgaacaatctaaaaatacgcgaaaaaataaaaaaaacgaaaaaaccctacgaaac

SEQ ID NO: 10771 - DNA, 533 bp, Artificial Sequence
  chemically treated genomic DNA (Homo sapiens) CpG-island No: 10771
  unsure (174, 196, 447)
tggggtagagtttttgcggggaaaggggcgtttgaaaggacgtgcgattcggagtgggttagtttatgtagagagtttgggggtgggaggaagttcgtattttgaaggatacgttgattttcgtggggattttcggcgtttcgtagttcgggtcgtcgagggaggtagtaggantttaggggtcgggaggcgtcgngtagagggaggggtcgggggtcggggaggttttgagggaggtttttggttttttttggcggagttggggcgtttttcggaagcgtttttaattttttagaagtttttcgggacgggtaggagggggtggggattgttatatatagatttcgggagtaggggagcgggttaagagtagaatcgtgtcgcggttcgagagcgagagttacgtttcggcgttagtttagttcgatttaggtgaggggcgggagnacgtttgcgtgcgtgcggttcgggggagcgtcgagtaatttgggggtgcgcgagggagtaagaagggcgaggggattttgcgaagt

SEQ ID NO: 10772 - DNA, 533 bp, Artificial Sequence
  chemically treated genomic DNA (Homo sapiens) CpG-island No: 10772
  unsure (87, 338, 360)
acttcgcaaaatcccctcgcccttcttactccctcgcgcacccccaaattactcgacgctcccccgaaccgcacgcacgcaaacgtnctcccgcccctcacctaaatcgaactaaactaacgccgaaacgtaactctcgctctcgaaccgcgacacgattctactcttaacccgctcccctactcccgaaatctatatataacaatccccaccccctcctacccgtcccgaaaaacttctaaaaaattaaaaacgcttccgaaaaacgccccaactccgccaaaaaaaaccaaaaacctccctcaaaacctccccgacccccgacccctccctctacncgacgcctcccgacccctaaantcctactacctccctcgacgacccgaactacgaaacgccgaaaatccccacgaaaatcaacgtatccttcaaaatacgaacttcctcccacccccaaactctctacataaactaacccactccgaatcgcacgtcctttcaaacgcccctttccccgcaaaaactctacccca

SEQ ID NO: 10773 - DNA, 798 bp, Artificial Sequence
  chemically treated genomic DNA (Homo sapiens) CpG-island No: 10773
gagattcgcgggattcgttaattggtttgagttaggaatataattagtgtttagttatcgatatttcggcggtcgggagtttttcgttttttgttagttttagacgtacgtgataaattagatcggagtttggcgcgcgtttttgtttttcggttcgggtttttttagtcgggtttcgaggtttatcgttcgttttatatttatttcgtagagttggtttcgttaattgtagagtcgtcgggggtcgggtttagttggatgggcgtcggtttttttttgggtattttggattcgggtaacgcgtttttaatttcggggggagggtagtatttttcgttttttttcgttgcgttgtttcgcgttcgttgcgtaggattaagttcgggtcgcgggtttcggggttgtttttagcgggtgcgtttcgcgcggtttcgttagcgtcgaggggtcggtagcggttttagtggattttcgttttattcgttcgggattcggtttcgcgcgtagagagtcgaaaggttgttttgtaggagcggagcgggttgaacgtgcggttcggtagttcgggatttttttttttttttttttttaattaattagttttttcggttcgggcggtatagtcgcgcgcgtattagagtttagttttagtttttgtcggggaaagtgtcgtcgtcgtcgtgtttttagtcgttttgcgaagcggttttgggagggattggaggtcgggggaggggcggggaaggggaagtttcgttttttattcgggatgcggcgttttttatatttttattcggt

SEQ ID NO: 10774 - DNA, 798 bp, Artificial Sequence
  chemically treated genomic DNA (Homo sapiens) CpG-island No: 10774
accgaataaaaatataaaaaacgccgcatcccgaataaaaaacgaaacttccccttccccgcccctcccccgacctccaatccctcccaaaaccgcttcgcaaaacgactaaaaacacgacgacgacgacactttccccgacaaaaactaaaactaaactctaatacgcgcgcgactataccgcccgaaccgaaaaaactaattaattaaaaaaaaaaaaaaaaaaaaatcccgaactaccgaaccgcacgttcaacccgctccgctcctacaaaacaacctttcgactctctacgcgcgaaaccgaatcccgaacgaataaaacgaaaatccactaaaaccgctaccgacccctcgacgctaacgaaaccgcgcgaaacgcacccgctaaaaacaaccccgaaacccgcgacccgaacttaatcctacgcaacgaacgcgaaacaacgcaacgaaaaaaaacgaaaaatactaccctccccccgaaattaaaaacgcgttacccgaatccaaaatacccaaaaaaaaaccgacgcccatccaactaaacccgacccccgacgactctacaattaacgaaaccaactctacgaaataaatataaaacgaacgataaacctcgaaacccgactaaaaaaacccgaaccgaaaaacaaaaacgcgcgccaaactccgatctaatttatcacgtacgtctaaaactaacaaaaaacgaaaaactcccgaccgccgaaatatcgataactaaacactaattatattcctaactcaaaccaattaacgaatcccgcgaatctc

SEQ ID NO: 10775 - DNA, 798 bp, Artificial Sequence
  chemically treated genomic DNA (Homo sapiens) CpG-island No: 10775
gtcgagtgggagtgtggaaagcgtcgtatttcgggtgggaggcgaggttttttttttttcgtttttttttcggtttttagttttttttagggtcgtttcgtagagcggttaggagtacggcggcggcggtatttttttcggtaggagttggagttgggttttggtgcgcgcgcggttgtgtcgttcgagtcggagggattggttggttgagagagagagaggaagggaatttcgggttgtcgaatcgtacgtttagttcgtttcgtttttgtagggtagtttttcggttttttgcgcgcgaagtcgagtttcgggcgggtggggcgggggtttattgagatcgttatcggtttttcggcgttgacgggatcgcgcggggcgtattcgttgaaggtagtttcggggttcgcggttcggatttggttttgcgtagcgggcgcggggtagcgtagcgggaggaagcgagaggtgttgtttttttttcggagttggaagcgcgttattcgggtttaaaatgtttaagaagaagtcgacgtttatttagttgaattcggttttcgacggttttgtagttaacgggattagttttgcggagtaagtatggggcgggcggtgaatttcggggttcggttggggaggttcgagtcggggagtaggagcgcgcgttaggtttcgatttggtttgttacgtacgtttggggttggtagggggcgagaaattttcggtcgtcgaggtatcggtgattaagtattgattgtgtttttgatttagattagttagcggatttcgcgggtttt

SEQ ID NO: 10776 - DNA, 798 bp, Artificial Sequence
  chemically treated genomic DNA (Homo sapiens) CpG-island No: 10776
aaaacccgcgaaatccgctaactaatctaaatcaaaaacacaatcaatacttaatcaccgatacctcgacgaccgaaaatttctcgccccctaccaaccccaaacgtacgtaacaaaccaaatcgaaacctaacgcgcgctcctactccccgactcgaacctccccaaccgaaccccgaaattcaccgcccgccccatacttactccgcaaaactaatcccgttaactacaaaaccgtcgaaaaccgaattcaactaaataaacgtcgacttcttcttaaacattttaaacccgaataacgcgcttccaactccgaaaaaaaaacaacacctctcgcttcctcccgctacgctaccccgcgcccgctacgcaaaaccaaatccgaaccgcgaaccccgaaactaccttcaacgaatacgccccgcgcgatcccgtcaacgccgaaaaaccgataacgatctcaataaacccccgccccacccgcccgaaactcgacttcgcgcgcaaaaaaccgaaaaactaccctacaaaaacgaaacgaactaaacgtacgattcgacaacccgaaattcccttcctctctctctctcaaccaaccaatccctccgactcgaacgacacaaccgcgcgcgcaccaaaacccaactccaactcctaccgaaaaaaataccgccgccgccgtactcctaaccgctctacgaaacgaccctaaaaaaaactaaaaaccgaaaaaaaaacgaaaaaaaaaaaacctcgcctcccacccgaaatacgacgctttccacactcccactcgac

SEQ ID NO: 10777 - DNA, 931 bp, Artificial Sequence
  chemically treated genomic DNA (Homo sapiens) CpG-island No: 10777
ttgtttcgcgtgtatttacgggaggattcgtagacgttattgtttttttgcgtgtttcggttattttcgggcggtttgtagcggtgcgcggggtggttggggttacgtgtagagttgttcgcggacgcggaatagtagcggtgaagtttttcggttcggcgaattcgtcgtgtttattgttcgtttcggttgtcgtcgttttagtcgtagtcgttgtttcgtcgtcgggggagaggtagtttattgttttttttcgcggcgaaggtgaggagttgtttcggttcggttcgcggggagtttcgggagtcgtacggtgagagcgtaatttagttggcggagttgggggaagttttgtgatttgaggaggggtcgggatcggacgcggttcgttttttgcggtcgtttcggtggcggggttttagaggagggtcggaggttgcgcggggttttaggggcgggcggtacggatgggtagtcgggcggcgcggggattttagttttgcggattttttttttttgcgtattatttttttttcgtattgtttgtttggggttcgcgcgttttttatttcgtagtttaatttgggggtcgtcgtcgtttttcggatggggggcgtttcggcggcggatggtttcgaatttttgttcgggttttcgggttggcgtttggggcggatttattttttttttggggcggcggtcgcggtgtggagttcgcgtcgcgaataagtgttgcgggcgcgagggagcggtttttcggggtcgacgcggacggtaaatttgttcggcgcgttcgtttgttggggttttttcgttgtttttcgggcgcggttcggttgaaattgcgatcgtcggaggcgagcggtttttggattcgtgtagtcggtttatttgtagttatattttgagattaaatatttttttttttttt

SEQ ID NO: 10778 - DNA, 931 bp, Artificial Sequence
  chemically treated genomic DNA (Homo sapiens) CpG-island No: 10778
aaaaaaaaaaaaaatatttaatctcaaaatataactacaaataaaccgactacacgaatccaaaaaccgctcgcctccgacgatcgcaatttcaaccgaaccgcgcccgaaaaacaacgaaaaaaccccaacaaacgaacgcgccgaacaaatttaccgtccgcgtcgaccccgaaaaaccgctccctcgcgcccgcaacacttattcgcgacgcgaactccacaccgcgaccgccgccccaaaaaaaaaataaatccgccccaaacgccaacccgaaaacccgaacaaaaattcgaaaccatccgccgccgaaacgccccccatccgaaaaacgacgacgacccccaaattaaactacgaaataaaaaacgcgcgaaccccaaacaaacaatacgaaaaaaaaataatacgcaaaaaaaaaaaatccgcaaaactaaaatccccgcgccgcccgactacccatccgtaccgcccgcccctaaaaccccgcgcaacctccgaccctcctctaaaaccccgccaccgaaacgaccgcaaaaaacgaaccgcgtccgatcccgacccctcctcaaatcacaaaacttcccccaactccgccaactaaattacgctctcaccgtacgactcccgaaactccccgcgaaccgaaccgaaacaactcctcaccttcgccgcgaaaaaaaacaataaactacctctcccccgacgacgaaacaacgactacgactaaaacgacgacaaccgaaacgaacaataaacacgacgaattcgccgaaccgaaaaacttcaccgctactattccgcgtccgcgaacaactctacacgtaaccccaaccaccccgcgcaccgctacaaaccgcccgaaaataaccgaaacacgcaaaaaaacaataacgtctacgaatcctcccgtaaatacacgcgaaacaa

SEQ ID NO: 10779 - DNA, 931 bp, Artificial Sequence
  chemically treated genomic DNA (Homo sapiens) CpG-island No: 10779
aaaaaaaaaaaaaatgtttagttttaaagtatagttgtaagtggatcggttgtacgggtttagaggtcgttcgttttcgacggtcgtagttttagtcgggtcgcgttcgagaaatagcggagaggttttagtaggcgggcgcgtcggataggtttatcgttcgcgtcggtttcggggaatcgttttttcgcgttcgtagtatttgttcgcggcgcggattttatatcgcggtcgtcgttttaggggaggagtgagttcgttttaggcgttaattcggggattcgggtaagggttcggggttattcgtcgtcggggcgttttttattcggaaagcggcgacggtttttaagttgggttgcggagtgggaggcgcgcgagttttaagtagataatgcgggagaagggtgatgcgtagggaggaggggttcgtaaagttgaggttttcgcgtcgttcggttatttattcgtgtcgttcgtttttgaagtttcgcgtagttttcgatttttttttggggtttcgttatcggagcggtcgtaggggacgggtcgcgttcgatttcgatttttttttaaattataaaattttttttaatttcgttaattaagttgcgtttttatcgtgcggttttcggggtttttcgcgggtcgagtcgagatagttttttattttcgtcgcggagaaagataataggttgtttttttttcggcggcggagtagcggttgcggttaaagcggcggtaatcgaggcgagtaatgggtacggcggattcgtcgagtcgaggggttttatcgttgttgtttcgcgttcgcgaatagttttgtacgtagttttagttatttcgcgtatcgttataagtcgttcgggggtggtcggggtacgtaagaaggtagtaacgtttgcgagttttttcgtgagtatacgcggagtaa

SEQ ID NO: 10780 - DNA, 931 bp, Artificial Sequence
  chemically treated genomic DNA (Homo sapiens) CpG-island No: 10780
ttactccgcgtatactcacgaaaaaactcgcaaacgttactaccttcttacgtaccccgaccacccccgaacgacttataacgatacgcgaaataactaaaactacgtacaaaactattcgcgaacgcgaaacaacaacgataaaacccctcgactcgacgaatccgccgtacccattactcgcctcgattaccgccgctttaaccgcaaccgctactccgccgccgaaaaaaaaacaacctattatctttctccgcgacgaaaataaaaaactatctcgactcgacccgcgaaaaaccccgaaaaccgcacgataaaaacgcaacttaattaacgaaattaaaaaaaattttataatttaaaaaaaaatcgaaatcgaacgcgacccgtcccctacgaccgctccgataacgaaaccccaaaaaaaaatcgaaaactacgcgaaacttcaaaaacgaacgacacgaataaataaccgaacgacgcgaaaacctcaactttacgaacccctcctccctacgcatcacccttctcccgcattatctacttaaaactcgcgcgcctcccactccgcaacccaacttaaaaaccgtcgccgctttccgaataaaaaacgccccgacgacgaataaccccgaacccttacccgaatccccgaattaacgcctaaaacgaactcactcctcccctaaaacgacgaccgcgatataaaatccgcgccgcgaacaaatactacgaacgcgaaaaaacgattccccgaaaccgacgcgaacgataaacctatccgacgcgcccgcctactaaaacctctccgctatttctcgaacgcgacccgactaaaactacgaccgtcgaaaacgaacgacctctaaacccgtacaaccgatccacttacaactatactttaaaactaaacatttttttttttttt

SEQ ID NO: 10781 - DNA, 689 bp, Artificial Sequence
  chemically treated genomic DNA (Homo sapiens) CpG-island No: 10781
gttgcgggttaagtttcgcgtttcgtttttaggtttcgttatgtaggaggtaggtgcgcgtttatcgttttcgtagcgtagttatttttagcggtagtttagcggtttttagcgcgtttagttacgtttatagcgtgcggtttaagtgcgtatagagcgttaagtttagcgcgttttaggcgttcgttttgtattttacgcgcggttttagcggtttcgggttcgaaggtcgcgcgttagtgggcggggacggttattaggttatttaggttttagcgtagtgcgcgtaggagttttagggattcgtttaggtgttgggcgattagtagtaggtcgaagcgcgcggttatcgtttgtattttcggggttaagaggcgcgttgttattttataaggcgcgcggcgcgttgtggtcgaagtttaagtttaaggttatgaggttgtggttatggtgtttgtcgggtcgtttggggtcgtagaaggcgtaggaagtggcgtaggattcgggtttcgacgaagggagaggtcgttttgtagaaagcggattttaggacgagggttgggtttcgtagggtggtgaaggaggtgtcgcggggtaggatgcgtcgtatttgggcggggaagggtttgtgtgtttacgagggcggttggttttggggacgttttaagggttttaagggtagtagtcgt

SEQ ID NO: 10782 - DNA, 689 bp, Artificial Sequence
  chemically treated genomic DNA (Homo sapiens) CpG-island No: 10782
acgactactacccttaaaacccttaaaacgtccccaaaaccaaccgccctcgtaaacacacaaacccttccccgcccaaatacgacgcatcctaccccgcgacacctccttcaccaccctacgaaacccaaccctcgtcctaaaatccgctttctacaaaacgacctctcccttcgtcgaaacccgaatcctacgccacttcctacgccttctacgaccccaaacgacccgacaaacaccataaccacaacctcataaccttaaacttaaacttcgaccacaacgcgccgcgcgccttataaaataacaacgcgcctcttaaccccgaaaatacaaacgataaccgcgcgcttcgacctactactaatcgcccaacacctaaacgaatccctaaaactcctacgcgcactacgctaaaacctaaataacctaataaccgtccccgcccactaacgcgcgaccttcgaacccgaaaccgctaaaaccgcgcgtaaaatacaaaacgaacgcctaaaacgcgctaaacttaacgctctatacgcacttaaaccgcacgctataaacgtaactaaacgcgctaaaaaccgctaaactaccgctaaaaataactacgctacgaaaacgataaacgcgcacctacctcctacataacgaaacctaaaaacgaaacgcgaaacttaacccgcaac

SEQ ID NO: 10783 - DNA, 689 bp, Artificial Sequence
  chemically treated genomic DNA (Homo sapiens) CpG-island No: 10783
gcgattgttgtttttggagtttttggagcgtttttagagttagtcgttttcgtgggtatataggttttttttcgtttagatgcgacgtattttgtttcgcgatattttttttattattttgcgggatttagttttcgttttggagttcgttttttataagacggttttttttttcgtcggagttcggattttgcgttattttttgcgttttttacgattttaggcggttcgataggtattatggttataattttatggttttggatttaggtttcgattataacgcgtcgcgcgttttgtagggtggtaacgcgttttttggtttcgggggtgtaagcggtggtcgcgcgtttcgatttgttgttgatcgtttagtatttggacgagtttttggggtttttgcgcgtattgcgttggggtttggatgatttggtggtcgttttcgtttattggcgcgcggttttcgggttcggagtcgttggagtcgcgcgtggagtgtagggcgagcgtttagaacgcgttggatttggcgttttgtgcgtatttgaatcgtacgttgtgggcgtggttgggcgcgttgggggtcgttgggttgtcgttggaggtggttgcgttgcgggagcggtgggcgcgtatttgttttttgtatggcgaggtttgggggcggggcgcggagtttgattcgtagt

SEQ ID NO: 10784 - DNA, 689 bp, Artificial Sequence
  chemically treated genomic DNA (Homo sapiens) CpG-island No: 10784
actacgaatcaaactccgcgccccgcccccaaacctcgccatacaaaaaacaaatacgcgcccaccgctcccgcaacgcaaccacctccaacgacaacccaacgacccccaacgcgcccaaccacgcccacaacgtacgattcaaatacgcacaaaacgccaaatccaacgcgttctaaacgctcgccctacactccacgcgcgactccaacgactccgaacccgaaaaccgcgcgccaataaacgaaaacgaccaccaaatcatccaaaccccaacgcaatacgcgcaaaaaccccaaaaactcgtccaaatactaaacgatcaacaacaaatcgaaacgcgcgaccaccgcttacacccccgaaaccaaaaaacgcgttaccaccctacaaaacgcgcgacgcgttataatcgaaacctaaatccaaaaccataaaattataaccataatacctatcgaaccgcctaaaatcgtaaaaaacgcaaaaaataacgcaaaatccgaactccgacgaaaaaaaaaaccgtcttataaaaaacgaactccaaaacgaaaactaaatcccgcaaaataataaaaaaaatatcgcgaaacaaaatacgtcgcatctaaacgaaaaaaaacctatatacccacgaaaacgactaactctaaaaacgctccaaaaactccaaaaacaacaatcgc

SEQ ID NO: 10785 - DNA, 573 bp, Artificial Sequence
  chemically treated genomic DNA (Homo sapiens) CpG-island No: 10785
tttcgatcgagcgtgtaggagtttcggggtgttattgggtttcgatcgagcgtgtaggagtttcggggtgttattgggtttcgatcgagcgtgtaggagtttcggggtgttattgggtttcgatcgagcgtgtaggagtttcggggtgttattgggtttcgatcgagcgtgtaggagtttcggggtgttattgggtttcgatcgagcgtgtaggagtttcggggtgttattgggtttcgatcgagcgtgtaggagtttcggggtgttattgggtttcgatcgagcgtgtaggagtttcggggtgttattgggtttcgatcgagcgtgtaggagtttcggggtgttattgggtttcgatcgagcgtgtaggagtttcggggtgttattgggtttcgatcgagcgtgtaggagtttcggggtgttattgggtttcgatcgagcgtgtaggagtttcggggtgttattgggtttcgatcgagcgtgtaggagtttcggtgagacgtttgtttacggttagtatcgaggttttttttatttagattcgttttttttttagattatttgtagttaggt

SEQ ID NO: 10786 - DNA, 573 bp, Artificial Sequence
  chemically treated genomic DNA (Homo sapiens) CpG-island No: 10786
acctaactacaaataatctaaaaaaaaaacgaatctaaataaaaaaaacctcgatactaaccgtaaacaaacgtctcaccgaaactcctacacgctcgatcgaaacccaataacaccccgaaactcctacacgctcgatcgaaacccaataacaccccgaaactcctacacgctcgatcgaaacccaataacaccccgaaactcctacacgctcgatcgaaacccaataacaccccgaaactcctacacgctcgatcgaaacccaataacaccccgaaactcctacacgctcgatcgaaacccaataacaccccgaaactcctacacgctcgatcgaaacccaataacaccccgaaactcctacacgctcgatcgaaacccaataacaccccgaaactcctacacgctcgatcgaaacccaataacaccccgaaactcctacacgctcgatcgaaacccaataacaccccgaaactcctacacgctcgatcgaaacccaataacaccccgaaactcctacacgctcgatcgaaacccaataacaccccgaaactcctacacgctcgatcgaaa

SEQ ID NO: 10787 - DNA, 573 bp, Artificial Sequence
  chemically treated genomic DNA (Homo sapiens) CpG-island No: 10787
gtttggttgtaggtggtttgagggagaagcgggtttgggtagagggagtttcggtattgatcgtgggtaggcgttttatcgaagtttttatacgttcggtcggggtttagtggtatttcgaagtttttatacgttcggtcggggtttagtggtatttcgaagtttttatacgttcggtcggggtttagtggtatttcgaagtttttatacgttcggtcggggtttagtggtatttcgaagtttttatacgttcggtcggggtttagtggtatttcgaagtttttatacgttcggtcggggtttagtggtatttcgaagtttttatacgttcggtcggggtttagtggtatttcgaagtttttatacgttcggtcggggtttagtggtatttcgaagtttttatacgttcggtcggggtttagtggtatttcgaagtttttatacgttcggtcggggtttagtggtatttcgaagtttttatacgttcggtcggggtttagtggtatttcgaagtttttatacgttcggtcggggtttagtggtatttcgaagtttttatacgttcggtcgggg

SEQ ID NO: 10788 - DNA, 573 bp, Artificial Sequence
  chemically treated genomic DNA (Homo sapiens) CpG-island No: 10788
ccccgaccgaacgtataaaaacttcgaaataccactaaaccccgaccgaacgtataaaaacttcgaaataccactaaaccccgaccgaacgtataaaaacttcgaaataccactaaaccccgaccgaacgtataaaaacttcgaaataccactaaaccccgaccgaacgtataaaaacttcgaaataccactaaaccccgaccgaacgtataaaaacttcgaaataccactaaaccccgaccgaacgtataaaaacttcgaaataccactaaaccccgaccgaacgtataaaaacttcgaaataccactaaaccccgaccgaacgtataaaaacttcgaaataccactaaaccccgaccgaacgtataaaaacttcgaaataccactaaaccccgaccgaacgtataaaaacttcgaaataccactaaaccccgaccgaacgtataaaaacttcgaaataccactaaaccccgaccgaacgtataaaaacttcgataaaacgcctacccacgatcaataccgaaactccctctacccaaacccgcttctccctcaaaccacctacaaccaaac

SEQ ID NO: 10789 - DNA, 808 bp, Artificial Sequence
  chemically treated genomic DNA (Homo sapiens) CpG-island No: 10789
ttcgtttcgatttgcgggtcgcgttttcgcgagttgtttgcgggcgcgttgggagtcggttcggggagatgcgagcgtagggagatgcgttttgtttcgggcgtagcgggtaagttgtcgtattttttatttttgttgtttggtttggggttaggagagcggtaattcggggtcggtttcggagttggatatattcggcgttttcggggttagggtttgcgggttttcggcgttgcgttttttcgattcgtttttcgcggcgttcgggtcgcgttttgcggtagttatcgagttgagggtagggcgttttagcgtttttggtttcggtttcgtttcgtagcggtcgtatttcgaggttcggtttcgtatagttgtagtcggtgtttttcggttaagttttcgtttggcgttttcggttttagtttcggtcgttcgtcgttgatttttttttgcgcgcggttgagtcgtttttggacgtttttggcgaagatgttcgttttgatgtcggttatggttgcgggttcggggagttgcgaagagtagagcgcgtagcggggttggcggcggcgcggaggagcgggaggaggagcgggaggaggaggagagggtcgagtaagggaggagcgggagaagcggcggggagtcgcggagcgcggaggggtgagggcggggcgcggcggcgggattagtttaaagcgatagagcgggggcgggatgcgtcgggattggttgtgatatggggagaaggggcgggggaagaaagagaaagaggttaagaaaaagagagggaaaagttagaagttagatt

SEQ ID NO: 10790 - DNA, 808 bp, Artificial Sequence
  chemically treated genomic DNA (Homo sapiens) CpG-island No: 10790
aatctaacttctaacttttccctctctttttcttaacctctttctctttcttcccccgccccttctccccatatcacaaccaatcccgacgcatcccgcccccgctctatcgctttaaactaatcccgccgccgcgccccgccctcacccctccgcgctccgcgactccccgccgcttctcccgctcctcccttactcgaccctctcctcctcctcccgctcctcctcccgctcctccgcgccgccgccaaccccgctacgcgctctactcttcgcaactccccgaacccgcaaccataaccgacatcaaaacgaacatcttcgccaaaaacgtccaaaaacgactcaaccgcgcgcaaaaaaaaatcaacgacgaacgaccgaaactaaaaccgaaaacgccaaacgaaaacttaaccgaaaaacaccgactacaactatacgaaaccgaacctcgaaatacgaccgctacgaaacgaaaccgaaaccaaaaacgctaaaacgccctaccctcaactcgataactaccgcaaaacgcgacccgaacgccgcgaaaaacgaatcgaaaaaacgcaacgccgaaaacccgcaaaccctaaccccgaaaacgccgaatatatccaactccgaaaccgaccccgaattaccgctctcctaaccccaaaccaaacaacaaaaataaaaaatacgacaacttacccgctacgcccgaaacaaaacgcatctccctacgctcgcatctccccgaaccgactcccaacgcgcccgcaaacaactcgcgaaaacgcgacccgcaaatcgaaacgaa

SEQ ID NO: 10791 - DNA, 808 bp, Artificial Sequence
  chemically treated genomic DNA (Homo sapiens) CpG-island No: 10791
aatttggtttttggttttttttttttttttttttggttttttttttttttttttttcgttttttttttttatgttatagttagtttcgacgtatttcgttttcgttttgtcgttttaagttggtttcgtcgtcgcgtttcgtttttattttttcgcgtttcgcggtttttcgtcgtttttttcgttttttttttgttcggtttttttttttttttttcgttttttttttcgttttttcgcgtcgtcgttagtttcgttgcgcgttttgtttttcgtagtttttcggattcgtagttatggtcgatattaagacgggtattttcgttaagaacgtttagaagcgatttaatcgcgcgtaggaaaaggttagcggcgggcggtcggggttggggtcggggacgttaggcgggggtttggtcggagggtatcggttgtagttgtgcggggtcgagtttcggggtgcggtcgttgcggagcggggtcggggttagggacgttgggacgttttgtttttagttcggtgattgtcgtaaggcgcgattcgggcgtcgcggggagcgggtcgggaggacgtagcgtcggggattcgtagattttggtttcggagacgtcggatatgtttagtttcggagtcggtttcgggttgtcgtttttttggttttaagttaggtaatagaagtaggaggtgcggtagtttgttcgttgcgttcggagtagagcgtatttttttgcgttcgtattttttcgggtcggtttttagcgcgttcgtaggtagttcgcggggacgcggttcgtagatcggggcggg

SEQ ID NO: 10792 - DNA, 808 bp, Artificial Sequence
  chemically treated genomic DNA (Homo sapiens) CpG-island No: 10792
cccgccccgatctacgaaccgcgtccccgcgaactacctacgaacgcgctaaaaaccgacccgaaaaaatacgaacgcaaaaaaatacgctctactccgaacgcaacgaacaaactaccgcacctcctacttctattacctaacttaaaaccaaaaaaacgacaacccgaaaccgactccgaaactaaacatatccgacgtctccgaaaccaaaatctacgaatccccgacgctacgtcctcccgacccgctccccgcgacgcccgaatcgcgccttacgacaatcaccgaactaaaaacaaaacgtcccaacgtccctaaccccgaccccgctccgcaacgaccgcaccccgaaactcgaccccgcacaactacaaccgataccctccgaccaaacccccgcctaacgtccccgaccccaaccccgaccgcccgccgctaaccttttcctacgcgcgattaaatcgcttctaaacgttcttaacgaaaatacccgtcttaatatcgaccataactacgaatccgaaaaactacgaaaaacaaaacgcgcaacgaaactaacgacgacgcgaaaaaacgaaaaaaaaaacgaaaaaaaaaaaaaaaaaccgaacaaaaaaaaaacgaaaaaaacgacgaaaaaccgcgaaacgcgaaaaaataaaaacgaaacgcgacgacgaaaccaacttaaaacgacaaaacgaaaacgaaatacgtcgaaactaactataacataaaaaaaaaaaacgaaaaaaaaaaaaaaaaaaaaccaaaaaaaaaaaaaaaaaaaaccaaaaaccaaatt

SEQ ID NO: 10793 - DNA, 504 bp, Artificial Sequence
  chemically treated genomic DNA (Homo sapiens) CpG-island No: 10793
gttgtcgacgttcgttatggttcggtcggtcgggtaggggtttcgtagcgagattagcggcgtttgcggttttttttacggcggagtgagtagttcggggttcggcggcgaattttttttcggtcgcgtcgcgttgttatttttagtttcgtcgcgcgttggtagttgagcgtttggagataatagcggggatttaatgttaatagttaaagcgttaggagttcgggggaggtaggagtcgtcgcgattgttttatttttaagtcgagttttagaggcggcgagaggagtgttaggaagggaggacgcgcgttcgagcgcgtggacggggttgatcggtgggcgcggagatttttgtttggttacgttattttttgttagtcgcggatttcgcgcgttataggaacgtttgttttttattttatttttttttttcgtttttggtggttggggggatttggggatttaagggaatggttgaattggcgtcgtgcgttttttagat

SEQ ID NO: 10794 - DNA, 504 bp, Artificial Sequence
  chemically treated genomic DNA (Homo sapiens) CpG-island No: 10794
atctaaaaaacgcacgacgccaattcaaccattcccttaaatccccaaatccccccaaccaccaaaaacgaaaaaaaaaaataaaataaaaaacaaacgttcctataacgcgcgaaatccgcgactaacaaaaaataacgtaaccaaacaaaaatctccgcgcccaccgatcaaccccgtccacgcgctcgaacgcgcgtcctcccttcctaacactcctctcgccgcctctaaaactcgacttaaaaataaaacaatcgcgacgactcctacctcccccgaactcctaacgctttaactattaacattaaatccccgctattatctccaaacgctcaactaccaacgcgcgacgaaactaaaaataacaacgcgacgcgaccgaaaaaaaattcgccgccgaaccccgaactactcactccgccgtaaaaaaaaccgcaaacgccgctaatctcgctacgaaacccctacccgaccgaccgaaccataacgaacgtcgacaac

SEQ ID NO: 10795 - DNA, 504 bp, Artificial Sequence
  chemically treated genomic DNA (Homo sapiens) CpG-island No: 10795
atttagaagacgtacgacgttaatttagttatttttttgggtttttaaatttttttagttattagagacggaaggagaaggtgaagtggaaaatagacgtttttgtggcgcgcgggattcgcggttgatagagagtagcgtggttaggtagggattttcgcgtttatcggttagtttcgtttacgcgttcgggcgcgcgttttttttttttgatatttttttcgtcgtttttggaattcggtttggagatggggtagtcgcgacggtttttgtttttttcgagtttttagcgttttagttgttgatattgggttttcgttgttgtttttaggcgtttagttgttagcgcgcggcggggttgagagtgatagcgcggcgcggtcgggggaggattcgtcgtcgagtttcgggttgtttatttcgtcgtgggggggatcgtagacgtcgttggtttcgttgcgaggtttttgttcggtcggtcgagttatgacggacgtcggtaat

SEQ ID NO: 10796 - DNA, 504 bp, Artificial Sequence
  chemically treated genomic DNA (Homo sapiens) CpG-island No: 10796
attaccgacgtccgtcataactcgaccgaccgaacaaaaacctcgcaacgaaaccaacgacgtctacgatcccccccacgacgaaataaacaacccgaaactcgacgacgaatcctcccccgaccgcgccgcgctatcactctcaaccccgccgcgcgctaacaactaaacgcctaaaaacaacaacgaaaacccaatatcaacaactaaaacgctaaaaactcgaaaaaaacaaaaaccgtcgcgactaccccatctccaaaccgaattccaaaaacgacgaaaaaaatatcaaaaaaaaaaaacgcgcgcccgaacgcgtaaacgaaactaaccgataaacgcgaaaatccctacctaaccacgctactctctatcaaccgcgaatcccgcgcgccacaaaaacgtctattttccacttcaccttctccttccgtctctaataactaaaaaaatttaaaaacccaaaaaaataactaaattaacgtcgtacgtcttctaaat

SEQ ID NO: 10797 - DNA, 715 bp, Artificial Sequence
  chemically treated genomic DNA (Homo sapiens) CpG-island No: 10797
tttttcgcgttttttcggtagagacgtttcgtaggttcgattgttttaggcgtaatcgttttcgcgcgggggatttgttacgttttcggtttttttagaaacgggcggtttgtttttgtttcgaaaatggggacggggagagggggttgcgcgttttttatttaagatttttgtatttttttttttcgtcgtttttttcgttcgttttcgtcggttttcgtttttcgtcggatttattttggttcgcgttcgcgttggtggcggtggagttttcgtagtttatcgcgtagtcggtcggggaagtcgcgtttcggagttttcggtcgcgggttttgggggcggagatttagacgaagggcggcgtatttcgagcgggaggttgacggggtcgcgaggggttaggaatcgagtgggggtcgtttttttttatcgtcgggagacgcggttcggggcgtagcgggttgcgggttgtcgggcggaaattattcggtatttttcgtttcggtttcgtttcgttcggggattcgtcggatttattcgtcgttttagtaatttcggtattggttaatttttagttttttgcgcgtttcgcggtcggttattggtcgttattacgaggggcgggagtttaaagtgggtttcggggcgagggagcggtaaggggcgtggtcggcgtagcggggtgggggtgtttatttgtttatttttagtattt

SEQ ID NO: 10798 - DNA, 715 bp, Artificial Sequence
  chemically treated genomic DNA (Homo sapiens) CpG-island No: 10798
aaatactaaaaataaacaaataaacacccccaccccgctacgccgaccacgccccttaccgctccctcgccccgaaacccactttaaactcccgcccctcgtaataacgaccaataaccgaccgcgaaacgcgcaaaaaactaaaaattaaccaataccgaaattactaaaacgacgaataaatccgacgaatccccgaacgaaacgaaaccgaaacgaaaaataccgaataatttccgcccgacaacccgcaacccgctacgccccgaaccgcgtctcccgacgataaaaaaaaacgacccccactcgattcctaacccctcgcgaccccgtcaacctcccgctcgaaatacgccgcccttcgtctaaatctccgcccccaaaacccgcgaccgaaaactccgaaacgcgacttccccgaccgactacgcgataaactacgaaaactccaccgccaccaacgcgaacgcgaaccaaaataaatccgacgaaaaacgaaaaccgacgaaaacgaacgaaaaaaacgacgaaaaaaaaaaatacaaaaatcttaaataaaaaacgcgcaaccccctctccccgtccccattttcgaaacaaaaacaaaccgcccgtttctaaaaaaaccgaaaacgtaacaaatcccccgcgcgaaaacgattacgcctaaaacaatcgaacctacgaaacgtctctaccgaaaaaacgcgaaaaa

SEQ ID NO: 10799 - DNA, 715 bp, Artificial Sequence
  chemically treated genomic DNA (Homo sapiens) CpG-island No: 10799
ggatgttgagggtgggtaggtgggtatttttatttcgttgcgtcggttacgttttttgtcgttttttcgtttcggggtttattttaaattttcgtttttcgtaataacgattaatggtcgatcgcgaagcgcgtaggaggttggggattggttagtgtcgaggttgttggggcgacgggtgggttcggcgggttttcgggcggggcggggtcggggcgaggggtgtcgggtggttttcgttcggtagttcgtagttcgttgcgtttcgggtcgcgtttttcggcggtgggagggggcggtttttattcggtttttggtttttcgcggtttcgttagtttttcgttcggggtgcgtcgtttttcgtttgggttttcgtttttaggattcgcggtcgagagtttcggagcgcggttttttcggtcggttgcgcgatgggttgcgggaattttatcgttattagcgcgggcgcgggttaaggtgagttcggcgggaggcgggggtcggcgggggcgggcgggagaggcggcgggaaggaagggtgtagggattttgggtggggggcgcgtagtttttttttttcgtttttattttcgggataggagtagatcgttcgtttttggaaagatcgaaagcgtggtaagtttttcgcgcgggggcggttgcgtttggagtagtcgagtttgcggggcgtttttgtcgagggagcgcggggag

SEQ ID NO: 10800 - DNA, 715 bp, Artificial Sequence
  chemically treated genomic DNA (Homo sapiens) CpG-island No: 10800
ctccccgcgctccctcgacaaaaacgccccgcaaactcgactactccaaacgcaaccgcccccgcgcgaaaaacttaccacgctttcgatctttccaaaaacgaacgatctactcctatcccgaaaataaaaacgaaaaaaaaaaactacgcgccccccacccaaaatccctacacccttccttcccgccgcctctcccgcccgcccccgccgacccccgcctcccgccgaactcaccttaacccgcgcccgcgctaataacgataaaattcccgcaacccatcgcgcaaccgaccgaaaaaaccgcgctccgaaactctcgaccgcgaatcctaaaaacgaaaacccaaacgaaaaacgacgcaccccgaacgaaaaactaacgaaaccgcgaaaaaccaaaaaccgaataaaaaccgccccctcccaccgccgaaaaacgcgacccgaaacgcaacgaactacgaactaccgaacgaaaaccacccgacacccctcgccccgaccccgccccgcccgaaaacccgccgaacccacccgtcgccccaacaacctcgacactaaccaatccccaacctcctacgcgcttcgcgatcgaccattaatcgttattacgaaaaacgaaaatttaaaataaaccccgaaacgaaaaaacgacaaaaaacgtaaccgacgcaacgaaataaaaatacccacctacccaccctcaacatcc

SEQ ID NO: 10801 - DNA, 574 bp, Artificial Sequence
  chemically treated genomic DNA (Homo sapiens) CpG-island No: 10801
  unsure (548, 553, 556, 570)
gcgaggcggggcggggttgggtcggttgttcgtataaagagagttagcgagttagttcgcggattaggtatttcgggtcgttgggggtcgggcggggcggggcgaggtagggaatatttatttagtagtagtacgttttttttcgtagggagtttggagcgcgagcgggtggagatttcgttgaggatgtaggatttaacgggaagtaaggcgtacggtgaggtcggaggtcggagtcgtagcgcgggagggacggattcggtttcggcgcgtcggggatggggttgtcgggaacgtagtggtcgggttcggcgtcgagttttagcgggtacgggatttcgaggcgttcgcgtaaggtcgggggagttagcgggggttgagggagaggtggagtcgttattaaaggttttgttcgttttcgtcgtcgtttgtcgcggcgttatcgttgttcgacgttataaacgttgtttaaggggtcgttagtgtaagtcgaggataatttcggcggagaagaatcgaaggagtcgatgataaattggtgtttagtngggtnttntgtaaagcgagtanatta

SEQ ID NO: 10802 - DNA, 574 bp, Artificial Sequence
  chemically treated genomic DNA (Homo sapiens) CpG-island No: 10802
  unsure (5, 19, 22, 27)
taatntactcgctttacanaanacccnactaaacaccaatttatcatcgactccttcgattcttctccgccgaaattatcctcgacttacactaacgaccccttaaacaacgtttataacgtcgaacaacgataacgccgcgacaaacgacgacgaaaacgaacaaaacctttaataacgactccacctctccctcaacccccgctaactcccccgaccttacgcgaacgcctcgaaatcccgtacccgctaaaactcgacgccgaacccgaccactacgttcccgacaaccccatccccgacgcgccgaaaccgaatccgtccctcccgcgctacgactccgacctccgacctcaccgtacgccttacttcccgttaaatcctacatcctcaacgaaatctccacccgctcgcgctccaaactccctacgaaaaaaaacgtactactactaaataaatattccctacctcgccccgccccgcccgacccccaacgacccgaaatacctaatccgcgaactaactcgctaactctctttatacgaacaaccgacccaaccccgccccgcctcgc

SEQ ID NO: 10803 - DNA, 574 bp, Artificial Sequence
  chemically treated genomic DNA (Homo sapiens) CpG-island No: 10803
  unsure (5, 19, 22, 27)
taatntattcgttttgtanggnatttnattgagtattagtttattatcggttttttcggttttttttcgtcgggattattttcgatttatattggcggttttttgggtaacgtttatagcgtcgggtaacggtggcgtcgcggtaggcgacgacgaggacgggtagaatttttggtaacgattttattttttttttagttttcgttggttttttcggttttgcgcggacgtttcgggatttcgtgttcgttggagttcggcgtcgggttcggttattgcgttttcggtagttttattttcggcgcgtcgaggtcgggttcgtttttttcgcgttgcggtttcggttttcggttttatcgtacgttttgtttttcgttaggttttgtatttttagcgaggtttttattcgttcgcgttttaagttttttgcggggaagaacgtgttattgttgggtaagtgttttttgtttcgtttcgtttcgttcggtttttagcggttcggggtatttggttcgcgggttagttcgttggttttttttgtgcggatagtcggtttagtttcgtttcgtttcgt

SEQ ID NO: 10804 - DNA, 574 bp, Artificial Sequence
  chemically treated genomic DNA (Homo sapiens) CpG-island No: 10804
  unsure (548, 553, 556, 570)
acgaaacgaaacgaaactaaaccgactatccgcacaaaaaaaaccaacgaactaacccgcgaaccaaataccccgaaccgctaaaaaccgaacgaaacgaaacgaaacaaaaaacacttacccaacaataacacgttcttccccgcaaaaaacttaaaacgcgaacgaataaaaacctcgctaaaaatacaaaacctaacgaaaaacaaaacgtacgataaaaccgaaaaccgaaaccgcaacgcgaaaaaaacgaacccgacctcgacgcgccgaaaataaaactaccgaaaacgcaataaccgaacccgacgccgaactccaacgaacacgaaatcccgaaacgtccgcgcaaaaccgaaaaaaccaacgaaaactaaaaaaaaaataaaatcgttaccaaaaattctacccgtcctcgtcgtcgcctaccgcgacgccaccgttacccgacgctataaacgttacccaaaaaaccgccaatataaatcgaaaataatcccgacgaaaaaaaaccgaaaaaaccgataataaactaatactcaatnaaatnccntacaaaacgaatanatta

SEQ ID NO: 10805 - DNA, 733 bp, Artificial Sequence
  chemically treated genomic DNA (Homo sapiens) CpG-island No: 10805
  unsure (525, 626, 665, 668)
gcgcgttatttcgagagttagcggcgaggaagttttttcgttattttttcggagttcggaaaatttaaatacgtatttgcgtatttttagttagatacgtatttttacgcgcgttcggttttcgttttttcgagacgagttcgtaatagtcgtggttagatttacgggtgggtgcgggagtcggatgcgttgcgaggagtcgtcgcgttcggattttttttttattattatatatattttttgattttatttttttttgaagtttgggggacggggagattttttaagtttcgatttgttttgcgtcgcgcgcgtgtcgtttcgttttttcggttttgttttggcggtcgatggtttttcgtttttcgtttgcgcgtagtttttttttcgagttttttgcgttttatttttgtttcgtcgagacgattttttggagttagcgagtcgaggcggcgtgcgtttcgagtggggattacggcggtggcggcggcgtcgggagtcgaggagtttgttagttgtcgcggngtcgcggttatttgttgttttcgttttttttcgttttcgtttttcgttttttttttttttagataacgtcgcgttcggaaatttagatttttttttttttntggttttcgacgagtttttttttttatttgtgggagttncgntttgtttacggagaattgagtgatatatacgggttttttgggagtcgtttcggaaataaagttat

SEQ ID NO: 10806 - DNA, 733 bp, Artificial Sequence
  chemically treated genomic DNA (Homo sapiens) CpG-island No: 10806
  unsure (66, 69, 108, 209)
ataactttatttccgaaacgactcccaaaaaacccgtatatatcactcaattctccgtaaacaaancgnaactcccacaaataaaaaaaaaaactcgtcgaaaaccanaaaaaaaaaaaaatctaaatttccgaacgcgacgttatctaaaaaaaaaaaaaacgaaaaacgaaaacgaaaaaaaacgaaaacaacaaataaccgcgacnccgcgacaactaacaaactcctcgactcccgacgccgccgccaccgccgtaatccccactcgaaacgcacgccgcctcgactcgctaactccaaaaaatcgtctcgacgaaacaaaaataaaacgcaaaaaactcgaaaaaaaaactacgcgcaaacgaaaaacgaaaaaccatcgaccgccaaaacaaaaccgaaaaaacgaaacgacacgcgcgcgacgcaaaacaaatcgaaacttaaaaaatctccccgtcccccaaacttcaaaaaaaaataaaatcaaaaaatatatataataataaaaaaaaaatccgaacgcgacgactcctcgcaacgcatccgactcccgcacccacccgtaaatctaaccacgactattacgaactcgtctcgaaaaaacgaaaaccgaacgcgcgtaaaaatacgtatctaactaaaaatacgcaaatacgtatttaaattttccgaactccgaaaaaataacgaaaaaacttcctcgccgctaactctcgaaataacgcgc

SEQ ID NO: 10807 - DNA, 733 bp, Artificial Sequence
  chemically treated genomic DNA (Homo sapiens) CpG-island No: 10807
  unsure (66, 69, 108, 209)
atggttttgttttcggagcgatttttaagaagttcgtgtgtgttatttagtttttcgtggataagncgnagtttttataggtggggaggggggttcgtcgagggttanaaagaagaaggaatttaagttttcgagcgcgacgttgtttgaaaagaagggaggcgggaggcgggggcgagggaaggcggaggtagtaaatgatcgcgatntcgcggtaattggtaaatttttcggttttcggcgtcgtcgttatcgtcgtggtttttattcgaagcgtacgtcgtttcggttcgttggttttagggagtcgtttcggcgggataggaatagagcgtagggagttcgggaggaaggttgcgcgtaagcgagggacggagagttatcggtcgttaggatagggtcggagggacgaggcgatacgcgcgcgacgtaggataaatcggagtttgggaaattttttcgttttttaagttttagaggggggtaaaattagaaaatgtgtgtgatggtgggagagagattcgggcgcggcgatttttcgtagcgtattcggttttcgtatttattcgtggatttggttacggttgttgcggattcgtttcgggaaagcggaggtcgagcgcgcgtaggggtgcgtgtttggttgggggtgcgtaggtgcgtgtttgaatttttcgggtttcgagggggtggcgggagagttttttcgtcgttgattttcggggtaacgcgt

SEQ ID NO: 10808 - DNA, 733 bp, Artificial Sequence
  chemically treated genomic DNA (Homo sapiens) CpG-island No: 10808
  unsure (525, 626, 665, 668)
acgcgttaccccgaaaatcaacgacgaaaaaactctcccgccaccccctcgaaacccgaaaaattcaaacacgcacctacgcacccccaaccaaacacgcacccctacgcgcgctcgacctccgctttcccgaaacgaatccgcaacaaccgtaaccaaatccacgaataaatacgaaaaccgaatacgctacgaaaaatcgccgcgcccgaatctctctcccaccatcacacacattttctaattttacccccctctaaaacttaaaaaacgaaaaaatttcccaaactccgatttatcctacgtcgcgcgcgtatcgcctcgtccctccgaccctatcctaacgaccgataactctccgtccctcgcttacgcgcaaccttcctcccgaactccctacgctctattcctatcccgccgaaacgactccctaaaaccaacgaaccgaaacgacgtacgcttcgaataaaaaccacgacgataacgacgacgccgaaaaccgaaaaatttaccaattaccgcganatcgcgatcatttactacctccgccttccctcgcccccgcctcccgcctcccttcttttcaaacaacgtcgcgctcgaaaacttaaattccttcttctttntaaccctcgacgaacccccctccccacctataaaaactncgncttatccacgaaaaactaaataacacacacgaacttcttaaaaatcgctccgaaaacaaaaccat

SEQ ID NO: 10809 - DNA, 512 bp, Artificial Sequence
  chemically treated genomic DNA (Homo sapiens) CpG-island No: 10809
  unsure (160, 262, 336, 353..354, 388)
ttttcgcgcgcgtttattttcgttcgcgcgcgtatttcgcgtatatatttattcgcgtatatacgcgcgtatatacgtattttcgggcgagggtcgggtcgtcgcgagtatagcgtgtaatcgttatataataaataataatagattttttcgtttcggnattagttttcggagtttagttagcgtcggtggcggcggcggcggcggtagaggcgcgggtagtattcggttcggggcgtatttcggttcgattttttatttnttcggagggtttttttttcgcgttacgtatttcgttggggtattttagggttttcgagcgggacgggttttttnttgcgttcgttcggggnnnttgggttttttttttttttttttttttttcganattcgaaaaaaaaataataggtcgcgaagagttaatcggtgcgggggggagtgtatttttgtggtgggtttttacgaaattttttgtggaaataacggttttagaaaaaaaatgtatggtatag

SEQ ID NO: 10810 - DNA, 512 bp, Artificial Sequence
  chemically treated genomic DNA (Homo sapiens) CpG-island No: 10810
  unsure (125, 158..159, 177, 251, 353)
ctataccatacattttttttctaaaaccgttatttccacaaaaaatttcgtaaaaacccaccacaaaaatacactcccccccgcaccgattaactcttcgcgacctattatttttttttcgaatntcgaaaaaaaaaaaaaaaaaaaaaaaacccaannnccccgaacgaacgcaanaaaaaacccgtcccgctcgaaaaccctaaaataccccaacgaaatacgtaacgcgaaaaaaaaaccctccgaanaaataaaaaatcgaaccgaaatacgccccgaaccgaatactacccgcgcctctaccgccgccgccgccgccaccgacgctaactaaactccgaaaactaatnccgaaacgaaaaaatctattattatttattatataacgattacacgctatactcgcgacgacccgaccctcgcccgaaaatacgtatatacgcgcgtatatacgcgaataaatatatacgcgaaatacgcgcgcgaacgaaaataaacgcgcgcgaaaa

SEQ ID NO: 10811 - DNA, 512 bp, Artificial Sequence
  chemically treated genomic DNA (Homo sapiens) CpG-island No: 10811
  unsure (125, 158..159, 177, 251, 353)
ttgtgttatgtattttttttttgaagtcgttgtttttataggggatttcgtaaggatttattataaaaatatattttttttcgtatcggttggtttttcgcggtttattatttttttttcggatntcgggggaagggagagagaagggggggtttagnnntttcgggcgaacgtaangagggattcgtttcgttcgggggttttgaagtgttttagcggggtgcgtaacgcggagaggggatttttcgggnaggtaaagggtcgggtcggggtgcgtttcgggtcgggtgttgttcgcgtttttgtcgtcgtcgtcgtcgttatcggcgttggttgggtttcggaagttagtntcggagcggaggaatttattgttatttattgtgtggcggttgtacgttgtattcgcggcggttcggttttcgttcgggagtgcgtgtgtgcgcgcgtgtgtgcgcgagtaagtgtgtgcgcggggtgcgcgcgcgggcgggagtgggcgcgcgcgggga

SEQ ID NO: 10812 - DNA, 512 bp, Artificial Sequence
  chemically treated genomic DNA (Homo sapiens) CpG-island No: 10812
  unsure (160, 262, 336, 353..354, 388)
tccccgcgcgcgcccactcccgcccgcgcgcgcaccccgcgcacacacttactcgcgcacacacgcgcgcacacacgcactcccgaacgaaaaccgaaccgccgcgaatacaacgtacaaccgccacacaataaataacaataaattcctccgctccganactaacttccgaaacccaaccaacgccgataacgacgacgacgacgacaaaaacgcgaacaacacccgacccgaaacgcaccccgacccgaccctttacctncccgaaaaatcccctctccgcgttacgcaccccgctaaaacacttcaaaacccccgaacgaaacgaatccctcnttacgttcgcccgaaannnctaaacccccccttctctctcccttcccccganatccgaaaaaaaaataataaaccgcgaaaaaccaaccgatacgaaaaaaaatatatttttataataaatccttacgaaatcccctataaaaacaacgacttcaaaaaaaaaatacataacacaa

SEQ ID NO: 10813 - DNA, 522 bp, Artificial Sequence
  chemically treated genomic DNA (Homo sapiens) CpG-island No: 10813
tttttcgttttttttcggtatcggagtaggaggattacggggtttcgttttacgtatttttttgttttttaacgggcgtttttatgtttcgtttcgggaatcgttttttaagtcgaggatttggtttggggtttgcgttagggagatagtgggtgaggggggcgggggggaggagggaggaggtagggagagcgatttcgtttcgtagttagcgtgagtttatttttgggttgaggtttgaagtggtaggagtggaaagttgatcgtttagtttcggttagtggtcggatcgtatatgtaatttagacggtgtaaaatattgttcggagtaaattaatcgggggttacgtttgcgggtagtatttttttatttgaggaaggttttagtatttcgcgttttgggttttcgcggaggttggttataggtcgggaaattagttcgagggagatgcggatttaatatttatatttaggttaagacggagttttcgatttaagaagtgtttttttaaggttgttttt

SEQ ID NO: 10814 - DNA, 522 bp, Artificial Sequence
  chemically treated genomic DNA (Homo sapiens) CpG-island No: 10814
aaaaacaaccttaaaaaaacacttcttaaatcgaaaactccgtcttaacctaaatataaatattaaatccgcatctccctcgaactaatttcccgacctataaccaacctccgcgaaaacccaaaacgcgaaatactaaaaccttcctcaaataaaaaaatactacccgcaaacgtaacccccgattaatttactccgaacaatattttacaccgtctaaattacatatacgatccgaccactaaccgaaactaaacgatcaactttccactcctaccacttcaaacctcaacccaaaaataaactcacgctaactacgaaacgaaatcgctctccctacctcctccctcctcccccccgcccccctcacccactatctccctaacgcaaaccccaaaccaaatcctcgacttaaaaaacgattcccgaaacgaaacataaaaacgcccgttaaaaaacaaaaaaatacgtaaaacgaaaccccgtaatcctcctactccgataccgaaaaaaaacgaaaaa

SEQ ID NO: 10815 - DNA, 522 bp, Artificial Sequence
  chemically treated genomic DNA (Homo sapiens) CpG-island No: 10815
ggagatagttttaaggaggtattttttaaatcgagggtttcgttttaatttagatgtggatgttaagttcgtatttttttcgggttgatttttcgatttgtagttagttttcgcgagagtttagggcgcgaggtgttgggattttttttaggtggagagatgttgttcgtagacgtgattttcggttggtttgtttcgggtaatattttgtatcgtttaaattatatgtgcgattcggttattggtcggagttgggcgattagttttttatttttgttattttagattttagtttagggatgagtttacgttaattgcgaaacgaaatcgttttttttgtttttttttttttttttttcgttttttttatttattatttttttgacgtagattttaagttaaattttcggtttggaggacgattttcggagcgaggtatgaaggcgttcgttgggaggtagaggggtgcgtgaagcggggtttcgtggtttttttgtttcggtgtcggagggagacggagaa

SEQ ID NO: 10816 - DNA, 522 bp, Artificial Sequence
  chemically treated genomic DNA (Homo sapiens) CpG-island No: 10816
ttctccgtctccctccgacaccgaaacaaaaaaaccacgaaaccccgcttcacgcacccctctacctcccaacgaacgccttcatacctcgctccgaaaatcgtcctccaaaccgaaaatttaacttaaaatctacgtcaaaaaaataataaataaaaaaaacgaaaaaaaaaaaaaaaaaaacaaaaaaaacgatttcgtttcgcaattaacgtaaactcatccctaaactaaaatctaaaataacaaaaataaaaaactaatcgcccaactccgaccaataaccgaatcgcacatataatttaaacgatacaaaatattacccgaaacaaaccaaccgaaaatcacgtctacgaacaacatctctccacctaaaaaaaatcccaacacctcgcgccctaaactctcgcgaaaactaactacaaatcgaaaaatcaacccgaaaaaaatacgaacttaacatccacatctaaattaaaacgaaaccctcgatttaaaaaatacctccttaaaactatctcc

SEQ ID NO: 10817 - DNA, 575 bp, Artificial Sequence
  chemically treated genomic DNA (Homo sapiens) CpG-island No: 10817
cgaaaatcggcggttcgtcgttggtgtagcgtacgtcggaggtgtttttttggatgagcgtttggacgaaagtaagcgattgttcgagcgcgtaagtgtttttggaataagtgtttaggattcgcgcgtttagcgttacgttgggtagtaggttgggattattgttgatttggtttagggcgtagagtatcgtttttagtttgtggatttcgtttttttttttgatgtcgtcgtagggtatttcgttgggatttttggcgtgtacggggaatagtttttcgagggtgacgtttttttcgattcggattgagtgcggggcgtatattttttggtcgcgcgtcgtcgtcgttagcgcgtataggagtatttttagtacgtagtaggggaattttattaaagttaggacgcggagtagtttttttagttggattatgttgtttcggttgttgcggtggcggcggcggcgttggagggaacggtggtgggttcgtcgaggttcgggttttttagggcgagttttttcgggaaagtttaggggtttttgtaggtacggagggtgggggaattcggggagg

SEQ ID NO: 10818 - DNA, 575 bp, Artificial Sequence
  chemically treated genomic DNA (Homo sapiens) CpG-island No: 10818
cctccccgaattcccccaccctccgtacctacaaaaacccctaaactttcccgaaaaaactcgccctaaaaaacccgaacctcgacgaacccaccaccgttccctccaacgccgccgccgccaccgcaacaaccgaaacaacataatccaactaaaaaaactactccgcgtcctaactttaataaaattcccctactacgtactaaaaatactcctatacgcgctaacgacgacgacgcgcgaccaaaaaatatacgccccgcactcaatccgaatcgaaaaaaacgtcaccctcgaaaaactattccccgtacacgccaaaaatcccaacgaaataccctacgacgacatcaaaaaaaaaaacgaaatccacaaactaaaaacgatactctacgccctaaaccaaatcaacaataatcccaacctactacccaacgtaacgctaaacgcgcgaatcctaaacacttattccaaaaacacttacgcgctcgaacaatcgcttactttcgtccaaacgctcatccaaaaaaacacctccgacgtacgctacaccaacgacgaaccgccgattttcg

SEQ ID NO: 10819 - DNA, 575 bp, Artificial Sequence
  chemically treated genomic DNA (Homo sapiens) CpG-island No: 10819
ttttttcggatttttttatttttcgtgtttgtaggagtttttgggttttttcggaggagttcgttttgaagggttcggatttcggcgagtttattatcgttttttttagcgtcgtcgtcgttatcgtagtagtcggagtagtatggtttagttgaggaagttgtttcgcgttttgattttgatgaagtttttttgttgcgtgttggaggtgtttttgtgcgcgttggcggcggcggcgcgcggttaggagatgtacgtttcgtatttaattcggatcgagggggacgttattttcggggggttgtttttcgtgtacgttaagggttttagcggagtgttttgcggcgatattaagagggaaaacgggatttataggttggaagcgatgttttacgttttggattagattaatagtgattttaatttattgtttaacgtgacgttgggcgcgcggattttggatatttgttttagggatatttacgcgttcgaatagtcgtttattttcgtttaggcgtttatttagaaggatattttcgacgtgcgttgtattaacggcgaatcgtcggttttcg

SEQ ID NO: 10820 - DNA, 575 bp, Artificial Sequence
  chemically treated genomic DNA (Homo sapiens) CpG-island No: 10820
cgaaaaccgacgattcgccgttaatacaacgcacgtcgaaaatatccttctaaataaacgcctaaacgaaaataaacgactattcgaacgcgtaaatatccctaaaacaaatatccaaaatccgcgcgcccaacgtcacgttaaacaataaattaaaatcactattaatctaatccaaaacgtaaaacatcgcttccaacctataaatcccgttttccctcttaatatcgccgcaaaacactccgctaaaacccttaacgtacacgaaaaacaaccccccgaaaataacgtccccctcgatccgaattaaatacgaaacgtacatctcctaaccgcgcgccgccgccgccaacgcgcacaaaaacacctccaacacgcaacaaaaaaacttcatcaaaatcaaaacgcgaaacaacttcctcaactaaaccatactactccgactactacgataacgacgacgacgctaaaaaaaacgataataaactcgccgaaatccgaacccttcaaaacgaactcctccgaaaaaacccaaaaactcctacaaacacgaaaaataaaaaaatccgaaaaaa

SEQ ID NO: 10821 - DNA, 815 bp, Artificial Sequence
  chemically treated genomic DNA (Homo sapiens) CpG-island No: 10821
gattagtatcgattttatcgttttcggcgaggtatttttagttttcgggaatgagaaatgtgttcgttatagtaggggtttataggaatgaagggcgtcggcgttgcgtaggtttaatagtttttcgcgttttcgttttcggtttcggtttagttcggttttttttttttcgttttggtagagtggcgttattagggggcgaaaaattcgacgagtatgaggttcgtagatttcgtgtaggagatgcgattttcgaagttgtcgttcgtgagttcggaggtagcggcgaggcgggtcgcggtaagaagtagcgttatattcgggaatagcgttaggcggcggaggcgtatggcggcgaggtggggtggggacggtcggaagggtcgcggttcggttgggattgcggaggtcgggcgcgcgattataaatcggttgtttgcgttggcgcgtttggtttaggggatttgtagtcggaggttttaatttttaaattcggttcgggtcgttgtgtggtagtcgttgattggttgcgcgtcgttttcgttcggcgggcgggattagttggttatcgttgagtggtcggagagcggggcggggcggggtttaagcggcgagtggttgggcgagcgttgtttcgtatggttttgggttgtgggtaggggttagggtcgggtttcggggtgagtcgaaatttgggggtcgagcggggcggggaatggggcgtagtgaggttgggagtcggttttgagttcgttttgtataggggtagttaggttcggggtatttgagttggaggcggaagcgtgaaataagga

SEQ ID NO: 10822 - DNA, 815 bp, Artificial Sequence
  chemically treated genomic DNA (Homo sapiens) CpG-island No: 10822
tccttatttcacgcttccgcctccaactcaaataccccgaacctaactacccctatacaaaacgaactcaaaaccgactcccaacctcactacgccccattccccgccccgctcgacccccaaatttcgactcaccccgaaacccgaccctaacccctacccacaacccaaaaccatacgaaacaacgctcgcccaaccactcgccgcttaaaccccgccccgccccgctctccgaccactcaacgataaccaactaatcccgcccgccgaacgaaaacgacgcgcaaccaatcaacgactaccacacaacgacccgaaccgaatttaaaaattaaaacctccgactacaaatcccctaaaccaaacgcgccaacgcaaacaaccgatttataatcgcgcgcccgacctccgcaatcccaaccgaaccgcgacccttccgaccgtccccaccccacctcgccgccatacgcctccgccgcctaacgctattcccgaatataacgctacttcttaccgcgacccgcctcgccgctacctccgaactcacgaacgacaacttcgaaaatcgcatctcctacacgaaatctacgaacctcatactcgtcgaatttttcgccccctaataacgccactctaccaaaacgaaaaaaaaaaaaccgaactaaaccgaaaccgaaaacgaaaacgcgaaaaactattaaacctacgcaacgccgacgcccttcattcctataaacccctactataacgaacacatttctcattcccgaaaactaaaaatacctcgccgaaaacgataaaatcgatactaatc

SEQ ID NO: 10823 - DNA, 815 bp, Artificial Sequence
  chemically treated genomic DNA (Homo sapiens) CpG-island No: 10823
tttttattttacgttttcgtttttagtttaggtgtttcgagtttggttatttttatgtaagacgagtttagggtcggtttttagttttattgcgttttatttttcgtttcgttcgatttttaggtttcggtttatttcgggattcggttttagtttttatttatagtttaggattatgcggagtaacgttcgtttagttattcgtcgtttaggtttcgtttcgtttcgtttttcggttatttagcggtaattagttggtttcgttcgtcggacgaaggcgacgcgtagttaattagcggttgttatatagcggttcgagtcgggtttgggggttgggattttcggttgtaggttttttgggttagacgcgttagcgtaggtagtcggtttgtggtcgcgcgttcgattttcgtagttttagtcgagtcgcgattttttcggtcgtttttattttatttcgtcgttatgcgttttcgtcgtttagcgttgttttcgggtgtggcgttgttttttgtcgcggttcgtttcgtcgttgttttcgaatttacggacgataatttcgagagtcgtattttttatacgggatttgcgggttttatgttcgtcgggtttttcgttttttgatgacgttattttgttaaggcgggggaagaagggtcgggttgggtcggggtcgggggcgagggcgcggggaattgttgggtttacgtagcgtcggcgttttttatttttgtgggtttttgttgtggcgggtatattttttattttcgggagttggaggtgtttcgtcgagagcggtggagtcggtgttgatt

SEQ ID NO: 10824 - DNA, 815 bp, Artificial Sequence
  chemically treated genomic DNA (Homo sapiens) CpG-island No: 10824
aatcaacaccgactccaccgctctcgacgaaacacctccaactcccgaaaataaaaaatatacccgccacaacaaaaacccacaaaaataaaaaacgccgacgctacgtaaacccaacaattccccgcgccctcgcccccgaccccgacccaacccgacccttcttcccccgccttaacaaaataacgtcatcaaaaaacgaaaaacccgacgaacataaaacccgcaaatcccgtataaaaaatacgactctcgaaattatcgtccgtaaattcgaaaacaacgacgaaacgaaccgcgacaaaaaacaacgccacacccgaaaacaacgctaaacgacgaaaacgcataacgacgaaataaaataaaaacgaccgaaaaaatcgcgactcgactaaaactacgaaaatcgaacgcgcgaccacaaaccgactacctacgctaacgcgtctaacccaaaaaacctacaaccgaaaatcccaacccccaaacccgactcgaaccgctatataacaaccgctaattaactacgcgtcgccttcgtccgacgaacgaaaccaactaattaccgctaaataaccgaaaaacgaaacgaaacgaaacctaaacgacgaataactaaacgaacgttactccgcataatcctaaactataaataaaaactaaaaccgaatcccgaaataaaccgaaacctaaaaatcgaacgaaacgaaaaataaaacgcaataaaactaaaaaccgaccctaaactcgtcttacataaaaataaccaaactcgaaacacctaaactaaaaacgaaaacgtaaaataaaaa

SEQ ID NO: 10825 - DNA, 690 bp, Artificial Sequence
  chemically treated genomic DNA (Homo sapiens) CpG-island No: 10825
tatcgttaggtatagtttaggttttagtattaggttggagatatcgatatagcgttcgtgttttatttatttttcgtttttcgttatcggacgagaataggttaatttcgtatttatcgttttgtaaagttgttttgttagcgtaatgttttttttgttgttaatatcgcgatcgacgttgattattagacgggttttgtcgagatcgacgttgttgttttggcgcgtttgggttgtcgtgcgggtaatcgttatagtcggagtttgttattttacggtgtgcgtttcgttagtgcgtgacgcgtttggttgagtcgtatcgaacgtgtcgttgttgatggttagtatcgtatacggcgtggtaatgcgtttttcgttaatcgttagattatcgtaaattatgtgttttattgtcgttttatcgttttgtacgttgacggtgttggtatcgttagatatcgtcgttttaaggcgataatttagttttgtcgttagtaatttgtcgcgacgggtgtttggtagtagtattaggtcgtttgcgtcgtgttggcgaatagtgttagttatgatatcggcgtattttcgattattcgatcgttcggtttgtcgtttaatttttagatatgattagcgtcgagttggattgtttgtgcgtcgtcggtattattgaggataaaggtgttgatttga

SEQ ID NO: 10826 - DNA, 690 bp, Artificial Sequence
  chemically treated genomic DNA (Homo sapiens) CpG-island No: 10826
tcaaatcaacacctttatcctcaataataccgacgacgcacaaacaatccaactcgacgctaatcatatctaaaaattaaacgacaaaccgaacgatcgaataatcgaaaatacgccgatatcataactaacactattcgccaacacgacgcaaacgacctaatactactaccaaacacccgtcgcgacaaattactaacgacaaaactaaattatcgccttaaaacgacgatatctaacgataccaacaccgtcaacgtacaaaacgataaaacgacaataaaacacataatttacgataatctaacgattaacgaaaaacgcattaccacgccgtatacgatactaaccatcaacaacgacacgttcgatacgactcaaccaaacgcgtcacgcactaacgaaacgcacaccgtaaaataacaaactccgactataacgattacccgcacgacaacccaaacgcgccaaaacaacaacgtcgatctcgacaaaacccgtctaataatcaacgtcgatcgcgatattaacaacaaaaaaaacattacgctaacaaaacaactttacaaaacgataaatacgaaattaacctattctcgtccgataacgaaaaacgaaaaataaataaaacacgaacgctatatcgatatctccaacctaatactaaaacctaaactatacctaacgata

SEQ ID NO: 10827 - DNA, 690 bp, Artificial Sequence
  chemically treated genomic DNA (Homo sapiens) CpG-island No: 10827
ttaaattaatatttttgtttttaatgatgtcgacggcgtataggtaatttagttcggcgttaattatgtttggaaattaaacggtaaatcggacgatcggatgatcgaagatacgtcggtgttatggttgatattattcgttagtacggcgtagacggtttggtgttgttgttaaatattcgtcgcggtaaattattggcggtaaaattgggttatcgttttaaagcggcggtgtttaacgatgttagtatcgttagcgtataggacggtaaagcgatagtgaaatatatggtttacggtggtttggcgattggcgaagaacgtattgttacgtcgtatgcggtattgattattagtagcggtacgttcgatgcggtttagttagacgcgttacgtattggcgaaacgtatatcgtggagtggtaggtttcggttgtggcgattattcgtacggtaatttaggcgcgttagagtaatagcgtcgatttcgataaagttcgtttggtggttagcgtcggtcgcggtattggtagtaaagagaatattgcgttggtagaatagttttgtaaggcgataggtgcggagttggtttgttttcgttcggtggcggaaaacgaaaaatggatggagtacgaacgttatgtcggtatttttaatttgatgttgaaatttgaattgtatttggcggtg

SEQ ID NO: 10828 - DNA, 690 bp, Artificial Sequence
  chemically treated genomic DNA (Homo sapiens) CpG-island No: 10828
caccgccaaatacaattcaaatttcaacatcaaattaaaaataccgacataacgttcgtactccatccatttttcgttttccgccaccgaacgaaaacaaaccaactccgcacctatcgccttacaaaactattctaccaacgcaatattctctttactaccaataccgcgaccgacgctaaccaccaaacgaactttatcgaaatcgacgctattactctaacgcgcctaaattaccgtacgaataatcgccacaaccgaaacctaccactccacgatatacgtttcgccaatacgtaacgcgtctaactaaaccgcatcgaacgtaccgctactaataatcaataccgcatacgacgtaacaatacgttcttcgccaatcgccaaaccaccgtaaaccatatatttcactatcgctttaccgtcctatacgctaacgatactaacatcgttaaacaccgccgctttaaaacgataacccaattttaccgccaataatttaccgcgacgaatatttaacaacaacaccaaaccgtctacgccgtactaacgaataatatcaaccataacaccgacgtatcttcgatcatccgatcgtccgatttaccgtttaatttccaaacataattaacgccgaactaaattacctatacgccgtcgacatcattaaaaacaaaaatattaatttaa

SEQ ID NO: 10829 - DNA, 1705 bp, Artificial Sequence
  chemically treated genomic DNA (Homo sapiens) CpG-island No: 10829
gtcgtcgtcgtcgtcggagtgtaggttgttgttttcgtttagtatcgtgttttcgtcgttttggaagtttacgttgggttcgtcgatttcgatttcggtagtatttgataggttgtttttagtcgacgaggaggtagttgggtttacgaagtttacgcggaagcggtttttggttttttcgttgtttttagtcggttcgttttcgtcgttggttttttcgttcgcgggggtttgtttggttttcgttttagtattagtcgtcgtcgttgtcgtcgtcgtcgtcgtcgtcgtagtagcggttcgttcggcgttttcggaaattaggtttatttggaaacggttttggttcggggtgggttttaagggtttgtttagttcgttttcggtcgtcgcggggtttttatcgcggatttcgtcgtcgtttcggttcgcgggcgtagtatttttcggtatcgagggtatagtcgtgtcgggtagttttattttggttgcggttagcgtagcggttgacggcgttttttcgatttcggttagtttcggggcgtcggaggagggcgtcgtgggtcgcggttttatagttgttcgattttcggcggaattgtagagttcggcggacgttttcggtagtacgttttttatatttttggtcggcggtggttatagtcgtaagattaggtgagagagttttttttttcgtcgtttgcgggtcgtcgttagtttggacggttatagaggttatcggtagtcgagcgagcgcgcgagtgtggcgggcgcggggcgggtttcgttgtttaaagtttcggcggggttgcggcggcggcggtttcggtagtagtacgcgggaggcggggtcggaggttttttcgttttttagttcgtttattcgcggtttcgtagcggcgcgcggttgacgtttttttagcgattcggtttttcgcggtttttgcgcgattttacgtaaaagcgtttcgtgcgaagagcgcggttagttagttcgtaaagggtttcgggtagtgcgggtagtacgaacggcgcgatcggggagtaggcgcggttacgtttcgttttagtgatgtcgtcgggaggattttcgcgcggttattttttttttcgtcgttttttttttacgtttttatttttttttttcgtcgcgttttgcggcgaaaaggagcgggtttttaggttattttttttttttttatttaggggtcgcgcgttagtggatttgtagtttaggtaacggggttgcggacggcgcgcgtgttttgtttcgttttacgtcggtagttgatgttttcgcggtagttgttattttagcgttttagttacggttttagaggttttcgtacgttggtttttttttttttttttcgttttggtgaattcgtagtatttgggttgagttcgaaatttcgcgagatgttgtaggcgttagtgcggttttttattaggcgcgtggtattcgaggtcgggtcggagtcgtaggttagtcgcgattttttcgggcgatgttgggggtttttcggtcggggtcgtagtcgttttcggagtcgcgggcgaggtgcgttttttagtttggtttgttttgggttttgattcgtcgtcgcgaattttcgttcgtaatttcgggtttgaatttggaggagggaggattttttttgtgtagttttcgagcggtagatttattttgttaggtagatttaga

SEQ ID NO: 10830 - DNA, 1705 bp, Artificial Sequence
  chemically treated genomic DNA (Homo sapiens) CpG-island No: 10830
tctaaatctacctaacaaaataaatctaccgctcgaaaactacacaaaaaaaatcctccctcctccaaattcaaacccgaaattacgaacgaaaattcgcgacgacgaatcaaaacccaaaacaaaccaaactaaaaaacgcacctcgcccgcgactccgaaaacgactacgaccccgaccgaaaaacccccaacatcgcccgaaaaaatcgcgactaacctacgactccgacccgacctcgaataccacgcgcctaataaaaaaccgcactaacgcctacaacatctcgcgaaatttcgaactcaacccaaatactacgaattcaccaaaacgaaaaaaaaaaaaaaaaaccaacgtacgaaaacctctaaaaccgtaactaaaacgctaaaataacaactaccgcgaaaacatcaactaccgacgtaaaacgaaacaaaacacgcgcgccgtccgcaaccccgttacctaaactacaaatccactaacgcgcgacccctaaataaaaaaaaaaaaaataacctaaaaacccgctccttttcgccgcaaaacgcgacgaaaaaaaaaaataaaaacgtaaaaaaaaaacgacgaaaaaaaaaataaccgcgcgaaaatcctcccgacgacatcactaaaacgaaacgtaaccgcgcctactccccgatcgcgccgttcgtactacccgcactacccgaaaccctttacgaactaactaaccgcgctcttcgcacgaaacgcttttacgtaaaatcgcgcaaaaaccgcgaaaaaccgaatcgctaaaaaaacgtcaaccgcgcgccgctacgaaaccgcgaataaacgaactaaaaaacgaaaaaacctccgaccccgcctcccgcgtactactaccgaaaccgccgccgccgcaaccccgccgaaactttaaacaacgaaacccgccccgcgcccgccacactcgcgcgctcgctcgactaccgataacctctataaccgtccaaactaacgacgacccgcaaacgacgaaaaaaaaaactctctcacctaatcttacgactataaccaccgccgaccaaaaatataaaaaacgtactaccgaaaacgtccgccgaactctacaattccgccgaaaatcgaacaactataaaaccgcgacccacgacgccctcctccgacgccccgaaactaaccgaaatcgaaaaaacgccgtcaaccgctacgctaaccgcaaccaaaataaaactacccgacacgactataccctcgataccgaaaaatactacgcccgcgaaccgaaacgacgacgaaatccgcgataaaaaccccgcgacgaccgaaaacgaactaaacaaacccttaaaacccaccccgaaccaaaaccgtttccaaataaacctaatttccgaaaacgccgaacgaaccgctactacgacgacgacgacgacgacgacaacgacgacgactaatactaaaacgaaaaccaaacaaacccccgcgaacgaaaaaaccaacgacgaaaacgaaccgactaaaaacaacgaaaaaaccaaaaaccgcttccgcgtaaacttcgtaaacccaactacctcctcgtcgactaaaaacaacctatcaaatactaccgaaatcgaaatcgacgaacccaacgtaaacttccaaaacgacgaaaacacgatactaaacgaaaacaacaacctacactccgacgacgacgacgac

SEQ ID NO: 10831 - DNA, 1705 bp, Artificial Sequence
  chemically treated genomic DNA (Homo sapiens) CpG-island No: 10831
tttaggtttgtttggtagggtgagtttatcgttcgaaagttgtatagaggaaatttttttttttttaggtttaggttcggagttacgagcggagattcgcggcggcgggttagagtttagagtaaattaggttggggaacgtatttcgttcgcggtttcggaagcggttgcggtttcgatcggaaagtttttagtatcgttcgaaggaatcgcggttggtttgcggtttcggttcggtttcgggtattacgcgtttagtgggaagtcgtattgacgtttgtagtatttcgcgagatttcgggtttagtttaagtattgcgagtttattaaagcggggggaaaaaaaaaaagttagcgtgcgagagtttttgaagtcgtggttggggcgttggggtggtagttgtcgcgggagtattagttatcggcgtgaggcgaggtagggtacgcgcgtcgttcgtagtttcgttgtttgggttgtaggtttattgacgcgcggtttttgggtggagagaggggaggtggtttgggagttcgttttttttcgtcgtagagcgcggcgggggagggaggtgaaggcgtgggaggaaggcggcggaagaggaggtagtcgcgcggagattttttcggcgatattattgaggcggagcgtagtcgcgtttgtttttcgatcgcgtcgttcgtgttgttcgtattgttcgaggttttttgcggattggttggtcgcgtttttcgtacggggcgtttttgcgtggggtcgcgtaggagtcgcggagggtcggatcgttgagggagcgttagtcgcgcgtcgttgcgggatcgcgggtgggcgggttgaggggcggaggagttttcggtttcgtttttcgcgtgttgttgtcggagtcgtcgtcgtcgtagtttcgtcgaggttttaaatagcggggttcgtttcgcgttcgttatattcgcgcgttcgttcggttgtcggtggtttttgtggtcgtttaggttagcggcggttcgtaggcggcggggagaaagatttttttatttggttttgcggttgtggttatcgtcggttaggggtgtggagggcgtgttgtcggagacgttcgtcgggttttgtagtttcgtcgggggtcgggtagttatggagtcgcggtttacggcgttttttttcggcgtttcgggattggtcggggtcggggagacgtcgttagtcgttgcgttggtcgtagttagggtggaattgttcggtacggttgtgttttcggtgtcggaggatgttgcgttcgcgagtcgggacggcggcggggttcgcgatgagggtttcgcggcggtcggggacgggttgggtagatttttggggtttatttcgagttagagtcgtttttaggtggatttggttttcgagaacgtcgggcgggtcgttgttgcggcggcggcggcggcggcggtagcggcggcggttggtgttggggcgggggttaagtagattttcgcggacggggaagttagcggcgagagcgagtcggttaaaggtagcgaggaagttaagggtcgttttcgcgtgaatttcgtggatttagttgttttttcgtcggttgaagatagtttgttagatgttgtcggggtcggagtcgacgggtttaacgtgagtttttagaacggcggggatacggtgttgagcgagggtagtagtttgtatttcggcggcggcggcggt

SEQ ID NO: 10832 - DNA, 1705 bp, Artificial Sequence
  chemically treated genomic DNA (Homo sapiens) CpG-island No: 10832
accgccgccgccgccgaaatacaaactactaccctcgctcaacaccgtatccccgccgttctaaaaactcacgttaaacccgtcgactccgaccccgacaacatctaacaaactatcttcaaccgacgaaaaaacaactaaatccacgaaattcacgcgaaaacgacccttaacttcctcgctacctttaaccgactcgctctcgccgctaacttccccgtccgcgaaaatctacttaacccccgccccaacaccaaccgccgccgctaccgccgccgccgccgccgccgcaacaacgacccgcccgacgttctcgaaaaccaaatccacctaaaaacgactctaactcgaaataaaccccaaaaatctacccaacccgtccccgaccgccgcgaaaccctcatcgcgaaccccgccgccgtcccgactcgcgaacgcaacatcctccgacaccgaaaacacaaccgtaccgaacaattccaccctaactacgaccaacgcaacgactaacgacgtctccccgaccccgaccaatcccgaaacgccgaaaaaaaacgccgtaaaccgcgactccataactacccgacccccgacgaaactacaaaacccgacgaacgtctccgacaacacgccctccacacccctaaccgacgataaccacaaccgcaaaaccaaataaaaaaatctttctccccgccgcctacgaaccgccgctaacctaaacgaccacaaaaaccaccgacaaccgaacgaacgcgcgaatataacgaacgcgaaacgaaccccgctatttaaaacctcgacgaaactacgacgacgacgactccgacaacaacacgcgaaaaacgaaaccgaaaactcctccgcccctcaacccgcccacccgcgatcccgcaacgacgcgcgactaacgctccctcaacgatccgaccctccgcgactcctacgcgaccccacgcaaaaacgccccgtacgaaaaacgcgaccaaccaatccgcaaaaaacctcgaacaatacgaacaacacgaacgacgcgatcgaaaaacaaacgcgactacgctccgcctcaataatatcgccgaaaaaatctccgcgcgactacctcctcttccgccgccttcctcccacgccttcacctccctcccccgccgcgctctacgacgaaaaaaaacgaactcccaaaccacctcccctctctccacccaaaaaccgcgcgtcaataaacctacaacccaaacaacgaaactacgaacgacgcgcgtaccctacctcgcctcacgccgataactaatactcccgcgacaactaccaccccaacgccccaaccacgacttcaaaaactctcgcacgctaactttttttttttccccccgctttaataaactcgcaatacttaaactaaacccgaaatctcgcgaaatactacaaacgtcaatacgacttcccactaaacgcgtaatacccgaaaccgaaccgaaaccgcaaaccaaccgcgattccttcgaacgatactaaaaactttccgatcgaaaccgcaaccgcttccgaaaccgcgaacgaaatacgttccccaacctaatttactctaaactctaacccgccgccgcgaatctccgctcgtaactccgaacctaaacctaaaaaaaaaaaaatttcctctatacaactttcgaacgataaactcaccctaccaaacaaacctaaa

SEQ ID NO: 10833 - DNA, 609 bp, Artificial Sequence
  chemically treated genomic DNA (Homo sapiens) CpG-island No: 10833
cggggatggggagtaagtttagttagtcgttgttttcgggtgtcgcgtgcgtagttgtacgttatttttagacgaatcgatgattggatggatggtcgtcgtagtcgttatattgatgatacggatgtgttttttcgtatatattatgttatcggagagttgttaacgtatggttatcgtcgggtatgggcgttgtttcgtagataggtagaatttgatggtatgtttgcgattaatgttaaacgtgtttatcggattatgcgttagaatgcgttgttgtttgagcgaaaatttgttgtatcgttatcgaaacgggtatatataggtaaagtgggcgtgaaagaaagtaattaacgatggtgttttgacggggtcgagttttgtttggataacggagagagattgcgtgtaacgttcgcgtttgattgttgtgatcgtgaaggattggattgggcgggttattatcggcgggtttaatagtggaataatattaggtcgttatgttgggaagcgggggaattttcgttttggtaataaatttttcggcgttttttaatggaggtggttgatcgataaaggggttattgttattcgggttaatgataataa

SEQ ID NO: 10834 - DNA, 609 bp, Artificial Sequence
  chemically treated genomic DNA (Homo sapiens) CpG-island No: 10834
ttattatcattaacccgaataacaataacccctttatcgatcaaccacctccattaaaaaacgccgaaaaatttattaccaaaacgaaaattcccccgcttcccaacataacgacctaatattattccactattaaacccgccgataataacccgcccaatccaatccttcacgatcacaacaatcaaacgcgaacgttacacgcaatctctctccgttatccaaacaaaactcgaccccgtcaaaacaccatcgttaattactttctttcacgcccactttacctatatatacccgtttcgataacgatacaacaaattttcgctcaaacaacaacgcattctaacgcataatccgataaacacgtttaacattaatcgcaaacataccatcaaattctacctatctacgaaacaacgcccatacccgacgataaccatacgttaacaactctccgataacataatatatacgaaaaaacacatccgtatcatcaatataacgactacgacgaccatccatccaatcatcgattcgtctaaaaataacgtacaactacgcacgcgacacccgaaaacaacgactaactaaacttactccccatccccg

SEQ ID NO: 10835 - DNA, 609 bp, Artificial Sequence
  chemically treated genomic DNA (Homo sapiens) CpG-island No: 10835
ttgttattattagttcgggtagtaataatttttttatcggttagttatttttattgaagaacgtcgaaaaatttgttgttaaaacgggggttttttcgttttttagtatgacggtttggtattgttttattgttaaattcgtcggtagtggttcgtttagtttagttttttacgattataatagttaagcgcgaacgttatacgtagttttttttcgttatttaagtagaattcgatttcgttagagtattatcgttgattgtttttttttacgtttattttgtttgtatgtgttcgtttcgatggcggtatagtaggttttcgtttaagtaatagcgtattttggcgtatgattcggtaaatacgtttggtattgatcgtaggtatattattaagttttgtttgtttgcgaagtagcgtttatattcgacgataattatacgttggtagtttttcgataatatggtgtatacggagaagtatattcgtattattagtgtgacgattgcggcggttatttatttagttatcggttcgtttgagaatgacgtgtaattgcgtacgcgatattcggagataacggttgattaagtttattttttattttcg

SEQ ID NO: 10836 - DNA, 609 bp, Artificial Sequence
  chemically treated genomic DNA (Homo sapiens) CpG-island No: 10836
cgaaaataaaaaataaacttaatcaaccgttatctccgaatatcgcgtacgcaattacacgtcattctcaaacgaaccgataactaaataaataaccgccgcaatcgtcacactaataatacgaatatacttctccgtatacaccatattatcgaaaaactaccaacgtataattatcgtcgaatataaacgctacttcgcaaacaaacaaaacttaataatatacctacgatcaataccaaacgtatttaccgaatcatacgccaaaatacgctattacttaaacgaaaacctactataccgccatcgaaacgaacacatacaaacaaaataaacgtaaaaaaaaacaatcaacgataatactctaacgaaatcgaattctacttaaataacgaaaaaaaactacgtataacgttcgcgcttaactattataatcgtaaaaaactaaactaaacgaaccactaccgacgaatttaacaataaaacaataccaaaccgtcatactaaaaaacgaaaaaacccccgttttaacaacaaatttttcgacgttcttcaataaaaataactaaccgataaaaaaattattactacccgaactaataataacaa

SEQ ID NO: 10837 - DNA, 523 bp, Artificial Sequence
  chemically treated genomic DNA (Homo sapiens) CpG-island No: 10837
ggtaaatggtatcgcggttttgtcggttttcggtacgttggttagtaaaattcgtgcgttttagttttatttcgggatgacgggttataacgggattattgttcgtttgtagtaggtaattagtgatttcggcgttgacggtatttttttggatatggatacgtcgggtggaatggtgttcggggcgtttgattgcgtcgatattattgttcgtatgcgcgatattaaatttatttgggcgttggttaatgatatgaattgtagtgtaggttagtttattgttagttcggtatcgcgacggttggttatataaacggttagaatcggttttattggggttatgatggcgtatagtaattatggcgttgcgtttaaaattaacggcgttgaggttacgttgatttatagcggcgatcgtaaggtcgacggtaatttttacgaaaagttttcgaaagatgtgcgtgttgatttttagacgcgtatcgatgttattcgttagatgtttgtcgaaaaggttttcgtt

SEQ ID NO: 10838 - DNA, 523 bp, Artificial Sequence
  chemically treated genomic DNA (Homo sapiens) CpG-island No: 10838
aacgaaaaccttttcgacaaacatctaacgaataacatcgatacgcgtctaaaaatcaacacgcacatctttcgaaaacttttcgtaaaaattaccgtcgaccttacgatcgccgctataaatcaacgtaacctcaacgccgttaattttaaacgcaacgccataattactatacgccatcataaccccaataaaaccgattctaaccgtttatataaccaaccgtcgcgataccgaactaacaataaactaacctacactacaattcatatcattaaccaacgcccaaataaatttaatatcgcgcatacgaacaataatatcgacgcaatcaaacgccccgaacaccattccacccgacgtatccatatccaaaaaaataccgtcaacgccgaaatcactaattacctactacaaacgaacaataatcccgttataacccgtcatcccgaaataaaactaaaacgcacgaattttactaaccaacgtaccgaaaaccgacaaaaccgcgataccatttacc

SEQ ID NO: 10839 - DNA, 523 bp, Artificial Sequence
  chemically treated genomic DNA (Homo sapiens) CpG-island No: 10839
agcggaaattttttcggtaaatatttgacgagtggtatcgatacgcgtttggaaattagtacgtatatttttcggaagtttttcgtaagggttgtcgtcgattttgcgatcgtcgttgtaaattagcgtgattttaacgtcgttagttttgagcgtagcgttatagttattgtgcgttattatgattttaatggagtcggttttggtcgtttgtgtgattagtcgtcgcgatgtcgaattggtaataagttgatttgtattgtagtttatgttattggttagcgtttagatgggtttgatatcgcgtatacgggtaataatgtcggcgtagttaaacgtttcggatattattttattcggcgtatttatatttagaagaatgtcgttaacgtcggggttattgattgtttgttgtaggcgagtaatgatttcgttgtaattcgttatttcggaataaggttgaagcgtacgggttttattgattagcgtgtcggaaatcggtaagatcgcgatattatttgtt

SEQ ID NO: 10840 - DNA, 523 bp, Artificial Sequence
  chemically treated genomic DNA (Homo sapiens) CpG-island No: 10840
aacaaataatatcgcgatcttaccgatttccgacacgctaatcaataaaacccgtacgcttcaaccttattccgaaataacgaattacaacgaaatcattactcgcctacaacaaacaatcaataaccccgacgttaacgacattcttctaaatataaatacgccgaataaaataatatccgaaacgtttaactacgccgacattattacccgtatacgcgatatcaaacccatctaaacgctaaccaataacataaactacaatacaaatcaacttattaccaattcgacatcgcgacgactaatcacacaaacgaccaaaaccgactccattaaaatcataataacgcacaataactataacgctacgctcaaaactaacgacgttaaaatcacgctaatttacaacgacgatcgcaaaatcgacgacaacccttacgaaaaacttccgaaaaatatacgtactaatttccaaacgcgtatcgataccactcgtcaaatatttaccgaaaaaatttccgct

SEQ ID NO: 10841 - DNA, 556 bp, Artificial Sequence
  chemically treated genomic DNA (Homo sapiens) CpG-island No: 10841
cgcgatttttacgtttaggtttcgttttcgcggtttttgttttcgtttcgtttttcgtagagggcgcgttttgggagcggcgggggacgcggttggtttttcggtttgcggggtggcggcgtcggggttgcgggcgttttggttggattcgtattgttttttagtgtcgcgcggagttagggcgtcgggttttttcgtttgatgttatcgtcgtgtagttagtttagaagcggtttattgaaagtagatttttttcggcgttcgttgggcggaggacgcgtcgcggttcgtagattcgagcgagttgggtatcgtcgggcgttttcggtttgttcgttttttttttttcgtcgttttttcgcgagttcggttaggcgcgtttgacgtggattattaaatttggagttgtcgtttcgttttttttttttttttttttttttttgataggcgagcgagcgattcggtgtaggtaggagacgtgttgtcgggttgggttgttcgggggagatgatttttcgttaggagggcgtttttgggaagaagattacgggggaag

SEQ ID NO: 10842 - DNA, 556 bp, Artificial Sequence
  chemically treated genomic DNA (Homo sapiens) CpG-island No: 10842
cttcccccgtaatcttcttcccaaaaacgccctcctaacgaaaaatcatctcccccgaacaacccaacccgacaacacgtctcctacctacaccgaatcgctcgctcgcctatcaaaaaaaaaaaaaaaaaaaaaaaaaacgaaacgacaactccaaatttaataatccacgtcaaacgcgcctaaccgaactcgcgaaaaaacgacgaaaaaaaaaaaacgaacaaaccgaaaacgcccgacgatacccaactcgctcgaatctacgaaccgcgacgcgtcctccgcccaacgaacgccgaaaaaaatctactttcaataaaccgcttctaaactaactacacgacgataacatcaaacgaaaaaacccgacgccctaactccgcgcgacactaaaaaacaatacgaatccaaccaaaacgcccgcaaccccgacgccgccaccccgcaaaccgaaaaaccaaccgcgtcccccgccgctcccaaaacgcgccctctacgaaaaacgaaacgaaaacaaaaaccgcgaaaacgaaacctaaacgtaaaaatcgcg

SEQ ID NO: 10843 - DNA, 556 bp, Artificial Sequence
  chemically treated genomic DNA (Homo sapiens) CpG-island No: 10843
tttttttcgtggttttttttttagaggcgtttttttggcgaggagttatttttttcgggtagtttagttcggtagtacgttttttgtttgtatcgagtcgttcgttcgtttgttagagggaggaggaggaggagaggggacgaggcggtagttttaagtttaatggtttacgttaggcgcgtttggtcgggttcgcgggggagcggcggggaggagggggcgggtaggtcgggggcgttcggcggtgtttagttcgttcgggtttgcggatcgcggcgcgtttttcgtttagcgagcgtcgaagagggtttgtttttaatgagtcgtttttgggttgattgtacggcggtgatattaggcgggggagttcggcgttttgatttcgcgcggtattagggggtaatgcgggtttagttaaggcgttcgtagtttcgacgtcgttatttcgtaagtcgggaagttagtcgcgtttttcgtcgtttttagggcgcgttttttgcggggggcggggcgggggtaggggtcgcgagggcgggatttgggcgtggagatcgcg

SEQ ID NO: 10844 - DNA, 556 bp, Artificial Sequence
  chemically treated genomic DNA (Homo sapiens) CpG-island No: 10844
cgcgatctccacgcccaaatcccgccctcgcgacccctacccccgccccgccccccgcaaaaaacgcgccctaaaaacgacgaaaaacgcgactaacttcccgacttacgaaataacgacgtcgaaactacgaacgccttaactaaacccgcattaccccctaataccgcgcgaaatcaaaacgccgaactcccccgcctaatatcaccgccgtacaatcaacccaaaaacgactcattaaaaacaaaccctcttcgacgctcgctaaacgaaaaacgcgccgcgatccgcaaacccgaacgaactaaacaccgccgaacgcccccgacctacccgccccctcctccccgccgctcccccgcgaacccgaccaaacgcgcctaacgtaaaccattaaacttaaaactaccgcctcgtcccctctcctcctcctcctccctctaacaaacgaacgaacgactcgatacaaacaaaaaacgtactaccgaactaaactacccgaaaaaaataactcctcgccaaaaaaacgcctctaaaaaaaaaaccacgaaaaaaa

SEQ ID NO: 10845 - DNA, 612 bp, Artificial Sequence
  chemically treated genomic DNA (Homo sapiens) CpG-island No: 10845
gtggttcgtagcggttggtatacgtggtgttagcggcggataaggataagtacgcgttagtagtttcgttaatattgcgatagcgttgttttcgcggtttttattcggttaaaatagcgttacggtgttttacgtttgacggatgaattgcgtgtttagggttatttttttaacgtaaaaatcgtggcggtaagtttgcgtcgttagggattgagggtaaaggtttttcggaagtttagttcggttagttatcgcgtatacggtttgtttgtgttagaaaatttgttggagtaggatttttacgttagtggttcgaattagaagtgggtaggagatattacgtatttacgtatagatgaaggttggttgtatttggtaatggttattgatttgtggttacgtgtcgttattggttggttaatgtcgttacgtatgacggcgtaattggtttgcgatgttttgtagatggcgttgtggcggcgtaagacgttttcgaacgttatcgtttatacggatcggggaggttagtattgtttagtaaattattaggcgtaattgaagcggtataatttgcgtggaagtatgagcgtaaaaggttgttgttacgataat

SEQ ID NO: 10846 - DNA, 612 bp, Artificial Sequence
  chemically treated genomic DNA (Homo sapiens) CpG-island No: 10846
attatcgtaacaacaaccttttacgctcatacttccacgcaaattataccgcttcaattacgcctaataatttactaaacaatactaacctccccgatccgtataaacgataacgttcgaaaacgtcttacgccgccacaacgccatctacaaaacatcgcaaaccaattacgccgtcatacgtaacgacattaaccaaccaataacgacacgtaaccacaaatcaataaccattaccaaatacaaccaaccttcatctatacgtaaatacgtaatatctcctacccacttctaattcgaaccactaacgtaaaaatcctactccaacaaattttctaacacaaacaaaccgtatacgcgataactaaccgaactaaacttccgaaaaacctttaccctcaatccctaacgacgcaaacttaccgccacgatttttacgttaaaaaaataaccctaaacacgcaattcatccgtcaaacgtaaaacaccgtaacgctattttaaccgaataaaaaccgcgaaaacaacgctatcgcaatattaacgaaactactaacgcgtacttatccttatccgccgctaacaccacgtataccaaccgctacgaaccac

SEQ ID NO: 10847 - DNA, 612 bp, Artificial Sequence
  chemically treated genomic DNA (Homo sapiens) CpG-island No: 10847
attatcgtagtagtaattttttgcgtttatatttttacgtagattatgtcgttttagttgcgtttaataatttgttgaatagtattggttttttcggttcgtgtgaacgataacgttcgggggcgttttacgtcgttatagcgttatttgtagggtatcgtaggttagttgcgtcgttatgcgtggcgatattgattagttaataacggtacgtgattataggttaatgattattgttagatatagttagtttttatttgtacgtaagtacgtgatgttttttgtttatttttggttcgggttattggcgtaaaaattttgttttaatagattttttgatataggtaggtcgtgtgcgcggtagttgatcgggttgaattttcgggaggtttttgtttttagtttttgacggcgtaggtttgtcgttacggtttttacgttaaaggggtaattttgagtacgtagtttattcgttaggcgtggggtatcgtaacgttgttttgatcgggtaaaagtcgcgaggataacgttgtcgtagtgttggcggaattgttgacgcgtgtttatttttgttcgtcgttgatattacgtatattagtcgttgcgggttat

SEQ ID NO: 10848 - DNA, 612 bp, Artificial Sequence
  chemically treated genomic DNA (Homo sapiens) CpG-island No: 10848
ataacccgcaacgactaatatacgtaatatcaacgacgaacaaaaataaacacgcgtcaacaattccgccaacactacgacaacgttatcctcgcgacttttacccgatcaaaacaacgttacgataccccacgcctaacgaataaactacgtactcaaaattacccctttaacgtaaaaaccgtaacgacaaacctacgccgtcaaaaactaaaaacaaaaacctcccgaaaattcaacccgatcaactaccgcgcacacgacctacctatatcaaaaaatctattaaaacaaaatttttacgccaataacccgaaccaaaaataaacaaaaaacatcacgtacttacgtacaaataaaaactaactatatctaacaataatcattaacctataatcacgtaccgttattaactaatcaatatcgccacgcataacgacgcaactaacctacgataccctacaaataacgctataacgacgtaaaacgcccccgaacgttatcgttcacacgaaccgaaaaaaccaatactattcaacaaattattaaacgcaactaaaacgacataatctacgtaaaaatataaacgcaaaaaattactactacgataat

SEQ ID NO: 10849 - DNA, 662 bp, Artificial Sequence
  chemically treated genomic DNA (Homo sapiens) CpG-island No: 10849
ggagttaggttgtttttcgcggtcgtgtatcgtatacgttatatttacgtcgcgttgtacgtaatttcgcgaggtttttttacgttttcgtttaaaaattttttggattaggcgacgtgtatagttggttttttttaatcgtttatgtttcgttcgttaggggggattaagttttagacgaaaatttttcgtggttcgtcgattcgtcgattgtcggtatcgcgttaattttatagttcggtatcgtagtataggcgcggtgttttaaggattcgtaggacggtaggattcgtcggttaggggttcgttacgcgggttaggtttgtttcgttataaatgcgttttttgggattatttttatgtgcgacggggaaagaaattcgtttcgtttcgtatcgtggcgcgtttttttttttcgtttttatttttcgttcggtcgtttcgtcgcgaatattcgttcgttttaaggattcgtcgcggggcgttgcgcgtcggttgtttgtcgtttttttttttcgttatgttttttttatcggttttcgtcgggcggggtcgtcgtcgtttcgcgtttatacggcggttttcgttcggcgtttttaagatgagtattttttgttttaaataagataagggtgatatgattattatatttaatgttatta

SEQ ID NO: 10850 - DNA, 662 bp, Artificial Sequence
  chemically treated genomic DNA (Homo sapiens) CpG-island No: 10850
taataacattaaatataataatcatatcacccttatcttatttaaaacaaaaaatactcatcttaaaaacgccgaacgaaaaccgccgtataaacgcgaaacgacgacgaccccgcccgacgaaaaccgataaaaaaaacataacgaaaaaaaaaaacgacaaacaaccgacgcgcaacgccccgcgacgaatccttaaaacgaacgaatattcgcgacgaaacgaccgaacgaaaaataaaaacgaaaaaaaaaaacgcgccacgatacgaaacgaaacgaatttctttccccgtcgcacataaaaataatcccaaaaaacgcatttataacgaaacaaacctaacccgcgtaacgaacccctaaccgacgaatcctaccgtcctacgaatccttaaaacaccgcgcctatactacgataccgaactataaaattaacgcgataccgacaatcgacgaatcgacgaaccacgaaaaattttcgtctaaaacttaatcccccctaacgaacgaaacataaacgattaaaaaaaaccaactatacacgtcgcctaatccaaaaaatttttaaacgaaaacgtaaaaaaacctcgcgaaattacgtacaacgcgacgtaaatataacgtatacgatacacgaccgcgaaaaacaacctaactcc

SEQ ID NO: 10851 - DNA, 662 bp, Artificial Sequence
  chemically treated genomic DNA (Homo sapiens) CpG-island No: 10851
taatgatattaaatatggtggttatgttatttttgttttgtttagagtaagaggtatttattttgggggcgtcgagcggaagtcgtcgtatggacgcgaagcggcggcggtttcgttcggcgggggtcggtagggagagtatggcggggggggggggcggtaagtaatcgacgcgtagcgtttcgcggcgagtttttggggcgggcgagtattcgcggcggggcggtcgggcggagggtggaagcgaggggagagggcgcgttacggtgcggggcgaggcgagttttttttttcgtcgtatatggaagtggttttaaggggcgtatttgtagcggggtaggtttggttcgcgtggcgggtttttggtcggcgggttttatcgttttgcgggtttttggggtatcgcgtttatattacggtatcgaattgtgaggttagcgcggtgtcggtagtcggcgagtcggcgagttacgggggattttcgtttgggatttgattttttttagcgagcggggtatgagcggttggggggggttaattatgtacgtcgtttagtttagaggatttttgaacgggggcgtgggagagtttcgcgaggttgcgtatagcgcgacgtaggtgtggcgtgtacggtgtacggtcgcgggaggtagtttagtttt

SEQ ID NO: 10852 - DNA, 662 bp, Artificial Sequence
  chemically treated genomic DNA (Homo sapiens) CpG-island No: 10852
aaaactaaactacctcccgcgaccgtacaccgtacacgccacacctacgtcgcgctatacgcaacctcgcgaaactctcccacgcccccgttcaaaaatcctctaaactaaacgacgtacataattaaccccccccaaccgctcataccccgctcgctaaaaaaaatcaaatcccaaacgaaaatcccccgtaactcgccgactcgccgactaccgacaccgcgctaacctcacaattcgataccgtaatataaacgcgataccccaaaaacccgcaaaacgataaaacccgccgaccaaaaacccgccacgcgaaccaaacctaccccgctacaaatacgccccttaaaaccacttccatatacgacgaaaaaaaaaactcgcctcgccccgcaccgtaacgcgccctctcccctcgcttccaccctccgcccgaccgccccgccgcgaatactcgcccgccccaaaaactcgccgcgaaacgctacgcgtcgattacttaccgccccccccccccgccatactctccctaccgacccccgccgaacgaaaccgccgccgcttcgcgtccatacgacgacttccgctcgacgcccccaaaataaatacctcttactctaaacaaaacaaaaataacataaccaccatatttaatatcatta

SEQ ID NO: 10853 - DNA, 536 bp, Artificial Sequence
  chemically treated genomic DNA (Homo sapiens) CpG-island No: 10853
ggaggtagcgcgggatacggaaggtggaacggggcggtatttttcggagaaagttggcgattatttgttcgaaggggttttgtatatttggtgtatatttatcgagatttttattttcgcgcgtcgcggtttcgcgtatcggttacgttttcgcgagtttagagttgtttagggttcgtagaggttcggaggcgtttatattcggatagttatatgggcgtggttttttttttcgttttttaaattttcgaaattttattggttattcggagaacgcgtagtcggttacgtttacgtttttattgttagagttcggggtttgggttatagagcgcgggaggcgttggagcgtttttagagtattcggggttcgcggtttttacgttggcggcgttagagcggttttggtgttttttcgcggcgcgtttgtcgagaaaagtttttttgtttgggagttattacgtttcgtttaggaaatttggattttgggtttatgcgtttatggtattatcgtttggattatagaataagtcgtg

SEQ ID NO: 10854 - DNA, 536 bp, Artificial Sequence
  chemically treated genomic DNA (Homo sapiens) CpG-island No: 10854
cacgacttattctataatccaaacgataataccataaacgcataaacccaaaatccaaatttcctaaacgaaacgtaataactcccaaacaaaaaaacttttctcgacaaacgcgccgcgaaaaaacaccaaaaccgctctaacgccgccaacgtaaaaaccgcgaaccccgaatactctaaaaacgctccaacgcctcccgcgctctataacccaaaccccgaactctaacaataaaaacgtaaacgtaaccgactacgcgttctccgaataaccaataaaatttcgaaaatttaaaaaacgaaaaaaaaaaccacgcccatataactatccgaatataaacgcctccgaacctctacgaaccctaaacaactctaaactcgcgaaaacgtaaccgatacgcgaaaccgcgacgcgcgaaaataaaaatctcgataaatatacaccaaatatacaaaaccccttcgaacaaataatcgccaactttctccgaaaaataccgccccgttccaccttccgtatcccgcgctacctcc

SEQ ID NO: 10855 - DNA, 536 bp, Artificial Sequence
  chemically treated genomic DNA (Homo sapiens) CpG-island No: 10855
tacggtttattttgtgatttaggcggtgatattataaacgtataagtttaaggtttaggttttttgggcggggcgtgatggtttttaggtagagaagtttttttcggtaggcgcgtcgcgggagggtattagggtcgttttggcgtcgttagcgtggagatcgcgggtttcgggtgttttgggagcgttttagcgtttttcgcgttttgtaatttaggtttcggattttggtagtaggggcgtgggcgtggtcgattgcgcgtttttcgagtggttaataaagtttcgaaagtttgaaaagcggaggaaaaggttacgtttatgtggttgttcgagtgtgggcgttttcgggtttttgcgagttttgggtagttttgagttcgcggaggcgtggtcggtgcgcggggtcgcggcgcgcggggatgggggtttcggtggatgtgtattaggtgtataagattttttcgagtaggtggtcgttagtttttttcgaaaggtatcgtttcgttttatttttcgtatttcgcgttgttttt

SEQ ID NO: 10856 - DNA, 536 bp, Artificial Sequence
  chemically treated genomic DNA (Homo sapiens) CpG-island No: 10856
aaaaacaacgcgaaatacgaaaaataaaacgaaacgatacctttcgaaaaaaactaacgaccacctactcgaaaaaatcttatacacctaatacacatccaccgaaacccccatccccgcgcgccgcgaccccgcgcaccgaccacgcctccgcgaactcaaaactacccaaaactcgcaaaaacccgaaaacgcccacactcgaacaaccacataaacgtaaccttttcctccgcttttcaaactttcgaaactttattaaccactcgaaaaacgcgcaatcgaccacgcccacgcccctactaccaaaatccgaaacctaaattacaaaacgcgaaaaacgctaaaacgctcccaaaacacccgaaacccgcgatctccacgctaacgacgccaaaacgaccctaataccctcccgcgacgcgcctaccgaaaaaaacttctctacctaaaaaccatcacgccccgcccaaaaaacctaaaccttaaacttatacgtttataatatcaccgcctaaatcacaaaataaaccgta

SEQ ID NO: 10857 - DNA, 601 bp, Artificial Sequence
  chemically treated genomic DNA (Homo sapiens) CpG-island No: 10857
gagttggttcggaggaggagtcgtaggcggtatcgttgttagtcggagagaagcgcgggtcgcggtattttttcgttattcgtttttggacgtttttcgttcgcgttttagtttagagtcggtttttttttcggaaggaaacgatttttgtcgggtcgttttcggtttgtagcgtcgacgtttttttttttttttttttttagtttttgtttttcgttttatttttcgtttcgtttcgttttttcgttggtttttcgatattcgtgtttgggggttttattggttttttttcggcgtttaggtttcgttgattttatcggcggagttcgggttcgggagtttttagtaagttcgttgttgttttatcgtgtttttttttttcggtttatagtcgggtacgttttggcgtgatttttattattttgtttcgttttaggttcgttagggcgttatttttcgcgtttttcgttttttttacgttgtttttatcgttgttatttcgcgttttttttttttagtcggttatttgttaggaaattaaacgttttattttagtatttttttttttagtttaattttttttttatttgtatcgtttatt

SEQ ID NO: 10858 - DNA, 601 bp, Artificial Sequence
  chemically treated genomic DNA (Homo sapiens) CpG-island No: 10858
aataaacgatacaaataaaaaaaaaattaaactaaaaaaaaaaatactaaaataaaacgtttaatttcctaacaaataaccgactaaaaaaaaaaaacgcgaaataacaacgataaaaacaacgtaaaaaaaacgaaaaacgcgaaaaataacgccctaacgaacctaaaacgaaacaaaataataaaaatcacgccaaaacgtacccgactataaaccgaaaaaaaaaaacacgataaaacaacaacgaacttactaaaaactcccgaacccgaactccgccgataaaatcaacgaaacctaaacgccgaaaaaaaaccaataaaacccccaaacacgaatatcgaaaaaccaacgaaaaaacgaaacgaaacgaaaaataaaacgaaaaacaaaaactaaaaaaaaaaaaaaaaaaaaacgtcgacgctacaaaccgaaaacgacccgacaaaaatcgtttccttccgaaaaaaaaaccgactctaaactaaaacgcgaacgaaaaacgtccaaaaacgaataacgaaaaaataccgcgacccgcgcttctctccgactaacaacgataccgcctacgactcctcctccgaaccaactc

SEQ ID NO: 10859 - DNA, 601 bp, Artificial Sequence
  chemically treated genomic DNA (Homo sapiens) CpG-island No: 10859
ggtggacgatgtaggtaggagggaagttaggttgggaggagaggtgttgggatgggacgtttggttttttgataagtgatcgattagagagagaaggcgcggagtggtagcggtaagaataacgtggaaaggacggaaaacgcgaagagtggcgttttggcggatttggggcggggtagagtggtaagggttacgttaggacgtattcggttgtgggtcgggggaggagagtacggtgggatagtaacgaatttgttgggggttttcggattcgagtttcgtcgatgaggttagcggagtttaggcgtcgggaggaggttagtagagtttttagatacgagtgtcgggaggttagcggaggggcgggacgggacgggaaatgggacgaagagtaagagttgggggaggagggaagagggggcgtcggcgttgtaagtcggaggcggttcgatagggatcgttttttttcggagaggaggtcggttttggattgaggcgcggacggggggcgtttaagggcgggtgacggggaaatatcgcggttcgcgttttttttcggttggtagcggtgtcgtttgcggtttttttttcgggttagttt

SEQ ID NO: 10860 - DNA, 601 bp, Artificial Sequence
  chemically treated genomic DNA (Homo sapiens) CpG-island No: 10860
aaactaacccgaaaaaaaaaccgcaaacgacaccgctaccaaccgaaaaaaaacgcgaaccgcgatatttccccgtcacccgcccttaaacgccccccgtccgcgcctcaatccaaaaccgacctcctctccgaaaaaaaacgatccctatcgaaccgcctccgacttacaacgccgacgccccctcttccctcctcccccaactcttactcttcgtcccatttcccgtcccgtcccgcccctccgctaacctcccgacactcgtatctaaaaactctactaacctcctcccgacgcctaaactccgctaacctcatcgacgaaactcgaatccgaaaacccccaacaaattcgttactatcccaccgtactctcctcccccgacccacaaccgaatacgtcctaacgtaacccttaccactctaccccgccccaaatccgccaaaacgccactcttcgcgttttccgtcctttccacgttattcttaccgctaccactccgcgccttctctctctaatcgatcacttatcaaaaaaccaaacgtcccatcccaacacctctcctcccaacctaacttccctcctacctacatcgtccacc

SEQ ID NO: 10861 - DNA, 571 bp, Artificial Sequence
  chemically treated genomic DNA (Homo sapiens) CpG-island No: 10861
cgtttttattgttcggggatggggagtaagtttagttagtcgttgttttcgggtgtcgcgtgcgtagttgtacgttatttttagacgaatcgatgattggatggatggtcgtcgtagtcgttatattgatgatacggatgtgttttttcgtatatattatgttatcggagagttgttaacgtatggttatcgtcgggtatgggcgttgtttcgtagataggtagaatttgatggtatgtttgcgattaatgttaaacgtgtttatcggattatgcgttagaatgcgttgttgtttgagcgaaaatttgttgtatcgttatcgaaacgggtatatataggtagagtggtcgtgaaagaaagtaattagcgatggtgttttgacgggttcgagttttgttgtgataacggagagagattgcgtgttacgttcgcgttggattgttgtgatcgtgaggtattgtattgggcggttattatcggcggttttaatagtgaaatagtatatgacgttatgttgggagatttttattgatattggcggtaagttgattgtttagaaggaggttaaaat

SEQ ID NO: 10862 - DNA, 571 bp, Artificial Sequence
  chemically treated genomic DNA (Homo sapiens) CpG-island No: 10862
attttaacctccttctaaacaatcaacttaccgccaatatcaataaaaatctcccaacataacgtcatatactatttcactattaaaaccgccgataataaccgcccaatacaatacctcacgatcacaacaatccaacgcgaacgtaacacgcaatctctctccgttatcacaacaaaactcgaacccgtcaaaacaccatcgctaattactttctttcacgaccactctacctatatatacccgtttcgataacgatacaacaaattttcgctcaaacaacaacgcattctaacgcataatccgataaacacgtttaacattaatcgcaaacataccatcaaattctacctatctacgaaacaacgcccatacccgacgataaccatacgttaacaactctccgataacataatatatacgaaaaaacacatccgtatcatcaatataacgactacgacgaccatccatccaatcatcgattcgtctaaaaataacgtacaactacgcacgcgacacccgaaaacaacgactaactaaacttactccccatccccgaacaataaaaacg

SEQ ID NO: 10863 - DNA, 571 bp, Artificial Sequence
  chemically treated genomic DNA (Homo sapiens) CpG-island No: 10863
gttttagtttttttttggataattagtttatcgttagtattaatggggattttttagtatgacgttatgtattgttttattgttgaagtcgtcggtagtgatcgtttagtgtagtgttttacgattatagtagtttagcgcgaacgtgatacgtagttttttttcgttattatagtagaattcgaattcgttagagtattatcgttgattgtttttttttacggttattttgtttgtatgtgttcgtttcgatggcggtatagtaggttttcgtttaagtaatagcgtattttggcgtatgattcggtaaatacgtttggtattgatcgtaggtatattattaagttttgtttgtttgcgaagtagcgtttatattcgacgataattatacgttggtagtttttcgataatatggtgtatacggagaagtatattcgtattattagtgtgacgattgcggcggttatttatttagttatcggttcgtttgagaatgacgtgtaattgcgtacgcgatattcggagataacggttgattaagtttattttttattttcgggtaataagggcg

SEQ ID NO: 10864 - DNA, 571 bp, Artificial Sequence
  chemically treated genomic DNA (Homo sapiens) CpG-island No: 10864
cgcccttattacccgaaaataaaaaataaacttaatcaaccgttatctccgaatatcgcgtacgcaattacacgtcattctcaaacgaaccgataactaaataaataaccgccgcaatcgtcacactaataatacgaatatacttctccgtatacaccatattatcgaaaaactaccaacgtataattatcgtcgaatataaacgctacttcgcaaacaaacaaaacttaataatatacctacgatcaataccaaacgtatttaccgaatcatacgccaaaatacgctattacttaaacgaaaacctactataccgccatcgaaacgaacacatacaaacaaaataaccgtaaaaaaaaacaatcaacgataatactctaacgaattcgaattctactataataacgaaaaaaaactacgtatcacgttcgcgctaaactactataatcgtaaaacactacactaaacgatcactaccgacgacttcaacaataaaacaatacataacgtcatactaaaaaatccccattaatactaacgataaactaattatccaaaaaaaaactaaaac

SEQ ID NO: 10865 - DNA, 560 bp, Artificial Sequence
  chemically treated genomic DNA (Homo sapiens) CpG-island No: 10865
gttttcgttatcggcggtacgcgtattttttttgattggttggtgattgagtgtagcgttaatttcggcgagatatttttggatcggatgatcgcgatggtggaaggcgtatagcgacgtaaaacgtcgaacgaaattgttttgattattttgttgattgttttgattatcgtttttttattggtaatcgttacgttgtggtcgtttttcgcgtggggcggtaatgtagttagcgtaacggtattggtggcgttgttggtttgtttgattttaattattattggcggtttgttgttagcgatcggcgttttcgggatgagtcggatgttatgcgcgaatgtgattgttattagcggacgtgtagtttaagcggtaggtgacgttgacgttttgttattggataaaatcggtattattatattcggtaatcgttaggcggtcggatttattttcgcgtatggcgtggatgaaaaatacgttggtttaacgtcgtataattggttttttttggttgatgaaatcgtcggaaaggtcgtatttttttgatttttttttaataa

SEQ ID NO: 10866 - DNA, 560 bp, Artificial Sequence
  chemically treated genomic DNA (Homo sapiens) CpG-island No: 10866
ttattaaaaaaaaatcaaaaaaatacgacctttccgacgatttcatcaaccaaaaaaaaccaattatacgacgttaaaccaacgtatttttcatccacgccatacgcgaaaataaatccgaccgcctaacgattaccgaatataataataccgattttatccaataacaaaacgtcaacgtcacctaccgcttaaactacacgtccgctaataacaatcacattcgcgcataacatccgactcatcccgaaaacgccgatcgctaacaacaaaccgccaataataattaaaatcaaacaaaccaacaacgccaccaataccgttacgctaactacattaccgccccacgcgaaaaacgaccacaacgtaacgattaccaataaaaaaacgataatcaaaacaatcaacaaaataatcaaaacaatttcgttcgacgttttacgtcgctatacgccttccaccatcgcgatcatccgatccaaaaatatctcgccgaaattaacgctacactcaatcaccaaccaatcaaaaaaaatacgcgtaccgccgataacgaaaac

SEQ ID NO: 10867 - DNA, 560 bp, Artificial Sequence
  chemically treated genomic DNA (Homo sapiens) CpG-island No: 10867
ttgttgggaaagaattaaaaaaatgcggttttttcggcggttttattagttaggagaagttagttgtgcggcgttaggttagcgtattttttatttacgttatgcgcggggataaattcgatcgtttgacggttatcgagtgtgatggtgtcggttttatttagtagtagaacgttaacgttatttgtcgtttaaattgtacgttcgttggtggtaattatattcgcgtatagtattcggtttatttcggggacgtcgatcgttgataataggtcgttaatagtggttgggattagatagattagtagcgttattagtatcgttacgttgattgtattatcgttttacgcggaaaacggttatagcgtggcggttgttagtaaaaagacgatagttagggtaattagtagaatggttagggtaatttcgttcggcgttttgcgtcgttgtgcgttttttattatcgcgattattcgatttagaaatgtttcgtcggggttaacgttatatttaattattagttagttagaaagaatacgcgtgtcgtcggtgacggaggt

SEQ ID NO: 10868 - DNA, 560 bp, Artificial Sequence
  chemically treated genomic DNA (Homo sapiens) CpG-island No: 10868
acctccgtcaccgacgacacgcgtattctttctaactaactaataattaaatataacgttaaccccgacgaaacatttctaaatcgaataatcgcgataataaaaaacgcacaacgacgcaaaacgccgaacgaaattaccctaaccattctactaattaccctaactatcgtctttttactaacaaccgccacgctataaccgttttccgcgtaaaacgataatacaatcaacgtaacgatactaataacgctactaatctatctaatcccaaccactattaacgacctattatcaacgatcgacgtccccgaaataaaccgaatactatacgcgaatataattaccaccaacgaacgtacaatttaaacgacaaataacgttaacgttctactactaaataaaaccgacaccatcacactcgataaccgtcaaacgatcgaatttatccccgcgcataacgtaaataaaaaatacgctaacctaacgccgcacaactaacttctcctaactaataaaaccgccgaaaaaaccgcatttttttaattctttcccaacaa

SEQ ID NO: 10869 - DNA, 753 bp, Artificial Sequence
  chemically treated genomic DNA (Homo sapiens) CpG-island No: 10869
ggagcgcgttattttgtcgaaattatcgtttttgcgttcggattgcgttattattggcgaaacgacgttattataatcggtacgcgtatataaaggttatatttttaacgttattcgtatttacggttagtcggggtattttatcgaattagtaggcggaagttaatttatcgaattaacgtattatcgggattgagcgggattatacgtagttttgcgttaacgcgtgcgtaaagtatttgttaggaaataatgttagcgtggtgttttatttgattgatgatgatgttatcgttcgttcgtacgttgttgttgttttagttattggcgattagattgatttttttcgtcgtgtcgcggacgaatattagttttttcgtcgaacgggtattaataaatagcgatgttcgtttgcgtacgttttttattttgtcggtcgtttgggcgtttaaggtatgaatattacgatgtatcgtcgcgtagttatgacgataaaattcggtttcggcgttaattatttggttcggtttttgcgtattggcggcgttgtcgagataagttagcggtaaatcgtttattttacgcgaaagtatcggaaagtcggttcgtattttgtcgacggaaaaaattattttgtattttttggtagtcgttgatcgattttggttagtatttgttgtttaagttttttattacgtagtgttttcgttagttcggtagttaaggcgtaaatgattattttgttgggtattt

SEQ ID NO: 10870 - DNA, 753 bp, Artificial Sequence
  chemically treated genomic DNA (Homo sapiens) CpG-island No: 10870
aaatacccaacaaaataatcatttacgccttaactaccgaactaacgaaaacactacgtaataaaaaacttaaacaacaaatactaaccaaaatcgatcaacgactaccaaaaaatacaaaataattttttccgtcgacaaaatacgaaccgactttccgatactttcgcgtaaaataaacgatttaccgctaacttatctcgacaacgccgccaatacgcaaaaaccgaaccaaataattaacgccgaaaccgaattttatcgtcataactacgcgacgatacatcgtaatattcataccttaaacgcccaaacgaccgacaaaataaaaaacgtacgcaaacgaacatcgctatttattaatacccgttcgacgaaaaaactaatattcgtccgcgacacgacgaaaaaaatcaatctaatcgccaataactaaaacaacaacaacgtacgaacgaacgataacatcatcatcaatcaaataaaacaccacgctaacattatttcctaacaaatactttacgcacgcgttaacgcaaaactacgtataatcccgctcaatcccgataatacgttaattcgataaattaacttccgcctactaattcgataaaataccccgactaaccgtaaatacgaataacgttaaaaatataacctttatatacgcgtaccgattataataacgtcgtttcgccaataataacgcaatccgaacgcaaaaacgataatttcgacaaaataacgcgctcc

SEQ ID NO: 10871 - DNA, 753 bp, Artificial Sequence
  chemically treated genomic DNA (Homo sapiens) CpG-island No: 10871
ggatgtttagtaagatgattatttacgttttggttgtcgaattgacggaagtattgcgtgatgaggggtttaaatagtaggtgttggttagaatcggttaacggttgttaggaggtgtaagatgatttttttcgtcgataaagtgcgggtcgatttttcggtgttttcgcgtgaggtaaacggtttgtcgttggtttatttcgatagcgtcgttagtgcgtagaaatcgagttaggtgattgacgtcgaggtcgagttttatcgttatggttacgcggcggtgtatcgtggtatttatattttaagcgtttaggcgatcgataaaatggagaacgtgcgtaagcgggtatcgttgtttattaatgttcgttcggcggaagagttggtgttcgttcgcggtacgacggaagggattaatttggtcgttaatagttggggtaatagtaacgtgcgggcgggcgataatattattattagttagatggagtattacgttaatattgttttttggtagatgttttgcgtacgcgttggcgtagagttgcgtgtgatttcgtttaatttcgatggtacgttggttcgataggttaattttcgtttgttgattcgatggagtgtttcgattggtcgtgaatacggatggcgttagagatatgatttttatgtgcgcgtatcggttgtagtgacgtcgtttcgttaatgatggcgtaattcgggcgtaggggcggtagtttcggtaaaataacgcgtttt

SEQ ID NO: 10872 - DNA, 753 bp, Artificial Sequence
  chemically treated genomic DNA (Homo sapiens) CpG-island No: 10872
aaaacgcgttattttaccgaaactaccgcccctacgcccgaattacgccatcattaacgaaacgacgtcactacaaccgatacgcgcacataaaaatcatatctctaacgccatccgtattcacgaccaatcgaaacactccatcgaatcaacaaacgaaaattaacctatcgaaccaacgtaccatcgaaattaaacgaaatcacacgcaactctacgccaacgcgtacgcaaaacatctaccaaaaaacaatattaacgtaatactccatctaactaataataatattatcgcccgcccgcacgttactattaccccaactattaacgaccaaattaatcccttccgtcgtaccgcgaacgaacaccaactcttccgccgaacgaacattaataaacaacgatacccgcttacgcacgttctccattttatcgatcgcctaaacgcttaaaatataaataccacgatacaccgccgcgtaaccataacgataaaactcgacctcgacgtcaatcacctaactcgatttctacgcactaacgacgctatcgaaataaaccaacgacaaaccgtttacctcacgcgaaaacaccgaaaaatcgacccgcactttatcgacgaaaaaaatcatcttacacctcctaacaaccgttaaccgattctaaccaacacctactatttaaacccctcatcacgcaatacttccgtcaattcgacaaccaaaacgtaaataatcatcttactaaacatcc

SEQ ID NO: 10873 - DNA, 817 bp, Artificial Sequence
  chemically treated genomic DNA (Homo sapiens) CpG-island No: 10873
tgggtcgggcgtacgatgttcgcggtgttggggaaattcggtcggattagtttttgcgatgggcggcggggcggtttagcgttttttggttttggtggatcggtttttaggtattcgaagggacgtggggtttggtaaattgggtggggttcgcgcggggtgcggggagtttgcggttttttggtataggggtggggtcgtagacgtcgtgagtgtgtagcgcgtgtgagtgtgcgggggcgtgttttttcgtgtgcgcgcgtcgtgcgttcgttggggaggtgcggggattcggcgattcggagcgtttttttcgcggtgtcgcggtgcggaagtcggggcgcgttggcgcgtacgttcgttcgtttttttttttggtcgttgttttcgtatcgcggggaagcgggtttggaggtttttttgagaagtagtttttttcggtcggcggtatttttggttgcgtgttcggtcgcgtttagggtgcgattgttcgggttagatagtattttagggcgagtttcggcggtttgatttcgtcgatttttttcgttttggttgtaattcgcgtgcgaggtcgttcgcgtttttcgagtgtttgtcggtgtagtgggggtggattggtcggttgtggtcgtgtgtgcgcgtgtggattggggttcggttcgagttagaagtttaagcggtagatgtcgggtattgttattttcgttttatttgtcgcgggtggattttggggtaggtgggaagcggaggagaggggtttcgaggcgggtggtagttagatttttagtaacgcggttttattgtgaagttgtta

SEQ ID NO: 10874 - DNA, 817 bp, Artificial Sequence
  chemically treated genomic DNA (Homo sapiens) CpG-island No: 10874
taacaacttcacaataaaaccgcgttactaaaaatctaactaccacccgcctcgaaacccctctcctccgcttcccacctaccccaaaatccacccgcgacaaataaaacgaaaataacaatacccgacatctaccgcttaaacttctaactcgaaccgaaccccaatccacacgcgcacacacgaccacaaccgaccaatccacccccactacaccgacaaacactcgaaaaacgcgaacgacctcgcacgcgaattacaaccaaaacgaaaaaaatcgacgaaatcaaaccgccgaaactcgccctaaaatactatctaacccgaacaatcgcaccctaaacgcgaccgaacacgcaaccaaaaataccgccgaccgaaaaaaactacttctcaaaaaaacctccaaacccgcttccccgcgatacgaaaacaacgaccaaaaaaaaaaacgaacgaacgtacgcgccaacgcgccccgacttccgcaccgcgacaccgcgaaaaaaacgctccgaatcgccgaatccccgcacctccccaacgaacgcacgacgcgcgcacacgaaaaaacacgcccccgcacactcacacgcgctacacactcacgacgtctacgaccccacccctataccaaaaaaccgcaaactccccgcaccccgcgcgaaccccacccaatttaccaaaccccacgtcccttcgaatacctaaaaaccgatccaccaaaaccaaaaaacgctaaaccgccccgccgcccatcgcaaaaactaatccgaccgaatttccccaacaccgcgaacatcgtacgcccgaccca

SEQ ID NO: 10875 - DNA, 817 bp, Artificial Sequence
  chemically treated genomic DNA (Homo sapiens) CpG-island No: 10875
tggtagttttataatggggtcgcgttgttggaggtttgattgttattcgtttcgaaatttttttttttcgttttttatttgttttaaagtttattcgcgataggtggggcgagggtggtaatgttcgatatttgtcgtttaagtttttggttcggatcgggttttaatttatacgcgtatatacggttatagtcggttagtttatttttattgtatcggtagatattcggagggcgcgggcggtttcgtacgcgggttgtaattaggacgaggagggtcggcgagattagatcgtcggggttcgttttgaggtgttatttgattcgggtagtcgtattttgagcgcggtcgggtacgtagttaaaggtgtcgtcggtcggggaaagttattttttaaaggggtttttaggttcgttttttcgcggtgcgggaatagcggttaagggagggagcgagcgagcgtgcgcgttaacgcgtttcgattttcgtatcgcggtatcgcgggagaggcgtttcgggtcgtcgagttttcgtatttttttagcgagcgtacgacgcgcgtatacgggggggtacgttttcgtatatttatacgcgttgtatatttacggcgtttgcggttttatttttgtgttagggaatcgtaagtttttcgtatttcgcgcgggttttatttagtttattagattttacgttttttcgggtgtttgggaatcggtttattaaggttaagggacgttgggtcgtttcgtcgtttatcgtagaagttggttcggtcgggtttttttagtatcgcgggtatcgtgcgttcggttta

SEQ ID NO: 10876 - DNA, 817 bp, Artificial Sequence
  chemically treated genomic DNA (Homo sapiens) CpG-island No: 10876
taaaccgaacgcacgatacccgcgatactaaaaaaacccgaccgaaccaacttctacgataaacgacgaaacgacccaacgtcccttaaccttaataaaccgattcccaaacacccgaaaaaacgtaaaatctaataaactaaataaaacccgcgcgaaatacgaaaaacttacgattccctaacacaaaaataaaaccgcaaacgccgtaaatatacaacgcgtataaatatacgaaaacgtacccccccgtatacgcgcgtcgtacgctcgctaaaaaaatacgaaaactcgacgacccgaaacgcctctcccgcgataccgcgatacgaaaatcgaaacgcgttaacgcgcacgctcgctcgctccctcccttaaccgctattcccgcaccgcgaaaaaacgaacctaaaaacccctttaaaaaataactttccccgaccgacgacacctttaactacgtacccgaccgcgctcaaaatacgactacccgaatcaaataacacctcaaaacgaaccccgacgatctaatctcgccgaccctcctcgtcctaattacaacccgcgtacgaaaccgcccgcgccctccgaatatctaccgatacaataaaaataaactaaccgactataaccgtatatacgcgtataaattaaaacccgatccgaaccaaaaacttaaacgacaaatatcgaacattaccaccctcgccccacctatcgcgaataaactttaaaacaaataaaaaacgaaaaaaaaaaatttcgaaacgaataacaatcaaacctccaacaacgcgaccccattataaaactacca

SEQ ID NO: 10877 - DNA, 603 bp, Artificial Sequence
  chemically treated genomic DNA (Homo sapiens) CpG-island No: 10877
agggtatttataatattagttacggtaattataattattgtttgatcgttttttagtaggcgattttcgatagttgtcgttaagtggtttttttcggtattaggtttttcgttgaacgtaaaatttgtatattcggttattagtttattagcgatggatttcgtttgatttaacgcgtatcgttgtttttcgttttgtatttgggtaattcgaaaacgagtatttgcggtgtaatggttggatgttagagggattgtagaattttttttattcgtaagttgacgattttgacgggttgatttttttatagacgttttttggttttcggaaagttggtattcgcgttagttcggtaacggttttaaaatgtcgtcgtttaggtgtgacgcggtcgagtttaggagacgatgaagttggcggcgtgtttcgatgtgggtgagatgcgggtgatcgaggtgaggtttgggatgttcgcgaggagtcgggaaggaataggtgtgtgagtaggagacgtgcgtgtggtagatattttgtggcgcgttatgagtttattcggtatcggggatttttagagtttattttaattttttttttaatttaatt

SEQ ID NO: 10878 - DNA, 603 bp, Artificial Sequence
  chemically treated genomic DNA (Homo sapiens) CpG-island No: 10878
aattaaattaaaaaaaaaattaaaataaactctaaaaatccccgataccgaataaactcataacgcgccacaaaatatctaccacacgcacgtctcctactcacacacctattccttcccgactcctcgcgaacatcccaaacctcacctcgatcacccgcatctcacccacatcgaaacacgccgccaacttcatcgtctcctaaactcgaccgcgtcacacctaaacgacgacattttaaaaccgttaccgaactaacgcgaataccaactttccgaaaaccaaaaaacgtctataaaaaaatcaacccgtcaaaatcgtcaacttacgaataaaaaaaattctacaatccctctaacatccaaccattacaccgcaaatactcgttttcgaattacccaaatacaaaacgaaaaacaacgatacgcgttaaatcaaacgaaatccatcgctaataaactaataaccgaatatacaaattttacgttcaacgaaaaacctaataccgaaaaaaaccacttaacgacaactatcgaaaatcgcctactaaaaaacgatcaaacaataattataattaccgtaactaatattataaataccct

SEQ ID NO: 10879 - DNA, 603 bp, Artificial Sequence
  chemically treated genomic DNA (Homo sapiens) CpG-island No: 10879
agttaagttgaagaagaggttggagtagattttagagattttcggtatcgagtaagtttatgacgcgttataaagtgtttattatacgtacgttttttatttatatatttattttttttcggtttttcgcgaatattttaggttttatttcggttattcgtattttatttatatcggaatacgtcgttaattttatcgttttttagattcggtcgcgttatatttaagcggcgatattttaagatcgttatcggattggcgcgagtgttaatttttcgaaggttaggaaacgtttgtgaggagattaattcgttagaatcgttagtttgcgggtggaaaaaattttgtaatttttttggtatttagttattgtatcgtaaatgttcgttttcgaattatttaggtgtagaacgaagggtagcgatacgcgttgagttaggcgaaatttatcgttgatgaattgatgatcgggtgtataaattttgcgtttagcggaaaatttggtatcgggaagaattatttagcggtagttatcgggaatcgtttgttgaaagacggttagatagtgattgtggttatcgtggttgatgttatgagtgtttt

SEQ ID NO: 10880 - DNA, 603 bp, Artificial Sequence
  chemically treated genomic DNA (Homo sapiens) CpG-island No: 10880
aaaacactcataacatcaaccacgataaccacaatcactatctaaccgtctttcaacaaacgattcccgataactaccgctaaataattcttcccgataccaaattttccgctaaacgcaaaatttatacacccgatcatcaattcatcaacgataaatttcgcctaactcaacgcgtatcgctacccttcgttctacacctaaataattcgaaaacgaacatttacgatacaataactaaataccaaaaaaattacaaaattttttccacccgcaaactaacgattctaacgaattaatctcctcacaaacgtttcctaaccttcgaaaaattaacactcgcgccaatccgataacgatcttaaaatatcgccgcttaaatataacgcgaccgaatctaaaaaacgataaaattaacgacgtattccgatataaataaaatacgaataaccgaaataaaacctaaaatattcgcgaaaaaccgaaaaaaaataaatatataaataaaaaacgtacgtataataaacactttataacgcgtcataaacttactcgataccgaaaatctctaaaatctactccaacctcttcttcaacttaact

SEQ ID NO: 10881 - DNA, 529 bp, Artificial Sequence
  chemically treated genomic DNA (Homo sapiens) CpG-island No: 10881
aacggagagtgtcggtagcgttttaacgttttgcgtgtcgtaaacggtgttagaaatgtttagttcgttaaggttcgtgatcgtaacgatatcgttagttttcgttagatcggtttcgatacgttttagatcgaggtggtttagtattttatcgattttcgcgttgcgggttttgttttcgttatcgatgatagtgatttgttggttcggttttattttatcgcgtttgatgcggttaatgtcgataacgttaatatagttgttgtaatcgagttgagaaatttgtatttggaacggatcgttaaggttaacgttcggcgtaggaacgtggttaataatcgtttggtatagcggggttatgtttttcgttatattttcgtggtttagattcgcgatatcgtttagcgtagaagcgtaaacgatcgggaagtttagttgttcgtcggtcgcgtcgaggttaacgaatagatcgaatatttgatttataaattaattaaggacgcgcggtaaggggtttaaattttgttgt

SEQ ID NO: 10882 - DNA, 529 bp, Artificial Sequence
  chemically treated genomic DNA (Homo sapiens) CpG-island No: 10882
acaacaaaatttaaaccccttaccgcgcgtccttaattaatttataaatcaaatattcgatctattcgttaacctcgacgcgaccgacgaacaactaaacttcccgatcgtttacgcttctacgctaaacgatatcgcgaatctaaaccacgaaaatataacgaaaaacataaccccgctataccaaacgattattaaccacgttcctacgccgaacgttaaccttaacgatccgttccaaatacaaatttctcaactcgattacaacaactatattaacgttatcgacattaaccgcatcaaacgcgataaaataaaaccgaaccaacaaatcactatcatcgataacgaaaacaaaacccgcaacgcgaaaatcgataaaatactaaaccacctcgatctaaaacgtatcgaaaccgatctaacgaaaactaacgatatcgttacgatcacgaaccttaacgaactaaacatttctaacaccgtttacgacacgcaaaacgttaaaacgctaccgacactctccgtt

SEQ ID NO: 10883 - DNA, 529 bp, Artificial Sequence
  chemically treated genomic DNA (Homo sapiens) CpG-island No: 10883
ataataaagtttgaattttttgtcgcgcgtttttaattggtttgtgaattaggtattcgatttgttcgttaatttcgacgcgatcgacgagtagttggatttttcgatcgtttacgtttttgcgttgaacggtatcgcgggtttggattacgaagatatggcggaagatatgatttcgttgtattaggcgattgttgattacgtttttgcgtcggacgttgattttgacggttcgttttagatgtagattttttagttcgattataatagttatgttggcgttatcggtattggtcgtattaagcgcggtaaagtgaagtcgaattagtaggttattattatcgatagcgaaggtaaaattcgtaacgcgaaagtcggtaaagtgttgggttatttcggtttggaacgtatcgaaatcgatttggcggaagttggcgatatcgttgcgattacgggttttggcgaattgaatatttttgatatcgtttgcgatacgtaaaacgttgaagcgttgtcggtatttttcgtt

SEQ ID NO: 10884 - DNA, 529 bp, Artificial Sequence
  chemically treated genomic DNA (Homo sapiens) CpG-island No: 10884
aacgaaaaataccgacaacgcttcaacgttttacgtatcgcaaacgatatcaaaaatattcaattcgccaaaacccgtaatcgcaacgatatcgccaacttccgccaaatcgatttcgatacgttccaaaccgaaataacccaacactttaccgactttcgcgttacgaattttaccttcgctatcgataataataacctactaattcgacttcactttaccgcgcttaatacgaccaataccgataacgccaacataactattataatcgaactaaaaaatctacatctaaaacgaaccgtcaaaatcaacgtccgacgcaaaaacgtaatcaacaatcgcctaatacaacgaaatcatatcttccgccatatcttcgtaatccaaacccgcgataccgttcaacgcaaaaacgtaaacgatcgaaaaatccaactactcgtcgatcgcgtcgaaattaacgaacaaatcgaatacctaattcacaaaccaattaaaaacgcgcgacaaaaaattcaaactttattat

SEQ ID NO: 10885 - DNA, 1017 bp, Artificial Sequence
  chemically treated genomic DNA (Homo sapiens) CpG-island No: 10885
tcgtatcgtcgtgtttttcggtttaagttttaatattcgggcgaattggcgtgttttattagttcggtagtatgaattattattcgttagttattttattggagacgacggaagatcgttgtcgaagcggcgttttatcgtttttagtatgacgttttgtattgttttattgttgaagtcgtcggtagtgatcgtttagtgtagtggtttacgattatagtagtttagcgcgaacgtgatacgtagttttttttcgttattataagagaatttgaattcgttaggaggatatcgttgattgtttttttttagggttattttgtttgtatgtgttcgtttcgatgggcggtaaagaagtttttcggtaagtaataagggatgaacgagtcggttcggggatttttagagtttgttagggcgaatcgagaatgtattttgcgaggcgcgatcgaatttatgatatttcggtttcggtaaggcgcgaatggtgtgttttatagtagttgtttaacgttttggtttttatagaattacgtttcgatttgttaatcgggagtcggttatattttttagtaaacggttttttagttcgttaatttttattttgagatcggtgttgtatgagtttattatcggcggaatattaatattattcgcgatcgttagataattgcgtatttcgtgttgcgggcgtttaagcgttaaacgttggtttgtttttatcggtaatcgtagtcggtttagacggtattattatttagtcgcgtttcgtaatcggtattcgttagagtaaattatttattagttttggatttaatagttaattgatcgagcgtgattttaagcgcggggggaattggcggtaatatttattagttagtttagtaatggtaacggggggtatattaagtgcgtcgaagtgggtgatattcgatttggggaaaatcgttgaggtcggtattttttagaagtggtataaatggtcgtacgaataattttcgggatattttcgttttt

SEQ ID NO: 10886 - DNA, 1017 bp, Artificial Sequence
  chemically treated genomic DNA (Homo sapiens) CpG-island No: 10886
aaaaacgaaaatatcccgaaaattattcgtacgaccatttataccacttctaaaaaataccgacctcaacgattttccccaaatcgaatatcacccacttcgacgcacttaatataccccccgttaccattactaaactaactaataaatattaccgccaattccccccgcgcttaaaatcacgctcgatcaattaactattaaatccaaaactaataaataatttactctaacgaataccgattacgaaacgcgactaaataataataccgtctaaaccgactacgattaccgataaaaacaaaccaacgtttaacgcttaaacgcccgcaacacgaaatacgcaattatctaacgatcgcgaataatattaatattccgccgataataaactcatacaacaccgatctcaaaataaaaattaacgaactaaaaaaccgtttactaaaaaatataaccgactcccgattaacaaatcgaaacgtaattctataaaaaccaaaacgttaaacaactactataaaacacaccattcgcgccttaccgaaaccgaaatatcataaattcgatcgcgcctcgcaaaatacattctcgattcgccctaacaaactctaaaaatccccgaaccgactcgttcatcccttattacttaccgaaaaacttctttaccgcccatcgaaacgaacacatacaaacaaaataaccctaaaaaaaaacaatcaacgatatcctcctaacgaattcaaattctcttataataacgaaaaaaaactacgtatcacgttcgcgctaaactactataatcgtaaaccactacactaaacgatcactaccgacgacttcaacaataaaacaatacaaaacgtcatactaaaaacgataaaacgccgcttcgacaacgatcttccgtcgtctccaataaaataactaacgaataataattcatactaccgaactaataaaacacgccaattcgcccgaatattaaaacttaaaccgaaaaacacgacgatacga

SEQ ID NO: 10887 - DNA, 1017 bp, Artificial Sequence
  chemically treated genomic DNA (Homo sapiens) CpG-island No: 10887
aaagacgggaatatttcgaagattattcgtgcggttatttatattatttttgaagaatgtcggttttaacggttttttttaagtcgggtattatttatttcggcgtatttgatatgtttttcgttattattgttaaattaattggtgggtattatcgttaatttttttcgcgtttgagattacgttcggttagttaattgttgagtttaaaattgatgggtggtttgttttgacgggtgtcggttgcgaagcgcggttggatgataatgtcgtttggatcggttgcgattgtcgatgaaagtaggttagcgtttaacgtttaaacgttcgtagtacgggatgcgtagttatttggcggtcgcgggtggtattgatgtttcgtcggtaatgggtttatgtagtatcgattttaaagtggggattggcgggttggaaggtcgtttattgaaggatgtgatcgattttcgattggtaaatcgaagcgtgattttatggaagttagggcgttaaatagttgttgtggggtatattattcgcgttttgtcggggtcggaatattatgagttcgatcgcgtttcgtaggatgtattttcggttcgttttggtagattttagagattttcggatcggttcgtttattttttgttgtttatcgaaaaatttttttatcgtttatcgaaacgggtatatataggtagagtggttttgaaagaaagtaattagcgatgtttttttgacgggtttaagtttttttgtgataacggagagagattgcgtgttacgttcgcgttggattgttgtgatcgtgagttattgtattgggcggttattatcggcggttttaatagtgaaatagtataggacgttatgttgggagcggtggaacgtcgtttcggtaacgatttttcgtcgtttttagtggagtggttgacggataatggtttatgttatcgggttaatgaaatacgttagttcgttcggatgttgggatttgaatcgaagaatacggcggtgcgg

SEQ ID NO: 10888 - DNA, 1017 bp, Artificial Sequence
  chemically treated genomic DNA (Homo sapiens) CpG-island No: 10888
ccgcaccgccgtattcttcgattcaaatcccaacatccgaacgaactaacgtatttcattaacccgataacataaaccattatccgtcaaccactccactaaaaacgacgaaaaatcgttaccgaaacgacgttccaccgctcccaacataacgtcctatactatttcactattaaaaccgccgataataaccgcccaatacaataactcacgatcacaacaatccaacgcgaacgtaacacgcaatctctctccgttatcacaaaaaaacttaaacccgtcaaaaaaacatcgctaattactttctttcaaaaccactctacctatatatacccgtttcgataaacgataaaaaaatttttcgataaacaacaaaaaataaacgaaccgatccgaaaatctctaaaatctaccaaaacgaaccgaaaatacatcctacgaaacgcgatcgaactcataatattccgaccccgacaaaacgcgaataatataccccacaacaactatttaacgccctaacttccataaaatcacgcttcgatttaccaatcgaaaatcgatcacatccttcaataaacgaccttccaacccgccaatccccactttaaaatcgatactacataaacccattaccgacgaaacatcaataccacccgcgaccgccaaataactacgcatcccgtactacgaacgtttaaacgttaaacgctaacctactttcatcgacaatcgcaaccgatccaaacgacattatcatccaaccgcgcttcgcaaccgacacccgtcaaaacaaaccacccatcaattttaaactcaacaattaactaaccgaacgtaatctcaaacgcgaaaaaaattaacgataatacccaccaattaatttaacaataataacgaaaaacatatcaaatacgccgaaataaataatacccgacttaaaaaaaaccgttaaaaccgacattcttcaaaaataatataaataaccgcacgaataatcttcgaaatattcccgtcttt

SEQ ID NO: 10889 - DNA, 710 bp, Artificial Sequence
  chemically treated genomic DNA (Homo sapiens) CpG-island No: 10889
attggtcggataatagggttgtttagtggcgtatacgtgtatcgtattagtggcgtagcgggtatgtttttcgggtatgtcgggtcgtgtattagttatatcgtcgaaaggcggatatttttgtcggggtcgtattcggtatcgggtagtgtgtcggggaacgttgaggttgagagagggcgggaattgttagaagaagatagcgaagaggtgcgggtttttttcgtacgttgcgtttgcgtggttagtattagacggaattttcgttcggtatcgttcgttacgtcggtgattttttcggttaggttatcggcggttttacgtcggtacgttagcgttcgttcgaagcggttcgttatttcggtaagtattcggtacggcggtagcggcgttggtagtacgtttttagtattcggtattcgtttagattattttagtatttattacggtttttgtgcgttgttggtcgttaggtaaagatgcgggtttaatcggatattcggcggtagcgttttttatagtcgcgttagcgtatggtcgttcggttgtgttgtttttattatcgcggtatagttatattgatttattgcggttgtatatcgtttttttcggtagtagcggtttaaagtgaatgtttcgttcgtcgttgtttttgagtattagttcgttattacgtagttttaaagcggatatagaaggcgtttttgtta

SEQ ID NO: 10890 - DNA, 710 bp, Artificial Sequence
  chemically treated genomic DNA (Homo sapiens) CpG-island No: 10890
taacaaaaacgccttctatatccgctttaaaactacgtaataacgaactaatactcaaaaacaacgacgaacgaaacattcactttaaaccgctactaccgaaaaaaacgatatacaaccgcaataaatcaatataactataccgcgataataaaaacaacacaaccgaacgaccatacgctaacgcgactataaaaaacgctaccgccgaatatccgattaaacccgcatctttacctaacgaccaacaacgcacaaaaaccgtaataaatactaaaataatctaaacgaataccgaatactaaaaacgtactaccaacgccgctaccgccgtaccgaatacttaccgaaataacgaaccgcttcgaacgaacgctaacgtaccgacgtaaaaccgccgataacctaaccgaaaaaatcaccgacgtaacgaacgataccgaacgaaaattccgtctaatactaaccacgcaaacgcaacgtacgaaaaaaacccgcacctcttcgctatcttcttctaacaattcccgccctctctcaacctcaacgttccccgacacactacccgataccgaatacgaccccgacaaaaatatccgcctttcgacgatataactaatacacgacccgacatacccgaaaaacatacccgctacgccactaatacgatacacgtatacgccactaaacaaccctattatccgaccaat

SEQ ID NO: 10891 - DNA, 710 bp, Artificial Sequence
  chemically treated genomic DNA (Homo sapiens) CpG-island No: 10891
taatagaagcgttttttatattcgttttaaagttacgtgatgacgaattgatatttaagaataacggcgggcggagtatttattttgagtcgttgttgtcgggggaggcggtgtatagtcgtaatgagttaatgtggttgtgtcgcggtggtaaaggtagtatagtcggacggttatacgttggcgcggttgtggggggcgttgtcgtcggatattcggttaagttcgtatttttatttggcgattaatagcgtataggggtcgtggtggatattggggtggtttgagcgggtgtcgggtgttgaggacgtattgttagcgtcgttgtcgtcgtatcgggtgtttatcgggatggcggatcgtttcgggcggacgttgacgtatcggcgtgaggtcgtcggtgatttggtcggggaaattatcggcgtgacggacggtgtcgggcgggagtttcgtttggtgttgattacgtaggcgtagcgtgcggaagaggttcgtattttttcgttatttttttttgatagttttcgtttttttttagttttagcgtttttcgatatattgttcggtatcgaatacggtttcgataggggtattcgtttttcggcggtgtggttgatgtacgattcggtatattcggagagtatgttcgttgcgttattggtgcggtatacgtatacgttattgaataattttattgttcggttaat

SEQ ID NO: 10892 - DNA, 710 bp, Artificial Sequence
  chemically treated genomic DNA (Homo sapiens) CpG-island No: 10892
attaaccgaacaataaaattattcaataacgtatacgtataccgcaccaataacgcaacgaacatactctccgaatataccgaatcgtacatcaaccacaccgccgaaaaacgaatacccctatcgaaaccgtattcgataccgaacaatatatcgaaaaacgctaaaactaaaaaaaaacgaaaactatcaaaaaaaaataacgaaaaaatacgaacctcttccgcacgctacgcctacgtaatcaacaccaaacgaaactcccgcccgacaccgtccgtcacgccgataatttccccgaccaaatcaccgacgacctcacgccgatacgtcaacgtccgcccgaaacgatccgccatcccgataaacacccgatacgacgacaacgacgctaacaatacgtcctcaacacccgacacccgctcaaaccaccccaatatccaccacgacccctatacgctattaatcgccaaataaaaatacgaacttaaccgaatatccgacgacaacgccccccacaaccgcgccaacgtataaccgtccgactatactacctttaccaccgcgacacaaccacattaactcattacgactatacaccgcctcccccgacaacaacgactcaaaataaatactccgcccgccgttattcttaaatatcaattcgtcatcacgtaactttaaaacgaatataaaaaacgcttctatta

SEQ ID NO: 10893 - DNA, 1215 bp, Artificial Sequence
  chemically treated genomic DNA (Homo sapiens) CpG-island No: 10893
cgtgtcgcgtacgtttacgtttattcgcgttgttttagagtattattcgcgttgggttatttatcgattatgtttgaacgtaagaggcggagcgacgggtttttttttttatttgatggttgttggatcgttcgttttacgtattttttttgtttcggaggcgtcgatattcgttttttagtgtatcgggagtagaaattcggtagacgcgcgggtaattcgggttaagcgttattttttagtttttcgcgtttcggagtcgcgttttcgaggggttcgggatatttatttttgagcgcgtttatgagtgatttttcgtttttgatgagttttttgatgaatttgttggttttgtttagttttgtttcgtgcgatttgagcgtttttcggaagtgcggattatcgaggtagtagtcgttgaattcgagcgttgggagttttatggtgcgcgcggcgtttagtcggggggcgcgttttcgtcggggttcgggtcgttcgtcgtttagagtatttacgcggcgggatttcggtcggttttttcgacggtcgtcggttttataggtgtggcgttggtttatttcgcgcgcggtgttcgtcggcgcgtaagattttcgaatcgagttcggattcggtcgaggtgttgttgtttcgggcgcgggtaacggagcggatcgcgagtaggaaacgtagcgcggattcgtagcggcgtcgggaagcgagcgagcgggcgagcgagtgtagacgtcgttttttcgtttttttcgttagttagttttcggtagtttcgagcgtttttttatagtagtttcggtcgtttcgtcggtgtttgggtcgttcgaatttgttagcgatgatttaattttcgtcgggttaattagcgtatttttttttgttcgatttttaggtcgttcgaggacgttcggttttttcgcggttttgatttaattaaaggggtttggaggtagggtttgcggttgggggcgtggttttcgttaacgtttaggttcgtagcgtaaatttcgtttttttttgtttttttagcgttgtagatttcgaaatttaggggtgagcgttgttgtgtattcgttttcgttattttgttcgtttgttttagttcgaattcgagttacgtatggcgagtttgttggttttgggggtcgaagagtttcgatgtgttaagtatgaaaaatttggggattagggttgtagtttatt

SEQ ID NO: 10894 - DNA, 1215 bp, Artificial Sequence
  chemically treated genomic DNA (Homo sapiens) CpG-island No: 10894
aataaactacaaccctaatccccaaatttttcatacttaacacatcgaaactcttcgacccccaaaaccaacaaactcgccatacgtaactcgaattcgaactaaaacaaacgaacaaaataacgaaaacgaatacacaacaacgctcacccctaaatttcgaaatctacaacgctaaaaaaacaaaaaaaaacgaaatttacgctacgaacctaaacgttaacgaaaaccacgcccccaaccgcaaaccctacctccaaacccctttaattaaatcaaaaccgcgaaaaaaccgaacgtcctcgaacgacctaaaaatcgaacaaaaaaaaatacgctaattaacccgacgaaaattaaatcatcgctaacaaattcgaacgacccaaacaccgacgaaacgaccgaaactactataaaaaaacgctcgaaactaccgaaaactaactaacgaaaaaaacgaaaaaacgacgtctacactcgctcgcccgctcgctcgcttcccgacgccgctacgaatccgcgctacgtttcctactcgcgatccgctccgttacccgcgcccgaaacaacaacacctcgaccgaatccgaactcgattcgaaaatcttacgcgccgacgaacaccgcgcgcgaaataaaccaacgccacacctataaaaccgacgaccgtcgaaaaaaccgaccgaaatcccgccgcgtaaatactctaaacgacgaacgacccgaaccccgacgaaaacgcgccccccgactaaacgccgcgcgcaccataaaactcccaacgctcgaattcaacgactactacctcgataatccgcacttccgaaaaacgctcaaatcgcacgaaacaaaactaaacaaaaccaacaaattcatcaaaaaactcatcaaaaacgaaaaatcactcataaacgcgctcaaaaataaatatcccgaacccctcgaaaacgcgactccgaaacgcgaaaaactaaaaaataacgcttaacccgaattacccgcgcgtctaccgaatttctactcccgatacactaaaaaacgaatatcgacgcctccgaaacaaaaaaaatacgtaaaacgaacgatccaacaaccatcaaataaaaaaaaaaacccgtcgctccgcctcttacgttcaaacataatcgataaataacccaacgcgaataatactctaaaacaacgcgaataaacgtaaacgtacgcgacacg

SEQ ID NO: 10895 - DNA, 1215 bp, Artificial Sequence
  chemically treated genomic DNA (Homo sapiens) CpG-island No: 10895
ggtgaattgtagttttagtttttaggttttttatgtttggtatatcgaggtttttcggtttttaggattagtagattcgttatgcgtggttcggattcgggttggagtaggcgggtaaggtagcgggggcgggtgtatagtaacgtttatttttaggtttcggggtttgtaacgttgggagggtaagaggaggcggagtttgcgttgcggatttaggcgttggcgagggttacgtttttagtcgtagattttgtttttaggtttttttgattggattaagatcgcggaagggtcgggcgttttcgggcggtttgagggtcgggtaggggagggtgcgttgattggttcggcggggattaagttatcgttagtaggttcgagcggtttagatatcggcggggcggtcgaggttgttgtgagagggcgttcgaggttgtcgagagttagttagcgaaggaggcggggaggcggcgtttgtattcgttcgttcgttcgttcgtttttcggcgtcgttgcgggttcgcgttgcgttttttgttcgcgattcgtttcgttgttcgcgttcggaatagtagtatttcggtcgggttcgagttcggttcgggagttttgcgcgtcggcggatatcgcgcgcggagtgagttagcgttatatttgtggagtcggcggtcgtcgggggagtcggtcggggtttcgtcgcgtgagtgttttgggcggcgggcggttcgggtttcggcggaggcgcgtttttcggttgggcgtcgcgcgtattatggggtttttagcgttcgagtttagcgattgttgtttcgatagttcgtattttcgagagacgtttaagtcgtacgaagtagagttggataagattaataaatttattaaggagtttattaaggacgggaagttatttataagcgcgtttaagagtgagtgtttcgagtttttcgggaacgcggtttcgggacgcgaggaattgggaggtggcgtttagttcgggttgttcgcgcgtttgtcgggtttttgttttcggtatattgggggacgggtgtcgacgttttcgaggtaggaaggatacgtaaagcgggcgatttagtaattattagatgaagagagagattcgtcgtttcgttttttgcgtttaggtatggtcggtaggtgatttagcgcgggtggtgttttggggtagcgcgggtgggcgtgggcgtgcgcggtacg

SEQ ID NO: 10896 - DNA, 1215 bp, Artificial Sequence
  chemically treated genomic DNA (Homo sapiens) CpG-island No: 10896
cgtaccgcgcacgcccacgcccacccgcgctaccccaaaacaccacccgcgctaaatcacctaccgaccatacctaaacgcaaaaaacgaaacgacgaatctctctcttcatctaataattactaaatcgcccgctttacgtatccttcctacctcgaaaacgtcgacacccgtcccccaatataccgaaaacaaaaacccgacaaacgcgcgaacaacccgaactaaacgccacctcccaattcctcgcgtcccgaaaccgcgttcccgaaaaactcgaaacactcactcttaaacgcgcttataaataacttcccgtccttaataaactccttaataaatttattaatcttatccaactctacttcgtacgacttaaacgtctctcgaaaatacgaactatcgaaacaacaatcgctaaactcgaacgctaaaaaccccataatacgcgcgacgcccaaccgaaaaacgcgcctccgccgaaacccgaaccgcccgccgcccaaaacactcacgcgacgaaaccccgaccgactcccccgacgaccgccgactccacaaatataacgctaactcactccgcgcgcgatatccgccgacgcgcaaaactcccgaaccgaactcgaacccgaccgaaatactactattccgaacgcgaacaacgaaacgaatcgcgaacaaaaaacgcaacgcgaacccgcaacgacgccgaaaaacgaacgaacgaacgaacgaatacaaacgccgcctccccgcctccttcgctaactaactctcgacaacctcgaacgccctctcacaacaacctcgaccgccccgccgatatctaaaccgctcgaacctactaacgataacttaatccccgccgaaccaatcaacgcaccctcccctacccgaccctcaaaccgcccgaaaacgcccgacccttccgcgatcttaatccaatcaaaaaaacctaaaaacaaaatctacgactaaaaacgtaaccctcgccaacgcctaaatccgcaacgcaaactccgcctcctcttaccctcccaacgttacaaaccccgaaacctaaaaataaacgttactatacacccgcccccgctaccttacccgcctactccaacccgaatccgaaccacgcataacgaatctactaatcctaaaaaccgaaaaacctcgatataccaaacataaaaaacctaaaaactaaaactacaattcacc

SEQ ID NO: 10897 - DNA, 539 bp, Artificial Sequence
  chemically treated genomic DNA (Homo sapiens) CpG-island No: 10897
  unsure (322)
ggttggattgatcgtcgcgtttcgttattcggatttcgggttttcgttttttttcggggattaggttagagaagtcggcgggattcgagtcgatttcgttcgtagcgtagcggatagggagcgagcgaggagggagggagtagcggcgttcggatttatcgtgattcgcgggatgttttttttgttttggtaggatatggtggcggtggtggttgtagcggttggtttttttttttttttttttgtttcggttcgttcgcgttttttttagcgtatagcgtttcgagattaggtggagtgaatggtgcgttggtcgcgtcgncgttttcgttcgttttcgtttttttttcgggttttcgcggcggttgttagagataatagtaaattttttcggttttttttttattttcgtttttttacgtatatttttttttattcgcgtttacgttcgggttttggtttttttttttttttgttgcgttagttgggattttataagataagaatggttgatttgcgattttttttttttttttttt

SEQ ID NO: 10898 - DNA, 539 bp, Artificial Sequence
  chemically treated genomic DNA (Homo sapiens) CpG-island No: 10898
  unsure (218)
aaaaaaaaaaaaaaaaaaatcgcaaatcaaccattcttatcttataaaatcccaactaacgcaacaaaaaaaaaaaaaaaccaaaacccgaacgtaaacgcgaataaaaaaaaatatacgtaaaaaaacgaaaataaaaaaaaaaccgaaaaaatttactattatctctaacaaccgccgcgaaaacccgaaaaaaaaacgaaaacgaacgaaaacgncgacgcgaccaacgcaccattcactccacctaatctcgaaacgctatacgctaaaaaaaacgcgaacgaaccgaaacaaaaaaaaaaaaaaaaaaaccaaccgctacaaccaccaccgccaccatatcctaccaaaacaaaaaaaacatcccgcgaatcacgataaatccgaacgccgctactccctccctcctcgctcgctccctatccgctacgctacgaacgaaatcgactcgaatcccgccgacttctctaacctaatccccgaaaaaaaacgaaaacccgaaatccgaataacgaaacgcgacgatcaatccaacc

SEQ ID NO: 10899 - DNA, 539 bp, Artificial Sequence
  chemically treated genomic DNA (Homo sapiens) CpG-island No: 10899
  unsure (218)
aagagagaagagggaggagtcgtagattagttatttttgttttatggggttttagttggcgtagtaaaagaaaaaaaaaattaaaattcgggcgtgaacgcgggtgaaggagggtgtgcgtgggggggcgggggtgaaagggggatcggggagatttattattgtttttggtagtcgtcgcgggagttcgggaggggggcggaggcgggcggaggcgncggcgcggttagcgtattatttattttatttgatttcggggcgttgtgcgttgaggaaggcgcgggcgagtcggagtagaagaaggagggagggagttagtcgttgtagttattatcgttattatgttttattaaggtaagaagaatatttcgcggattacggtgagttcgggcgtcgttgtttttttttttttcgttcgttttttgttcgttgcgttgcgggcggggtcggttcggatttcgtcggtttttttggtttggttttcggggagggacggagattcggggttcgggtggcggagcgcggcggttagtttagtt

SEQ ID NO: 10900 - DNA, 539 bp, Artificial Sequence
  chemically treated genomic DNA (Homo sapiens) CpG-island No: 10900
  unsure (322)
aactaaactaaccgccgcgctccgccacccgaaccccgaatctccgtccctccccgaaaaccaaaccaaaaaaaccgacgaaatccgaaccgaccccgcccgcaacgcaacgaacaaaaaacgaacgaaaaaaaaaaaaacaacgacgcccgaactcaccgtaatccgcgaaatattcttcttaccttaataaaacataataacgataataactacaacgactaactccctccctccttcttctactccgactcgcccgcgccttcctcaacgcacaacgccccgaaatcaaataaaataaataatacgctaaccgcgccgncgcctccgcccgcctccgcccccctcccgaactcccgcgacgactaccaaaaacaataataaatctccccgatccccctttcacccccgcccccccacgcacaccctccttcacccgcgttcacgcccgaattttaattttttttttcttttactacgccaactaaaaccccataaaacaaaaataactaatctacgactcctccctcttctctctt

SEQ ID NO: 10901 - DNA, 756 bp, Artificial Sequence
  chemically treated genomic DNA (Homo sapiens) CpG-island No: 10901
tgcgacgcgatgggggaggggagggaggtcgtgggaagcggtcggggggcgcggggatgggaaggggtcgggcgggcggcgtggttattttaggttgcggattttttttttggggagcggcgttgtcggcgggcgggtttcgtaatttttcggttttttcgttcgttttttcgtttttttcgggcggcggcgggggtcggtacggtacggtttatagcggcggtttttttgcgtcgagtttcggatgttgtttttggggaggcggaggtagcggtagcggtagcggttcggttcgtacggttattatcgttcgcggtagtaggcgttcgcgggtcgagttttttagtagtcggcgtcggcgtcggcggcggcggcggcggcggttatggttttttgcgtttgtttttttcgttttcggcgttttgcggcggtcgcggttcgattttcgtattttgcgtttgcgcgcggtttagttagcgcggcgcgtttttttcgcgcgcgttcgcgtttatttataatcgcgttcgcggagtgtttttcgtatcgttttcggtgcgtgggcgggagatataagtttagttaagtttatatagttcggttcgggtggttatggagaggcgtattgtagagatatttggacgcgtattgtgataggcgttattttgatatacgtgtttttttatttttaaatattacgggtcgtaagcgtttatatttatatttatttgtagggattacgtgggagaatttgaaggg

SEQ ID NO: 10902 - DNA, 756 bp, Artificial Sequence
  chemically treated genomic DNA (Homo sapiens) CpG-island No: 10902
cccttcaaattctcccacgtaatccctacaaataaatataaatataaacgcttacgacccgtaatatttaaaaataaaaaaacacgtatatcaaaataacgcctatcacaatacgcgtccaaatatctctacaatacgcctctccataaccacccgaaccgaactatataaacttaactaaacttatatctcccgcccacgcaccgaaaacgatacgaaaaacactccgcgaacgcgattataaataaacgcgaacgcgcgcgaaaaaaacgcgccgcgctaactaaaccgcgcgcaaacgcaaaatacgaaaatcgaaccgcgaccgccgcaaaacgccgaaaacgaaaaaaacaaacgcaaaaaaccataaccgccgccgccgccgccgccgacgccgacgccgactactaaaaaactcgacccgcgaacgcctactaccgcgaacgataataaccgtacgaaccgaaccgctaccgctaccgctacctccgcctccccaaaaacaacatccgaaactcgacgcaaaaaaaccgccgctataaaccgtaccgtaccgacccccgccgccgcccgaaaaaaacgaaaaaacgaacgaaaaaaccgaaaaattacgaaacccgcccgccgacaacgccgctccccaaaaaaaaaatccgcaacctaaaataaccacgccgcccgcccgaccccttcccatccccgcgccccccgaccgcttcccacgacctccctcccctcccccatcgcgtcgca

SEQ ID NO: 10903 - DNA, 756 bp, Artificial Sequence
  chemically treated genomic DNA (Homo sapiens) CpG-island No: 10903
ttttttaaatttttttacgtggtttttgtaggtgagtgtgggtgtgagcgtttgcggttcgtggtgtttgggagtgagagagtacgtgtgttagaatggcgtttgttatagtgcgcgtttaggtgtttttgtagtacgtttttttatagttattcgagtcgggttgtatgggtttggttaggtttatgtttttcgtttacgtatcgaaggcggtgcggaaagtatttcgcgggcgcgattgtgagtgagcgcgggcgcgcgcgggaggggcgcgtcgcgttggttgggtcgcgcgtaggcgtagagtgcggaagtcgggtcgcggtcgtcgtagagcgtcgggggcgggaggagtaaacgtaggaggttatggtcgtcgtcgtcgtcgtcgtcgacgtcggcgtcggttgttaaggggttcggttcgcgagcgtttgttgtcgcggacgatggtgatcgtacgggtcgggtcgttgtcgttgtcgttgttttcgtttttttagaagtaatattcgaggttcggcgtagaagagtcgtcgttgtgagtcgtgtcgtatcggttttcgtcgtcgttcgaggagaacgggagggcgggcgagagagtcggggagttgcggagttcgttcgtcggtagcgtcgttttttagggagggagttcgtagtttgaggtgattacgtcgttcgttcggtttttttttattttcgcgtttttcggtcgttttttacggtttttttttttttttttatcgcgtcgta

SEQ ID NO: 10904 - DNA, 756 bp, Artificial Sequence
  chemically treated genomic DNA (Homo sapiens) CpG-island No: 10904
tacgacgcgataaaaaaaaaaaaaaaaaccgtaaaaaacgaccgaaaaacgcgaaaataaaaaaaaaccgaacgaacgacgtaatcacctcaaactacgaactccctccctaaaaaacgacgctaccgacgaacgaactccgcaactccccgactctctcgcccgccctcccgttctcctcgaacgacgacgaaaaccgatacgacacgactcacaacgacgactcttctacgccgaacctcgaatattacttctaaaaaaacgaaaacaacgacaacgacaacgacccgacccgtacgatcaccatcgtccgcgacaacaaacgctcgcgaaccgaaccccttaacaaccgacgccgacgtcgacgacgacgacgacgacgaccataacctcctacgtttactcctcccgcccccgacgctctacgacgaccgcgacccgacttccgcactctacgcctacgcgcgacccaaccaacgcgacgcgcccctcccgcgcgcgcccgcgctcactcacaatcgcgcccgcgaaatactttccgcaccgccttcgatacgtaaacgaaaaacataaacctaaccaaacccatacaacccgactcgaataactataaaaaaacgtactacaaaaacacctaaacgcgcactataacaaacgccattctaacacacgtactctctcactcccaaacaccacgaaccgcaaacgctcacacccacactcacctacaaaaaccacgtaaaaaaatttaaaaaa

SEQ ID NO: 10905 - DNA, 504 bp, Artificial Sequence
  chemically treated genomic DNA (Homo sapiens) CpG-island No: 10905
ggatagtttttatagttaattaaggatagagtcggtggttttttttcggaggagatcggaagttggtttcggttgtagaggggaaggcggttattagtgtaaagttagagttgaggtaagtgggcggtaacggtttggggtcgtcgtttgtgtgcgtttttttttttcggatttcgtagttttttttgtgttgggttgggaattggggaggtatggttgagttcggtttttaaaggcggtttttcgtttttttttttcgagttttttcgagagtgcggttttttcgagagcgcggaggtttcggggtggatagtttggaggagggggttttaagcgtggtagtttcggggtttttttcgtgttgggacgtcgagtcggagtggaggttgggagatttggcgtttagttttcgcgtcgttgtttttttaagttgtgtggttttgggcgagttatttgtttttttcggttttttgtaatatgagagtagttttttttgtttttttt

SEQ ID NO: 10906 - DNA, 504 bp, Artificial Sequence
  chemically treated genomic DNA (Homo sapiens) CpG-island No: 10906
aaaaaaaacaaaaaaaactactctcatattacaaaaaaccgaaaaaaacaaataactcgcccaaaaccacacaacttaaaaaaacaacgacgcgaaaactaaacgccaaatctcccaacctccactccgactcgacgtcccaacacgaaaaaaaccccgaaactaccacgcttaaaaccccctcctccaaactatccaccccgaaacctccgcgctctcgaaaaaaccgcactctcgaaaaaactcgaaaaaaaaaaacgaaaaaccgcctttaaaaaccgaactcaaccatacctccccaattcccaacccaacacaaaaaaaactacgaaatccgaaaaaaaaaaacgcacacaaacgacgaccccaaaccgttaccgcccacttacctcaactctaactttacactaataaccgccttcccctctacaaccgaaaccaacttccgatctcctccgaaaaaaaaccaccgactctatccttaattaactataaaaactatcc

SEQ ID NO: 10907 - DNA, 504 bp, Artificial Sequence
  chemically treated genomic DNA (Homo sapiens) CpG-island No: 10907
aggaagggtagggagggttatttttatgttataaagagtcggagagggtaaatgattcgtttaaggttatatagtttagaaaaatagcggcgcggggattagacgttaggttttttaatttttatttcggttcggcgttttaatacggaggaagtttcgagattgttacgtttagagtttttttttttaggttgtttatttcgaggttttcgcgttttcggagagatcgtattttcggagagattcgggagagaaagacgaaagatcgtttttggaggtcgaatttagttatgtttttttagtttttagtttagtatagaggaagttgcggggttcggaagaaaaaaacgtatataggcggcggttttaaatcgttgtcgtttatttattttagttttggttttatattggtagtcgtttttttttttgtagtcgaaattaattttcggtttttttcgggaagaagttatcgattttgtttttgattggttgtaagagttgttt

SEQ ID NO: 10908 - DNA, 504 bp, Artificial Sequence
  chemically treated genomic DNA (Homo sapiens) CpG-island No: 10908
aaacaactcttacaaccaatcaaaaacaaaatcgataacttcttcccgaaaaaaaccgaaaattaatttcgactacaaaaaaaaaaacgactaccaatataaaaccaaaactaaaataaataaacgacaacgatttaaaaccgccgcctatatacgtttttttcttccgaaccccgcaacttcctctatactaaactaaaaactaaaaaaacataactaaattcgacctccaaaaacgatctttcgtctttctctcccgaatctctccgaaaatacgatctctccgaaaacgcgaaaacctcgaaataaacaacctaaaaaaaaaaactctaaacgtaacaatctcgaaacttcctccgtattaaaacgccgaaccgaaataaaaattaaaaaacctaacgtctaatccccgcgccgctatttttctaaactatataaccttaaacgaatcatttaccctctccgactctttataacataaaaataaccctccctacccttcct

SEQ ID NO: 10909 - DNA, 549 bp, Artificial Sequence
  chemically treated genomic DNA (Homo sapiens) CpG-island No: 10909
ttttttacgtattatttttattgttatgtcgataaatttcgggagtaaagggggtacgatttttttcgcgtttttgcgggttgaaggcgggtattaaagtatgtagttttaagttttttttgtagaagtcgcgttttttattcggttcggggtagagggggcgcgagagagtaagtgggcgggcgttttatttttcgtattttttttaggttttggcgtatagggtgggagcgttgcgttgcgtcgcgtgcgtatcgcggttcgtttgtcgtttgttttttgttttagttgggttatttttcgggttgtcggtggagggttaagaggcgttaacgttacgttgtttcggttttttagcgggttttgtttttttttttaaggcggcggcggttgagggcggagttttttaaatggtttggttagatgcggtaggtttgttgtttacgttgtcgtcgtcgttattggagaagggtcggtgtagtagttatagcgaagtagtagtagtagtagcgagaggagtagtagtagtagtagtagtagtacgagagt

SEQ ID NO: 10910 - DNA, 549 bp, Artificial Sequence
  chemically treated genomic DNA (Homo sapiens) CpG-island No: 10910
actctcgtactactactactactactactactcctctcgctactactactactacttcgctataactactacaccgacccttctccaataacgacgacgacaacgtaaacaacaaacctaccgcatctaaccaaaccatttaaaaaactccgccctcaaccgccgccgccttaaaaaaaaaaacaaaacccgctaaaaaaccgaaacaacgtaacgttaacgcctcttaaccctccaccgacaacccgaaaaataacccaactaaaacaaaaaacaaacgacaaacgaaccgcgatacgcacgcgacgcaacgcaacgctcccaccctatacgccaaaacctaaaaaaaatacgaaaaataaaacgcccgcccacttactctctcgcgccccctctaccccgaaccgaataaaaaacgcgacttctacaaaaaaaacttaaaactacatactttaatacccgccttcaacccgcaaaaacgcgaaaaaaatcgtaccccctttactcccgaaatttatcgacataacaataaaaataatacgtaaaaaa

SEQ ID NO: 10911 - DNA, 549 bp, Artificial Sequence
  chemically treated genomic DNA (Homo sapiens) CpG-island No: 10911
gttttcgtgttgttgttgttgttgttgttgtttttttcgttgttgttgttgttgtttcgttgtagttgttgtatcgatttttttttagtggcggcggcggtagcgtgagtagtaaatttgtcgtatttggttaggttatttggggggtttcgtttttagtcgtcgtcgttttgggaggggaaatagagttcgttggaaaatcgaaatagcgtaacgttagcgttttttagttttttatcggtagttcggggagtggtttagttagggtagggggtaggcggtaagcgggtcgcgatgcgtacgcggcgtagcgtagcgtttttattttgtgcgttaggatttggaggaggtgcggaggatgggacgttcgtttatttgttttttcgcgttttttttgtttcggatcgagtagggagcgcggtttttgtaggggaagtttgggattgtatgttttagtgttcgtttttagttcgtaggggcgcgggaggaatcgtgttttttttgttttcgggatttatcggtatgatagtgggggtggtgcgtgagaga

SEQ ID NO: 10912 - DNA, 549 bp, Artificial Sequence
  chemically treated genomic DNA (Homo sapiens) CpG-island No: 10912
tctctcacgcaccacccccactatcataccgataaatcccgaaaacaaaaaaaacacgattcctcccgcgcccctacgaactaaaaacgaacactaaaacatacaatcccaaacttcccctacaaaaaccgcgctccctactcgatccgaaacaaaaaaaacgcgaaaaaacaaataaacgaacgtcccatcctccgcacctcctccaaatcctaacgcacaaaataaaaacgctacgctacgccgcgtacgcatcgcgacccgcttaccgcctaccccctaccctaactaaaccactccccgaactaccgataaaaaactaaaaaacgctaacgttacgctatttcgattttccaacgaactctatttcccctcccaaaacgacgacgactaaaaacgaaaccccccaaataacctaaccaaatacgacaaatttactactcacgctaccgccgccgccactaaaaaaaaatcgatacaacaactacaacgaaacaacaacaacaacaacgaaaaaaacaacaacaacaacaacaacaacacgaaaac

SEQ ID NO: 10913 - DNA, 537 bp, Artificial Sequence
  chemically treated genomic DNA (Homo sapiens) CpG-island No: 10913
ggtcgtcgatcgtgagtttcgtagcgatttttattatcgtttgaacgtattttcgatttatttgtcgttattacgcgagcgttcggaagatatttcgttgttggcgaaagtttttatttttaaaattgttcgtcgtttggggcgtaatatcgatagtatttttgtcgagacgttgcgtattttgagtaatatggagtggtcgggtaacgtacgcgaattggaaaacgttattgagcgcgcggtattgttaatacgcggtaacgtgttgtagttgttattgttagatattgttttatcggaatttgaaacgtcgtttgtcgtaacggttgtcgttttggagggcgaagatgaatattagttgattgtgcgcgtgttgaaagaaattaacggcgtggttgtcgggtttaaaggcgttgcgtaacgtttggggttgaaacgtacgattttgttgttacggatgaagcggttgggaattgataaatcggtattgatttaattgtaaattgtcggatagatttgtttgttcggtttattatt

SEQ ID NO: 10914 - DNA, 537 bp, Artificial Sequence
  chemically treated genomic DNA (Homo sapiens) CpG-island No: 10914
aataataaaccgaacaaacaaatctatccgacaatttacaattaaatcaataccgatttatcaattcccaaccgcttcatccgtaacaacaaaatcgtacgtttcaaccccaaacgttacgcaacgcctttaaacccgacaaccacgccgttaatttctttcaacacgcgcacaatcaactaatattcatcttcgccctccaaaacgacaaccgttacgacaaacgacgtttcaaattccgataaaacaatatctaacaataacaactacaacacgttaccgcgtattaacaataccgcgcgctcaataacgttttccaattcgcgtacgttacccgaccactccatattactcaaaatacgcaacgtctcgacaaaaatactatcgatattacgccccaaacgacgaacaattttaaaaataaaaactttcgccaacaacgaaatatcttccgaacgctcgcgtaataacgacaaataaatcgaaaatacgttcaaacgataataaaaatcgctacgaaactcacgatcgacgacc

SEQ ID NO: 10915 - DNA, 537 bp, Artificial Sequence
  chemically treated genomic DNA (Homo sapiens) CpG-island No: 10915
aatagtaggtcggataggtagatttgttcggtaatttgtagttaaattaatgtcgatttattaatttttagtcgttttattcgtgatagtagggtcgtgcgttttagttttagacgttgcgtagcgtttttaggttcggtaattacgtcgttggttttttttagtacgcgtataattaattgatatttattttcgttttttagggcgataatcgttgcggtaggcggcgttttaggtttcggtaaaataatatttggtaatgatagttgtagtacgttatcgcgtgttagtaatatcgcgcgtttaatgacgttttttagttcgcgtacgttattcggttattttatgttgtttaaggtgcgtagcgtttcggtaggaatgttgtcgatattgcgttttagacgacgggtaattttgaaggtaaaggttttcgttagtagcggaatatttttcggacgttcgcgtagtggcggtaggtgaatcgggaatacgtttaggcggtaatagagatcgttacggaatttacggtcggcgatt

SEQ ID NO: 10916 - DNA, 537 bp, Artificial Sequence
  chemically treated genomic DNA (Homo sapiens) CpG-island No: 10916
aatcgccgaccgtaaattccgtaacgatctctattaccgcctaaacgtattcccgattcacctaccgccactacgcgaacgtccgaaaaatattccgctactaacgaaaacctttaccttcaaaattacccgtcgtctaaaacgcaatatcgacaacattcctaccgaaacgctacgcaccttaaacaacataaaataaccgaataacgtacgcgaactaaaaaacgtcattaaacgcgcgatattactaacacgcgataacgtactacaactatcattaccaaatattattttaccgaaacctaaaacgccgcctaccgcaacgattatcgccctaaaaaacgaaaataaatatcaattaattatacgcgtactaaaaaaaaccaacgacgtaattaccgaacctaaaaacgctacgcaacgtctaaaactaaaacgcacgaccctactatcacgaataaaacgactaaaaattaataaatcgacattaatttaactacaaattaccgaacaaatctacctatccgacctactatt

SEQ ID NO: 10917 - DNA, 634 bp, Artificial Sequence
  chemically treated genomic DNA (Homo sapiens) CpG-island No: 10917
taggcgtcgaggtcgcgtagaatttcggagtttttgcgtttttgcgtttcgttcgcggttgcgaggttcggtgttcgtagaggtttcggcggaaacggttttatttcgggcgggttttcgttttcggttcgttttcgttcgtttcgcgttatgtatggcgtttttttttcgagttttataaggcgttttttttcggttttaggtttatataaggcgtttttttttcggcgcggttggttggcggttcgcgggttgggagttcggttcgttgggttcgtttaatttcggagttcgtagttagcggatttgttgttaaggagggggcggtagcggcgggagggacgggaacgcggggtttggttcggcgcgggaggcgcgggacgggtcgatttgggggtttcgttggttttcgttggtttcgtattttgtttcgttttttttttttagttcggagtatagtacgttttgtcggaggttttttagcggttttagttcgggatttttagttatacgggttttcgagtttcgtcggtcgtttttttttgagagttgataagtgggttttttttgatattttttttttttttcgtttgcgtttttcgtatttttttgtttttagtcgagttgttttttt

SEQ ID NO: 10918 - DNA, 634 bp, Artificial Sequence
  chemically treated genomic DNA (Homo sapiens) CpG-island No: 10918
aaaaaaacaactcgactaaaaacaaaaaaatacgaaaaacgcaaacgaaaaaaaaaaaaaatatcaaaaaaaacccacttatcaactctcaaaaaaaaacgaccgacgaaactcgaaaacccgtataactaaaaatcccgaactaaaaccgctaaaaaacctccgacaaaacgtactatactccgaactaaaaaaaaaaaacgaaacaaaatacgaaaccaacgaaaaccaacgaaacccccaaatcgacccgtcccgcgcctcccgcgccgaaccaaaccccgcgttcccgtccctcccgccgctaccgccccctccttaacaacaaatccgctaactacgaactccgaaattaaacgaacccaacgaaccgaactcccaacccgcgaaccgccaaccaaccgcgccgaaaaaaaaacgccttatataaacctaaaaccgaaaaaaaacgccttataaaactcgaaaaaaaaacgccatacataacgcgaaacgaacgaaaacgaaccgaaaacgaaaacccgcccgaaataaaaccgtttccgccgaaacctctacgaacaccgaacctcgcaaccgcgaacgaaacgcaaaaacgcaaaaactccgaaattctacgcgacctcgacgccta

SEQ ID NO: 10919 - DNA, 634 bp, Artificial Sequence
  chemically treated genomic DNA (Homo sapiens) CpG-island No: 10919
gagggggtagttcggttgaagatagggaggtacgagaagcgtaagcggggaggaagagagatgttagggaagatttatttgttaatttttaggggagagcggtcggcgaggttcggaggttcgtgtggttggaggtttcgggttggggtcgttgaaagattttcggtagggcgtgttgtgtttcgggttaggggagaaaagcgaggtaaaatacgaaattagcggggattagcgggatttttaagtcggttcgtttcgcgtttttcgcgtcgggttaggtttcgcgttttcgtttttttcgtcgttgtcgttttttttttggtagtaggttcgttggttgcgggtttcgaggttgggcgggtttagcggatcgggtttttagttcgcgggtcgttagttagtcgcgtcgggaaggaagcgttttgtatgggtttggggtcgggaggaagcgttttgtagggttcggggaggaagcgttatatatggcgcggggcggacgggggcgggtcgggggcgggagttcgttcgggatggagtcgttttcgtcggagtttttgcgggtatcgagtttcgtagtcgcgggcggggcgtaggggcgtaggggtttcggggttttacgcggtttcgacgtttg

SEQ ID NO: 10920 - DNA, 634 bp, Artificial Sequence
  chemically treated genomic DNA (Homo sapiens) CpG-island No: 10920
caaacgtcgaaaccgcgtaaaaccccgaaacccctacgcccctacgccccgcccgcgactacgaaactcgatacccgcaaaaactccgacgaaaacgactccatcccgaacgaactcccgcccccgacccgcccccgtccgccccgcgccatatataacgcttcctccccgaaccctacaaaacgcttcctcccgaccccaaacccatacaaaacgcttccttcccgacgcgactaactaacgacccgcgaactaaaaacccgatccgctaaacccgcccaacctcgaaacccgcaaccaacgaacctactaccaaaaaaaaaacgacaacgacgaaaaaaacgaaaacgcgaaacctaacccgacgcgaaaaacgcgaaacgaaccgacttaaaaatcccgctaatccccgctaatttcgtattttacctcgcttttctcccctaacccgaaacacaacacgccctaccgaaaatctttcaacgaccccaacccgaaacctccaaccacacgaacctccgaacctcgccgaccgctctcccctaaaaattaacaaataaatcttccctaacatctctcttcctccccgcttacgcttctcgtacctccctatcttcaaccgaactaccccctc

SEQ ID NO: 10921 - DNA, 790 bp, Artificial Sequence
  chemically treated genomic DNA (Homo sapiens) CpG-island No: 10921
agcgcgattgggcgttcgttttcggcgcggatgtcgttttgagtgtcgataattagtatttttttgtcggtgagtttgttggcgtgttagtttatttcggcgttttgcgttatgtcgaataggttgtcgttgggagattttattagtatttgcggggttagcggtagagcgttttgcggtttcgtcgcgtgggtgattatcgtataaaacgcgtcgttttgcggggtgaaaatttttttaatggttatcgttatcgttcggtttagtaaagtttgagttgttgtagtagggtttttagttgcgttttgcgcggttcgtttagcggcgaggcgggcggtagtacgtgcgtggagataggacgatcgtagagtacgatcgtttttttaattacgtttataaacggcgtatttagttgatatatttgcggaatttgtagtaaggtttgatgatattcggtcgttttcgttacgttttcgtcgcgttaggtttttagaagatttatcgatatttgcggggtaaagttgtcgttcgtcgatatcgtttcgtcgtcgtcgagtagttaggtattgaatagatgatcgtcgtagtcgtagagtacggtgaagtgcggatgggtatttttgacggtatggattatgttgcgtacgtgggcgacggagtcgatggtgtttttgatgtcgataatattgttgcggcgagtcggcgatgggtttcgttttgtgttttaaagatgcgtgagttatagcgttcggtttgtttttattttttatatatgttagtgatttatttt

SEQ ID NO: 10922 - DNA, 790 bp, Artificial Sequence
  chemically treated genomic DNA (Homo sapiens) CpG-island No: 10922
aaaataaatcactaacatatataaaaaataaaaacaaaccgaacgctataactcacgcatctttaaaacacaaaacgaaacccatcgccgactcgccgcaacaatattatcgacatcaaaaacaccatcgactccgtcgcccacgtacgcaacataatccataccgtcaaaaatacccatccgcacttcaccgtactctacgactacgacgatcatctattcaatacctaactactcgacgacgacgaaacgatatcgacgaacgacaactttaccccgcaaatatcgataaatcttctaaaaacctaacgcgacgaaaacgtaacgaaaacgaccgaatatcatcaaaccttactacaaattccgcaaatatatcaactaaatacgccgtttataaacgtaattaaaaaaacgatcgtactctacgatcgtcctatctccacgcacgtactaccgcccgcctcgccgctaaacgaaccgcgcaaaacgcaactaaaaaccctactacaacaactcaaactttactaaaccgaacgataacgataaccattaaaaaaattttcaccccgcaaaacgacgcgttttatacgataatcacccacgcgacgaaaccgcaaaacgctctaccgctaaccccgcaaatactaataaaatctcccaacgacaacctattcgacataacgcaaaacgccgaaataaactaacacgccaacaaactcaccgacaaaaaaatactaattatcgacactcaaaacgacatccgcgccgaaaacgaacgcccaatcgcgct

SEQ ID NO: 10923 - DNA, 790 bp, Artificial Sequence
  chemically treated genomic DNA (Homo sapiens) CpG-island No: 10923
aaaataagttattagtatatataaaagatgaaaataggtcgggcgttgtggtttacgtatttttagagtataggacggagtttatcgtcgattcgtcgtagtaatattatcggtattaaagatattatcgatttcgtcgtttacgtgcgtagtatgatttatatcgttaaaggtgtttattcgtattttatcgtgttttgcggttacgacgattatttgtttaatatttggttgttcggcggcgacggggcgatatcggcgagcggtaattttgtttcgtaggtgtcggtgaattttttgaaagtttggcgcgacggggacgtggcgaaagcggtcgggtattattagattttgttgtaaatttcgtagatgtattagttggatacgtcgtttgtgaacgtgattaaagaggcgatcgtgttttgcggtcgttttgtttttacgtacgtgttgtcgttcgtttcgtcgttggacgagtcgcgtaaggcgtagttgaaaattttgttgtaatagtttaagttttgttgagtcggacgataacgatgattattgagaaaatttttatttcgtaggacgacgcgttttatgcggtgattatttacgcggcggggtcgtagggcgttttgtcgttgatttcgtagatgttgatggaattttttagcggtaatttgttcggtatgacgtagaacgtcgggatgggttggtacgttaataagtttatcggtaaagaggtgttgattatcggtatttagggcggtattcgcgtcggagacggacgtttaatcgcgtt

SEQ ID NO: 10924 - DNA, 790 bp, Artificial Sequence
  chemically treated genomic DNA (Homo sapiens) CpG-island No: 10924
aacgcgattaaacgtccgtctccgacgcgaataccgccctaaataccgataatcaacacctctttaccgataaacttattaacgtaccaacccatcccgacgttctacgtcataccgaacaaattaccgctaaaaaattccatcaacatctacgaaatcaacgacaaaacgccctacgaccccgccgcgtaaataatcaccgcataaaacgcgtcgtcctacgaaataaaaattttctcaataatcatcgttatcgtccgactcaacaaaacttaaactattacaacaaaattttcaactacgccttacgcgactcgtccaacgacgaaacgaacgacaacacgtacgtaaaaacaaaacgaccgcaaaacacgatcgcctctttaatcacgttcacaaacgacgtatccaactaatacatctacgaaatttacaacaaaatctaataatacccgaccgctttcgccacgtccccgtcgcgccaaactttcaaaaaattcaccgacacctacgaaacaaaattaccgctcgccgatatcgccccgtcgccgccgaacaaccaaatattaaacaaataatcgtcgtaaccgcaaaacacgataaaatacgaataaacacctttaacgatataaatcatactacgcacgtaaacgacgaaatcgataatatctttaataccgataatattactacgacgaatcgacgataaactccgtcctatactctaaaaatacgtaaaccacaacgcccgacctattttcatcttttatatatactaataacttatttt

SEQ ID NO: 10925 - DNA, 597 bp, Artificial Sequence
  chemically treated genomic DNA (Homo sapiens) CpG-island No: 10925
tcgttagcgttttagacgtattgttggtcgtattgttgagttgtattattttttttttcgtcgtatttgtatttttaagcgttacggcggatgtaatattttttgttcgtttagttgttgtttcggcgcgcgttgtcgcggatttcgtcgtatttttgttttgagttgtcgtcgtcgtattgttagtagtttttgtcgttttcgtggatgtcgtcgtggcgttgtttttcgttgttgacgtttgtttggtcgttttattttttgaagtagacgtcgatgatgtcgatgacgtcgtcgaattggttgacgatgcggtagtcgtttttgaggattttgcgtttgttttcgatattttacgacgatttttattgtgttttaaagatgtcgtttatttttaggttagcggtttcgacgatcgtttttacgttatttagcgattgacgtgtttgtgtagcgacgtttgtcggtatttcgttcgttttcggatttatcgggatttgatcggaggtgatgattatattgtttagattaacgttttgtacgtaaggatcgatagttgtcggtgtatttttcgtcgcgatagttttgtttatgatt

SEQ ID NO: 10926 - DNA, 597 bp, Artificial Sequence
  chemically treated genomic DNA (Homo sapiens) CpG-island No: 10926
aatcataaacaaaactatcgcgacgaaaaatacaccgacaactatcgatccttacgtacaaaacgttaatctaaacaatataatcatcacctccgatcaaatcccgataaatccgaaaacgaacgaaataccgacaaacgtcgctacacaaacacgtcaatcgctaaataacgtaaaaacgatcgtcgaaaccgctaacctaaaaataaacgacatctttaaaacacaataaaaatcgtcgtaaaatatcgaaaacaaacgcaaaatcctcaaaaacgactaccgcatcgtcaaccaattcgacgacgtcatcgacatcatcgacgtctacttcaaaaaataaaacgaccaaacaaacgtcaacaacgaaaaacaacgccacgacgacatccacgaaaacgacaaaaactactaacaatacgacgacgacaactcaaaacaaaaatacgacgaaatccgcgacaacgcgcgccgaaacaacaactaaacgaacaaaaaatattacatccgccgtaacgcttaaaaatacaaatacgacgaaaaaaaaaataatacaactcaacaatacgaccaacaatacgtctaaaacgctaacga

SEQ ID NO: 10927 - DNA, 597 bp, Artificial Sequence
  chemically treated genomic DNA (Homo sapiens) CpG-island No: 10927
aattatgagtaaaattatcgcgacggaaaatgtatcggtagttatcggtttttacgtatagggcgttgatttgggtaatatgattattattttcggttagatttcggtaaattcgaaaacgggcgaagtatcggtagacgtcgttgtataggtacgttagtcgttggataacgtaaaagcgatcgtcgaagtcgttggtttgaaagtgggcgatatttttagagtatagtgggagtcgtcgtaaggtgtcggaaataagcgtagaatttttaaaaacggttgtcgtatcgttagttagttcggcggcgttatcggtattatcggcgtttgttttaaaagatgaggcgattagataagcgttagtagcgaagagtagcgttacgacggtatttacgaaggcgatagaggttgttggtagtgcgacggcggtagtttagagtaaaagtacggcggaattcgcggtaacgcgcgtcgagatagtagttaaacgggtagaggatattgtattcgtcgtggcgtttgaggatgtaagtacgacgaaaaaggggatagtatagtttagtagtgcgattaatagtacgtttgaaacgttggcgg

SEQ ID NO: 10928 - DNA, 597 bp, Artificial Sequence
  chemically treated genomic DNA (Homo sapiens) CpG-island No: 10928
ccgccaacgtttcaaacgtactattaatcgcactactaaactatactatcccctttttcgtcgtacttacatcctcaaacgccacgacgaatacaatatcctctacccgtttaactactatctcgacgcgcgttaccgcgaattccgccgtacttttactctaaactaccgccgtcgcactaccaacaacctctatcgccttcgtaaataccgtcgtaacgctactcttcgctactaacgcttatctaatcgcctcatcttttaaaacaaacgccgataataccgataacgccgccgaactaactaacgatacgacaaccgtttttaaaaattctacgcttatttccgacaccttacgacgactcccactatactctaaaaatatcgcccactttcaaaccaacgacttcgacgatcgcttttacgttatccaacgactaacgtacctatacaacgacgtctaccgatacttcgcccgttttcgaatttaccgaaatctaaccgaaaataataatcatattacccaaatcaacgccctatacgtaaaaaccgataactaccgatacattttccgtcgcgataattttactcataatt

SEQ ID NO: 10929 - DNA, 569 bp, Artificial Sequence
  chemically treated genomic DNA (Homo sapiens) CpG-island No: 10929
tttcggcgtttattttcgatagcgtaaaacgggtttagattttattgtcgttttttttttttagttgtagttttcgatttatttttttaatacgcgttttatcgtttttacggttgtgacgaatggatttaggatgcgtaggacgtattttgaatattgtagttgcgcgtttagtcggtgacgtcgtttgcgttattttaattcggtgttatgacgacgtttagtttattgagatttttttgttcggttagcgatattacgttttttgttatatttatggttgaaatatagcgggtggtggtaggcgagggaatgttattgttgttatcgtcgtaggtatttaacggtaaagttttagtatcgattgttagatttgtttgttgggtttttttgttgtcgtcgtaagtttggttattagttgttttagcgtattgtgtttcgtcggtaataaaggacggtcggtcgtttcggttgttgtggttgcggaataattattttttttttttgtaatagggtgagaatggtttttaattgtttcggtgagagttgatttagcggcgtttgattaa

SEQ ID NO: 10930 - DNA, 569 bp, Artificial Sequence
  chemically treated genomic DNA (Homo sapiens) CpG-island No: 10930
ttaatcaaacgccgctaaatcaactctcaccgaaacaattaaaaaccattctcaccctattacaaaaaaaaaaaataattattccgcaaccacaacaaccgaaacgaccgaccgtcctttattaccgacgaaacacaatacgctaaaacaactaataaccaaacttacgacgacaacaaaaaaacccaacaaacaaatctaacaatcgatactaaaactttaccgttaaatacctacgacgataacaacaataacattccctcgcctaccaccacccgctatatttcaaccataaatataacaaaaaacgtaatatcgctaaccgaacaaaaaaatctcaataaactaaacgtcgtcataacaccgaattaaaataacgcaaacgacgtcaccgactaaacgcgcaactacaatattcaaaatacgtcctacgcatcctaaatccattcgtcacaaccgtaaaaacgataaaacgcgtattaaaaaaataaatcgaaaactacaactaaaaaaaaaaaacgacaataaaatctaaacccgttttacgctatcgaaaataaacgccgaaa

SEQ ID NO: 10931 - DNA, 569 bp, Artificial Sequence
  chemically treated genomic DNA (Homo sapiens) CpG-island No: 10931
ttggttagacgtcgttgaattagtttttatcggagtaattaaaaattatttttattttgttgtaggaagggaagatggttatttcgtaattatagtagtcgaggcgatcgatcgttttttattatcggcggagtataatgcgttaaaatagttggtgattaaatttgcggcggtaataggggaatttagtaaatagatttggtaatcgatgttggaattttgtcgttagatatttgcgacggtggtagtaatggtattttttcgtttattattattcgttatgttttagttatgagtgtggtaaagggcgtggtgtcgttgatcgggtaagaaagttttaatgggttaagcgtcgttatgatatcgggttgggataacgtaaacggcgttatcggttggacgcgtaattgtaatatttaaagtgcgttttgcgtattttgaatttattcgttataatcgtgaaggcggtaaagcgcgtgttgaggggatgagtcgggagttgtagttggagaaaaaagacggtagtaaaatttggattcgttttgcgttatcgaaagtgagcgtcgagg

SEQ ID NO: 10932 - DNA, 569 bp, Artificial Sequence
  chemically treated genomic DNA (Homo sapiens) CpG-island No: 10932
cctcgacgctcactttcgataacgcaaaacgaatccaaattttactaccgtcttttttctccaactacaactcccgactcatcccctcaacacgcgctttaccgccttcacgattataacgaataaattcaaaatacgcaaaacgcactttaaatattacaattacgcgtccaaccgataacgccgtttacgttatcccaacccgatatcataacgacgcttaacccattaaaactttcttacccgatcaacgacaccacgccctttaccacactcataactaaaacataacgaataataataaacgaaaaaataccattactaccaccgtcgcaaatatctaacgacaaaattccaacatcgattaccaaatctatttactaaattcccctattaccgccgcaaatttaatcaccaactattttaacgcattatactccgccgataataaaaaacgatcgatcgcctcgactactataattacgaaataaccatcttcccttcctacaacaaaataaaaataatttttaattactccgataaaaactaattcaacgacgtctaaccaa

SEQ ID NO: 10933 - DNA, 622 bp, Artificial Sequence
  chemically treated genomic DNA (Homo sapiens) CpG-island No: 10933
agtcgcgcggattcggtaatcgtttttttcgcggtttaggggattttttaggtcgggacgtagtcgaagggaagtttttattcggaggcgtcgggaggagcgggcgaattttgatttagtcggggagttttgggagtcgcgttagtgcggaagcgtcgtcgggggaataggggaaatttgatttgatcggaaaagagcgatcgaaggggagattaatttgttcgtcggggttttcgttggtttcgtttgttcgtcggggcggggttatcgcgggggttttcgtcgttttgcggaagagaggaaagaggggaaggcgattttgcgcgcgttcggggacgcgggttttttcgtttcggtatatgggggttagagtttcgcgttcgcgaggttggagggaagttaagaggggttgagtgagagatacgcgaatagacgtatatagataggacgggagacgcgagtggcgcgcgggatataaaggcgtggaggtttcgaagttcggcgaggatagcgggcgttttcggtttttattattttttttgttcgcgttgtttaatttggtgttaaatcggatttatttgttttttttttatttttaggcggttcgtttttttattttagt

SEQ ID NO: 10934 - DNA, 622 bp, Artificial Sequence
  chemically treated genomic DNA (Homo sapiens) CpG-island No: 10934
actaaaataaaaaaacgaaccgcctaaaaataaaaaaaaaacaaataaatccgatttaacaccaaattaaacaacgcgaacaaaaaaaataataaaaaccgaaaacgcccgctatcctcgccgaacttcgaaacctccacgcctttatatcccgcgcgccactcgcgtctcccgtcctatctatatacgtctattcgcgtatctctcactcaacccctcttaacttccctccaacctcgcgaacgcgaaactctaacccccatataccgaaacgaaaaaacccgcgtccccgaacgcgcgcaaaatcgccttcccctctttcctctcttccgcaaaacgacgaaaacccccgcgataaccccgccccgacgaacaaacgaaaccaacgaaaaccccgacgaacaaattaatctccccttcgatcgctcttttccgatcaaatcaaatttcccctattcccccgacgacgcttccgcactaacgcgactcccaaaactccccgactaaatcaaaattcgcccgctcctcccgacgcctccgaataaaaacttcccttcgactacgtcccgacctaaaaaatcccctaaaccgcgaaaaaaacgattaccgaatccgcgcgact

SEQ ID NO: 10935 - DNA, 622 bp, Artificial Sequence
  chemically treated genomic DNA (Homo sapiens) CpG-island No: 10935
gttggggtggggaagcggatcgtttgggagtgaaggaggagtaggtgagttcgatttggtattagattaggtagcgcgagtagaggaggtggtgggagtcgagaacgttcgttgttttcgtcgggtttcggagtttttacgtttttgtgtttcgcgcgttattcgcgtttttcgttttgtttgtgtgcgtttgttcgcgtgttttttatttagttttttttagtttttttttagtttcgcgggcgcgaaattttggtttttatgtgtcggagcgagggggttcgcgttttcgggcgcgcgtagagtcgttttttttttttttttttttttcgtagagcggcgggagttttcgcggtaatttcgtttcggcgggtagacggagttagcgaggatttcggcggataaattagtttttttttcgatcgttttttttcgattaagttaggttttttttgttttttcgacggcgttttcgtattagcgcgatttttagggtttttcggttgggttagggttcgttcgtttttttcggcgttttcggataggggttttttttcggttgcgtttcggtttgaggagttttttggatcgcgggaggggcgattgtcgggttcgcgcggtt

SEQ ID NO: 10936 - DNA, 622 bp, Artificial Sequence
  chemically treated genomic DNA (Homo sapiens) CpG-island No: 10936
aaccgcgcgaacccgacaatcgcccctcccgcgatccaaaaaactcctcaaaccgaaacgcaaccgaaaaaaaacccctatccgaaaacgccgaaaaaaacgaacgaaccctaacccaaccgaaaaaccctaaaaatcgcgctaatacgaaaacgccgtcgaaaaaacaaaaaaaacctaacttaatcgaaaaaaaacgatcgaaaaaaaaactaatttatccgccgaaatcctcgctaactccgtctacccgccgaaacgaaattaccgcgaaaactcccgccgctctacgaaaaaaaaaaaaaaaaaaaaaacgactctacgcgcgcccgaaaacgcgaaccccctcgctccgacacataaaaaccaaaatttcgcgcccgcgaaactaaaaaaaaactaaaaaaaactaaataaaaaacacgcgaacaaacgcacacaaacaaaacgaaaaacgcgaataacgcgcgaaacacaaaaacgtaaaaactccgaaacccgacgaaaacaacgaacgttctcgactcccaccacctcctctactcgcgctacctaatctaataccaaatcgaactcacctactcctccttcactcccaaacgatccgcttccccaccccaac

SEQ ID NO: 10937 - DNA, 738 bp, Artificial Sequence
  chemically treated genomic DNA (Homo sapiens) CpG-island No: 10937
tcgggcgttttcgtaattggtagttgtattgcgttcgacgatatttcggcgtggtagttattttcgatggaggtattgtgattaggataggtgtttttagattttttttcggttgatggtggacggatggggcgtggtatgcgttcgaggtgggtaatcggaagtagtaggtgggtttttggataacgggttaggaacgcggaaaattttgatagttatttttgtatttcggattaaattcgattttgtcgcgtaggcgaaggaacggtttacggggtttatttcgtttcggtatttcggtgatttgcggatttcggaagttttcgtggtattcgggaatttttttggtaaatttttcgcgcggacgtaggtggtcgttcgttttaagggatttttttttgggtacgtttttgggtgggtcgatgaatttgtcgcggtatttcggtattttcgagttgggggcgtaggtcgtttcggaatcggatacgcgtaggttgtcgttttttttgatgggcgtatttttcgagtagttggtatatatacggaagttgtttttgtatttcggtatcgttacgaatttattttgaattttgatgttgtttatttggggaatggagtgcgttttttcggggaattgttgtacgaattggcgacggtattcggagggttttggtatttggttttgttgttcgtggtttatagtttgggtacgtatttgtagatggtatcgttgttgtt

SEQ ID NO: 10938 - DNA, 738 bp, Artificial Sequence
  chemically treated genomic DNA (Homo sapiens) CpG-island No: 10938
aacaacaacgataccatctacaaatacgtacccaaactataaaccacgaacaacaaaaccaaataccaaaaccctccgaataccgtcgccaattcgtacaacaattccccgaaaaaacgcactccattccccaaataaacaacatcaaaattcaaaataaattcgtaacgataccgaaatacaaaaacaacttccgtatatataccaactactcgaaaaatacgcccatcaaaaaaaacgacaacctacgcgtatccgattccgaaacgacctacgcccccaactcgaaaataccgaaataccgcgacaaattcatcgacccacccaaaaacgtacccaaaaaaaaatcccttaaaacgaacgaccacctacgtccgcgcgaaaaatttaccaaaaaaattcccgaataccacgaaaacttccgaaatccgcaaatcaccgaaataccgaaacgaaataaaccccgtaaaccgttccttcgcctacgcgacaaaatcgaatttaatccgaaatacaaaaataactatcaaaattttccgcgttcctaacccgttatccaaaaacccacctactacttccgattacccacctcgaacgcataccacgccccatccgtccaccatcaaccgaaaaaaaatctaaaaacacctatcctaatcacaatacctccatcgaaaataactaccacgccgaaatatcgtcgaacgcaatacaactaccaattacgaaaacgcccga

SEQ ID NO: 10939 - DNA, 738 bp, Artificial Sequence
  chemically treated genomic DNA (Homo sapiens) CpG-island No: 10939
agtagtagcgatgttatttgtagatgcgtgtttaggttgtggattacgaatagtagggttaggtgttagagtttttcgagtatcgtcgttagttcgtgtagtagtttttcgagaaggcgtattttattttttagatgagtagtattaagatttagggtgagttcgtggcggtgtcggaatatagggatagttttcgtatgtatgttaattattcgaagagtgcgtttattaagaagaacgataatttgcgcgtattcggtttcgaggcggtttgcgtttttagttcggaggtgtcggagtatcgcgataaatttatcgatttatttaagaacgtgtttaaagagaagttttttaagacggacgattatttgcgttcgcgcggggagtttattaaagagattttcgaatattacgagagttttcgagattcgtagattatcgaaatgtcggagcggggtaagtttcgtgagtcgttttttcgtttgcgcggtaagatcgagtttaattcggagtataggaataattattaggatttttcgcgtttttgattcgttgtttagaagtttatttgttgttttcggttgtttatttcgggcgtatgttacgttttattcgtttattattagtcggaagaggatttggaaatatttgttttggttatagtgtttttatcggaggtaattgttacgtcggagtatcgtcgagcgtagtataattattaattgcgggagcgttcga

SEQ ID NO: 10940 - DNA, 738 bp, Artificial Sequence
  chemically treated genomic DNA (Homo sapiens) CpG-island No: 10940
tcgaacgctcccgcaattaataattatactacgctcgacgatactccgacgtaacaattacctccgataaaaacactataaccaaaacaaatatttccaaatcctcttccgactaataataaacgaataaaacgtaacatacgcccgaaataaacaaccgaaaacaacaaataaacttctaaacaacgaatcaaaaacgcgaaaaatcctaataattattcctatactccgaattaaactcgatcttaccgcgcaaacgaaaaaacgactcacgaaacttaccccgctccgacatttcgataatctacgaatctcgaaaactctcgtaatattcgaaaatctctttaataaactccccgcgcgaacgcaaataatcgtccgtcttaaaaaacttctctttaaacacgttcttaaataaatcgataaatttatcgcgatactccgacacctccgaactaaaaacgcaaaccgcctcgaaaccgaatacgcgcaaattatcgttcttcttaataaacgcactcttcgaataattaacatacatacgaaaactatccctatattccgacaccgccacgaactcaccctaaatcttaatactactcatctaaaaaataaaatacgccttctcgaaaaactactacacgaactaacgacgatactcgaaaaactctaacacctaaccctactattcgtaatccacaacctaaacacgcatctacaaataacatcgctactact

SEQ ID NO: 10941 - DNA, 507 bp, Artificial Sequence
  chemically treated genomic DNA (Homo sapiens) CpG-island No: 10941
gatatttcgttttcgttattgttagaggtattatttttattttcggtttttagtacggtagtcgttaatttgaaatttagcgtcgcgtttttttcgttcgtatcgttgtcgttgtcgtcgtcgtcgttgttgtcgattttcgacgttggttcggtttttttaaagagttttacggtgcggatttttagatcgatttttttcggcggaggcggtttcgaggttttagttggggcggatcgcggagttatagagtttaggttttttttaaaggaggtgtcgtcgttttcgttattagttagtattgttcgtattcggagtcggagacggtgtcgatttattcgcggttatcgtcgtcgttgatttcgggaacgagaagagtagtaagaggaagaagcgttttttttttttcgttttagtagcgttattaattttttattgtttaatttgttgtttttcgttttttcgattcgttattggttgtaatattttggcggttgtagattattg

SEQ ID NO: 10942 - DNA, 507 bp, Artificial Sequence
  chemically treated genomic DNA (Homo sapiens) CpG-island No: 10942
caataatctacaaccgccaaaatattacaaccaataacgaatcgaaaaaacgaaaaacaacaaattaaacaataaaaaattaataacgctactaaaacgaaaaaaaaaaaacgcttcttcctcttactactcttctcgttcccgaaatcaacgacgacgataaccgcgaataaatcgacaccgtctccgactccgaatacgaacaatactaactaataacgaaaacgacgacacctcctttaaaaaaaacctaaactctataactccgcgatccgccccaactaaaacctcgaaaccgcctccgccgaaaaaaatcgatctaaaaatccgcaccgtaaaactctttaaaaaaaccgaaccaacgtcgaaaatcgacaacaacgacgacgacgacaacgacaacgatacgaacgaaaaaaacgcgacgctaaatttcaaattaacgactaccgtactaaaaaccgaaaataaaaataatacctctaacaataacgaaaacgaaatatc

SEQ ID NO: 10943 - DNA, 507 bp, Artificial Sequence
  chemically treated genomic DNA (Homo sapiens) CpG-island No: 10943
taatgatttgtagtcgttagggtattgtagttagtggcgagtcgagggggcgggaggtagtaggttaggtagtgagaagttagtggcgttgttgggacgggggaaaggagacgttttttttttttgttgtttttttcgttttcgagattagcggcggcggtgatcgcgagtgggtcggtatcgttttcggtttcgggtgcgaataatgttgattgatagcggaggcggcggtattttttttgaggaggatttggattttgtggtttcgcgattcgttttagttggggtttcggagtcgttttcgtcgggaggggtcggtttggggattcgtatcgtgaggttttttggggaggtcgggttagcgtcgggagtcggtagtagcggcggcggcggtagcggtagcggtacgggcggaggggacgcggcgttggattttaagttggcggttgtcgtgttgaggatcgggggtggaggtggtgtttttggtagtgacgaggacgaagtgtt

SEQ ID NO: 10944 - DNA, 507 bp, Artificial Sequence
  chemically treated genomic DNA (Homo sapiens) CpG-island No: 10944
aacacttcgtcctcgtcactaccaaaaacaccacctccacccccgatcctcaacacgacaaccgccaacttaaaatccaacgccgcgtcccctccgcccgtaccgctaccgctaccgccgccgccgctactaccgactcccgacgctaacccgacctccccaaaaaacctcacgatacgaatccccaaaccgacccctcccgacgaaaacgactccgaaaccccaactaaaacgaatcgcgaaaccacaaaatccaaatcctcctcaaaaaaaataccgccgcctccgctatcaatcaacattattcgcacccgaaaccgaaaacgataccgacccactcgcgatcaccgccgccgctaatctcgaaaacgaaaaaaacaacaaaaaaaaaaaacgtctcctttcccccgtcccaacaacgccactaacttctcactacctaacctactacctcccgccccctcgactcgccactaactacaataccctaacgactacaaatcatta

SEQ ID NO: 10945 - DNA, 544 bp, Artificial Sequence
  chemically treated genomic DNA (Homo sapiens) CpG-island No: 10945
aatttgtggttcggggtcgttagttggggttcggggagcgcgagcgggggttcggggggcgggggtcgcgggtcgcgaggggggcgggggtcgcgagggggcggggcgtgcgagggggcgggggcgtgcgagggggcgggggcgcgcgagggggcggggcgcgcgagggggcggggcgcgcgagggggcggggcgcgcgaaggggcggggcgcgtaaggggggcggggcgcgcgagggggcggggcgcgcgagggggcggggcgcgcgaaggggcggggcgcgtaagggggcggggcgcgtcgggttcgtttttttcgcgggcgtttagtggtaatagggagggtcgggtaagaatgttacgaataaggggagggtttttttttattttggggggatcgtttcgacgttttggggttttttttttttcgcggggtttgtttaaacgtttgtcgtgggttcggaagaatttgcgggtttggggcgggggattaaaggtttgttttttttcggagagagggtttttttggttcgattattgggttt

SEQ ID NO: 10946 - DNA, 544 bp, Artificial Sequence
  chemically treated genomic DNA (Homo sapiens) CpG-island No: 10946
aaacccaataatcgaaccaaaaaaaccctctctccgaaaaaaaacaaacctttaatcccccgccccaaacccgcaaattcttccgaacccacgacaaacgtttaaacaaaccccgcgaaaaaaaaaaaaccccaaaacgtcgaaacgatccccccaaaataaaaaaaaaccctccccttattcgtaacattcttacccgaccctccctattaccactaaacgcccgcgaaaaaaacgaacccgacgcgccccgcccccttacgcgccccgccccttcgcgcgccccgccccctcgcgcgccccgccccctcgcgcgccccgccccccttacgcgccccgccccttcgcgcgccccgccccctcgcgcgccccgccccctcgcgcgccccgccccctcgcgcgcccccgccccctcgcacgcccccgccccctcgcacgccccgccccctcgcgacccccgcccccctcgcgacccgcgacccccgccccccgaacccccgctcgcgctccccgaaccccaactaacgaccccgaaccacaaatt

SEQ ID NO: 10947 - DNA, 544 bp, Artificial Sequence
  chemically treated genomic DNA (Homo sapiens) CpG-island No: 10947
gaatttaatggtcgggttagggggatttttttttcggaaaaaagtaagtttttaatttttcgttttagattcgtaggttttttcgggtttacggtaagcgtttaaataagtttcgcgaggagggagggattttaaaacgtcgaggcggtttttttaaaataaaagagaattttttttttgttcgtggtatttttattcggttttttttgttgttattaagcgttcgcggagaggacgagttcggcgcgtttcgtttttttgcgcgtttcgttttttcgcgcgtttcgttttttcgcgcgtttcgttttttcgcgcgtttcgttttttttgcgcgtttcgttttttcgcgcgtttcgttttttcgcgcgtttcgttttttcgcgcgtttcgttttttcgcgcgttttcgttttttcgtacgttttcgttttttcgtacgtttcgttttttcgcggttttcgtttttttcgcggttcgcggttttcgtttttcggattttcgttcgcgtttttcggattttagttggcggtttcggattataaatt

SEQ ID NO: 10948 - DNA, 544 bp, Artificial Sequence
  chemically treated genomic DNA (Homo sapiens) CpG-island No: 10948
aatttataatccgaaaccgccaactaaaatccgaaaaacgcgaacgaaaatccgaaaaacgaaaaccgcgaaccgcgaaaaaaacgaaaaccgcgaaaaaacgaaacgtacgaaaaaacgaaaacgtacgaaaaaacgaaaacgcgcgaaaaaacgaaacgcgcgaaaaaacgaaacgcgcgaaaaaacgaaacgcgcgaaaaaacgaaacgcgcaaaaaaaacgaaacgcgcgaaaaaacgaaacgcgcgaaaaaacgaaacgcgcgaaaaaacgaaacgcgcaaaaaaacgaaacgcgccgaactcgtcctctccgcgaacgcttaataacaacaaaaaaaaccgaataaaaataccacgaacaaaaaaaaaattctcttttattttaaaaaaaccgcctcgacgttttaaaatccctccctcctcgcgaaacttatttaaacgcttaccgtaaacccgaaaaaacctacgaatctaaaacgaaaaattaaaaacttacttttttccgaaaaaaaaatccccctaacccgaccattaaattc

SEQ ID NO: 10949 - DNA, 660 bp, Artificial Sequence
  chemically treated genomic DNA (Homo sapiens) CpG-island No: 10949
  unsure (640)
tagattcgtttgtattagcgaatttttaaagatgataatcgagaagtttatgatgaacgtcgttagtagcgagaatagcggtaatattttatagttttgttataacggatgtattttgtagttcgtcgagattattagcgattttattgaagattggtgtatggtcggtagtagcgtatcgagcgcgatgatgaagaatattattttgtttagtcgttgtagcgatattttttattttagacgtttaaatagtgtcggagtaaattttagtgttattacgtcgatatagatggttatatagatcgtcgtttcgaatagtatcgagtttacgttgaagtgattcggaatgtagaagtacggtaggttttagtagcgatttacgtcgatagtgatcgataagttatttagtgagtaattaaatagattcgttaatagcgtcggacgtattagcggatggtattgtttacggttaaagacgtatatcgttacgttagcgtttagtcggtataggtaaaagtcggtgttaattagtaagttaaacgcgatttatacgttttacgggaagtcggcgtttagggtaaagatagaattttagatcgaatattagacgttttataattaggagtatatagatgacgantaacggtttaaaaattatga

SEQ ID NO: 10950 - DNA, 660 bp, Artificial Sequence
  chemically treated genomic DNA (Homo sapiens) CpG-island No: 10950
  unsure (21)
tcataatttttaaaccgttantcgtcatctatatactcctaattataaaacgtctaatattcgatctaaaattctatctttaccctaaacgccgacttcccgtaaaacgtataaatcgcgtttaacttactaattaacaccgacttttacctataccgactaaacgctaacgtaacgatatacgtctttaaccgtaaacaataccatccgctaatacgtccgacgctattaacgaatctatttaattactcactaaataacttatcgatcactatcgacgtaaatcgctactaaaacctaccgtacttctacattccgaatcacttcaacgtaaactcgatactattcgaaacgacgatctatataaccatctatatcgacgtaataacactaaaatttactccgacactatttaaacgtctaaaataaaaaatatcgctacaacgactaaacaaaataatattcttcatcatcgcgctcgatacgctactaccgaccatacaccaatcttcaataaaatcgctaataatctcgacgaactacaaaatacatccgttataacaaaactataaaatattaccgctattctcgctactaacgacgttcatcataaacttctcgattatcatctttaaaaattcgctaatacaaacgaatcta

SEQ ID NO: 10951 - DNA, 660 bp, Artificial Sequence
  chemically treated genomic DNA (Homo sapiens) CpG-island No: 10951
  unsure (21)
ttatgatttttggatcgttantcgttatttgtatgtttttgattgtgaagcgtttggtgttcggtttggggttttgtttttattttgaacgtcggtttttcgtggggcgtgtggatcgcgtttgatttgttgattggtatcggtttttgtttgtgtcggttgggcgttggcgtggcggtatacgtttttaatcgtgggtaatattattcgttggtgcgttcggcgttgttggcgagtttgtttggttatttattgggtggtttgtcgattattatcgacgtgggtcgttattggaatttgtcgtatttttatatttcgggttattttaacgtgaattcggtattgttcgagacggcggtttgtatgattatttatatcggcgtgatggtattggagtttgtttcggtattgtttgaacgtttggggtggaaggtgtcgttatagcgattaaataaggtgatgttttttattatcgcgttcggtgcgttgttgtcgattatgtattagtttttaatggggtcgttgatgatttcggcgggttataaggtgtattcgttgtggtagagttatgaaatgttgtcgttgttttcgttgttgacggcgtttattatgggtttttcgattgttatttttgaaggttcgttggtgtaggcgggtttg

SEQ ID NO: 10952 - DNA, 660 bp, Artificial Sequence
  chemically treated genomic DNA (Homo sapiens) CpG-island No: 10952
  unsure (640)
caaacccgcctacaccaacgaaccttcaaaaataacaatcgaaaaacccataataaacgccgtcaacaacgaaaacaacgacaacatttcataactctaccacaacgaatacaccttataacccgccgaaatcatcaacgaccccattaaaaactaatacataatcgacaacaacgcaccgaacgcgataataaaaaacatcaccttatttaatcgctataacgacaccttccaccccaaacgttcaaacaataccgaaacaaactccaataccatcacgccgatataaataatcatacaaaccgccgtctcgaacaataccgaattcacgttaaaataacccgaaatataaaaatacgacaaattccaataacgacccacgtcgataataatcgacaaaccacccaataaataaccaaacaaactcgccaacaacgccgaacgcaccaacgaataatattacccacgattaaaaacgtataccgccacgccaacgcccaaccgacacaaacaaaaaccgataccaatcaacaaatcaaacgcgatccacacgccccacgaaaaaccgacgttcaaaataaaaacaaaaccccaaaccgaacaccaaacgcttcacaatcaaaaacatacaaataacgantaacgatccaaaaatcataa

SEQ ID NO: 10953 - DNA, 553 bp, Artificial Sequence
  chemically treated genomic DNA (Homo sapiens) CpG-island No: 10953
taaacggtatttgacggttgtttattttcggtttgttcggatggttcggtatggtaattatttcgttttcgttttgatagttttcgataattagttttatcggatcgataatcgttattgcgcgcggcgtattttcgttgagatttttacggatgtaggattttagcgacgttattttaatggtgttgttttgtttggttacgtcgatgcgtttgtagaatttacgaatagaagtcgtagtgtaattacgacgacgtagatcggaaatggtcggtatacgcgggttattttagtttttaacgtgtttgtcggttattagtaggtttaatttacgtttggatattacggtgtattttagatttaggcgcgagaatttatattggcgcgggtgaataggaatcgtgatgttgtttagtatttagtcgtatagacgacggttgttttggaatttaagcgtatatagagagtgcgtaatattttttagggtatcgttgatgtagtgggtgaagtcgtatatcgggtagatgtattatttgttgttagtttggtgggt

SEQ ID NO: 10954 - DNA, 553 bp, Artificial Sequence
  chemically treated genomic DNA (Homo sapiens) CpG-island No: 10954
acccaccaaactaacaacaaataatacatctacccgatatacgacttcacccactacatcaacgataccctaaaaaatattacgcactctctatatacgcttaaattccaaaacaaccgtcgtctatacgactaaatactaaacaacatcacgattcctattcacccgcgccaatataaattctcgcgcctaaatctaaaatacaccgtaatatccaaacgtaaattaaacctactaataaccgacaaacacgttaaaaactaaaataacccgcgtataccgaccatttccgatctacgtcgtcgtaattacactacgacttctattcgtaaattctacaaacgcatcgacgtaaccaaacaaaacaacaccattaaaataacgtcgctaaaatcctacatccgtaaaaatctcaacgaaaatacgccgcgcgcaataacgattatcgatccgataaaactaattatcgaaaactatcaaaacgaaaacgaaataattaccataccgaaccatccgaacaaaccgaaaataaacaaccgtcaaataccgttta

SEQ ID NO: 10955 - DNA, 553 bp, Artificial Sequence
  chemically treated genomic DNA (Homo sapiens) CpG-island No: 10955
atttattagattggtaataagtggtgtatttattcgatgtacgattttatttattgtattagcgatgttttggaaggtattacgtattttttgtgtacgtttgagttttaggataatcgtcgtttgtacgattgggtattggataatattacgatttttgtttattcgcgttagtatgagttttcgcgtttgaatttggaatatatcgtgatgtttaagcgtaagttgaatttgttggtgatcgataagtacgttgaaggttgggatgattcgcgtatgtcgattattttcggtttgcgtcgtcgtggttatattgcggtttttattcgtgagttttgtaaacgtatcggcgtgattaagtaggataatattattgagatggcgtcgttggaattttgtattcgtgaagattttaacgaaaatgcgtcgcgcgtaatggcggttatcgattcggtgaaattggttatcgaaaattattagggcgaaggcgaaatggttattatgtcgaattattcgaataaatcggaaatgggtagtcgttaggtgtcgttta

SEQ ID NO: 10956 - DNA, 553 bp, Artificial Sequence
  chemically treated genomic DNA (Homo sapiens) CpG-island No: 10956
taaacgacacctaacgactacccatttccgatttattcgaataattcgacataataaccatttcgccttcgccctaataattttcgataaccaatttcaccgaatcgataaccgccattacgcgcgacgcattttcgttaaaatcttcacgaatacaaaattccaacgacgccatctcaataatattatcctacttaatcacgccgatacgtttacaaaactcacgaataaaaaccgcaatataaccacgacgacgcaaaccgaaaataatcgacatacgcgaatcatcccaaccttcaacgtacttatcgatcaccaacaaattcaacttacgcttaaacatcacgatatattccaaattcaaacgcgaaaactcatactaacgcgaataaacaaaaatcgtaatattatccaatacccaatcgtacaaacgacgattatcctaaaactcaaacgtacacaaaaaatacgtaataccttccaaaacatcgctaatacaataaataaaatcgtacatcgaataaatacaccacttattaccaatctaataaat

SEQ ID NO: 10957 - DNA, 777 bp, Artificial Sequence
  chemically treated genomic DNA (Homo sapiens) CpG-island No: 10957
agtttcggaggtttaggtcgtcggagtaattatattagggtcggtgtatttcggggcggcggcgtaggattaggttaggtcgggtcgggtcgggtagggcggcgcgagtcgggggtggggcggcggcgtagcgtcgtcgtcgtagttttcgttttttttttaggggtcgcgtcggagtttcggcggcggcggcggtgtttatagtttgagaagagcgtttcgttcgggagcggcggcggttatcgagatttatttaaggcgcgtttttttcggttttttagcgtttttaagtcgtagcggtcgcgtttttttagttagttcgttcgttcgttttgtttttttgttgtcggttgcgttatggcgttggcgttggcggcgttggcggcggtcgagtcggtttgcggtagtcggtattagtaggtaagcggcgttcgattttagtttcgaatttcggtttttggttttgttttgttcgttggtcgttttaggtttttttggtcggttcgcggttaattcgacgtcggggtttggtaggtcgcgttgggtttggaggggcgggtcgggtttcgggttcggattcgaggttgttacgggttcggtttgttcgtttgcgattttaggtgggatttcggcggtggaaagtttttttttcggtttcgtttttcgtattttttagggcgggcgggtttttgagttagaattcgcgatttataggcggtatcgatttgaggtattcgttttttatttttttatttttggtttgatgttattggaaaa

SEQ ID NO: 10958 - DNA, 777 bp, Artificial Sequence
  chemically treated genomic DNA (Homo sapiens) CpG-island No: 10958
ttttccaataacatcaaaccaaaaataaaaaaataaaaaacgaatacctcaaatcgataccgcctataaatcgcgaattctaactcaaaaacccgcccgccctaaaaaatacgaaaaacgaaaccgaaaaaaaaactttccaccgccgaaatcccacctaaaatcgcaaacgaacaaaccgaacccgtaacaacctcgaatccgaacccgaaacccgacccgcccctccaaacccaacgcgacctaccaaaccccgacgtcgaattaaccgcgaaccgaccaaaaaaacctaaaacgaccaacgaacaaaacaaaaccaaaaaccgaaattcgaaactaaaatcgaacgccgcttacctactaataccgactaccgcaaaccgactcgaccgccgccaacgccgccaacgccaacgccataacgcaaccgacaacaaaaaaacaaaacgaacgaacgaactaactaaaaaaacgcgaccgctacgacttaaaaacgctaaaaaaccgaaaaaaacgcgccttaaataaatctcgataaccgccgccgctcccgaacgaaacgctcttctcaaactataaacaccgccgccgccgccgaaactccgacgcgacccctaaaaaaaaaacgaaaactacgacgacgacgctacgccgccgccccacccccgactcgcgccgccctacccgacccgacccgacctaacctaatcctacgccgccgccccgaaatacaccgaccctaatataattactccgacgacctaaacctccgaaact

SEQ ID NO: 10959 - DNA, 777 bp, Artificial Sequence
  chemically treated genomic DNA (Homo sapiens) CpG-island No: 10959
ttttttaatgatattaaattaaaggtggaaaaatgaaaaacgaatgttttagatcgatgtcgtttgtgggtcgcgggttttgatttagggattcgttcgttttgggaaatgcgggaaacgaggtcgggaggaggattttttatcgtcggagttttatttggggtcgtagacgggtaggtcgggttcgtggtagtttcgaattcgagttcggggttcgattcgtttttttaggtttagcgcggtttgttaagtttcggcgtcgagttggtcgcgggtcggttagagaggtttgaggcggttagcgggtagggtagagttagggatcggagttcggggttggagtcgggcgtcgtttatttgttggtatcggttgtcgtaggtcggttcgatcgtcgttagcgtcgttaacgttaacgttatggcgtagtcggtagtagggaagtagagcgagcgagcgagttagttgaaggggcgcggtcgttgcggtttgggagcgttgggaggtcgagggggacgcgttttgggtgggtttcgatggtcgtcgtcgttttcgggcgagacgttttttttaggttgtaagtatcgtcgtcgtcgtcgaggtttcgacgcggtttttggggaagaggcggggattacgacgacggcgttgcgtcgtcgttttattttcgattcgcgtcgttttgttcggttcggttcggtttagtttagttttgcgtcgtcgtttcgaggtgtatcggttttggtgtagttgtttcgacgatttgagttttcgaggtt

SEQ ID NO: 10960 - DNA, 777 bp, Artificial Sequence
  chemically treated genomic DNA (Homo sapiens) CpG-island No: 10960
aacctcgaaaactcaaatcgtcgaaacaactacaccaaaaccgatacacctcgaaacgacgacgcaaaactaaactaaaccgaaccgaaccgaacaaaacgacgcgaatcgaaaataaaacgacgacgcaacgccgtcgtcgtaatccccgcctcttccccaaaaaccgcgtcgaaacctcgacgacgacgacgatacttacaacctaaaaaaaacgtctcgcccgaaaacgacgacgaccatcgaaacccacccaaaacgcgtccccctcgacctcccaacgctcccaaaccgcaacgaccgcgccccttcaactaactcgctcgctcgctctacttccctactaccgactacgccataacgttaacgttaacgacgctaacgacgatcgaaccgacctacgacaaccgataccaacaaataaacgacgcccgactccaaccccgaactccgatccctaactctaccctacccgctaaccgcctcaaacctctctaaccgacccgcgaccaactcgacgccgaaacttaacaaaccgcgctaaacctaaaaaaacgaatcgaaccccgaactcgaattcgaaactaccacgaacccgacctacccgtctacgaccccaaataaaactccgacgataaaaaatcctcctcccgacctcgtttcccgcatttcccaaaacgaacgaatccctaaatcaaaacccgcgacccacaaacgacatcgatctaaaacattcgtttttcatttttccacctttaatttaatatcattaaaaaa

SEQ ID NO: 10961 - DNA, 575 bp, Artificial Sequence
  chemically treated genomic DNA (Homo sapiens) CpG-island No: 10961
cgtgaattcggtagtatcggtttgttggcggcgattgaattttcgttggggattattcgcgtagtggaaatcgtttacgttttcgagcgtttgatcggtatcgttttcggtgtagaagattatgtgcgtaatttgcgtatagaacgtttttcggaaggaattgaattgttgttcgtacgttgttttattttgtaggtcgcgcgttttgcgggtatttaggcgttcgatatcgtttatttcgacgttaataacgaagtcggatttttgtaagaagtcgtttatattaaatagttgggttttgacggtaaatcgttgattaattcgcgttagattgatttgttgtataatttttacgtatcgatttagaaagaagtggattacgttcgtcgcgtcgtagaagtcgttgaagtcgtcgttcgcgaaggtttcggcgtggtttttttgaacggtaagatggtggacggttcggttatcgatcgcgttcgtttggtgttttttcgtgtagaatttttcggtattcgcgaagaataaggtaattaaaatgacgtagaaaatagaataattttaacgataag

SEQ ID NO: 10962 - DNA, 575 bp, Artificial Sequence
  chemically treated genomic DNA (Homo sapiens) CpG-island No: 10962
cttatcgttaaaattattctattttctacgtcattttaattaccttattcttcgcgaataccgaaaaattctacacgaaaaaacaccaaacgaacgcgatcgataaccgaaccgtccaccatcttaccgttcaaaaaaaccacgccgaaaccttcgcgaacgacgacttcaacgacttctacgacgcgacgaacgtaatccacttctttctaaatcgatacgtaaaaattatacaacaaatcaatctaacgcgaattaatcaacgatttaccgtcaaaacccaactatttaatataaacgacttcttacaaaaatccgacttcgttattaacgtcgaaataaacgatatcgaacgcctaaatacccgcaaaacgcgcgacctacaaaataaaacaacgtacgaacaacaattcaattccttccgaaaaacgttctatacgcaaattacgcacataatcttctacaccgaaaacgataccgatcaaacgctcgaaaacgtaaacgatttccactacgcgaataatccccaacgaaaattcaatcgccgccaacaaaccgatactaccgaattcacg

SEQ ID NO: 10963 - DNA, 575 bp, Artificial Sequence
  chemically treated genomic DNA (Homo sapiens) CpG-island No: 10963
tttgtcgttgagattgttttattttttgcgttattttgattgttttatttttcgcggatgtcggagagttttgtacgggagagtattagacgggcgcgatcgataatcggatcgtttattattttgtcgtttagggaaattacgtcgaggttttcgcgagcggcggttttagcggtttttacgacgcggcgggcgtgatttatttttttttgggtcggtgcgtagaggttgtgtagtagattaatttgacgcgggttgattagcgatttgtcgttaaagtttagttgtttgatgtgggcggttttttgtagaaattcggtttcgttgttagcgtcggaatagacggtatcgaacgtttgaatattcgtagagcgcgcggtttgtaaaatggaatagcgtgcgaatagtagtttagtttttttcggggagcgttttgtacgtaggttgcgtatatagttttttgtatcgagggcgatatcgattaaacgttcggaagcgtgagcgatttttattgcgcgggtaatttttagcggagatttaatcgtcgttagtaggtcggtgttgtcgggtttacg

SEQ ID NO: 10964 - DNA, 575 bp, Artificial Sequence
  chemically treated genomic DNA (Homo sapiens) CpG-island No: 10964
cgtaaacccgacaacaccgacctactaacgacgattaaatctccgctaaaaattacccgcgcaataaaaatcgctcacgcttccgaacgtttaatcgatatcgccctcgatacaaaaaactatatacgcaacctacgtacaaaacgctccccgaaaaaaactaaactactattcgcacgctattccattttacaaaccgcgcgctctacgaatattcaaacgttcgataccgtctattccgacgctaacaacgaaaccgaatttctacaaaaaaccgcccacatcaaacaactaaactttaacgacaaatcgctaatcaacccgcgtcaaattaatctactacacaacctctacgcaccgacccaaaaaaaaataaatcacgcccgccgcgtcgtaaaaaccgctaaaaccgccgctcgcgaaaacctcgacgtaatttccctaaacgacaaaataataaacgatccgattatcgatcgcgcccgtctaatactctcccgtacaaaactctccgacatccgcgaaaaataaaacaatcaaaataacgcaaaaaataaaacaatctcaacgacaaa

SEQ ID NO: 10965 - DNA, 748 bp, Artificial Sequence
  chemically treated genomic DNA (Homo sapiens) CpG-island No: 10965
gatgacggagagggattttcgggattaaagaataacgatcgtaggcgagtgtacgagcgaggtgcgcgcgttgagtagggggaggggtttggcgcgcgtcgaattagatcgagggggtgggggcgagttttttcgcgagagtgggtttgtttttgggttgtagtcgttgtcgtcgtttttcgttagcgtcgttgttgcgggggattgtgggagttttcgcgtttcgttcgttgggagagaggtatttttttttttttttttttttttttttaaggtaggcgtgaagcgggtaagagtcggggtcgggtggttgggggtttttcgtgttcgtcgggaggggataacgacggcgataggggttgcggggagtcggcggcgcgttttttttgttcgttttcgttttgttttttttcgcgttgcgtatgtgagtcgtttgatcggcggtcgttatgttaggagcgtagtggcggcgtaattagttttttagggcggcggaggtgagcggttcgggagggaaatacgcggtcggttaagggtttagggtgcggcgggagattttgggtgaagaggtgcgttgatcggtcgagttttttgcgcgttttgggttcgttgtgggcgggggcgggacgattagttcgttatacgcgggtcgcggcgttgagggggagggaggagttcgttcgaggtttgagggatagattgtatattgggggtttgtcgtttgaggaggatggttaagatatttaag

SEQ ID NO: 10966 - DNA, 748 bp, Artificial Sequence
  chemically treated genomic DNA (Homo sapiens) CpG-island No: 10966
cttaaatatcttaaccatcctcctcaaacgacaaacccccaatatacaatctatccctcaaacctcgaacgaactcctccctccccctcaacgccgcgacccgcgtataacgaactaatcgtcccgcccccgcccacaacgaacccaaaacgcgcaaaaaactcgaccgatcaacgcacctcttcacccaaaatctcccgccgcaccctaaacccttaaccgaccgcgtatttccctcccgaaccgctcacctccgccgccctaaaaaactaattacgccgccactacgctcctaacataacgaccgccgatcaaacgactcacatacgcaacgcgaaaaaaaacaaaacgaaaacgaacaaaaaaaacgcgccgccgactccccgcaacccctatcgccgtcgttatcccctcccgacgaacacgaaaaacccccaaccacccgaccccgactcttacccgcttcacgcctaccttaaaaaaaaaaaaaaaaaaaaaaaaaaatacctctctcccaacgaacgaaacgcgaaaactcccacaatcccccgcaacaacgacgctaacgaaaaacgacgacaacgactacaacccaaaaacaaacccactctcgcgaaaaaactcgcccccaccccctcgatctaattcgacgcgcgccaaacccctccccctactcaacgcgcgcacctcgctcgtacactcgcctacgatcgttattctttaatcccgaaaatccctctccgtcatc

SEQ ID NO: 10967 - DNA, 748 bp, Artificial Sequence
  chemically treated genomic DNA (Homo sapiens) CpG-island No: 10967
tttagatattttaattattttttttaaacggtaagtttttagtgtatagtttgttttttaggtttcgagcgagttttttttttttttttagcgtcgcggttcgcgtgtaacgggttagtcgtttcgttttcgtttataacgagtttaggacgcgtaggaagttcggtcggttagcgtatttttttatttaaaatttttcgtcgtattttgggtttttggtcggtcgcgtgtttttttttcggatcgtttattttcgtcgttttagaaggttggttgcgtcgttattgcgtttttaatatggcggtcgtcgattaggcggtttatatacgtaacgcggagggaggtagagcgggagcgagtaagaaaggcgcgtcgtcggtttttcgtagtttttgtcgtcgtcgttgttttttttcggcggatacggagaatttttagttattcgatttcgatttttattcgttttacgtttattttagggaaagggagagggaaaaggagaggtattttttttttagcgagcgggacgcggagatttttataatttttcgtagtaacggcgttggcgagaagcggcggtagcggttgtagtttaagaataaatttattttcgcgagagagttcgtttttattttttcgatttggttcggcgcgcgttaggtttttttttttatttagcgcgcgtatttcgttcgtgtattcgtttgcggtcgttgttttttaatttcggagattttttttcgttatt

SEQ ID NO: 10968 - DNA, 748 bp, Artificial Sequence
  chemically treated genomic DNA (Homo sapiens) CpG-island No: 10968
aataacgaaaaaaaatctccgaaattaaaaaacaacgaccgcaaacgaatacacgaacgaaatacgcgcgctaaataaaaaaaaaaacctaacgcgcgccgaaccaaatcgaaaaaataaaaacgaactctctcgcgaaaataaatttattcttaaactacaaccgctaccgccgcttctcgccaacgccgttactacgaaaaattataaaaatctccgcgtcccgctcgctaaaaaaaaaatacctctccttttccctctccctttccctaaaataaacgtaaaacgaataaaaatcgaaatcgaataactaaaaattctccgtatccgccgaaaaaaaacaacgacgacgacaaaaactacgaaaaaccgacgacgcgcctttcttactcgctcccgctctacctccctccgcgttacgtatataaaccgcctaatcgacgaccgccatattaaaaacgcaataacgacgcaaccaaccttctaaaacgacgaaaataaacgatccgaaaaaaaaacacgcgaccgaccaaaaacccaaaatacgacgaaaaattttaaataaaaaaatacgctaaccgaccgaacttcctacgcgtcctaaactcgttataaacgaaaacgaaacgactaacccgttacacgcgaaccgcgacgctaaaaaaaaaaaaaaaactcgctcgaaacctaaaaaacaaactatacactaaaaacttaccgtttaaaaaaaataattaaaatatctaaa

SEQ ID NO: 10969 - DNA, 540 bp, Artificial Sequence
  chemically treated genomic DNA (Homo sapiens) CpG-island No: 10969
gttatgtatcgtatcgtgagtattttttttttaggcgaacggttcgtgttgatatattataattttcggcgtatgtagcggttcggcgttgtttagcgtttcgataattattttgtcggtgtttagtttatattcgttttgtatttttttttcgtttaattcgcgcgtatacggaatgtcgttaaagaagtagtcggcgtgcgtggtgtttaacgtcgggatcgttagtttcgtttgcgtttatgcggtggtatgagtggagtgggtatggataatgttattaagcgacgggtaacgacggtagagttcgagatgcgtcgtagtgtcggaagatgggcgatattttttttttattattttgtcgtttatattaattattattatattcgtcgtttttttggttcgtaagtaacgttttttggtttgattattattagttcgcgttcgcggttatagcgttgatttgttttagtaaagttgtgatttatcgttattgtgttttaaagattattaagtggtagagttaggatttgaatttag

SEQ ID NO: 10970 - DNA, 540 bp, Artificial Sequence
  chemically treated genomic DNA (Homo sapiens) CpG-island No: 10970
ctaaattcaaatcctaactctaccacttaataatctttaaaacacaataacgataaatcacaactttactaaaacaaatcaacgctataaccgcgaacgcgaactaataataatcaaaccaaaaaacgttacttacgaaccaaaaaaacgacgaatataataataattaatataaacgacaaaataataaaaaaaaaatatcgcccatcttccgacactacgacgcatctcgaactctaccgtcgttacccgtcgcttaataacattatccatacccactccactcataccaccgcataaacgcaaacgaaactaacgatcccgacgttaaacaccacgcacgccgactacttctttaacgacattccgtatacgcgcgaattaaacgaaaaaaaaatacaaaacgaatataaactaaacaccgacaaaataattatcgaaacgctaaacaacgccgaaccgctacatacgccgaaaattataatatatcaacacgaaccgttcgcctaaaaaaaaaatactcacgatacgatacataac

SEQ ID NO: 10971 - DNA, 540 bp, Artificial Sequence
  chemically treated genomic DNA (Homo sapiens) CpG-island No: 10971
ttggatttaaattttagttttattatttgatggtttttagagtatagtggcgatgaattataattttattggggtaagttagcgttatgatcgcggacgcgggttggtggtgattaagttaaggggcgttgtttacgaattaagaaagcggcggatatggtggtggttaatatgagcggtaaggtggtggaagggaagtatcgtttatttttcgatattgcgacgtatttcgaattttatcgtcgttattcgtcgtttggtggtattgtttatatttattttatttatgttatcgtatgggcgtaggcggggttggcgatttcggcgttaggtattacgtacgtcgattatttttttggcgatatttcgtgtacgcgcgggttaagcgaagaagaggtgtagggcgagtatgaattgaatatcggtaaagtgattatcgaaacgttgggtaacgtcgagtcgttgtatacgtcgggaattgtggtgtattagtacgggtcgttcgtttgggggaaagatgtttacgatgcggtgtataat

SEQ ID NO: 10972 - DNA, 540 bp, Artificial Sequence
  chemically treated genomic DNA (Homo sapiens) CpG-island No: 10972
attatacaccgcatcgtaaacatctttcccccaaacgaacgacccgtactaatacaccacaattcccgacgtatacaacgactcgacgttacccaacgtttcgataatcactttaccgatattcaattcatactcgccctacacctcttcttcgcttaacccgcgcgtacacgaaatatcgccaaaaaaataatcgacgtacgtaatacctaacgccgaaatcgccaaccccgcctacgcccatacgataacataaataaaataaatataaacaataccaccaaacgacgaataacgacgataaaattcgaaatacgtcgcaatatcgaaaaataaacgatacttcccttccaccaccttaccgctcatattaaccaccaccatatccgccgctttcttaattcgtaaacaacgccccttaacttaatcaccaccaacccgcgtccgcgatcataacgctaacttaccccaataaaattataattcatcgccactatactctaaaaaccatcaaataataaaactaaaatttaaatccaa

SEQ ID NO: 10973 - DNA, 768 bp, Artificial Sequence
  chemically treated genomic DNA (Homo sapiens) CpG-island No: 10973
taaacgggcgtagtatcgtacgtaattcgttagtatagacgttttcgttatcgtttataattcgcgttttgattatcgcgtaacgtttttagtcgcgtttttgtttttggtaataattttttaacgcggtaaagtttagtattagcgggttattttcgttaaacggacgtagtcgtatatttacgcgatagacgaagttattttgcgttggttgatttagtattttaattagtcgttgttttatgcgggtaaaaaattgcgcgttatttagttttcggcgtttattttgcgtataattatgtttcggttaggtaaaaattagatcgatattagaggagaaatttagttttttatcgtttagtttatttatgtttaaaattagtagcggttgcgtttcgttttgcgtattgtacggcgttttttattcgcggtagtaggcgttatatagttagttacgcgtcgcgataattagcgttttcgttagatagttgaattgttgtaatatgttttttttagtaattagtgttagcgtttgcgtttaggggatgcgtattataatgcgtcgtcgggatagtcgtagtttgggtaattaattcgtttcgttatttatattatagagcggtttttgtaattatgtcgcgtaatgtttttattcgtcggtttggggcgggtggttttttagtttcggtcgttattttggatggggtaatattttgttttggtataaattattaaaagtaagtttggtttcgttgtgcgttatttttt

SEQ ID NO: 10974 - DNA, 768 bp, Artificial Sequence
  chemically treated genomic DNA (Homo sapiens) CpG-island No: 10974
aaaaaataacgcacaacgaaaccaaacttacttttaataatttataccaaaacaaaatattaccccatccaaaataacgaccgaaactaaaaaaccacccgccccaaaccgacgaataaaaacattacgcgacataattacaaaaaccgctctataatataaataacgaaacgaattaattacccaaactacgactatcccgacgacgcattataatacgcatcccctaaacgcaaacgctaacactaattactaaaaaaaacatattacaacaattcaactatctaacgaaaacgctaattatcgcgacgcgtaactaactatataacgcctactaccgcgaataaaaaacgccgtacaatacgcaaaacgaaacgcaaccgctactaattttaaacataaataaactaaacgataaaaaactaaatttctcctctaatatcgatctaatttttacctaaccgaaacataattatacgcaaaataaacgccgaaaactaaataacgcgcaattttttacccgcataaaacaacgactaattaaaatactaaatcaaccaacgcaaaataacttcgtctatcgcgtaaatatacgactacgtccgtttaacgaaaataacccgctaatactaaactttaccgcgttaaaaaattattaccaaaaacaaaaacgcgactaaaaacgttacgcgataatcaaaacgcgaattataaacgataacgaaaacgtctatactaacgaattacgtacgatactacgcccgttta

SEQ ID NO: 10975 - DNA, 768 bp, Artificial Sequence
  chemically treated genomic DNA (Homo sapiens) CpG-island No: 10975
aagaggtagcgtatagcgaagttaaatttatttttagtgatttgtgttagaatagggtattgttttatttagagtggcgatcggaattggaaagttattcgttttaggtcgacgaatggaagtattacgcggtatggttgtagaagtcgttttgtaatgtgagtgacgaagcgggttaattgtttaagttgcggttatttcggcggcgtattatggtgcgtattttttgggcgtaaacgttggtattggttattgaagagagtatattgtagtagtttagttatttggcggagacgttgattgtcgcggcgcgtgattggttgtatgacgtttgttgtcgcgagtggggaacgtcgtgtaatgcgtagggcgaagcgtaatcgttgttgattttaggtatgggtaagttgggcggtggggagttgaattttttttttgatatcgatttgatttttgtttggtcggaatatggttgtacgtagggtggacgtcgggaattggataacgcgtagttttttattcgtatggggtagcggttgattaaagtgttggattaattaacgtaggatggtttcgtttatcgcgtggatatgcggttgcgttcgtttggcgaaagtggttcgttggtgttgagttttgtcgcgttggaagattattattaggagtaggggcgcgattgggagcgttacgcgatggttaaggcgcggattatgggcgatagcgaaggcgtttatgttaacgagttgcgtgcgatgttgcgttcgtttg

SEQ ID NO: 10976 - DNA, 768 bp, Artificial Sequence
  chemically treated genomic DNA (Homo sapiens) CpG-island No: 10976
caaacgaacgcaacatcgcacgcaactcgttaacataaacgccttcgctatcgcccataatccgcgccttaaccatcgcgtaacgctcccaatcgcgcccctactcctaataataatcttccaacgcgacaaaactcaacaccaacgaaccactttcgccaaacgaacgcaaccgcatatccacgcgataaacgaaaccatcctacgttaattaatccaacactttaatcaaccgctaccccatacgaataaaaaactacgcgttatccaattcccgacgtccaccctacgtacaaccatattccgaccaaacaaaaatcaaatcgatatcaaaaaaaaaattcaactccccaccgcccaacttacccatacctaaaatcaacaacgattacgcttcgccctacgcattacacgacgttccccactcgcgacaacaaacgtcatacaaccaatcacgcgccgcgacaatcaacgtctccgccaaataactaaactactacaatatactctcttcaataaccaataccaacgtttacgcccaaaaaatacgcaccataatacgccgccgaaataaccgcaacttaaacaattaacccgcttcgtcactcacattacaaaacgacttctacaaccataccgcgtaatacttccattcgtcgacctaaaacgaataactttccaattccgatcgccactctaaataaaacaataccctattctaacacaaatcactaaaaataaatttaacttcgctatacgctacctctt

SEQ ID NO: 10977 - DNA, 531 bp, Artificial Sequence
  chemically treated genomic DNA (Homo sapiens) CpG-island No: 10977
  unsure (429..430, 433)
acgatggggcggggttaaatcgtgagcgaattttggtaaaagcggtttcgtaaggtttgattgttagcgaaaatatgagcgacgacgaagtcgcgatgttgatatttgtatttggtttttttacggtagagtaggttatcgacgttttcgggcgcggcgtcggtatggacgtcgttaaacgtaatatttagaagatgggcggttatgtcgaaatttagtcgaagtaggttattggtattacgattcgtattttattgtcgttgacgttggttattttcgacggtatgttcgtacgcgttgcggatgaatttttattttgtcgttgaatttgttatggattattgtaattcgtgaagtcgattttaattacggtcggcggcgatcgggtgttgaatgcgggtgaaatttgttatcgttatatttttggtnnggnagggggtttggtgcgaggatattgagggcgagatcgttcgtttaggggatttttagagttttttatagcgagattttattttaaaaaaaaaaaaaaaa

SEQ ID NO: 10978 - DNA, 531 bp, Artificial Sequence
  chemically treated genomic DNA (Homo sapiens) CpG-island No: 10978
  unsure (99, 102..)
ttttttttttttttttaaaataaaatctcgctataaaaaactctaaaaatcccctaaacgaacgatctcgccctcaatatcctcgcaccaaaccccctnccnnaccaaaaatataacgataacaaatttcacccgcattcaacacccgatcgccgccgaccgtaattaaaatcgacttcacgaattacaataatccataacaaattcaacgacaaaataaaaattcatccgcaacgcgtacgaacataccgtcgaaaataaccaacgtcaacgacaataaaatacgaatcgtaataccaataacctacttcgactaaatttcgacataaccgcccatcttctaaatattacgtttaacgacgtccataccgacgccgcgcccgaaaacgtcgataacctactctaccgtaaaaaaaccaaatacaaatatcaacatcgcgacttcgtcgtcgctcatattttcgctaacaatcaaaccttacgaaaccgcttttaccaaaattcgctcacgatttaaccccgccccatcgt

SEQ ID NO: 10979 - DNA, 531 bp, Artificial Sequence
  chemically treated genomic DNA (Homo sapiens) CpG-island No: 10979
  unsure (99, 102..)
ttttttttttttttttaagatggagtttcgttgtggaggattttagaggttttttaggcgggcgatttcgtttttagtattttcgtattaggttttttnttnnattaaagatgtgacgatggtaaattttattcgtatttagtattcggtcgtcgtcggtcgtgattgagatcggttttacgggttgtagtgatttataatagatttagcggtagaatgaaaatttattcgtaacgcgtacggatatgtcgtcgaggatggttagcgttagcggtagtaaaatgcggatcgtagtgttagtaatttgtttcgattggatttcgatatgatcgtttattttttggatattacgtttaacgacgtttatgtcgacgtcgcgttcggagacgtcggtgatttgttttgtcgtggagaagttaggtgtaaatattagtatcgcgatttcgtcgtcgtttatgttttcgttgatagttaaattttgcgaggtcgtttttgttagaattcgtttacggtttagtttcgttttatcgt

SEQ ID NO: 10980 - DNA, 531 bp, Artificial Sequence
  chemically treated genomic DNA (Homo sapiens) CpG-island No: 10980
  unsure (429..430, 433)
acgataaaacgaaactaaaccgtaaacgaattctaacaaaaacgacctcgcaaaatttaactatcaacgaaaacataaacgacgacgaaatcgcgatactaatatttacacctaacttctccacgacaaaacaaatcaccgacgtctccgaacgcgacgtcgacataaacgtcgttaaacgtaatatccaaaaaataaacgatcatatcgaaatccaatcgaaacaaattactaacactacgatccgcattttactaccgctaacgctaaccatcctcgacgacatatccgtacgcgttacgaataaattttcattctaccgctaaatctattataaatcactacaacccgtaaaaccgatctcaatcacgaccgacgacgaccgaatactaaatacgaataaaatttaccatcgtcacatctttaatnnaanaaaaaacctaatacgaaaatactaaaaacgaaatcgcccgcctaaaaaacctctaaaatcctccacaacgaaactccatcttaaaaaaaaaaaaaaaa

SEQ ID NO: 10981 - DNA, 586 bp, Artificial Sequence
  chemically treated genomic DNA (Homo sapiens) CpG-island No: 10981
gtcgtaatgtacgggtaatcgggcgcgttgtaagggttaattacgttgacgtagttgttgtacgattagggttacgttatttaggttatcggaaaatggtatatgcgggaaattatagagtcgtagtcgtagaacgttggttttgatgattttcgtggttttaattcggtgtttgatatgtatatcgtatggcgcgacgtttacgttaattcggaagtggttttgagttcggatcgttttgtatatattaattaattatcgtttagtaaagatgacgtttatgcgttgcgcggcggcgattaataggttattgtcgattattacgtcgaaatatatggtagatttggattaacgttgtacggagtatggcgtttagtttttcgataagatggcgaagagcgttaaattattttttttttattacggtattcgtggttgttatttcgataatttatttaaatgtcgaaattatgtcgggtagttattcggtacggtcgttcgtatggcgattgtattggtggagatgaacgattgtgttcgttaatttgtattaaatattggagaaaaacggttagtttgataatat

SEQ ID NO: 10982 - DNA, 586 bp, Artificial Sequence
  chemically treated genomic DNA (Homo sapiens) CpG-island No: 10982
atattatcaaactaaccgtttttctccaatatttaatacaaattaacgaacacaatcgttcatctccaccaatacaatcgccatacgaacgaccgtaccgaataactacccgacataatttcgacatttaaataaattatcgaaataacaaccacgaataccgtaataaaaaaaaaataatttaacgctcttcgccatcttatcgaaaaactaaacgccatactccgtacaacgttaatccaaatctaccatatatttcgacgtaataatcgacaataacctattaatcgccgccgcgcaacgcataaacgtcatctttactaaacgataattaattaatatatacaaaacgatccgaactcaaaaccacttccgaattaacgtaaacgtcgcgccatacgatatacatatcaaacaccgaattaaaaccacgaaaatcatcaaaaccaacgttctacgactacgactctataatttcccgcatataccattttccgataacctaaataacgtaaccctaatcgtacaacaactacgtcaacgtaattaacccttacaacgcgcccgattacccgtacattacgac

SEQ ID NO: 10983 - DNA, 586 bp, Artificial Sequence
  chemically treated genomic DNA (Homo sapiens) CpG-island No: 10983
gtgttattaagttgatcgtttttttttagtgtttgatatagattagcgaatatagtcgtttatttttattaatgtagtcgttatacgagcggtcgtgtcggatagttattcggtataatttcggtatttgggtaggttatcgaagtggtagttacgagtgtcgtagtagaggaagaatggtttagcgtttttcgttattttgtcgaggagttgagcgttatatttcgtgtagcgttgatttagatttgttatatatttcggcgtaatggtcggtaatggtttgttggtcgtcgtcgcgtagcgtatgaacgttatttttgttgagcggtgattggttgatgtatgtaggacggttcggatttagggttattttcggattgacgtgaacgtcgcgttatgcggtgtatatattagatatcgagttaaagttacggaaattattaaagttaacgttttgcggttgcggttttgtggtttttcgtatatgttatttttcgatggtttgagtgacgtagttttgatcgtgtagtaattgcgttagcgtggttaatttttgtagcgcgttcggttgttcgtatattgcgat

SEQ ID NO: 10984 - DNA, 586 bp, Artificial Sequence
  chemically treated genomic DNA (Homo sapiens) CpG-island No: 10984
atcgcaatatacgaacaaccgaacgcgctacaaaaattaaccacgctaacgcaattactacacgatcaaaactacgtcactcaaaccatcgaaaaataacatatacgaaaaaccacaaaaccgcaaccgcaaaacgttaactttaataatttccgtaactttaactcgatatctaatatatacaccgcataacgcgacgttcacgtcaatccgaaaataaccctaaatccgaaccgtcctacatacatcaaccaatcaccgctcaacaaaaataacgttcatacgctacgcgacgacgaccaacaaaccattaccgaccattacgccgaaatatataacaaatctaaatcaacgctacacgaaatataacgctcaactcctcgacaaaataacgaaaaacgctaaaccattcttcctctactacgacactcgtaactaccacttcgataacctacccaaataccgaaattataccgaataactatccgacacgaccgctcgtataacgactacattaataaaaataaacgactatattcgctaatctatatcaaacactaaaaaaaaacgatcaacttaataacac

SEQ ID NO: 10985 - DNA, 512 bp, Artificial Sequence
  chemically treated genomic DNA (Homo sapiens) CpG-island No: 10985
gtcgttacgtcgcggtattgataatgtcgttggacgtataaaaatgtcgtcgagttcggtgatattcggttcgcgttcgcgtagttcgtcggcgttaagtattcgcgttcgatatcgttcgtcgttgtgcgtttttataaggcgcgtattcgttttatttcgagatcggacgtggtaattagtattttgtcgtagttgtcgtagcgaatgtcgttttgatcgtaaaaggttttggtggcgcggtttttcgttaggtaaaattgcgtttttaggttgtcgggcgtgtaatagatttcggtatggattacgtcgttgttgtggttcgtttggtgataggtcggggcggaatttttttttagtaaagtaattgcgggcgttcggataggtattaattagttgtatgggggtcgaaatggcgatgatgtcgtcgttaataattataaaattttatattcgttcgtaattagacgcgtatcgtttggttcggtagagatttttatcggagtgttgat

SEQ ID NO: 10986 - DNA, 512 bp, Artificial Sequence
  chemically treated genomic DNA (Homo sapiens) CpG-island No: 10986
atcaacactccgataaaaatctctaccgaaccaaacgatacgcgtctaattacgaacgaatataaaattttataattattaacgacgacatcatcgccatttcgacccccatacaactaattaatacctatccgaacgcccgcaattactttactaaaaaaaaattccgccccgacctatcaccaaacgaaccacaacaacgacgtaatccataccgaaatctattacacgcccgacaacctaaaaacgcaattttacctaacgaaaaaccgcgccaccaaaaccttttacgatcaaaacgacattcgctacgacaactacgacaaaatactaattaccacgtccgatctcgaaataaaacgaatacgcgccttataaaaacgcacaacgacgaacgatatcgaacgcgaatacttaacgccgacgaactacgcgaacgcgaaccgaatatcaccgaactcgacgacatttttatacgtccaacgacattatcaataccgcgacgtaacgac

SEQ ID NO: 10987 - DNA, 512 bp, Artificial Sequence
  chemically treated genomic DNA (Homo sapiens) CpG-island No: 10987
attaatatttcgataaaagtttttgtcgaattaaacggtgcgcgtttggttgcgagcgaatgtaggattttgtgattattggcggcggtattatcgttatttcgatttttatgtaattgattgatgtttattcggacgttcgtaattgttttgttggaaaaagatttcgtttcggtttgttattagacgggttataatagcggcgtgatttatgtcggggtttattatacgttcggtagtttgaaggcgtagttttgtttggcgggaaatcgcgttattaaagttttttgcgattaaaacggtattcgttacgataattgcggtaagatgttggttgttacgttcgatttcgaaatggaacggatgcgcgttttatgggaacgtatagcggcgaacggtatcgagcgcgaatgtttaacgtcgacgaattgcgcgagcgcgaatcgaatattatcgggttcggcggtatttttgtgcgtttagcggtattgttagtatcgcgacgtgacggt

SEQ ID NO: 10988 - DNA, 512 bp, Artificial Sequence
  chemically treated genomic DNA (Homo sapiens) CpG-island No: 10988
accgtcacgtcgcgatactaacaataccgctaaacgcacaaaaataccgccgaacccgataatattcgattcgcgctcgcgcaattcgtcgacgttaaacattcgcgctcgataccgttcgccgctatacgttcccataaaacgcgcatccgttccatttcgaaatcgaacgtaacaaccaacatcttaccgcaattatcgtaacgaataccgttttaatcgcaaaaaactttaataacgcgatttcccgccaaacaaaactacgccttcaaactaccgaacgtataataaaccccgacataaatcacgccgctattataacccgtctaataacaaaccgaaacgaaatctttttccaacaaaacaattacgaacgtccgaataaacatcaatcaattacataaaaatcgaaataacgataataccgccgccaataatcacaaaatcctacattcgctcgcaaccaaacgcgcaccgtttaattcgacaaaaacttttatcgaaatattaat

SEQ ID NO: 10989 - DNA, 834 bp, Artificial Sequence
  chemically treated genomic DNA (Homo sapiens) CpG-island No: 10989
  unsure (3, 5, 9, 20, 28, 35, 39, 41, 54, 56, 59, 68, 70, 72, 85, 87)
  unsure (98, 110, 126, 129, 132, 142, 147, 150, 158, 218, 246, 260)
  unsure (262, 274..275, 313..314, 357, 375, 380..381, 420, 427..428)
  unsure (437, 440, 445, 465, 467, 471, 477, 481, 487, 505, 559..560)
  unsure (578..579, 592, 608, 620, 638, 642, 650, 655, 657, 667, 692)
  unsure (701, 705, 727, 730, 733, 739, 742..743, 749, 755, 757, 793)
  unsure (804..805, 808..809, 814, 816, 818, 820, 822)
tantncganatcgtttacgnatttcgtnttaacgnttanantttttcgcgtttnanatncgttcgatnantnacgcgttatcgtnanacgtttacgtnacgtacgtttancgtatattttcgcgtntanttnttacgtattntcgtntanttttatanttttttttttatatatatatacgttcgtacgtatttatttatattttcgtacgtatatancgttatttatatatacgttattattttnttttttttacgcgntnttacgcgtacgnntcgcgttcgcgttttttatttcgttttcgtttatattnnttttaacgttatttttttcgcgcgtacgtcgttttcgcgcgtngttacgcgttacgtattnttatnntttcgtacgcgttttacgcgtacgttttcgcgtacgtantttacgnnttttcgcgnttntatanttattcgcgcgtatatatantntttnttattntttnttttanttttatatatatatttangtatatatatatttttagcgattcgcgcgttcgttcgcgttcgcgttcgcgcgnnttattttcgtttatattnnttttacgattatnttattcgcgtacgcgntttcgtacgcgnttattcgtacgtatattntcgntttttcgntatantntttcgcgcgnacgcgttcgcgtacgcgttttcgtntacgttcgnacgntttcgtacgtattttcgttcgnttntantttcgntannnttttnttacgntntttcgcgcgtacgtatttacgttatttcgtacgtanttttttcgttnnttnnnatanananananacgtatatatat

SEQ ID NO: 10990 - DNA, 834 bp, Artificial Sequence
  chemically treated genomic DNA (Homo sapiens) CpG-island No: 10990
  unsure (13, 15, 17, 19, 21, 25..26, 30..31, 42, 78, 80, 86, 91..92)
  unsure (96, 102, 105, 108, 130, 134, 143, 168, 178, 180, 185, 193)
  unsure (197, 215, 227, 243, 256..257, 275..276, 330, 348, 354, 358)
  unsure (364, 368, 370, 390, 395, 398, 407..408, 415, 454..455, 460)
  unsure (478, 521..522, 560..561, 573, 575, 589, 617, 677, 685, 688)
  unsure (693, 703, 706, 709, 725, 737, 748, 750, 763, 765, 767, 776)
  unsure (779, 781, 794, 796, 800, 807, 815, 826, 830, 832)
atatatatacgtntntntntntatnnnaannaacgaaaaaantacgtacgaaataacgtaaatacgtacgcgcgaaanancgtaanaaaannntancgaaantanaancgaacgaaaatacgtacgaaancgtncgaacgtanacgaaaacgcgtacgcgaacgcgtncgcgcgaaanantatancgaaaaancganaatatacgtacgaataancgcgtacgaaancgcgtacgcgaataanataatcgtaaaannaatataaacgaaaataanncgcgcgaacgcgaacgcgaacgaacgcgcgaatcgctaaaaatatatatatacntaaatatatatataaaantaaaanaaanaataanaaanantatatatacgcgcgaataantatanaancgcgaaaanncgtaaantacgtacgcgaaaacgtacgcgtaaaacgcgtacgaaannataanaatacgtaacgcgtaacnacgcgcgaaaacgacgtacgcgcgaaaaaaataacgttaaaannaatataaacgaaaacgaaataaaaaacgcgaacgcganncgtacgcgtaanancgcgtaaaaaaaanaaaataataacgtatatataaataacgntatatacgtacgaaaatataaataaatacgtacgaacgtatatatatataaaaaaaaaantataaaantanacganaatacgtaanaantanacgcgaaaatatacgntaaacgtacgtnacgtaaacgtntnacgataacgcgtnantnatcgaacgnatntnaaacgcgaaaaantntaancgttaanacgaaatncgtaaacgatntcgnanta

SEQ ID NO: 10991 - DNA, 834 bp, Artificial Sequence
  chemically treated genomic DNA (Homo sapiens) CpG-island No: 10991
  unsure (13, 15, 17, 19, 21, 25..26, 30..31, 42, 78, 80, 86, 91..92)
  unsure (96, 102, 105, 108, 130, 134, 143, 168, 178, 180, 185, 193)
  unsure (197, 215, 227, 243, 256..257, 275..276, 330, 348, 354, 358)
  unsure (364, 368, 370, 390, 395, 398, 407..408, 415, 454..455, 460)
  unsure (478, 521..522, 560..561, 573, 575, 589, 617, 677, 685, 688)
  unsure (693, 703, 706, 709, 725, 737, 748, 750, 763, 765, 767, 776)
  unsure (779, 781, 794, 796, 800, 807, 815, 826, 830, 832)
gtatatgtgcgtntntntntntatnnnagnnagcgaggaggntgcgtgcgaggtggcgtgggtgcgtgcgcgcgaggngncgtggngaggnnntgncgaggntgnggncgagcgagagtgcgtgcggggncgtncgagcgtgngcgagagcgcgtgcgcgagcgcgtncgcgcgaggngntgtgncgagaggncggnagtgtgcgtgcgggtggncgcgtgcgaggncgcgtgcgcgagtagngtagtcgtggggnnagtgtgagcgagggtggnncgcgcgagcgcgagcgcgagcgagcgcgcgagtcgttaagagtgtgtgtgtgtntgagtgtgtgtgtgaggntgaggnaggnagtggnaggngntgtgtgtgcgcgcgagtggntgtgnggncgcgagggnncgtgggntgcgtgcgcgagagcgtgcgcgtggagcgcgtgcgaggnngtggnagtgcgtggcgcgtggtngcgcgcgagggcggcgtgcgcgcgagagaggtggcgttggggnnagtgtgagcgagggcggggtggagagcgcgagcgcggnncgtgcgcgtggngncgcgtgagagaggngaggtggtagcgtgtgtgtgagtggcgntgtgtgcgtgcgagagtgtgagtgagtgcgtgcgagcgtgtgtgtgtgtgagagagaggntgtgaggntgngcggnagtgcgtggnggntgngcgcgagagtgtgcgntaggcgtgcgtngcgtgagcgtntngcggtagcgcgtngntngtcgagcgngtntngagcgcgagagantntagncgttagngcgaggtncgtgggcggtntcgngnta

SEQ ID NO: 10992 - DNA, 834 bp, Artificial Sequence
  chemically treated genomic DNA (Homo sapiens) CpG-island No: 10992
  unsure (3, 5, 9, 20, 28, 35, 39, 41, 54, 56, 59, 68, 70, 72, 85, 87)
  unsure (98, 110, 126, 129, 132, 142, 147, 150, 158, 218, 246, 260)
  unsure (262, 274..275, 313..314, 357, 375, 380..381, 420, 427..428)
  unsure (437, 440, 445, 465, 467, 471, 477, 481, 487, 505, 559..560)
  unsure (578..579, 592, 608, 620, 638, 642, 650, 655, 657, 667, 692)
  unsure (701, 705, 727, 730, 733, 739, 742..743, 749, 755, 757, 793)
  unsure (804..805, 808..809, 814, 816, 818, 820, 822)
tancncganaccgcccacgnacctcgcnctaacgnctanantctctcgcgctcnanacncgctcgacnancnacgcgctaccgcnanacgctcacgcnacgcacgcctancgcacactctcgcgcncanccnccacgcactnccgcncancctcacancctctctctcacacacacacacgctcgcacgcactcactcacactctcgcacgcacacancgccactcacacacacgctaccacctcncctctctcacgcgncnccacgcgcacgnnccgcgctcgcgctctccaccccgccctcgctcacactnnccccaacgccacctctctcgcgcgcacgccgccctcgcgcgcnaccacgcgccacgcactnccacnncctcgcacgcgctccacgcgcacgctctcgcgcacgcancccacgnnccctcgcgnccncacanccactcgcgcgcacacacancncctnccactncctncctcancctcacacacacactcanacacacacacactcttaacgactcgcgcgctcgctcgcgctcgcgctcgcgcgnnccaccctcgctcacactnnccccacgactacnctactcgcgcacgcgncctcgcacgcgnccacccgcacgcacactnccgncctctcgncacancncctcgcgcgnacgcgctcgcgcacgcgctctcgcncacgctcgnacgnccccgcacgcactctcgctcgnccncancctcgncannncctcnccacgncncctcgcgcgcacgcacccacgccacctcgcacgcancctcctcgctnnctnnnatanananananacgcacatatac

SEQ ID NO: 10993 - DNA, 616 bp, Artificial Sequence
  chemically treated genomic DNA (Homo sapiens) CpG-island No: 10993
gtttgcgcggcgtgttattcggtttgttggtattaaaaattattcggtttttgtaatttattattttggcgatggtttgcgttagttcgcggatagtgtagttaacgttcgtgtcgacgttaatgtgcgataatatcggttgggtgttttttagttagattttatgcgttagttttatgatatgaattttcgtcgtcgttatattatcgacgtgtagaaattcgcgtatcgtgtatcgttttcgcgatacgttttaattagtttttttagtgaaacgcgatttaaatcgttgggatttggtagtatttaaatttgcgtcgaattaatggtgagcgtttgttttttttattgtgtatcgcgttggttgaatttttgtttatatgtttgtttgtttagaatcgttaacgtcgttttttagtatttttagttgtttgtcgtagttattattatcgtaagttagatttagttttaggttagtagttttcgttagcggttttgcgtcggtatggatttgtacggtaagtttacgcgtcggtgttataattaaggtacgcggttgatttattttgcgatcggtaatcgtaggatgagagagaagataatgaaacgttgacgt

SEQ ID NO: 10994 - DNA, 616 bp, Artificial Sequence
  chemically treated genomic DNA (Homo sapiens) CpG-island No: 10994
acgtcaacgtttcattatcttctctctcatcctacgattaccgatcgcaaaataaatcaaccgcgtaccttaattataacaccgacgcgtaaacttaccgtacaaatccataccgacgcaaaaccgctaacgaaaactactaacctaaaactaaatctaacttacgataataataactacgacaaacaactaaaaatactaaaaaacgacgttaacgattctaaacaaacaaacatataaacaaaaattcaaccaacgcgatacacaataaaaaaaacaaacgctcaccattaattcgacgcaaatttaaatactaccaaatcccaacgatttaaatcgcgtttcactaaaaaaactaattaaaacgtatcgcgaaaacgatacacgatacgcgaatttctacacgtcgataatataacgacgacgaaaattcatatcataaaactaacgcataaaatctaactaaaaaacacccaaccgatattatcgcacattaacgtcgacacgaacgttaactacactatccgcgaactaacgcaaaccatcgccaaaataataaattacaaaaaccgaataatttttaataccaacaaaccgaataacacgccgcgcaaac

SEQ ID NO: 10995 - DNA, 616 bp, Artificial Sequence
  chemically treated genomic DNA (Homo sapiens) CpG-island No: 10995
acgttaacgttttattatttttttttttattttgcgattgtcgatcgtaaggtgaattagtcgcgtgttttaattatggtatcgacgcgtgaatttgtcgtgtagatttatgtcgacgtagaatcgttggcggaagttattggtttgaagttgggtttggtttacggtggtgatggttacgataaatagttgaaagtgttggaaagcggcgttggcgattttgggtaaataagtatatgaatagggatttagttagcgcggtgtatagtgggggaaataaacgtttattattggttcgacgtagatttgggtgttgttaaattttagcggtttaagtcgcgttttattggagaaattggttgaagcgtatcgcgagagcggtatacgatgcgcgaatttttgtacgtcgatgatatggcggcggcgagagtttatgttatggagttggcgtatgaagtttggttggagaatatttagtcgatgttgtcgtatattaacgtcggtacgggcgttgattgtattattcgcgagttggcgtaaattatcgttaaagtggtgggttataaaggtcgggtggtttttgatgttagtaaatcggatggtacgtcgcgtaaat

SEQ ID NO: 10996 - DNA, 616 bp, Artificial Sequence
  chemically treated genomic DNA (Homo sapiens) CpG-island No: 10996
atttacgcgacgtaccatccgatttactaacatcaaaaaccacccgacctttataacccaccactttaacgataatttacgccaactcgcgaataatacaatcaacgcccgtaccgacgttaatatacgacaacatcgactaaatattctccaaccaaacttcatacgccaactccataacataaactctcgccgccgccatatcatcgacgtacaaaaattcgcgcatcgtataccgctctcgcgatacgcttcaaccaatttctccaataaaacgcgacttaaaccgctaaaatttaacaacacccaaatctacgtcgaaccaataataaacgtttatttcccccactatacaccgcgctaactaaatccctattcatatacttatttacccaaaatcgccaacgccgctttccaacactttcaactatttatcgtaaccatcaccaccgtaaaccaaacccaacttcaaaccaataacttccgccaacgattctacgtcgacataaatctacacgacaaattcacgcgtcgataccataattaaaacacgcgactaattcaccttacgatcgacaatcgcaaaataaaaaaaaaaataataaaacgttaacgt

SEQ ID NO: 10997 - DNA, 769 bp, Artificial Sequence
  chemically treated genomic DNA (Homo sapiens) CpG-island No: 10997
gatttagagacgttttaatattagattcgttggtatcgcgtagtgcgtttgttcggcgatagatttttgtagatgtagatttgtcgcgcgattaaagattattaggtttagtagcgagttgtcgtttagacggttagcgtcgtgtatcgatatataagcgattttattaacggtaaatagtttcggaataattatattttcgttttttttatttatagttagtgtttgatcggtaattttggtcggaatatcgtttattatgtagtgataggttgggataatcggaatcggtttttttatcggatcgacgtgagcgaaggtacgggaaagttttaggatattcggtagacgggattcgagaatttttttatttaggtgatcgagttttagtttcgcgtgtggtttttacggattattatagtcgcgatttttacggatttcgattatgatggaacgcgtaattacgttacggttcgttaggtttttggcgttcggcgtataacgttttataaaacgttcgttatgtttgtttagtagataatcgtttttattacggtaatttcggtgattagtacgtttcgtaagtaatgtcggtcgggtggaattgttatatttttatattttgtatcggtacgtcggtacggatagttatggattttagagattttcgcgagcgatttggttttatgtaggcggttatttgatgttgtacgtttttgtattatataggaaagttgataatagtggtattagaaggaaatgttgtacg

SEQ ID NO: 10998 - DNA, 769 bp, Artificial Sequence
  chemically treated genomic DNA (Homo sapiens) CpG-island No: 10998
cgtacaacatttccttctaataccactattatcaactttcctatataatacaaaaacgtacaacatcaaataaccgcctacataaaaccaaatcgctcgcgaaaatctctaaaatccataactatccgtaccgacgtaccgatacaaaatataaaaatataacaattccacccgaccgacattacttacgaaacgtactaatcaccgaaattaccgtaataaaaacgattatctactaaacaaacataacgaacgttttataaaacgttatacgccgaacgccaaaaacctaacgaaccgtaacgtaattacgcgttccatcataatcgaaatccgtaaaaatcgcgactataataatccgtaaaaaccacacgcgaaactaaaactcgatcacctaaataaaaaaattctcgaatcccgtctaccgaatatcctaaaactttcccgtaccttcgctcacgtcgatccgataaaaaaaccgattccgattatcccaacctatcactacataataaacgatattccgaccaaaattaccgatcaaacactaactataaataaaaaaaacgaaaatataattattccgaaactatttaccgttaataaaatcgcttatatatcgatacacgacgctaaccgtctaaacgacaactcgctactaaacctaataatctttaatcgcgcgacaaatctacatctacaaaaatctatcgccgaacaaacgcactacgcgataccaacgaatctaatattaaaacgtctctaaatc

SEQ ID NO: 10999 - DNA, 769 bp, Artificial Sequence
  chemically treated genomic DNA (Homo sapiens) CpG-island No: 10999
cgtgtaatatttttttttgatgttattgttgttagtttttttgtatagtataggggcgtgtagtattaaatggtcgtttgtataaaattagatcgttcgcggggatttttagagtttatggttattcgtgtcggcgtatcggtgtaggatatggaaatgtggtagttttattcgatcggtattgtttgcggggcgtattggttatcgaagttgtcgtggtgaaggcggttatttgttgaataaatatggcgaacgttttatggagcgttatgcgtcgaacgttaaagatttggcgggtcgtgacgtggttgcgcgttttattatgatcgaaattcgtgaaggtcgcggttgtgatggttcgtgggggttatacgcgaaattgaaattcgattatttgggtaaagaagttttcgaatttcgtttgtcgggtattttggagttttttcgtattttcgtttacgtcgattcggtgaaagagtcgatttcggttattttaatttgttattatatgatgggcggtatttcgattaaagttatcggttaggtattgattgtgaatgagaaaggcgaagatgtggttgtttcgggattgtttgtcgttggtgaaatcgtttgtgtatcggtatacggcgttaatcgtttgggcggtaattcgttgttggatttggtggtttttggtcgcgcggtaggtttgtatttgtaagagtttatcgtcgagtaggcgtattgcgcgatgttagcgagtttgatgttgaagcgtttttggatt

SEQ ID NO: 11000 - DNA, 769 bp, Artificial Sequence
  chemically treated genomic DNA (Homo sapiens) CpG-island No: 11000
aatccaaaaacgcttcaacatcaaactcgctaacatcgcgcaatacgcctactcgacgataaactcttacaaatacaaacctaccgcgcgaccaaaaaccaccaaatccaacaacgaattaccgcccaaacgattaacgccgtataccgatacacaaacgatttcaccaacgacaaacaatcccgaaacaaccacatcttcgcctttctcattcacaatcaatacctaaccgataactttaatcgaaataccgcccatcatataataacaaattaaaataaccgaaatcgactctttcaccgaatcgacgtaaacgaaaatacgaaaaaactccaaaatacccgacaaacgaaattcgaaaacttctttacccaaataatcgaatttcaatttcgcgtataacccccacgaaccatcacaaccgcgaccttcacgaatttcgatcataataaaacgcgcaaccacgtcacgacccgccaaatctttaacgttcgacgcataacgctccataaaacgttcgccatatttattcaacaaataaccgccttcaccacgacaacttcgataaccaatacgccccgcaaacaataccgatcgaataaaactaccacatttccatatcctacaccgatacgccgacacgaataaccataaactctaaaaatccccgcgaacgatctaattttatacaaacgaccatttaatactacacgcccctatactatacaaaaaaactaacaacaataacatcaaaaaaaaatattacacg

SEQ ID NO: 11001 - DNA, 620 bp, Artificial Sequence
  chemically treated genomic DNA (Homo sapiens) CpG-island No: 11001
gattaagtcgagtcgtagtatttgtgagagagagaagtttgagtggcgttcgcggcggtcgcgttagtcgcgttttttattttaatttttattttaacggtcgtaggcgcgcgcggcggacggacgggcgcgcggcggtttttcgttttcgttttcgtttcggttggggcgcgtggtcgtgttcgtcgcgtgcgcgtgttgcgtttaacggtttcgcggggtaggagtaagtcgcggtcgtcgtttgggttttagggcggtttttggggttaggggtttcgcgtttagcgtttttcgttcgttatttttttcgttacgcgttcgcggcgttttttcgggtggttatcgtttcgtattcggatttttttttggtaagtagtttataaaatttttgaggttaattaacgagtggagttttatggtataggtttcgaagtatgtagtcgcgtggcgagtattaaggtattataggatatttttttggtggcgagttacggtatggtttagtatgatttcgttttagtagtgttacgtttcgaggtgatagtatgcgtatgatgtagtttgttaagtcgtgtgtaatataattatgatataaatatgtgtttttttattttttt

SEQ ID NO: 11002 - DNA, 620 bp, Artificial Sequence
  chemically treated genomic DNA (Homo sapiens) CpG-island No: 11002
aaaaaaataaaaaaacacatatttatatcataattatattacacacgacttaacaaactacatcatacgcatactatcacctcgaaacgtaacactactaaaacgaaatcatactaaaccataccgtaactcgccaccaaaaaaatatcctataataccttaatactcgccacgcgactacatacttcgaaacctataccataaaactccactcgttaattaacctcaaaaattttataaactacttaccaaaaaaaaatccgaatacgaaacgataaccacccgaaaaaacgccgcgaacgcgtaacgaaaaaaataacgaacgaaaaacgctaaacgcgaaacccctaaccccaaaaaccgccctaaaacccaaacgacgaccgcgacttactcctaccccgcgaaaccgttaaacgcaacacgcgcacgcgacgaacacgaccacgcgccccaaccgaaacgaaaacgaaaacgaaaaaccgccgcgcgcccgtccgtccgccgcgcgcgcctacgaccgttaaaataaaaattaaaataaaaaacgcgactaacgcgaccgccgcgaacgccactcaaacttctctctctcacaaatactacgactcgacttaatc

SEQ ID NO: 11003 - DNA, 620 bp, Artificial Sequence
  chemically treated genomic DNA (Homo sapiens) CpG-island No: 11003
ggggagataagaggatatatgtttgtgttatgattgtgttatatacgatttagtagattgtattatgcgtatgttgttatttcgaggcgtggtattattgaggcgaagttatgttgagttatatcgtaattcgttattaaaagagtattttatgatgttttgatgttcgttacgcgattatatgtttcgggatttgtgttatgaggttttattcgttgattggttttagggattttgtggattatttattagaaagggattcggatgcgaggcgataattattcgaaaaggcgtcgcgggcgcgtggcggagagggtggcgggcgggaaacgttgggcgcgggatttttggttttagagatcgttttggggtttaggcggcggtcgcggtttatttttgtttcgcgaggtcgttggacgtagtacgcgtacgcggcggatacggttacgcgttttagtcgggacgggagcgggagcgaggagtcgtcgcgcgttcgttcgttcgtcgcgcgcgtttgcggtcgttggggtgggggttggggtgggggacgcgattggcgcggtcgtcgcgagcgttatttagattttttttttttataagtgttgcggttcggtttagtt

SEQ ID NO: 11004 - DNA, 620 bp, Artificial Sequence
  chemically treated genomic DNA (Homo sapiens) CpG-island No: 11004
aactaaaccgaaccgcaacacttataaaaaaaaaaaatctaaataacgctcgcgacgaccgcgccaatcgcgtcccccaccccaacccccaccccaacgaccgcaaacgcgcgcgacgaacgaacgaacgcgcgacgactcctcgctcccgctcccgtcccgactaaaacgcgtaaccgtatccgccgcgtacgcgtactacgtccaacgacctcgcgaaacaaaaataaaccgcgaccgccgcctaaaccccaaaacgatctctaaaaccaaaaatcccgcgcccaacgtttcccgcccgccaccctctccgccacgcgcccgcgacgccttttcgaataattatcgcctcgcatccgaatccctttctaataaataatccacaaaatccctaaaaccaatcaacgaataaaacctcataacacaaatcccgaaacatataatcgcgtaacgaacatcaaaacatcataaaatactcttttaataacgaattacgatataactcaacataacttcgcctcaataataccacgcctcgaaataacaacatacgcataatacaatctactaaatcgtatataacacaatcataacacaaacatatatcctcttatctcccc

SEQ ID NO: 11005 - DNA, 813 bp, Artificial Sequence
  chemically treated genomic DNA (Homo sapiens) CpG-island No: 11005
  unsure (280, 391, 394)
gtatcgtcgagtggtatcggatgtcggtaatttgttggcgtaataggcgattgtcgatgtgttttgtgttaacggcgatagcgaatggcgcggtttaggcgtgattgaattttttggcgtgtatttgacgtcggattattaacgattcgatgtcgaagtatattttcgttcggtatcgtagtaggtttgcgatgattcgcgcgcgcgttgtggtgaggtattaacgggtaaatgtaagtcgtattaatgttcgttgtttggtaatatttgtaatttttanatcgcgtttggtgcgttgatggtttttttcgaaagagcgtgcgtcgcgtggtattagtatcgttagtaggagagtgaagcgtgaattatatttaattcgtttatcgtagtngtngttacgcgatgtagtaattaattatttgagaattttaacggttcgagatttcgttattgtgttttaaagggttatatcgttattatttacgtttattcggtgaaggtaaatgggcgttacgtgatggattcgtcgtcgatttcgaaattcgataatttaaaaatggatatgatgttcgttttgtaattgttcggcgcggggcgcgagaagcgtatttatgcggtgtcgtcgtttattcgcgtggaaagtttcgatttcgacgattattcgtttatcgtttagtagtgggatgagttatgcgttatttgcggatcgatttatagttattttgatgaagtggtgttggatgacgtcggaaatcgtatgtttgtttgtttcgatatcgattattgtcgttaatagagcgaggtaaaaaatta

SEQ ID NO: 11006 - DNA, 813 bp, Artificial Sequence
  chemically treated genomic DNA (Homo sapiens) CpG-island No: 11006
  unsure (420, 423, 534)
taattttttacctcgctctattaacgacaataatcgatatcgaaacaaacaaacatacgatttccgacgtcatccaacaccacttcatcaaaataactataaatcgatccgcaaataacgcataactcatcccactactaaacgataaacgaataatcgtcgaaatcgaaactttccacgcgaataaacgacgacaccgcataaatacgcttctcgcgccccgcgccgaacaattacaaaacgaacatcatatccatttttaaattatcgaatttcgaaatcgacgacgaatccatcacgtaacgcccatttaccttcaccgaataaacgtaaataataacgatataaccctttaaaacacaataacgaaatctcgaaccgttaaaattctcaaataattaattactacatcgcgtaacnacnactacgataaacgaattaaatataattcacgcttcactctcctactaacgatactaataccacgcgacgcacgctctttcgaaaaaaaccatcaacgcaccaaacgcgatntaaaaattacaaatattaccaaacaacgaacattaatacgacttacatttacccgttaatacctcaccacaacgcgcgcgcgaatcatcgcaaacctactacgataccgaacgaaaatatacttcgacatcgaatcgttaataatccgacgtcaaatacacgccaaaaaattcaatcacgcctaaaccgcgccattcgctatcgccgttaacacaaaacacatcgacaatcgcctattacgccaacaaattaccgacatccgataccactcgacgatac

SEQ ID NO: 11007 - DNA, 813 bp, Artificial Sequence
  chemically treated genomic DNA (Homo sapiens) CpG-island No: 11007
  unsure (420, 423, 534)
tggttttttgtttcgttttgttggcggtaataatcggtatcggagtagataaatatgcggttttcggcgttatttagtattattttattaagatagttgtgggtcgattcgtagatggcgtatggtttattttattgttgaacggtgaacgggtgatcgtcgaaatcgagattttttacgcgggtaaacggcggtatcgtatagatgcgtttttcgcgtttcgcgtcgaatagttgtagggcgggtattatgtttatttttgggttatcgaatttcgggatcggcgacgggtttattacgtagcgtttatttatttttatcggataggcgtaggtggtggcgatatgattttttagagtatagtggcgagatttcgaatcgttggggtttttaaatggttgattgttgtatcgcgtggtngtngttacggtgggcgagttggatataatttacgttttatttttttgttgacgatattgatattacgcggcgtacgttttttcggaggaaattattagcgtattaaacgcggtntgaggattataggtgttattaaatagcgggtattgatgcggtttatatttgttcgttaatattttattataacgcgcgcgcgggttatcgtagatttgttgcggtgtcgggcggaaatgtgtttcggtatcgaatcgttgataattcggcgttaggtgtacgttagaagatttaattacgtttaagtcgcgttattcgttgtcgtcgttgatatagaatatatcggtaatcgtttgttgcgttagtaggttatcggtattcggtattattcgacgatat

SEQ ID NO: 11008 - DNA, 813 bp, Artificial Sequence
  chemically treated genomic DNA (Homo sapiens) CpG-island No: 11008
  unsure (280, 391, 394)
atatcgtcgaataataccgaataccgataacctactaacgcaacaaacgattaccgatatattctatatcaacgacgacaacgaataacgcgacttaaacgtaattaaatcttctaacgtacacctaacgccgaattatcaacgattcgataccgaaacacatttccgcccgacaccgcaacaaatctacgataacccgcgcgcgcgttataataaaatattaacgaacaaatataaaccgcatcaatacccgctatttaataacacctataatcctcanaccgcgtttaatacgctaataatttcctccgaaaaaacgtacgccgcgtaatatcaatatcgtcaacaaaaaaataaaacgtaaattatatccaactcgcccaccgtaacnacnaccacgcgatacaacaatcaaccatttaaaaaccccaacgattcgaaatctcgccactatactctaaaaaatcatatcgccaccacctacgcctatccgataaaaataaataaacgctacgtaataaacccgtcgccgatcccgaaattcgataacccaaaaataaacataatacccgccctacaactattcgacgcgaaacgcgaaaaacgcatctatacgataccgccgtttacccgcgtaaaaaatctcgatttcgacgatcacccgttcaccgttcaacaataaaataaaccatacgccatctacgaatcgacccacaactatcttaataaaataatactaaataacgccgaaaaccgcatatttatctactccgataccgattattaccgccaacaaaacgaaacaaaaaacca

SEQ ID NO: 11009 - DNA, 1622 bp, Artificial Sequence
  chemically treated genomic DNA (Homo sapiens) CpG-island No: 11009
  unsure (921)
gtgttgggtattgtcggggaattcggtttcgggaagattacgttgttgaagtcgattttcgcgcgtttgacgtcgtagtagggggaaatttattacgagaatcgttcgttgtatgtaatgagcgaggtcgatcggcgtcgtttgttgcgtatcgaaagggggggggggggataagtatttttttaaagggtcgcgtcgataggatatttgttttaagattacgtcgttgtacggttggcggcgatattgcggcgagcgtcgcgttttggcgtaggtcgtatattcgtagttttatgtcggaacgttttgtgcgtcgtcggtgtcggtgagcgtgagggttaggtttatgttatagcgttttggtgaagcggaagtggttttgttcgtagttttcgcgtagatagaaacggtgcgcgtcgtggcgttttacgttggtcgaaagttcggttatttcggtttcggtttggcgggtttttttttttgtttacgttagtaatttattgtcgacgtttagatcgcgcgtttgcggtattattattaatttttgaatttcgtcgatttagttgatatgatgtagatgaaattgtaaatgtaggtcgattatgtcgataatttcgttattaagtagcgttagatggtagcgtatgtttgggtcgcgtagattggcgttaaaatttacgcgaaacgcgtggtggttaaatttcgtttgttttagtttataaattagcgcgtaaatcgcgtcggtgtcgtattgcgtggtcgggcgaagtttataagtaggtatggtgtttttttttttgatggattagcgttagtagcgtgtcgatcgattggcgtaggttgtcgttattgttgagcgtatggtaattttgtggagtatagcgggcggcgcgcgttaggcgggcgttaattttattggtngttttaacgttacgggtatttaggcgtttgcgggaggatttttgcggaatttgtaaatagacggttaattattcgtaatggcgggatttcgttcgcggttttcgttagcgattcgtgcgacgggcgttcgtagggtacgtacggtatgttcgattttttgtcgtatcgtaacgacgcggcgatcgtgtttcgtcgtttgattcgttttttgtcgacgcggcgggcggtgatcggcgtagcgatttgcgataaagggttgttcgttattatgattgcgttggtcgcgatgtacgatttgtcgattattttggtgtcgggcggggcgacgttgtcgtcgatcgtcggggaagacgcgggtaaggtgtagattatcggcgcgcgtttcgttaattacgaattttttttgtaggaggtcgtcgaattgggttgtcgcgtttgcgtttcgtcgggcggcgggtgttagtttttcggtacggcgggtatttcgtaggtggtcgcggaggcgttgggtttggcgttgtcgtatttcgcgttggcgtcgttcgggtaggcggtgtggttggagatcgttcgttagtcggcgcgcgcggttagcgagttggatagtcgcggtatattttttcggaaaatttttttttataagttttttaaatttttttgtgtattttttcggcgttggggggtttattaaaattttgggt

SEQ ID NO: 11010 - DNA, 1622 bp, Artificial Sequence
  chemically treated genomic DNA (Homo sapiens) CpG-island No: 11010
  unsure (702)
acccaaaattttaataaaccccccaacgccgaaaaaatacacaaaaaaatttaaaaaacttataaaaaaaaattttccgaaaaaatataccgcgactatccaactcgctaaccgcgcgcgccgactaacgaacgatctccaaccacaccgcctacccgaacgacgccaacgcgaaatacgacaacgccaaacccaacgcctccgcgaccacctacgaaatacccgccgtaccgaaaaactaacacccgccgcccgacgaaacgcaaacgcgacaacccaattcgacgacctcctacaaaaaaaattcgtaattaacgaaacgcgcgccgataatctacaccttacccgcgtcttccccgacgatcgacgacaacgtcgccccgcccgacaccaaaataatcgacaaatcgtacatcgcgaccaacgcaatcataataacgaacaaccctttatcgcaaatcgctacgccgatcaccgcccgccgcgtcgacaaaaaacgaatcaaacgacgaaacacgatcgccgcgtcgttacgatacgacaaaaaatcgaacataccgtacgtaccctacgaacgcccgtcgcacgaatcgctaacgaaaaccgcgaacgaaatcccgccattacgaataattaaccgtctatttacaaattccgcaaaaatcctcccgcaaacgcctaaatacccgtaacgttaaaacnaccaataaaattaacgcccgcctaacgcgcgccgcccgctatactccacaaaattaccatacgctcaacaataacgacaacctacgccaatcgatcgacacgctactaacgctaatccatcaaaaaaaaaaacaccatacctacttataaacttcgcccgaccacgcaatacgacaccgacgcgatttacgcgctaatttataaactaaaacaaacgaaatttaaccaccacgcgtttcgcgtaaattttaacgccaatctacgcgacccaaacatacgctaccatctaacgctacttaataacgaaattatcgacataatcgacctacatttacaatttcatctacatcatatcaactaaatcgacgaaattcaaaaattaataataataccgcaaacgcgcgatctaaacgtcgacaataaattactaacgtaaacaaaaaaaaaaacccgccaaaccgaaaccgaaataaccgaactttcgaccaacgtaaaacgccacgacgcgcaccgtttctatctacgcgaaaactacgaacaaaaccacttccgcttcaccaaaacgctataacataaacctaaccctcacgctcaccgacaccgacgacgcacaaaacgttccgacataaaactacgaatatacgacctacgccaaaacgcgacgctcgccgcaatatcgccgccaaccgtacaacgacgtaatcttaaaacaaatatcctatcgacgcgaccctttaaaaaaatacttatccccccccccccctttcgatacgcaacaaacgacgccgatcgacctcgctcattacatacaacgaacgattctcgtaataaatttccccctactacgacgtcaaacgcgcgaaaatcgacttcaacaacgtaatcttcccgaaaccgaattccccgacaatacccaacac

SEQ ID NO: 11011 - DNA, 1622 bp, Artificial Sequence
  chemically treated genomic DNA (Homo sapiens) CpG-island No: 11011
  unsure (702)
atttaaaattttggtgagttttttaacgtcggggggatatataagggggtttgagaggtttatggagaagaatttttcgggggggtatgtcgcggttatttagttcgttgatcgcgcgcgtcgattggcgggcgatttttagttatatcgtttgttcggacggcgttagcgcggagtgcggtagcgttagatttagcgttttcgcgattatttgcgaggtgttcgtcgtgtcgaggaattgatattcgtcgttcggcgaggcgtaggcgcgatagtttagttcggcggttttttgtagggagagttcgtggttggcgaaacgcgcgtcgatggtttgtattttgttcgcgtttttttcgacggtcggcggtagcgtcgtttcgttcggtattagaatagtcggtaggtcgtgtatcgcggttagcgtaattatggtggcgggtagttttttatcgtaggtcgttacgtcgattatcgttcgtcgcgtcggtagggagcggattaggcggcgaaatacgatcgtcgcgtcgttgcggtacggtagggaatcgaatatatcgtgcgtgttttgcgagcgttcgtcgtacggatcgttgacgaaggtcgcgaacgggatttcgttattgcgggtgattggtcgtttgtttataggtttcgtagagattttttcgtaggcgtttggatattcgtggcgttgaaatngttagtgaaattaacgttcgtttggcgcgcgtcgttcgttatattttataggattgttatacgtttaataatgacggtagtttgcgttagtcggtcgatacgttgttgacgttgatttattagaaggagaaatattatgtttgtttgtgagtttcgttcggttacgtagtacgatatcgacgcggtttacgcgttgatttgtgagttaaaataggcggagtttgattattacgcgtttcgcgtgggttttaacgttaatttgcgcgatttaaatatgcgttattatttggcgttgtttgatggcgaagttgtcggtatgatcggtttgtatttgtagttttatttgtattatgttaattggatcggcgaaatttaggagttggtggtaatgtcgtaggcgcgcggtttgaacgtcggtagtaagttattggcgtgggtagaagaagaagttcgttaggtcggggtcgaaatgatcgaattttcgattaacgtgaagcgttacgacgcgtatcgtttttatttgcgcgaaggttacgagtagagttattttcgttttattaaggcgttgtaatatgagtttgatttttacgtttatcggtatcggcggcgtatagggcgtttcggtatggggttgcgagtgtgcggtttgcgttagagcgcggcgttcgtcgtagtatcgtcgttaatcgtgtagcggcgtagttttagagtagatgttttgtcggcgcggttttttaaggggatgtttatttttttttttttttttcggtacgtagtaggcgacgtcggtcggtttcgtttattgtatatagcgaacggttttcgtagtgaatttttttttgttgcggcgttaggcgcgcggagatcgattttagtagcgtggttttttcggagtcggatttttcgataatgtttagtat

SEQ ID NO: 11012 - DNA, 1622 bp, Artificial Sequence
  chemically treated genomic DNA (Homo sapiens) CpG-island No: 11012
  unsure (921)
atactaaacattatcgaaaaatccgactccgaaaaaaccacgctactaaaatcgatctccgcgcgcctaacgccgcaacaaaaaaaaattcactacgaaaaccgttcgctatatacaataaacgaaaccgaccgacgtcgcctactacgtaccgaaaaaaaaaaaaaaaaataaacatccccttaaaaaaccgcgccgacaaaacatctactctaaaactacgccgctacacgattaacgacgatactacgacgaacgccgcgctctaacgcaaaccgcacactcgcaaccccataccgaaacgccctatacgccgccgataccgataaacgtaaaaatcaaactcatattacaacgccttaataaaacgaaaataactctactcgtaaccttcgcgcaaataaaaacgatacgcgtcgtaacgcttcacgttaatcgaaaattcgatcatttcgaccccgacctaacgaacttcttcttctacccacgccaataacttactaccgacgttcaaaccgcgcgcctacgacattaccaccaactcctaaatttcgccgatccaattaacataatacaaataaaactacaaatacaaaccgatcataccgacaacttcgccatcaaacaacgccaaataataacgcatatttaaatcgcgcaaattaacgttaaaacccacgcgaaacgcgtaataatcaaactccgcctattttaactcacaaatcaacgcgtaaaccgcgtcgatatcgtactacgtaaccgaacgaaactcacaaacaaacataatatttctccttctaataaatcaacgtcaacaacgtatcgaccgactaacgcaaactaccgtcattattaaacgtataacaatcctataaaatataacgaacgacgcgcgccaaacgaacgttaatttcactaacnatttcaacgccacgaatatccaaacgcctacgaaaaaatctctacgaaacctataaacaaacgaccaatcacccgcaataacgaaatcccgttcgcgaccttcgtcaacgatccgtacgacgaacgctcgcaaaacacgcacgatatattcgattccctaccgtaccgcaacgacgcgacgatcgtatttcgccgcctaatccgctccctaccgacgcgacgaacgataatcgacgtaacgacctacgataaaaaactacccgccaccataattacgctaaccgcgatacacgacctaccgactattctaataccgaacgaaacgacgctaccgccgaccgtcgaaaaaaacgcgaacaaaatacaaaccatcgacgcgcgtttcgccaaccacgaactctccctacaaaaaaccgccgaactaaactatcgcgcctacgcctcgccgaacgacgaatatcaattcctcgacacgacgaacacctcgcaaataatcgcgaaaacgctaaatctaacgctaccgcactccgcgctaacgccgtccgaacaaacgatataactaaaaatcgcccgccaatcgacgcgcgcgatcaacgaactaaataaccgcgacatacccccccgaaaaattcttctccataaacctctcaaacccccttatatatccccccgacgttaaaaaactcaccaaaattttaaat

SEQ ID NO: 11013 - DNA, 1084 bp, Artificial Sequence
  chemically treated genomic DNA (Homo sapiens) CpG-island No: 11013
gcgttttaagtggagggcgcggtgacgaggaagttgcggtcgtttttttacggcgagtcgataatttttacgtcggtgtagagtagttagaatttatcgtcggcgtagtttaggtacggcgtttagatgtcgtcggagttcgggttgttttttatgtttagtatcgatacgcggtttaacggggtgttgattagcgattagttttttaggttacgggagtggtagatgcgtacgttcgggaattattcgaaggtcgaggtggcgatgtagtagttttcgttttggcggtatagggacgggttcgggttgaagtcggtgagtatcgggttagtgatttttatattgttttcggttaatgggatgcggttgtcgcggcgtcgggaacggtttcgttttgcgtcgcgcggtgtttaattagttgtcggttgatggtttttacgcgggtatcggtgagtttgtagagcgatagtatgatgaatatgttcgcgtagagtattatcggtattacgtagaatagaattttgatggtggtgagtattttaatcggcgttacgttgttgttggcggaatagttgacgtacgtttagatttagtttattttcgtttcgttaatcgttaggttaatttttagttgaatagttagtggtagaatatcgttcgtcgtagcggcgatcgttgtagtttttttcgtagtttaatacgttagaagttattagatattgtagcggcgtggtggtattaaagacgaataggaataggatgttgaaggtaaaagtgagcgtttagtttgtggtttatcgttttgtgttttaaagatcgatacgttgggcgttggtatcggtaaaagttttacgtttatgattaaatagatcgttttttagtaattcggtaggtatcgtcgcgtagtttattttgattatgcggcgattattacgtttattgagattatggatcgtacgggtaattagttttttattcgtgttagttttatcgaggattagtacggtattgttattttgcgttattattttaatttgtttaagtacgttgtatatggtttcgttgcggttaataatttcgttaa

SEQ ID NO: 11014 - DNA, 1084 bp, Artificial Sequence
  chemically treated genomic DNA (Homo sapiens) CpG-island No: 11014
ttaacgaaattattaaccgcaacgaaaccatatacaacgtacttaaacaaattaaaataataacgcaaaataacaataccgtactaatcctcgataaaactaacacgaataaaaaactaattacccgtacgatccataatctcaataaacgtaataatcgccgcataatcaaaataaactacgcgacgatacctaccgaattactaaaaaacgatctatttaatcataaacgtaaaacttttaccgataccaacgcccaacgtatcgatctttaaaacacaaaacgataaaccacaaactaaacgctcacttttaccttcaacatcctattcctattcgtctttaataccaccacgccgctacaatatctaataacttctaacgtattaaactacgaaaaaaactacaacgatcgccgctacgacgaacgatattctaccactaactattcaactaaaaattaacctaacgattaacgaaacgaaaataaactaaatctaaacgtacgtcaactattccgccaacaacaacgtaacgccgattaaaatactcaccaccatcaaaattctattctacgtaataccgataatactctacgcgaacatattcatcatactatcgctctacaaactcaccgatacccgcgtaaaaaccatcaaccgacaactaattaaacaccgcgcgacgcaaaacgaaaccgttcccgacgccgcgacaaccgcatcccattaaccgaaaacaatataaaaatcactaacccgatactcaccgacttcaacccgaacccgtccctataccgccaaaacgaaaactactacatcgccacctcgaccttcgaataattcccgaacgtacgcatctaccactcccgtaacctaaaaaactaatcgctaatcaacaccccgttaaaccgcgtatcgatactaaacataaaaaacaacccgaactccgacgacatctaaacgccgtacctaaactacgccgacgataaattctaactactctacaccgacgtaaaaattatcgactcgccgtaaaaaaacgaccgcaacttcctcgtcaccgcgccctccacttaaaacgc

SEQ ID NO: 11015 - DNA, 1084 bp, Artificial Sequence
  chemically treated genomic DNA (Homo sapiens) CpG-island No: 11015
ttggcgagattattggtcgtagcgaagttatgtatagcgtgtttaaataagttgaaatggtggcgtaaagtgatagtatcgtgttgattttcggtgaaattggtacgggtaaagagttgattgttcgtgcgatttataattttagtgggcgtaataatcgtcgtatggttaaaatgaattgcgcggcgatgtttgtcggattgttggaaagcgatttgtttggttatgagcgtggggtttttatcggtgttagcgtttagcgtatcggtttttagagtatagggcgatagattatagattaagcgtttatttttgtttttaatattttgtttttgttcgtttttaatattattacgtcgttgtagtgtttgatggtttttgacgtgttggattacgagaagagttgtagcggtcgtcgttacgacgggcggtgttttattattaattgtttagttgaagattggtttggcgattggcgggacggaggtgggttggatttgggcgtacgttaattatttcgttagtagtagcgtgacgtcggttgaggtgtttattattattaaaattttgttttgcgtggtgtcggtggtgttttacgcgggtatgtttattatgttgtcgttttataagtttatcgatgttcgcgtggaggttattagtcggtagttgattaagtatcgcgcggcgtagggcgaggtcgttttcgacgtcgcgatagtcgtattttattaatcggaggtaatatggaaattattaattcgatatttatcggttttaattcggattcgtttttgtgtcgttagggcgaggattattatatcgttatttcgattttcgagtggttttcgggcgtgcgtatttattattttcgtgatttgaaaaattggtcgttggttagtatttcgttggatcgcgtgtcgatgttggatatgaagggtaattcggatttcggcggtatttgggcgtcgtgtttgagttacgtcgacggtaaattttggttgttttatatcgacgtgaagattgtcgattcgtcgtggaaaaacggtcgtaattttttcgttatcgcgttttttatttagagcgt

SEQ ID NO: 11016 - DNA, 1084 bp, Artificial Sequence
  chemically treated genomic DNA (Homo sapiens) CpG-island No: 11016
acgctctaaataaaaaacgcgataacgaaaaaattacgaccgtttttccacgacgaatcgacaatcttcacgtcgatataaaacaaccaaaatttaccgtcgacgtaactcaaacacgacgcccaaataccgccgaaatccgaattacccttcatatccaacatcgacacgcgatccaacgaaatactaaccaacgaccaatttttcaaatcacgaaaataataaatacgcacgcccgaaaaccactcgaaaatcgaaataacgatataataatcctcgccctaacgacacaaaaacgaatccgaattaaaaccgataaatatcgaattaataatttccatattacctccgattaataaaatacgactatcgcgacgtcgaaaacgacctcgccctacgccgcgcgatacttaatcaactaccgactaataacctccacgcgaacatcgataaacttataaaacgacaacataataaacatacccgcgtaaaacaccaccgacaccacgcaaaacaaaattttaataataataaacacctcaaccgacgtcacgctactactaacgaaataattaacgtacgcccaaatccaacccacctccgtcccgccaatcgccaaaccaatcttcaactaaacaattaataataaaacaccgcccgtcgtaacgacgaccgctacaactcttctcgtaatccaacacgtcaaaaaccatcaaacactacaacgacgtaataatattaaaaacgaacaaaaacaaaatattaaaaacaaaaataaacgcttaatctataatctatcgccctatactctaaaaaccgatacgctaaacgctaacaccgataaaaaccccacgctcataaccaaacaaatcgctttccaacaatccgacaaacatcgccgcgcaattcattttaaccatacgacgattattacgcccactaaaattataaatcgcacgaacaatcaactctttacccgtaccaatttcaccgaaaatcaacacgatactatcactttacgccaccatttcaacttatttaaacacgctatacataacttcgctacgaccaataatctcgccaa

SEQ ID NO: 11017 - DNA, 529 bp, Artificial Sequence
  chemically treated genomic DNA (Homo sapiens) CpG-island No: 11017
tagttagcgtgtaatttgtttttcgttttgttttaattgtgtaaggtaattatcggtaatttgacgatcgtaacgataattcgttaggcgacgtgtttcgcgatttatttttacgcgtagcggttgtattatattattatgtaggattttcgtcggttgtttatttagtttattcggtttacgggcgtgaattttttgttttagtaggtcgagcgttattgtaaagtcgtatagcgtggcggtaggcgttggcgggtagttagggatataaatatttatagggataattttattcgtatcgttttatacgtagtagagatcgtggaagatttcgttattgttatcgtaggtatcgtaggagatataaattttcgggttcggcgcggattgttacgtacgtagcgtaggggatcgtattgtacgggtgatcgcgtcgggaaattttatgtatagtagattatatcgtattgaggtattattcgttattgttttaaagaatatcggacggtttttgttacgtatggtttga

SEQ ID NO: 11018 - DNA, 529 bp, Artificial Sequence
  chemically treated genomic DNA (Homo sapiens) CpG-island No: 11018
tcaaaccatacgtaacaaaaaccgtccgatattctttaaaacaataacgaataatacctcaatacgatataatctactatacataaaatttcccgacgcgatcacccgtacaatacgatcccctacgctacgtacgtaacaatccgcgccgaacccgaaaatttatatctcctacgatacctacgataacaataacgaaatcttccacgatctctactacgtataaaacgatacgaataaaattatccctataaatatttatatccctaactacccgccaacgcctaccgccacgctatacgactttacaataacgctcgacctactaaaacaaaaaattcacgcccgtaaaccgaataaactaaataaacaaccgacgaaaatcctacataataatataatacaaccgctacgcgtaaaaataaatcgcgaaacacgtcgcctaacgaattatcgttacgatcgtcaaattaccgataattaccttacacaattaaaacaaaacgaaaaacaaattacacgctaacta

SEQ ID NO: 11019 - DNA, 529 bp, Artificial Sequence
  chemically treated genomic DNA (Homo sapiens) CpG-island No: 11019
ttagattatgcgtagtaaaggtcgttcggtgttttttagagtagtggcggatgatattttaatgcggtatagtttattgtgtataaagtttttcggcgcggttattcgtgtaatgcgattttttgcgttgcgtgcgtggtagttcgcgtcggattcgaaaatttgtattttttacggtgtttgcggtaatagtggcgggattttttacgatttttattgcgtgtggggcggtacggataaaattgtttttgtggatgtttatatttttggttgttcgttaacgtttgtcgttacgttgtacggttttgtaatggcgttcggtttgttggagtagaaaatttacgttcgtgggtcgggtgaattggatgaataatcggcggagattttgtatggtgatatggtgtagtcgttgcgcgtgaaagtggatcgcgaagtacgtcgtttggcgggttatcgttacggtcgttagattgtcgatgattattttatatagttagggtagggcgaagaataggttgtacgttggttg

SEQ ID NO: 11020 - DNA, 529 bp, Artificial Sequence
  chemically treated genomic DNA (Homo sapiens) CpG-island No: 11020
caaccaacgtacaacctattcttcgccctaccctaactatataaaataatcatcgacaatctaacgaccgtaacgataacccgccaaacgacgtacttcgcgatccactttcacgcgcaacgactacaccatatcaccatacaaaatctccgccgattattcatccaattcacccgacccacgaacgtaaattttctactccaacaaaccgaacgccattacaaaaccgtacaacgtaacgacaaacgttaacgaacaaccaaaaatataaacatccacaaaaacaattttatccgtaccgccccacacgcaataaaaatcgtaaaaaatcccgccactattaccgcaaacaccgtaaaaaatacaaattttcgaatccgacgcgaactaccacgcacgcaacgcaaaaaatcgcattacacgaataaccgcgccgaaaaactttatacacaataaactataccgcattaaaatatcatccgccactactctaaaaaacaccgaacgacctttactacgcataatctaa

SEQ ID NO: 11021 - DNA, 632 bp, Artificial Sequence
  chemically treated genomic DNA (Homo sapiens) CpG-island No: 11021
tattggatcgatatcggtggttaggcgattcggattatttattcggtattcggttattgcgtcgcgtagtatttttaacgtgtggtcggtaattttattttgtaggtatagtacgcgtagcgtcgaataacgttgattcgtattgtcgaacgtcgaggttagtatatttacgacgatttgttcggttagtgttgaagaatcgataattatcgcgtttatgtcgtcggttttagcgatgagcggaatagggcgattttgagcgtttaggcggttggcgatattgcgttgtagtaacgtagcgatttcggttgaatcggtaaatattatttcgcgtacgcgattattattcgttagttgcgcgtttacggttttatttcgatttggtagtaattgtattacgtttggcggtatattcgtttttagtaaaatggcgattttttgcgcggtaattagcggcgtttgttttgtcggttttgttagtacgttgttatttgtcgttagtgcggcggcgatttgttcggtgaaaatagttagcgggaagtttacggattgatatatattataggttttaatggacggtgggtttttttagcgaaattatttcgtatttgttcgtcgattaatggagaaaa

SEQ ID NO: 11022 - DNA, 632 bp, Artificial Sequence
  chemically treated genomic DNA (Homo sapiens) CpG-island No: 11022
ttttctccattaatcgacgaacaaatacgaaataatttcgctaaaaaaacccaccgtccattaaaacctataatatatatcaatccgtaaacttcccgctaactattttcaccgaacaaatcgccgccgcactaacgacaaataacaacgtactaacaaaaccgacaaaacaaacgccgctaattaccgcgcaaaaaatcgccattttactaaaaacgaatataccgccaaacgtaatacaattactaccaaatcgaaataaaaccgtaaacgcgcaactaacgaataataatcgcgtacgcgaaataatatttaccgattcaaccgaaatcgctacgttactacaacgcaatatcgccaaccgcctaaacgctcaaaatcgccctattccgctcatcgctaaaaccgacgacataaacgcgataattatcgattcttcaacactaaccgaacaaatcgtcgtaaatatactaacctcgacgttcgacaatacgaatcaacgttattcgacgctacgcgtactatacctacaaaataaaattaccgaccacacgttaaaaatactacgcgacgcaataaccgaataccgaataaataatccgaatcgcctaaccaccgatatcgatccaata

SEQ ID NO: 11023 - DNA, 632 bp, Artificial Sequence
  chemically treated genomic DNA (Homo sapiens) CpG-island No: 11023
ttttttttattaatcggcggataggtgcggaatgatttcgttaaagaaatttatcgtttattagggtttgtggtgtgtattagttcgtgaatttttcgttggttatttttatcgggtagatcgtcgtcgtattggcggtaggtaatagcgtgttggtaaaatcggtagaataaacgtcgttgattgtcgcgtaagggatcgttattttgttggaagcgggtgtatcgttaggcgtggtgtaattgttgttaggtcggggtgaaatcgtgggcgcgtaattgacgggtgatgatcgcgtgcgcggggtgatgtttatcggtttaatcgaagtcgttacgttattgtagcgtaatatcgttagtcgtttggacgtttagggtcgttttatttcgtttatcgttgaaatcggcggtatgaacgcgatgattgtcgattttttagtattgatcgaataggtcgtcgtggatgtattggtttcggcgttcgatagtgcgggttagcgttgttcggcgttgcgcgtgttgtgtttgtaagatgagattgtcgattatacgttgaaaatgttgcgcggcgtaatggtcgaatgtcggatgggtaattcgggtcgtttgattatcgatatcggtttagtg

SEQ ID NO: 11024 - DNA, 632 bp, Artificial Sequence
  chemically treated genomic DNA (Homo sapiens) CpG-island No: 11024
cactaaaccgatatcgataatcaaacgacccgaattacccatccgacattcgaccattacgccgcgcaacattttcaacgtataatcgacaatctcatcttacaaacacaacacgcgcaacgccgaacaacgctaacccgcactatcgaacgccgaaaccaatacatccacgacgacctattcgatcaatactaaaaaatcgacaatcatcgcgttcataccgccgatttcaacgataaacgaaataaaacgaccctaaacgtccaaacgactaacgatattacgctacaataacgtaacgacttcgattaaaccgataaacatcaccccgcgcacgcgatcatcacccgtcaattacgcgcccacgatttcaccccgacctaacaacaattacaccacgcctaacgatacacccgcttccaacaaaataacgatcccttacgcgacaatcaacgacgtttattctaccgattttaccaacacgctattacctaccgccaatacgacgacgatctacccgataaaaataaccaacgaaaaattcacgaactaatacacaccacaaaccctaataaacgataaatttctttaacgaaatcattccgcacctatccgccgattaataaaaaaaa

SEQ ID NO: 11025 - DNA, 582 bp, Artificial Sequence
  chemically treated genomic DNA (Homo sapiens) CpG-island No: 11025
agtcgttgatgtttgaattcgtttatgcgcgggtttttttttgcgcgttggttggttagttgggtattattcggttgatagatatcgtttttggtattacgtttgatgtcggataaatagtcgaatcgttggcgttgtttggtgaggatgatgatatggattttcgtttattacgtagttattaggtggtaaatggtatcgcggttttgtcggttttcggtacgttggttagtaaaattcgtgcgttttagttttatttcgggatgacgggttataacgggattattgttcgtttgtagtagggtaattagtgatttcggcgttgacggtatttttttggatatggatacgtcgggtggaatggtgttcggggcgtttgattgcgtcgatattattgttcggtatgcgcgatattaaatttatttgggcgttggttaatgatatgaattggagggaaggtaaattttttgttagttcggtatcgcgacggttgggtaaataatcgggtaagaacgggttattgggggtatgatggtttaaagaattatggcgttcggttaaaattatatagaatgattttaa

SEQ ID NO: 11026 - DNA, 582 bp, Artificial Sequence
  chemically treated genomic DNA (Homo sapiens) CpG-island No: 11026
ttaaaatcattctatataattttaaccgaacgccataattctttaaaccatcatacccccaataacccgttcttacccgattatttacccaaccgtcgcgataccgaactaacaaaaaatttaccttccctccaattcatatcattaaccaacgcccaaataaatttaatatcgcgcataccgaacaataatatcgacgcaatcaaacgccccgaacaccattccacccgacgtatccatatccaaaaaaataccgtcaacgccgaaatcactaattaccctactacaaacgaacaataatcccgttataacccgtcatcccgaaataaaactaaaacgcacgaattttactaaccaacgtaccgaaaaccgacaaaaccgcgataccatttaccacctaataactacgtaataaacgaaaatccatatcatcatcctcaccaaacaacgccaacgattcgactatttatccgacatcaaacgtaataccaaaaacgatatctatcaaccgaataatacccaactaaccaaccaacgcgcaaaaaaaaacccgcgcataaacgaattcaaacatcaacgact

SEQ ID NO: 11027 - DNA, 582 bp, Artificial Sequence
  chemically treated genomic DNA (Homo sapiens) CpG-island No: 11027
ttgaggttattttatgtgattttaatcgagcgttatagttttttgggttattatatttttaatgattcgtttttgttcggttgtttatttagtcgtcgcgatgtcgaattggtaaaaagtttattttttttttagtttatgttattggttagcgtttaaatgggtttgatatcgcgtatatcgggtaataatgtcggcgtagttaaacgtttcggatattattttattcggcgtatttatatttagaagaatgtcgttaacgtcggggttattgattgttttgttgtaggcgagtaatgatttcgttgtaattcgttatttcggaataaggttgaagcgtacgggttttattgattagcgtgtcggaaatcggtaagatcgcgatattatttgttatttgatagttgcgtgatggacggggatttatgttattatttttattaaatagcgttagcggttcggttatttgttcggtattaagcgtgatgttagagacggtatttgttagtcgggtgatgtttaattggttagttagcgcgtaaaagaaaattcgcgtataggcgggtttaagtattagcggtt

SEQ ID NO: 11028 - DNA, 582 bp, Artificial Sequence
  chemically treated genomic DNA (Homo sapiens) CpG-island No: 11028
aaccgctaatacttaaacccgcctatacgcgaattttcttttacgcgctaactaaccaattaaacatcacccgactaacaaataccgtctctaacatcacgcttaataccgaacaaataaccgaaccgctaacgctatttaataaaaataataacataaatccccgtccatcacgcaactatcaaataacaaataatatcgcgatcttaccgatttccgacacgctaatcaataaaacccgtacgcttcaaccttattccgaaataacgaattacaacgaaatcattactcgcctacaacaaaacaatcaataaccccgacgttaacgacattcttctaaatataaatacgccgaataaaataatatccgaaacgtttaactacgccgacattattacccgatatacgcgatatcaaacccatttaaacgctaaccaataacataaactaaaaaaaaaataaactttttaccaattcgacatcgcgacgactaaataaacaaccgaacaaaaacgaatcattaaaaatataataacccaaaaaactataacgctcgattaaaatcacataaaataacctcaa

SEQ ID NO: 11029 - DNA, 839 bp, Artificial Sequence
  chemically treated genomic DNA (Homo sapiens) CpG-island No: 11029
atcgtattcgcgaggattttatttttattgaagaagttcgtagtgattagcggtagtgtcgatagtgttgcgtcgtttattaggaagtagagataaattagcggaatagatttacgtagatcgtttattttgaagatgttttgttcgtgatggtaggttagaatgacggaatcggatgttaggaatagtagcgttttaaagaacgcgtgggttattaagtggaaaatcgtcgtattttatgtttgtacgttaagcgcgaggaatatgtagttaatttggtttatggtagagtaagcgagaatacgtttgatgtcggtttgtagtagcgcggaaaaatcggttagtagtagcgtaatcgtttcgataatatttattagatgtagaattttcggcgttatttaggaataggtcgttggtacgggcgattaggtagatattcgcggttattatgcgttgcggttttgattagcgcggagataggcgttggggttcgttatcgtcgtcgttaagttatgtttgtaagtgtaattgcgtagatttatcgacgggatcgtttagtagtattagcgtcgtttatattagtatgttattgtcgttagtaaagtgcgttggtgttagttttattatttcgcggaagtttagggtgtttagttcgttgtaaagaatgaatagtgcgaaagcgaggaatacgttatttatacgggttacgacgaacgtttttattgtcgtgcgttatttttcggatcggtgtaatagaattcgattagtagataggagtataggtttacgtttttttagtcgaggtatattagtagtaggttgtcggtaagtattagaat

SEQ ID NO: 11030 - DNA, 839 bp, Artificial Sequence
  chemically treated genomic DNA (Homo sapiens) CpG-island No: 11030
attctaatacttaccgacaacctactactaatatacctcgactaaaaaaacgtaaacctatactcctatctactaatcgaattctattacaccgatccgaaaaataacgcacgacaataaaaacgttcgtcgtaacccgtataaataacgtattcctcgctttcgcactattcattctttacaacgaactaaacaccctaaacttccgcgaaataataaaactaacaccaacgcactttactaacgacaataacatactaatataaacgacgctaatactactaaacgatcccgtcgataaatctacgcaattacacttacaaacataacttaacgacgacgataacgaaccccaacgcctatctccgcgctaatcaaaaccgcaacgcataataaccgcgaatatctacctaatcgcccgtaccaacgacctattcctaaataacgccgaaaattctacatctaataaatattatcgaaacgattacgctactactaaccgatttttccgcgctactacaaaccgacatcaaacgtattctcgcttactctaccataaaccaaattaactacatattcctcgcgcttaacgtacaaacataaaatacgacgattttccacttaataacccacgcgttctttaaaacgctactattcctaacatccgattccgtcattctaacctaccatcacgaacaaaacatcttcaaaataaacgatctacgtaaatctattccgctaatttatctctacttcctaataaacgacgcaacactatcgacactaccgctaatcactacgaacttcttcaataaaaataaaatcctcgcgaatacgat

SEQ ID NO: 11031 - DNA, 839 bp, Artificial Sequence
  chemically treated genomic DNA (Homo sapiens) CpG-island No: 11031
gttttggtgtttgtcgataatttgttgttgatgtatttcggttgggaaggcgtgggtttgtgtttttatttgttgatcgggttttattatatcgattcgaagaatggcgtacggtaatgaaagcgttcgtcgtgattcgtgtgggtgacgtgtttttcgttttcgtattgtttattttttataacgaattgggtattttgaattttcgcgaaatggtggaattggtattagcgtattttgttgacggtaataatatgttgatgtgggcgacgttgatgttgttgggcggtttcgtcggtaaatttgcgtagttgtatttgtagatatggtttgacgacggcgatggcgggttttaacgtttgttttcgcgttgattaaagtcgtaacgtatggtaatcgcgggtgtttatttgatcgttcgtattaacggtttgtttttgaatgacgtcggaagttttgtatttggtgggtattgtcggggcggttacgttgttgttggtcggttttttcgcgttgttatagatcgatattaaacgtgttttcgtttattttattatgagttagattggttatatgtttttcgcgtttggcgtgtaggtatgggatgcggcgattttttatttgatgatttacgcgttttttaaagcgttgttgtttttggtattcggtttcgttattttggtttgttattacgaatagaatatttttaagatgggcggtttgcgtaaatttatttcgttggtttatttttgttttttggtgggcggcgtagtattgtcggtattatcgttggttattgcgggtttttttagtaaggatgagattttcgcgggtgcgat

SEQ ID NO: 11032 - DNA, 839 bp, Artificial Sequence
  chemically treated genomic DNA (Homo sapiens) CpG-island No: 11032
atcgcacccgcgaaaatctcatccttactaaaaaaacccgcaataaccaacgataataccgacaatactacgccgcccaccaaaaaacaaaaataaaccaacgaaataaatttacgcaaaccgcccatcttaaaaatattctattcgtaataacaaaccaaaataacgaaaccgaataccaaaaacaacaacgctttaaaaaacgcgtaaatcatcaaataaaaaatcgccgcatcccatacctacacgccaaacgcgaaaaacatataaccaatctaactcataataaaataaacgaaaacacgtttaatatcgatctataacaacgcgaaaaaaccgaccaacaacaacgtaaccgccccgacaatacccaccaaatacaaaacttccgacgtcattcaaaaacaaaccgttaatacgaacgatcaaataaacacccgcgattaccatacgttacgactttaatcaacgcgaaaacaaacgttaaaacccgccatcgccgtcgtcaaaccatatctacaaatacaactacgcaaatttaccgacgaaaccgcccaacaacatcaacgtcgcccacatcaacatattattaccgtcaacaaaatacgctaataccaattccaccatttcgcgaaaattcaaaatacccaattcgttataaaaaataaacaatacgaaaacgaaaaacacgtcacccacacgaatcacgacgaacgctttcattaccgtacgccattcttcgaatcgatataataaaacccgatcaacaaataaaaacacaaacccacgccttcccaaccgaaatacatcaacaacaaattatcgacaaacaccaaaac

SEQ ID NO: 11033 - DNA, 612 bp, Artificial Sequence
  chemically treated genomic DNA (Homo sapiens) CpG-island No: 11033
  unsure (151, 165, 319)
cgagggaaaaggaaaatcgtatataaggttagataataaacgagttcgaaggtaaaagggaaaagttcggggagcgaaaagagagaggtaacgtataagaatagcgggagcgtatataggtcggtaagtttagatcgggaaattcgatcgngttacgacgttaanaaaggaacgcggtaaagcgtcggagagaagtcgggaagcggaaaggggcgtattatcggaaacgacgagttatagtatcgtcgcggtatcggaggaaagggatcgcggttaacggggaaataggttttaattataaggtcggaataaacggggnaattttttcgtaattaaacgacgatgtggttttcgtttttaaattcgtattggatgcgttggcgtgtcgggtgtgcgatttaatgtcgttttgtttttgagataatacggttcgattattggcggcgttgtttttaatcgtttagttacgtatattagggattacgtttgacggataagtaattgtaagtttcgggtatgtagatttgttaaaagtttgtttttgtattagggtataattagacggaacggtatttgatggttacgggattggtgtatcgattggataaaatt

SEQ ID NO: 11034 - DNA, 612 bp, Artificial Sequence
  chemically treated genomic DNA (Homo sapiens) CpG-island No: 11034
  unsure (294, 448, 462)
aattttatccaatcgatacaccaatcccgtaaccatcaaataccgttccgtctaattataccctaatacaaaaacaaacttttaacaaatctacatacccgaaacttacaattacttatccgtcaaacgtaatccctaatatacgtaactaaacgattaaaaacaacgccgccaataatcgaaccgtattatctcaaaaacaaaacgacattaaatcgcacacccgacacgccaacgcatccaatacgaatttaaaaacgaaaaccacatcgtcgtttaattacgaaaaaattnccccgtttattccgaccttataattaaaacctatttccccgttaaccgcgatccctttcctccgataccgcgacgatactataactcgtcgtttccgataatacgcccctttccgcttcccgacttctctccgacgctttaccgcgttcctttnttaacgtcgtaacncgatcgaatttcccgatctaaacttaccgacctatatacgctcccgctattcttatacgttacctctctcttttcgctccccgaacttttcccttttaccttcgaactcgtttattatctaaccttatatacgattttccttttccctcg

SEQ ID NO: 11035 - DNA, 612 bp, Artificial Sequence
  chemically treated genomic DNA (Homo sapiens) CpG-island No: 11035
  unsure (294, 448, 462)
agttttatttagtcggtgtattaatttcgtggttattagatatcgtttcgtttggttatgttttgatgtaggggtagatttttgataaatttgtatattcgaaatttgtagttgtttattcgttaggcgtgatttttgatatgcgtggttggacgattaagggtaacgtcgttagtggtcgggtcgtattattttaggaataggacggtattaaatcgtatattcgatacgttagcgtatttagtacggatttggggacggaaattatatcgtcgtttgattacggaagggttntttcgtttgtttcggttttgtggttggggtttgttttttcgttggtcgcggtttttttttttcggtgtcgcggcggtgttgtggttcgtcgttttcggtggtgcgttttttttcgtttttcggttttttttcggcgttttgtcgcgtttttttnttggcgtcgtggtncggtcgggtttttcggtttgggtttgtcggtttgtgtgcgttttcgttgtttttgtgcgttgttttttttttttcgtttttcgggttttttttttttgttttcgggttcgtttgttgtttggttttgtgtgcggttttttttttttttcg

SEQ ID NO: 11036 - DNA, 612 bp, Artificial Sequence
  chemically treated genomic DNA (Homo sapiens) CpG-island No: 11036
  unsure (151, 165, 319)
cgaaaaaaaaaaaaaaccgcacacaaaaccaaacaacaaacgaacccgaaaacaaaaaaaaaaaacccgaaaaacgaaaaaaaaaaaacaacgcacaaaaacaacgaaaacgcacacaaaccgacaaacccaaaccgaaaaacccgaccgnaccacgacgccaanaaaaaaacgcgacaaaacgccgaaaaaaaaccgaaaaacgaaaaaaaacgcaccaccgaaaacgacgaaccacaacaccgccgcgacaccgaaaaaaaaaaaccgcgaccaacgaaaaaacaaaccccaaccacaaaaccgaaacaaacgaaanaacccttccgtaatcaaacgacgatataatttccgtccccaaatccgtactaaatacgctaacgtatcgaatatacgatttaataccgtcctattcctaaaataatacgacccgaccactaacgacgttacccttaatcgtccaaccacgcatatcaaaaatcacgcctaacgaataaacaactacaaatttcgaatatacaaatttatcaaaaatctacccctacatcaaaacataaccaaacgaaacgatatctaataaccacgaaattaatacaccgactaaataaaact

SEQ ID NO: 11037 - DNA, 544 bp, Artificial Sequence
  chemically treated genomic DNA (Homo sapiens) CpG-island No: 11037
tcgtatcgtcgtgtttttcggtttaagttttaatattcgggcgaattggcgtgttttattagttcggtagtatgaattattattcgttagttattttattggagacgacggaagatcgttgtcgaagcggcgttttatcgtttttagtatgacgttttgtattgttttattgttgaagtcgtcggtagtgatcgtttagtgtagtgttttacgattatagtagtttagcgcgaacgtgatacgtagttttttttcgttattatagtagaattcgaattcgttagagtattatcgttgattgtttttttttacggttattttgtttgtatgtgttcgtttcgatggcggtatagtaggttttcgtttaagtaatagcgtattttggcgtatgattcggtaaatacgtttggtattgatcgtaggtatattattaagttttgtttgtcgcgaagtagcgtttatattcgacgataattatagatttgtaggtagtgtgtttttgagaatgttgaatgttaggttcgagtgggattgtttagtataa

SEQ ID NO: 11038 - DNA, 544 bp, Artificial Sequence
  chemically treated genomic DNA (Homo sapiens) CpG-island No: 11038
ttatactaaacaatcccactcgaacctaacattcaacattctcaaaaacacactacctacaaatctataattatcgtcgaatataaacgctacttcgcgacaaacaaaacttaataatatacctacgatcaataccaaacgtatttaccgaatcatacgccaaaatacgctattacttaaacgaaaacctactataccgccatcgaaacgaacacatacaaacaaaataaccgtaaaaaaaaacaatcaacgataatactctaacgaattcgaattctactataataacgaaaaaaaactacgtatcacgttcgcgctaaactactataatcgtaaaacactacactaaacgatcactaccgacgacttcaacaataaaacaatacaaaacgtcatactaaaaacgataaaacgccgcttcgacaacgatcttccgtcgtctccaataaaataactaacgaataataattcatactaccgaactaataaaacacgccaattcgcccgaatattaaaacttaaaccgaaaaacacgacgatacga

SEQ ID NO: 11039 - DNA, 544 bp, Artificial Sequence
  chemically treated genomic DNA (Homo sapiens) CpG-island No: 11039
ttatattgaatagttttattcggatttaatatttagtatttttagaaatatattgtttgtaggtttatggttatcgtcgggtatgggcgttgtttcgcgataggtagaatttgatggtatgtttgcgattaatgttaaacgtgtttatcggattatgcgttagaatgcgttgttgtttgagcgaaaatttgttgtatcgttatcgaaacgggtatatataggtagagtggtcgtgaaagaaagtaattagcgatggtgttttgacgggttcgagttttgttgtgataacggagagagattgcgtgttacgttcgcgttggattgttgtgatcgtgaggtattgtattgggcggttattatcggcggttttaatagtgaaatagtataggacgttatgttgggagcggtggaacgtcgtttcggtaacgatttttcgtcgtttttagtggagtggttgacggataatggtttatgttatcgggttaatgaaatacgttagttcgttcggatgttgggatttgaatcgaagaatacggcggtgcgg

SEQ ID NO: 11040 - DNA, 544 bp, Artificial Sequence
  chemically treated genomic DNA (Homo sapiens) CpG-island No: 11040
ccgcaccgccgtattcttcgattcaaatcccaacatccgaacgaactaacgtatttcattaacccgataacataaaccattatccgtcaaccactccactaaaaacgacgaaaaatcgttaccgaaacgacgttccaccgctcccaacataacgtcctatactatttcactattaaaaccgccgataataaccgcccaatacaatacctcacgatcacaacaatccaacgcgaacgtaacacgcaatctctctccgttatcacaacaaaactcgaacccgtcaaaacaccatcgctaattactttctttcacgaccactctacctatatatacccgtttcgataacgatacaacaaattttcgctcaaacaacaacgcattctaacgcataatccgataaacacgtttaacattaatcgcaaacataccatcaaattctacctatcgcgaaacaacgcccatacccgacgataaccataaacctacaaacaatatatttctaaaaatactaaatattaaatccgaataaaactattcaatataa

SEQ ID NO: 11041 - DNA, 1077 bp, Artificial Sequence
  chemically treated genomic DNA (Homo sapiens) CpG-island No: 11041
ggtagtttgacgcgtatgttgcgcgatagttttcgggaattggggttggattaggttattgtcgaagcggcggaatatttttcgatgcgcgcgatcgtttgttttatggtcgtatgttcgagatcgcgaaatgagttgttgttaggtttttaggatattatcggttcgacgattcgtgttttaatttaaagatttggcgtgttgggtttttcggttgatcgggggacgtagtttttttgttatatcgcggcgtattcgaagttagttgacgtgaatacgtattatacgttgtcggattttattatgaatcgtttgttgatagttttgtacgcggattcggttatagcgttgcgttgaatagagtcgtggtatttttagcgcgatagtttgttagcgttgggttattgattagtaaacgggttgtttatttgtcgtggtttatttttttagttaatttaaaaaattagtatgtttttcgttcgtcggaacggtcgaagaggtaaattattgatggtaatagtgacgcgtggtcggtgtcgtattgatattttttgttagatgttgtgtcgttttttcgagtaaattatttagtaataacgttatcgtttgcgggttttttagacggtaggtatcgttaaatgttttttagcgtaatttttttagaacgataaaatagcgtttaggtaacgattaggcgttatacgttttagtacgttagcgggtaaaaatttgttcgttttgattatttgtttgtattagtaggtttcgttgcgttaacgttttttttttttagcgataacgggttgaaaattatttatataaggcggtaatttgttgggggagtttcgggaaagtagagtgttggcggtgatttattttttgtagtagcgttagatgttgcgcgatttgcgttagtgttagatgagcggggatttagtatcgacgttagtttttttattaatgttagacgtaggttaagcggcgtattttatatggtcgtcgtttgtttatggtttgaatttgtatacgcgaaaagaagtttttttattagtggtttataaacggttgttaggttta

SEQ ID NO: 11042 - DNA, 1077 bp, Artificial Sequence
  chemically treated genomic DNA (Homo sapiens) CpG-island No: 11042
taaacctaacaaccgtttataaaccactaataaaaaaacttcttttcgcgtatacaaattcaaaccataaacaaacgacgaccatataaaatacgccgcttaacctacgtctaacattaataaaaaaactaacgtcgatactaaatccccgctcatctaacactaacgcaaatcgcgcaacatctaacgctactacaaaaaataaatcaccgccaacactctactttcccgaaactcccccaacaaattaccgccttatataaataattttcaacccgttatcgctaaaaaaaaaaaacgttaacgcaacgaaacctactaatacaaacaaataatcaaaacgaacaaatttttacccgctaacgtactaaaacgtataacgcctaatcgttacctaaacgctattttatcgttctaaaaaaattacgctaaaaaacatttaacgatacctaccgtctaaaaaacccgcaaacgataacgttattactaaataatttactcgaaaaaacgacacaacatctaacaaaaaatatcaatacgacaccgaccacgcgtcactattaccatcaataatttacctcttcgaccgttccgacgaacgaaaaacatactaattttttaaattaactaaaaaaataaaccacgacaaataaacaacccgtttactaatcaataacccaacgctaacaaactatcgcgctaaaaataccacgactctattcaacgcaacgctataaccgaatccgcgtacaaaactatcaacaaacgattcataataaaatccgacaacgtataatacgtattcacgtcaactaacttcgaatacgccgcgatataacaaaaaaactacgtcccccgatcaaccgaaaaacccaacacgccaaatctttaaattaaaacacgaatcgtcgaaccgataatatcctaaaaacctaacaacaactcatttcgcgatctcgaacatacgaccataaaacaaacgatcgcgcgcatcgaaaaatattccgccgcttcgacaataacctaatccaaccccaattcccgaaaactatcgcgcaacatacgcgtcaaactacc

SEQ ID NO: 11043 - DNA, 1077 bp, Artificial Sequence
  chemically treated genomic DNA (Homo sapiens) CpG-island No: 11043
taaatttggtagtcgtttgtgaattattgatgaaggaattttttttcgcgtgtgtaagtttagattatggataaacggcggttatgtaaaatgcgtcgtttagtttgcgtttgatattggtggaaaaattggcgtcgatgttggattttcgtttatttggtattgacgtagatcgcgtagtatttggcgttgttgtaaaaaatggattatcgttagtattttgttttttcggagtttttttagtaaattgtcgttttgtatgagtggtttttagttcgttgtcgttggaaggaaaaggcgttaacgtaacgaggtttattggtgtaggtaggtgattagagcgagtaaatttttattcgttggcgtgttggggcgtataacgtttggtcgttgtttgggcgttgttttatcgttttggaggagttgcgttggggggtatttggcgatgtttgtcgtttgggaagttcgtaagcggtggcgttgttgttgggtgatttgttcgagaaagcgatataatatttggtagagagtattaatgcggtatcgattacgcgttattattattattagtggtttgttttttcgatcgtttcgacgggcggggagtatgttgattttttaagttggttgggaaagtggattacggtagataaataattcgtttgttggttagtgatttaacgttggtaaattgtcgcgttggggatgttacgattttgtttagcgtagcgttatagtcgaattcgcgtataaagttgttaataaacggtttataatgaagttcggtagcgtgtggtgcgtgtttacgttaattggtttcggatacgtcgcggtgtggtagaaagattgcgtttttcggttagtcgagaagtttagtacgttaggtttttgggttggagtacgggtcgtcgggtcggtggtgttttgggaatttaatagtagtttatttcgcggtttcgagtatgcggttatagaataaacgatcgcgcgtatcggggaatgtttcgtcgtttcggtaatggtttgatttagttttagttttcgaaaattgtcgcgtagtatacgcgttaggttgtt

SEQ ID NO: 11044 - DNA, 1077 bp, Artificial Sequence
  chemically treated genomic DNA (Homo sapiens) CpG-island No: 11044
aacaacctaacgcgtatactacgcgacaattttcgaaaactaaaactaaatcaaaccattaccgaaacgacgaaacattccccgatacgcgcgatcgtttattctataaccgcatactcgaaaccgcgaaataaactactattaaattcccaaaacaccaccgacccgacgacccgtactccaacccaaaaacctaacgtactaaacttctcgactaaccgaaaaacgcaatctttctaccacaccgcgacgtatccgaaaccaattaacgtaaacacgcaccacacgctaccgaacttcattataaaccgtttattaacaactttatacgcgaattcgactataacgctacgctaaacaaaatcgtaacatccccaacgcgacaatttaccaacgttaaatcactaaccaacaaacgaattatttatctaccgtaatccactttcccaaccaacttaaaaaatcaacatactccccgcccgtcgaaacgatcgaaaaaacaaaccactaataataataataacgcgtaatcgataccgcattaatactctctaccaaatattatatcgctttctcgaacaaatcacccaacaacaacgccaccgcttacgaacttcccaaacgacaaacatcgccaaataccccccaacgcaactcctccaaaacgataaaacaacgcccaaacaacgaccaaacgttatacgccccaacacgccaacgaataaaaatttactcgctctaatcacctacctacaccaataaacctcgttacgttaacgccttttccttccaacgacaacgaactaaaaaccactcatacaaaacgacaatttactaaaaaaactccgaaaaaacaaaatactaacgataatccattttttacaacaacgccaaatactacgcgatctacgtcaataccaaataaacgaaaatccaacatcgacgccaatttttccaccaatatcaaacgcaaactaaacgacgcattttacataaccgccgtttatccataatctaaacttacacacgcgaaaaaaaattccttcatcaataattcacaaacgactaccaaattta

SEQ ID NO: 11045 - DNA, 503 bp, Artificial Sequence
  chemically treated genomic DNA (Homo sapiens) CpG-island No: 11045
gtttcggtatcggaaaaatcggttttttaaggtgtagcgaaaggcgattacgtaattttaatttaatcgttttttgaattgagttttcgttcgacgaaagatttgagcggtgcggatatgtggggagttattatgtttgattaattggtgtgtcgcgtgatgttttattagatgcgttatgaaggtatttttatttcgttatttgaatagggtacgttggttttttcgggtaatttggggatgtttgaatggggtcgggatttttttgatttaaatcggaagtgcgattgttaatttaaggtattgtcgtttgtttgaaattgaattcgcgtggtttggtaattttatggtatagttagagattttaagggacggggacggattcggtatttaattacggtaggggttacgtatggtgtttcgtttaattcgttttttttataattgggtttgtttttgtaattagggtatttttttagtttgttattacgtttcggaatagt

SEQ ID NO: 11046 - DNA, 503 bp, Artificial Sequence
  chemically treated genomic DNA (Homo sapiens) CpG-island No: 11046
actattccgaaacgtaataacaaactaaaaaaataccctaattacaaaaacaaacccaattataaaaaaaacgaattaaacgaaacaccatacgtaacccctaccgtaattaaataccgaatccgtccccgtcccttaaaatctctaactataccataaaattaccaaaccacgcgaattcaatttcaaacaaacgacaataccttaaattaacaatcgcacttccgatttaaatcaaaaaaatcccgaccccattcaaacatccccaaattacccgaaaaaaccaacgtaccctattcaaataacgaaataaaaataccttcataacgcatctaataaaacatcacgcgacacaccaattaatcaaacataataactccccacatatccgcaccgctcaaatctttcgtcgaacgaaaactcaattcaaaaaacgattaaattaaaattacgtaatcgcctttcgctacaccttaaaaaaccgatttttccgataccgaaac

SEQ ID NO: 11047 - DNA, 503 bp, Artificial Sequence
  chemically treated genomic DNA (Homo sapiens) CpG-island No: 11047
attgtttcgaagcgtagtgataagttgggagggtattttggttataagggtaaatttaattgtaagaagaacgggttgaacggaatattatacgtaatttttatcgtggttgaatgtcggattcgttttcgttttttggaatttttggttgtattatagggttgttaggttacgcggatttagttttaaataaacggtagtgttttgggttggtaatcgtattttcgatttggattaaaggaatttcggttttatttaaatatttttaggttattcgggaagattagcgtattttgtttagatggcggggtgaaaatgtttttatagcgtatttggtggaatattacgcggtatattagttggttaaatatggtggttttttatatattcgtatcgtttaaatttttcgtcggacggaagtttagtttagaaaacggttgagttggggttacgtaatcgtttttcgttgtattttggggaatcggttttttcggtgtcggaat

SEQ ID NO: 11048 - DNA, 503 bp, Artificial Sequence
  chemically treated genomic DNA (Homo sapiens) CpG-island No: 11048
attccgacaccgaaaaaaccgattccccaaaatacaacgaaaaacgattacgtaaccccaactcaaccgttttctaaactaaacttccgtccgacgaaaaatttaaacgatacgaatatataaaaaaccaccatatttaaccaactaatataccgcgtaatattccaccaaatacgctataaaaacattttcaccccgccatctaaacaaaatacgctaatcttcccgaataacctaaaaatatttaaataaaaccgaaattcctttaatccaaatcgaaaatacgattaccaacccaaaacactaccgtttatttaaaactaaatccgcgtaacctaacaaccctataatacaaccaaaaattccaaaaaacgaaaacgaatccgacattcaaccacgataaaaattacgtataatattccgttcaacccgttcttcttacaattaaatttacccttataaccaaaataccctcccaacttatcactacgcttcgaaacaat

SEQ ID NO: 11049 - DNA, 613 bp, Artificial Sequence
  chemically treated genomic DNA (Homo sapiens) CpG-island No: 11049
tagtagtcgtagtagggcggagtatcgcgaaaaacggagtaatatcgggggaggaggtagtaagaacgcgttaggacggtcgtataagaggaaggtttaagaagcggggagagggatcgaggacggcgaaaggattatagcgacgttagaggagtttcggggatcgagcgcgaacgcggaattaaggttagagtcggcgttagggggaaagagggattcgtatataaggttatataatagacgagtcggaagtataaagcgtaaagttcggcggggtttagcgagggagttaacgtataggaagcggcggagcgcgtatcggttcgcggggttagacggggaaagttagatcgcgttagtaggtagtagaggaaagcggtttatacgcgtcgggcgagtaggcggtcgcgcggaatcggggcgcgcgatttcgcggttcgcggtcgatcgatcgcgtcgcgttacggcgcgagtcggtcggcggcgagtcgggaatatagcgtacgttaaaaggtcgggaacgacgggagaggttatagaatttagggggattaacgtcgggataagaaatacggggagttataaggttagtataaaggtttaggttcggtat

SEQ ID NO: 11050 - DNA, 613 bp, Artificial Sequence
  chemically treated genomic DNA (Homo sapiens) CpG-island No: 11050
ataccgaacctaaacctttatactaaccttataactccccgtatttcttatcccgacgttaatccccctaaattctataacctctcccgtcgttcccgaccttttaacgtacgctatattcccgactcgccgccgaccgactcgcgccgtaacgcgacgcgatcgatcgaccgcgaaccgcgaaatcgcgcgccccgattccgcgcgaccgcctactcgcccgacgcgtataaaccgctttcctctactacctactaacgcgatctaactttccccgtctaaccccgcgaaccgatacgcgctccgccgcttcctatacgttaactccctcgctaaaccccgccgaactttacgctttatacttccgactcgtctattatataaccttatatacgaatccctctttccccctaacgccgactctaaccttaattccgcgttcgcgctcgatccccgaaactcctctaacgtcgctataatcctttcgccgtcctcgatccctctccccgcttcttaaaccttcctcttatacgaccgtcctaacgcgttcttactacctcctcccccgatattactccgtttttcgcgatactccgccctactacgactacta

SEQ ID NO: 11051 - DNA, 613 bp, Artificial Sequence
  chemically treated genomic DNA (Homo sapiens) CpG-island No: 11051
atgtcggatttgggtttttgtgttggttttgtggtttttcgtgttttttgtttcggcgttggtttttttgggttttgtggtttttttcgtcgttttcggttttttggcgtgcgttgtgttttcggttcgtcgtcggtcggttcgcgtcgtggcgcggcgcggtcggtcggtcgcgggtcgcggggtcgcgcgtttcggtttcgcgcggtcgtttgttcgttcggcgcgtgtgggtcgtttttttttgttgtttgttggcgcggtttggtttttttcgtttggtttcgcgggtcggtgcgcgtttcgtcgttttttgtgcgttggttttttcgttgggtttcgtcgggttttgcgttttgtgttttcggttcgtttgttgtgtggttttgtgtgcgggtttttttttttttttggcgtcggttttggttttggtttcgcgttcgcgttcggttttcggggtttttttggcgtcgttgtggttttttcgtcgttttcggttttttttttcgttttttgggttttttttttgtgcggtcgttttggcgcgtttttgttgttttttttttcggtgttgtttcgtttttcgcggtgtttcgttttgttgcggttgttg

SEQ ID NO: 11052 - DNA, 613 bp, Artificial Sequence
  chemically treated genomic DNA (Homo sapiens) CpG-island No: 11052
caacaaccgcaacaaaacgaaacaccgcgaaaaacgaaacaacaccgaaaaaaaaaacaacaaaaacgcgccaaaacgaccgcacaaaaaaaaaacccaaaaaacgaaaaaaaaaaccgaaaacgacgaaaaaaccacaacgacgccaaaaaaaccccgaaaaccgaacgcgaacgcgaaaccaaaaccaaaaccgacgccaaaaaaaaaaaaaaacccgcacacaaaaccacacaacaaacgaaccgaaaacacaaaacgcaaaacccgacgaaacccaacgaaaaaaccaacgcacaaaaaacgacgaaacgcgcaccgacccgcgaaaccaaacgaaaaaaaccaaaccgcgccaacaaacaacaaaaaaaaacgacccacacgcgccgaacgaacaaacgaccgcgcgaaaccgaaacgcgcgaccccgcgacccgcgaccgaccgaccgcgccgcgccacgacgcgaaccgaccgacgacgaaccgaaaacacaacgcacgccaaaaaaccgaaaacgacgaaaaaaaccacaaaacccaaaaaaaccaacgccgaaacaaaaaacacgaaaaaccacaaaaccaacacaaaaacccaaatccgacat

SEQ ID NO: 11053 - DNA, 578 bp, Artificial Sequence
  chemically treated genomic DNA (Homo sapiens) CpG-island No: 11053
  unsure (189)
gtttgcggatcgttatttaacgcggcgtaaacggcgaaatatttggcggatcgttttttcgatttttaggtttacgttattttcggttgggagttttgcgataatatttcgtatcgtttcgacgatcgttgcgtagtaattggcgtttttgattacggtaaaatcgaagaggtaattaaagcgttgganttgggtcgggtttgcggcgtatttattgcggcgtttattaaacgcgcggatagttcgattatttcggcggcggaatttagtattgattattaggtcgattgtatttgggaaatttatttgttgttttgttatagcgtggtgttggagatgattattcgtttcgcgtcgaacgcggaaatcggtaagattaaaaacgattttaattagttgtcgaatgcgtttcgttatttggtacgtatttggaaggagattttttttgcgatttgtcgcgtataaattgttgaattacgcgtagtaggcgcgggaatatttggattttcgtgcgtacgggttaaacgtcgtttgtgaataattgcggtaaaatatttattagatcgaagaaagtttgt

SEQ ID NO: 11054 - DNA, 578 bp, Artificial Sequence
  chemically treated genomic DNA (Homo sapiens) CpG-island No: 11054
  unsure (390)
acaaactttcttcgatctaataaatattttaccgcaattattcacaaacgacgtttaacccgtacgcacgaaaatccaaatattcccgcgcctactacgcgtaattcaacaatttatacgcgacaaatcgcaaaaaaaatctccttccaaatacgtaccaaataacgaaacgcattcgacaactaattaaaatcgtttttaatcttaccgatttccgcgttcgacgcgaaacgaataatcatctccaacaccacgctataacaaaacaacaaataaatttcccaaatacaatcgacctaataatcaatactaaattccgccgccgaaataatcgaactatccgcgcgtttaataaacgccgcaataaatacgccgcaaacccgacccaantccaacgctttaattacctcttcgattttaccgtaatcaaaaacgccaattactacgcaacgatcgtcgaaacgatacgaaatattatcgcaaaactcccaaccgaaaataacgtaaacctaaaaatcgaaaaaacgatccgccaaatatttcgccgtttacgccgcgttaaataacgatccgcaaac

SEQ ID NO: 11055 - DNA, 578 bp, Artificial Sequence
  chemically treated genomic DNA (Homo sapiens) CpG-island No: 11055
  unsure (390)
gtaaatttttttcgatttggtggatattttgtcgtaattgtttataagcgacgtttaattcgtgcgtacgaaaatttaggtattttcgcgtttgttgcgcgtaatttaatagtttatgcgcggtagatcgtagagggggtttttttttaggtgcgtattagatgacgaagcgtattcggtaattgattgagatcgtttttgattttgtcgattttcgcgttcggcgcgaggcgggtgattatttttagtattacgttgtagtagagtagtaggtgaattttttagatatagtcggtttgataattaatgttaaatttcgtcgtcgaggtaatcgggttattcgcgcgtttggtgaacgtcgtagtgagtgcgtcgtaggttcggtttagntttagcgttttgattattttttcggttttatcgtagttagaaacgttaattattgcgtaacgatcgtcgaggcgatacggggtgttatcgtagaatttttagtcggaaatggcgtagatttgaagatcggaaaagcgattcgttagatgtttcgtcgtttgcgtcgcgttgagtggcgattcgtaggt

SEQ ID NO: 11056 - DNA, 578 bp, Artificial Sequence
  chemically treated genomic DNA (Homo sapiens) CpG-island No: 11056
  unsure (189)
acctacgaatcgccactcaacgcgacgcaaacgacgaaacatctaacgaatcgcttttccgatcttcaaatctacgccatttccgactaaaaattctacgataacaccccgtatcgcctcgacgatcgttacgcaataattaacgtttctaactacgataaaaccgaaaaaataatcaaaacgctaaanctaaaccgaacctacgacgcactcactacgacgttcaccaaacgcgcgaataacccgattacctcgacgacgaaatttaacattaattatcaaaccgactatatctaaaaaattcacctactactctactacaacgtaatactaaaaataatcacccgcctcgcgccgaacgcgaaaatcgacaaaatcaaaaacgatctcaatcaattaccgaatacgcttcgtcatctaatacgcacctaaaaaaaaaccccctctacgatctaccgcgcataaactattaaattacgcgcaacaaacgcgaaaatacctaaattttcgtacgcacgaattaaacgtcgcttataaacaattacgacaaaatatccaccaaatcgaaaaaaatttac

SEQ ID NO: 11057 - DNA, 757 bp, Artificial Sequence
  chemically treated genomic DNA (Homo sapiens) CpG-island No: 11057
  unsure (91)
gcgtggcggttaagtcgtacgagtttgtaggttatttgttcggcggtatcgagcgtgcgtatagtaaagtagattattttaattcgggtanatcgttatatcggtcggagttatcgaagattgatttagcggacgcgtagatatgttagcgtatagtattttacgatatttatggcgttcgaaatcgcgatcgacgaattggcggaaaaagcgggtatcgatttcgtcgagtttcgtattttgaatgatatttaggttgatttcgtcgattcgacgcgttgtttttttcgtcgttagtttatcgagtgtttgcgtatcggagcggataaatttggttggaagtagcgtaacgttatattcggataggtgcgcgacggggagtggttagtcggttacggtgttgcggcgggttttcgtaataatttgttggaaaaatcgggtgttcgggtttatttcgaataaaacggtatcgttatcgtagaaacggatatgatcgatattggtatcggtagttatattattttggtttagacggtagcggaaatgtttggcgtatcgttggagtaggttgcggtttatttcggcgattttagtttttcggtttttgcgggttttggtggataatggggcgcgaatattttttatttcgggggtttacgtcgtttgtatgaagtcgcgaaatgattgtttcggtagtcgggtttgattttgagtagtgaatttgtttggagtgggagtgcgtaattaattcgttatg

SEQ ID NO: 11058 - DNA, 757 bp, Artificial Sequence
  chemically treated genomic DNA (Homo sapiens) CpG-island No: 11058
  unsure (667)
cataacgaattaattacgcactcccactccaaacaaattcactactcaaaatcaaacccgactaccgaaacaatcatttcgcgacttcatacaaacgacgtaaacccccgaaataaaaaatattcgcgccccattatccaccaaaacccgcaaaaaccgaaaaactaaaatcgccgaaataaaccgcaacctactccaacgatacgccaaacatttccgctaccgtctaaaccaaaataatataactaccgataccaatatcgatcatatccgtttctacgataacgataccgttttattcgaaataaacccgaacacccgatttttccaacaaattattacgaaaacccgccgcaacaccgtaaccgactaaccactccccgtcgcgcacctatccgaatataacgttacgctacttccaaccaaatttatccgctccgatacgcaaacactcgataaactaacgacgaaaaaaacaacgcgtcgaatcgacgaaatcaacctaaatatcattcaaaatacgaaactcgacgaaatcgatacccgctttttccgccaattcgtcgatcgcgatttcgaacgccataaatatcgtaaaatactatacgctaacatatctacgcgtccgctaaatcaatcttcgataactccgaccgatataacgatntacccgaattaaaataatctactttactatacgcacgctcgataccgccgaacaaataacctacaaactcgtacgacttaaccgccacgc

SEQ ID NO: 11059 - DNA, 757 bp, Artificial Sequence
  chemically treated genomic DNA (Homo sapiens) CpG-island No: 11059
  unsure (667)
tataacgaattgattacgtatttttattttaggtaaatttattgtttaggattaaattcgattgtcgaggtaattatttcgcgattttatataggcggcgtaaattttcgaggtgagaggtattcgcgttttattgtttattagaattcgtagaaatcgggaaattggaatcgtcgaggtgaatcgtaatttgttttagcggtacgttaagtattttcgttgtcgtttgggttagaatggtgtagttgtcggtgttaatgtcggttatgttcgtttttacggtaacggtgtcgttttgttcgaggtgaattcgagtattcgatttttttagtagattattgcgaaagttcgtcgtaatatcgtggtcgattagttatttttcgtcgcgtatttgttcgggtgtggcgttgcgttgtttttagttaaatttattcgtttcggtgcgtaagtattcgataagttgacggcgagagaagtagcgcgtcgggtcggcggggttaatttgagtgttatttaggatgcgaaattcgacgggatcgatgttcgtttttttcgttagttcgtcgatcgcgatttcgagcgttatgagtatcgtgggatgttgtacgttggtatatttgcgcgttcgttaagttagttttcggtagtttcggtcggtatgacgatntgttcggattagagtaatttgttttgttgtacgtacgttcggtgtcgtcgggtaggtgatttgtaggttcgtgcgatttagtcgttacgt

SEQ ID NO: 11060 - DNA, 757 bp, Artificial Sequence
  chemically treated genomic DNA (Homo sapiens) CpG-island No: 11060
  unsure (91)
acgtaacgactaaatcgcacgaacctacaaatcacctacccgacgacaccgaacgtacgtacaacaaaacaaattactctaatccgaacanatcgtcataccgaccgaaactaccgaaaactaacttaacgaacgcgcaaatataccaacgtacaacatcccacgatactcataacgctcgaaatcgcgatcgacgaactaacgaaaaaaacgaacatcgatcccgtcgaatttcgcatcctaaataacactcaaattaaccccgccgacccgacgcgctacttctctcgccgtcaacttatcgaatacttacgcaccgaaacgaataaatttaactaaaaacaacgcaacgccacacccgaacaaatacgcgacgaaaaataactaatcgaccacgatattacgacgaactttcgcaataatctactaaaaaaatcgaatactcgaattcacctcgaacaaaacgacaccgttaccgtaaaaacgaacataaccgacattaacaccgacaactacaccattctaacccaaacgacaacgaaaatacttaacgtaccgctaaaacaaattacgattcacctcgacgattccaatttcccgatttctacgaattctaataaacaataaaacgcgaatacctctcacctcgaaaatttacgccgcctatataaaatcgcgaaataattacctcgacaatcgaatttaatcctaaacaataaatttacctaaaataaaaatacgtaatcaattcgttata

SEQ ID NO: 11061 - DNA, 618 bp, Artificial Sequence
  chemically treated genomic DNA (Homo sapiens) CpG-island No: 11061
tttagtcggttgtcgtttcgcgttgttttcgcgtcgtcgttcgtatacgggtttatacgtatacgtcgtcgtcggtttttcgtgtatttttggcggttgttgaggttggcgttggttcgttggtttttatcgtagtattcggtcgtcggtcgttgcgttttttttttcgttcgttgaggttttagagttcggttttttgtaatggcggtcgtcgggcgtggtgacgttacgttcggcgttaggagacggcggggagcggaggggaaaagggtcggggagtaagttgcgtaattgtagagtttttttcgggcggtcgtacgatcggagttggggcgtaaattgggggttaaagcgtaggcgcgacgtagtcggttggtaattgaagcgttttgattttttgggcgtggttttcggagggcggggtggtgggggaagggaaggatggagttggagtatgcgtagtgcgtatagcggcgaatcggattaatttttgagtattattttaggagaggcgagggtttgggtcgcgcgtaggcgtagatcggatggaagtcggggttattggtagtttgtaattggtttttttgggaaggtcgttttggtgatgaatttagtttt

SEQ ID NO: 11062 - DNA, 618 bp, Artificial Sequence
  chemically treated genomic DNA (Homo sapiens) CpG-island No: 11062
aaaactaaattcatcaccaaaacgaccttcccaaaaaaaccaattacaaactaccaataaccccgacttccatccgatctacgcctacgcgcgacccaaaccctcgcctctcctaaaataatactcaaaaattaatccgattcgccgctatacgcactacgcatactccaactccatccttcccttcccccaccaccccgccctccgaaaaccacgcccaaaaaatcaaaacgcttcaattaccaaccgactacgtcgcgcctacgctttaacccccaatttacgccccaactccgatcgtacgaccgcccgaaaaaaactctacaattacgcaacttactccccgacccttttcccctccgctccccgccgtctcctaacgccgaacgtaacgtcaccacgcccgacgaccgccattacaaaaaaccgaactctaaaacctcaacgaacgaaaaaaaaaacgcaacgaccgacgaccgaatactacgataaaaaccaacgaaccaacgccaacctcaacaaccgccaaaaatacacgaaaaaccgacgacgacgtatacgtataaacccgtatacgaacgacgacgcgaaaacaacgcgaaacgacaaccgactaaa

SEQ ID NO: 11063 - DNA, 618 bp, Artificial Sequence
  chemically treated genomic DNA (Homo sapiens) CpG-island No: 11063
ggagttgagtttattattagagcggtttttttaggggaattagttataggttgttagtggtttcggtttttattcggtttgcgtttgcgcgcggtttaagttttcgttttttttggaatagtgtttagggattagttcggttcgtcgttgtgcgtattgcgtatgttttagttttatttttttttttttttattatttcgtttttcgggagttacgtttaaaaagttaaggcgttttagttattagtcggttacgtcgcgtttgcgttttgatttttagtttgcgttttaatttcggtcgtgcggtcgttcggggagggttttgtagttgcgtagtttgtttttcggtttttttttttttcgtttttcgtcgttttttgacgtcgggcgtgacgttattacgttcggcggtcgttattatagagagtcgagttttggagttttagcgagcggaggaggaggcgtagcggtcgacggtcgagtattgcggtgagagttagcgggttagcgttagttttaatagtcgttagaagtatacgaggaatcggcggcggcgtgtgcgtgtaggttcgtgtgcgggcggcggcgcgggagtagcgcggagcggtagtcggttggg

SEQ ID NO: 11064 - DNA, 618 bp, Artificial Sequence
  chemically treated genomic DNA (Homo sapiens) CpG-island No: 11064
cccaaccgactaccgctccgcgctactcccgcgccgccgcccgcacacgaacctacacgcacacgccgccgccgattcctcgtatacttctaacgactattaaaactaacgctaacccgctaactctcaccgcaatactcgaccgtcgaccgctacgcctcctcctccgctcgctaaaactccaaaactcgactctctataataacgaccgccgaacgtaataacgtcacgcccgacgtcaaaaaacgacgaaaaacgaaaaaaaaaaaaaccgaaaaacaaactacgcaactacaaaaccctccccgaacgaccgcacgaccgaaattaaaacgcaaactaaaaatcaaaacgcaaacgcgacgtaaccgactaataactaaaacgccttaactttttaaacgtaactcccgaaaaacgaaataataaaaaaaaaaaaaaataaaactaaaacatacgcaatacgcacaacgacgaaccgaactaatccctaaacactattccaaaaaaaacgaaaacttaaaccgcgcgcaaacgcaaaccgaataaaaaccgaaaccactaacaacctataactaattcccctaaaaaaaccgctctaataataaactcaactcc

SEQ ID NO: 11065 - DNA, 628 bp, Artificial Sequence
  chemically treated genomic DNA (Homo sapiens) CpG-island No: 11065
ggaagtggtaggtgaatgtttgcgtaagggcgcgtaggtttatatcgaaggttagtttcgtattcgtagttgggaggataacggtattattcgttacgttatcgaaatttttgttaagattacgggtattatgtagatgttggtacgtgtcgtaggtgtttagatttagtcggaagaggggtaatagtttagcggttagttttagtcggaattataggcggaggtcggtacgaaaaaaggtggcgtaaaaacgaaaggtcgtggacgtaaggtcgcgtagtcggagttttagtcgtaatcgtcggagggtgacgattacgggtttttagacgatatttcgttttgaacgattgattgtgataatcgtttcgttttgtgcggggtattatcggagagatgaggatgagcgaatattttagaatattttagggattgtttgacggtttttttattcgtaaatatgtcgaagtcgttgtcgtatagtatcggaacgtttttatcgaggatgattacggcgaatagtttcgtttggttgttcgtaataacggtgtaatggtttggcgtatttggaattttgaggacggtgtcgggtattggatgaattatgttattcgtgatttcgggattt

SEQ ID NO: 11066 - DNA, 628 bp, Artificial Sequence
  chemically treated genomic DNA (Homo sapiens) CpG-island No: 11066
aaatcccgaaatcacgaataacataattcatccaatacccgacaccgtcctcaaaattccaaatacgccaaaccattacaccgttattacgaacaaccaaacgaaactattcgccgtaatcatcctcgataaaaacgttccgatactatacgacaacgacttcgacatatttacgaataaaaaaaccgtcaaacaatccctaaaatattctaaaatattcgctcatcctcatctctccgataataccccgcacaaaacgaaacgattatcacaatcaatcgttcaaaacgaaatatcgtctaaaaacccgtaatcgtcaccctccgacgattacgactaaaactccgactacgcgaccttacgtccacgacctttcgtttttacgccaccttttttcgtaccgacctccgcctataattccgactaaaactaaccgctaaactattacccctcttccgactaaatctaaacacctacgacacgtaccaacatctacataatacccgtaatcttaacaaaaatttcgataacgtaacgaataataccgttatcctcccaactacgaatacgaaactaaccttcgatataaacctacgcgcccttacgcaaacattcacctaccacttcc

SEQ ID NO: 11067 - DNA, 628 bp, Artificial Sequence
  chemically treated genomic DNA (Homo sapiens) CpG-island No: 11067
gaatttcgaaattacggatgatatggtttatttagtattcggtatcgtttttaaaattttaggtacgttagattattgtatcgttattacggataattaggcgaaattgttcgtcgtggttattttcgataaagacgtttcggtattgtgcggtaacggtttcggtatgtttgcgggtaaaaggatcgttaggtagtttttgaagtattttgaaatattcgtttatttttattttttcggtgatgtttcgtataggacggggcggttgttatagttagtcgtttagaacgggatatcgtttgaaaattcgtaatcgttatttttcggcggttgcggttgaggtttcggttgcgcggttttacgtttacggtttttcgtttttgcgttattttttttcgtatcggttttcgtttgtggtttcggttgaggttgatcgttgaattgttgtttttttttcggttgagtttgagtatttgcggtacgtattagtatttgtatggtgttcgtggttttaataagaatttcggtgacgtaacgggtgatatcgttatttttttagttacgggtgcgaagttgattttcgatgtagatttgcgcgtttttgcgtagatatttatttgttattttt

SEQ ID NO: 11068 - DNA, 628 bp, Artificial Sequence
  chemically treated genomic DNA (Homo sapiens) CpG-island No: 11068
aaaaataacaaataaatatctacgcaaaaacgcgcaaatctacatcgaaaatcaacttcgcacccgtaactaaaaaaataacgatatcacccgttacgtcaccgaaattcttattaaaaccacgaacaccatacaaatactaatacgtaccgcaaatactcaaactcaaccgaaaaaaaaacaacaattcaacgatcaacctcaaccgaaaccacaaacgaaaaccgatacgaaaaaaaataacgcaaaaacgaaaaaccgtaaacgtaaaaccgcgcaaccgaaacctcaaccgcaaccgccgaaaaataacgattacgaattttcaaacgatatcccgttctaaacgactaactataacaaccgccccgtcctatacgaaacatcaccgaaaaaataaaaataaacgaatatttcaaaatacttcaaaaactacctaacgatccttttacccgcaaacataccgaaaccgttaccgcacaataccgaaacgtctttatcgaaaataaccacgacgaacaatttcgcctaattatccgtaataacgatacaataatctaacgtacctaaaattttaaaaacgataccgaatactaaataaaccatatcatccgtaatttcgaaattc

SEQ ID NO: 11069 - DNA, 730 bp, Artificial Sequence
  chemically treated genomic DNA (Homo sapiens) CpG-island No: 11069
atagtcgtttttagcgatgttttatcggttcgcgtttttatttgtttagaaattatcgtaaaggacggatggcgggtaagttttttcgtagtacgggttttatttagtgaggaatatagtcggatattacgattattgcgggttagatcgtttagggtggtattgtttattgttatttgtgtgacggaggtaaaaatcgtcgtattgtcgttgacggaatgttcgggcgtttttatttagtcgttttttagttttagtgtcgtgaacggtgaatcgtttataggtagggtggtcggtttagttcgtttcggtataataatcgttatcgtatttttattgacggatgttatttgtaggcggttatcgtcggagacgcggagttcgggaattttttttgttatttttagtcgttcgtcgtttgttatcggtatttttttcggtcggaatagcgattagttgttgtttagggaggaaatacgtattatttgcgttttattttgcgtatttcgtagattaggttgtgattttgcgtcgttattcggtcgataatatagcggttatgattgcgtgttttcgggttttattgttttattattattttcggacggtatatatttcgtagataacggtttcggttgtttagttagatcggtgaaagggtagttatggttattttcgggagttcgagtacgttttgtgtttttagtttaatgcgaatggtttgtgttag

SEQ ID NO: 11070 - DNA, 730 bp, Artificial Sequence
  chemically treated genomic DNA (Homo sapiens) CpG-island No: 11070
ctaacacaaaccattcgcattaaactaaaaacacaaaacgtactcgaactcccgaaaataaccataactaccctttcaccgatctaactaaacaaccgaaaccgttatctacgaaatatataccgtccgaaaataataataaaacaataaaacccgaaaacacgcaatcataaccgctatattatcgaccgaataacgacgcaaaatcacaacctaatctacgaaatacgcaaaataaaacgcaaataatacgtatttcctccctaaacaacaactaatcgctattccgaccgaaaaaaataccgataacaaacgacgaacgactaaaaataacaaaaaaaattcccgaactccgcgtctccgacgataaccgcctacaaataacatccgtcaataaaaatacgataacgattattataccgaaacgaactaaaccgaccaccctacctataaacgattcaccgttcacgacactaaaactaaaaaacgactaaataaaaacgcccgaacattccgtcaacgacaatacgacgatttttacctccgtcacacaaataacaataaacaataccaccctaaacgatctaacccgcaataatcgtaatatccgactatattcctcactaaataaaacccgtactacgaaaaaacttacccgccatccgtcctttacgataatttctaaacaaataaaaacgcgaaccgataaaacatcgctaaaaacgactat

SEQ ID NO: 11071 - DNA, 730 bp, Artificial Sequence
  chemically treated genomic DNA (Homo sapiens) CpG-island No: 11071
ttgatataggttattcgtattgagttgaaaatatagggcgtgttcggattttcggaggtgattatgattgtttttttatcggtttggttggatagtcggagtcgttatttgcgggatatgtatcgttcggggatggtgatggagtagtggaattcggagatacgtagttatgatcgttatgttatcgatcgggtgacggcgtagagttatagtttgatttgcgggatgcgtagggtgaaacgtaggtggtgcgtattttttttttggatagtagttggtcgttgtttcggtcggaaaaaatgtcggtggtagacggcgagcgattgagggtgatagggaaaattttcggatttcgcgttttcggcggtgatcgtttgtaggtggtattcgttagtgaagatgcgatgacggttgttgtgtcgggacgggttgaatcggttattttgtttgtgagcgatttatcgtttacggtattgaagttggagaacggttgggtggaaacgttcgggtatttcgttagcgatagtgcgacggtttttgttttcgttatatagatggtaatggataatgttattttgaacggtttggttcgtagtggtcgtgatgttcggttgtattttttattggatgaaattcgtattgcggaaaaatttgttcgttattcgttttttacggtggtttttgagtagataaagacgcgggtcggtgagatatcgttggaaacggttat

SEQ ID NO: 11072 - DNA, 730 bp, Artificial Sequence
  chemically treated genomic DNA (Homo sapiens) CpG-island No: 11072
ataaccgtttccaacgatatctcaccgacccgcgtctttatctactcaaaaaccaccgtaaaaaacgaataacgaacaaatttttccgcaatacgaatttcatccaataaaaaatacaaccgaacatcacgaccactacgaaccaaaccgttcaaaataacattatccattaccatctatataacgaaaacaaaaaccgtcgcactatcgctaacgaaatacccgaacgtttccacccaaccgttctccaacttcaataccgtaaacgataaatcgctcacaaacaaaataaccgattcaacccgtcccgacacaacaaccgtcatcgcatcttcactaacgaataccacctacaaacgatcaccgccgaaaacgcgaaatccgaaaattttccctatcaccctcaatcgctcgccgtctaccaccgacattttttccgaccgaaacaacgaccaactactatccaaaaaaaaaatacgcaccacctacgtttcaccctacgcatcccgcaaatcaaactataactctacgccgtcacccgatcgataacataacgatcataactacgtatctccgaattccactactccatcaccatccccgaacgatacatatcccgcaaataacgactccgactatccaaccaaaccgataaaaaaacaatcataatcacctccgaaaatccgaacacgccctatattttcaactcaatacgaataacctatatcaa

SEQ ID NO: 11073 - DNA, 634 bp, Artificial Sequence
  chemically treated genomic DNA (Homo sapiens) CpG-island No: 11073
cgtttcgttttcggcggggcggtgtggttgtttattaggcggtattagttaggttatcggtacgtttagtggtattcgtttgtgggcgtggtgtatatatttagttaggtatttagcggttgttttttatgtggaattttgtatgtttagtcgtatcgtttttttttatttttttcgcgtttcgtgtagtatcggatagttcggttttatttagggttgcgataatttgcggtttttttaggtgttcgaagaagtttgtttttgtcggttgttattagtcgcgtatgtggaattcgatagcggtttttagcgggttaagcggattgcgtgacgtgtgattatattcgcgggtttgaacgtcgtggatgttgtacgtaatgtagaaattgagtagggataatagtattttttggttgagtgataggaacgtcgttatgtttcgtgattattttttcggtaataggacgattaaacgtgttttttttgttattagcgttatgaatgcggtattttttttttttgacggcgtatcgttggttagcgaataatgtttatattttaggttgatttgtgttggtttattgtacgtttcgttgttaaatatatttaggtagagcgtttatgttagtagtgt

SEQ ID NO: 11074 - DNA, 634 bp, Artificial Sequence
  chemically treated genomic DNA (Homo sapiens) CpG-island No: 11074
acactactaacataaacgctctacctaaatatatttaacaacgaaacgtacaataaaccaacacaaatcaacctaaaatataaacattattcgctaaccaacgatacgccgtcaaaaaaaaaaaataccgcattcataacgctaataacaaaaaaaacacgtttaatcgtcctattaccgaaaaaataatcacgaaacataacgacgttcctatcactcaaccaaaaaatactattatccctactcaatttctacattacgtacaacatccacgacgttcaaacccgcgaatataatcacacgtcacgcaatccgcttaacccgctaaaaaccgctatcgaattccacatacgcgactaataacaaccgacaaaaacaaacttcttcgaacacctaaaaaaaccgcaaattatcgcaaccctaaataaaaccgaactatccgatactacacgaaacgcgaaaaaaataaaaaaaaacgatacgactaaacatacaaaattccacataaaaaacaaccgctaaatacctaactaaatatatacaccacgcccacaaacgaataccactaaacgtaccgataacctaactaataccgcctaataaacaaccacaccgccccgccgaaaacgaaacg

SEQ ID NO: 11075 - DNA, 634 bp, Artificial Sequence
  chemically treated genomic DNA (Homo sapiens) CpG-island No: 11075
gtattgttgatatggacgttttgtttgaatgtgtttggtagcggggcgtatagtaaattagtataaattagtttggaatgtaaatattattcgttgattagcgatgcgtcgttagggaaggaaggtgtcgtatttatggcgttgatggtagaaaaagtacgtttggtcgttttgttgtcggagggatggttacgggatatgacgacgtttttgttatttagttaggaggtgttgttatttttgtttagtttttgtattgcgtgtagtatttacggcgtttagattcgcgagtgtggttatacgttacgtagttcgtttgattcgttggaaatcgttatcggattttatatgcgcgattggtggtagtcgataaaagtaaattttttcggatatttgaaaaagtcgtagattatcgtagttttgaatgaggtcggattgttcggtgttgtacgggacgcggagaagatgaagaaaggcgatgcggttgaatatgtagagttttatatgaaagataatcgttgggtgtttggttggatgtgtgtattacgtttatagacggatgttattgaacgtatcgataatttggttgatgtcgtttgatgaataattatatcgtttcgtcggagacggggcg

SEQ ID NO: 11076 - DNA, 634 bp, Artificial Sequence
  chemically treated genomic DNA (Homo sapiens) CpG-island No: 11076
cgccccgtctccgacgaaacgatataattattcatcaaacgacatcaaccaaattatcgatacgttcaataacatccgtctataaacgtaatacacacatccaaccaaacacccaacgattatctttcatataaaactctacatattcaaccgcatcgcctttcttcatcttctccgcgtcccgtacaacaccgaacaatccgacctcattcaaaactacgataatctacgactttttcaaatatccgaaaaaatttacttttatcgactaccaccaatcgcgcatataaaatccgataacgatttccaacgaatcaaacgaactacgtaacgtataaccacactcgcgaatctaaacgccgtaaatactacacgcaatacaaaaactaaacaaaaataacaacacctcctaactaaataacaaaaacgtcgtcatatcccgtaaccatccctccgacaacaaaacgaccaaacgtactttttctaccatcaacgccataaatacgacaccttccttccctaacgacgcatcgctaatcaacgaataatatttacattccaaactaatttatactaatttactatacgccccgctaccaaacacattcaaacaaaacgtccatatcaacaatac

SEQ ID NO: 11077 - DNA, 562 bp, Artificial Sequence
  chemically treated genomic DNA (Homo sapiens) CpG-island No: 11077
tggcgtttttgtatgtatatcgtggattttttttcgggtatgggttatatacgcggttttcgttattttgtttgattcgtataacgttcggtagttatcgtaagtatcggtttgaaatatatcgttgtaatcggttaggtgattttgtgaatggatatttttttagtaggattgtacgcgaattagatcgtcgggggtattttcgagtcggtattacggttattacggacgtagtattattgtcggacggttcgagttttatcggttattagtatatattggcgtagtatgttatatagtagttttagtagttcgtaacggaatagatttagcgtggtacgttttagttatacgttttggcgacggtatatttttgattcgcggtataatggtagatggtttgtatatttttcggtgattatatgggtttaaagtttcggttcggaataattgttgaaggtttaggtgtttgtacgatatagttgtatcggtaataggtttgtttcgggcgttgtgtttcgataattttaaaggtgtagttgataagttttagtagttttga

SEQ ID NO: 11078 - DNA, 562 bp, Artificial Sequence
  chemically treated genomic DNA (Homo sapiens) CpG-island No: 11078
tcaaaactactaaaacttatcaactacacctttaaaattatcgaaacacaacgcccgaaacaaacctattaccgatacaactatatcgtacaaacacctaaaccttcaacaattattccgaaccgaaactttaaacccatataatcaccgaaaaatatacaaaccatctaccattataccgcgaatcaaaaatataccgtcgccaaaacgtataactaaaacgtaccacgctaaatctattccgttacgaactactaaaactactatataacatactacgccaatatatactaataaccgataaaactcgaaccgtccgacaataatactacgtccgtaataaccgtaataccgactcgaaaatacccccgacgatctaattcgcgtacaatcctactaaaaaaatatccattcacaaaatcacctaaccgattacaacgatatatttcaaaccgatacttacgataactaccgaacgttatacgaatcaaacaaaataacgaaaaccgcgtatataacccatacccgaaaaaaaatccacgatatacatacaaaaacgcca

SEQ ID NO: 11079 - DNA, 562 bp, Artificial Sequence
  chemically treated genomic DNA (Homo sapiens) CpG-island No: 11079
ttagagttgttagagtttattagttgtatttttaaggttatcgaaatataacgttcgaaataggtttgttgtcggtgtaattatatcgtgtagatatttgagtttttagtagttatttcggatcggggttttaggtttatgtagttatcgggaaatatgtagattatttgttattatatcgcgagttagaaatatatcgtcgttagggcgtgtagttgaggcgtgttacgttggatttgtttcgttgcgaattattggagttgttgtataatatattgcgttagtatgtgttgatggtcggtaaaattcgaatcgttcggtagtggtgttacgttcgtgatgatcgtgatgtcggttcggagatgttttcggcggtttggttcgcgtatagttttgttggaaaggtatttatttataaaattatttggtcggttatagcggtgtgttttaagtcgatgtttacggtggttatcgggcgttatacgaattaggtagaataacggaagtcgcgtgtatggtttatgttcggagaaaaatttacgatgtgtatgtaagagcgtta

SEQ ID NO: 11080 - DNA, 562 bp, Artificial Sequence
  chemically treated genomic DNA (Homo sapiens) CpG-island No: 11080
taacgctcttacatacacatcgtaaatttttctccgaacataaaccatacacgcgacttccgttattctacctaattcgtataacgcccgataaccaccgtaaacatcgacttaaaacacaccgctataaccgaccaaataattttataaataaatacctttccaacaaaactatacgcgaaccaaaccgccgaaaacatctccgaaccgacatcacgatcatcacgaacgtaacaccactaccgaacgattcgaattttaccgaccatcaacacatactaacgcaatatattatacaacaactccaataattcgcaacgaaacaaatccaacgtaacacgcctcaactacacgccctaacgacgatatatttctaactcgcgatataataacaaataatctacatatttcccgataactacataaacctaaaaccccgatccgaaataactactaaaaactcaaatatctacacgatataattacaccgacaacaaacctatttcgaacgttatatttcgataaccttaaaaatacaactaataaactctaacaactctaa

SEQ ID NO: 11081 - DNA, 651 bp, Artificial Sequence
  chemically treated genomic DNA (Homo sapiens) CpG-island No: 11081
tggcgtgttaggcgtttaataagtatatcggaattaaagcgatagcgatgttttatatcgtttagtttggttcgaaggttatatatggtgttggttattttcgttacgtcggcgcgaagttttttatgttcggtatagtttatttacgtagttttcggtataaattagttattatttgtagttttttgttgtatgggtcgttgtacggtagttagacgttgttgttcggtacggtgatattgtttaagtagttcgatatcgatatatcggcgttcggattgaacggcggttatataggttgagtcgttgtttgtaaacgggtttagtataatcgcgttcgggtgtgtgaagtttttaattagtggttgtaggttggtaataggttttttcgtcgggtgatgacgattgtttgaatatttttagtttaatacgtcgggtaatggtttttgaggtagcgtcggacgtttttttgtaggatgtaagcgtattcggggggatagtttatatatgtagttttcgatgtgtacggtttggggaatattatgggggtaattacgtttgaattcggattttttaggtcggtataaagcggatcgaggcggtttagttattaaagttttttatagcgggattttttttagacgtcggtta

SEQ ID NO: 11082 - DNA, 651 bp, Artificial Sequence
  chemically treated genomic DNA (Homo sapiens) CpG-island No: 11082
taaccgacgtctaaaaaaaatcccgctataaaaaactttaataactaaaccgcctcgatccgctttataccgacctaaaaaatccgaattcaaacgtaattacccccataatattccccaaaccgtacacatcgaaaactacatatataaactatccccccgaatacgcttacatcctacaaaaaaacgtccgacgctacctcaaaaaccattacccgacgtattaaactaaaaatattcaaacaatcgtcatcacccgacgaaaaaacctattaccaacctacaaccactaattaaaaacttcacacacccgaacgcgattatactaaacccgtttacaaacaacgactcaacctatataaccgccgttcaatccgaacgccgatatatcgatatcgaactacttaaacaatatcaccgtaccgaacaacaacgtctaactaccgtacaacgacccatacaacaaaaaactacaaataataactaatttataccgaaaactacgtaaataaactataccgaacataaaaaacttcgcgccgacgtaacgaaaataaccaacaccatatataaccttcgaaccaaactaaacgatataaaacatcgctatcgctttaattccgatatacttattaaacgcctaacacgcca

SEQ ID NO: 11083 - DNA, 651 bp, Artificial Sequence
  chemically treated genomic DNA (Homo sapiens) CpG-island No: 11083
tgatcggcgtttaaaaaaaatttcgttatggggagttttaatggttgaatcgtttcgattcgttttatgtcggtttgaaaaattcggatttaagcgtggttgtttttatggtgttttttaaatcgtatatatcgagggttgtatatgtgggttattttttcgaatgcgtttatattttgtaaaagagcgttcggcgttgttttagaagttattgttcgacgtgttgggttggaaatatttaggtaatcgttattattcgacggaaaagtttgttattagtttgtaattattgattgagagttttatatattcgaacgcgattgtgttggattcgtttgtaggtagcggtttaatttgtgtggtcgtcgtttagttcggacgtcggtatatcggtatcgagttgtttgaatagtattatcgtgtcggatagtaacgtttggttgtcgtatagcggtttatgtagtagggggttgtaaatgatgattggtttatgtcggaggttgcgtaaatgaattatgtcggatataaaaaatttcgcgtcgacgtggcggaggtggttaatattatgtgtgattttcgggttaggttgaacgatatggagtatcgttgtcgttttgatttcgatgtgtttgttgaacgtttggtacgtta

SEQ ID NO: 11084 - DNA, 651 bp, Artificial Sequence
  chemically treated genomic DNA (Homo sapiens) CpG-island No: 11084
taacgtaccaaacgttcaacaaacacatcgaaatcaaaacgacaacgatactccatatcgttcaacctaacccgaaaatcacacataatattaaccacctccgccacgtcgacgcgaaattttttatatccgacataattcatttacgcaacctccgacataaaccaatcatcatttacaaccccctactacataaaccgctatacgacaaccaaacgttactatccgacacgataatactattcaaacaactcgataccgatataccgacgtccgaactaaacgacgaccacacaaattaaaccgctacctacaaacgaatccaacacaatcgcgttcgaatatataaaactctcaatcaataattacaaactaataacaaacttttccgtcgaataataacgattacctaaatatttccaacccaacacgtcgaacaataacttctaaaacaacgccgaacgctcttttacaaaatataaacgcattcgaaaaaataacccacatatacaaccctcgatatatacgatttaaaaaacaccataaaaacaaccacgcttaaatccgaatttttcaaaccgacataaaacgaatcgaaacgattcaaccattaaaactccccataacgaaattttttttaaacgccgatca

SEQ ID NO: 11085 - DNA, 583 bp, Artificial Sequence
  chemically treated genomic DNA (Homo sapiens) CpG-island No: 11085
taggcggttataaagcgatcgacgcggttttagttatagaagtttattattagcgtatttttttttagtacgcggtatattttattataggtcggttgtagttatttatcggttttatcgtcggcgatggtacgtttttgacggttacggaaatcgacgagatatggcgggtcggtgaggatgaaatcgatagtattgttcggaaacgtggttataatacgtacgtagttattttggataaaacgggatataatagtatttttttttttatagagggtatcgggagggcgtttttgtggcgttcgtttttcgcggtttgtgggttgtttatcgcgttcggtaacgggttaggtcgatcgtggaatatcgtagtcgtcgtttttttgacggcgagaatatgtcgcgaaaggtttggaagggcgtttaattagaaagggttacgggttggcggatattgttatcgatggtaatcgggatcggtaaaaacgttcgtttcgtggttagtcgggaggggggttattgttataggaagggtttttttcgtttttttgaaaacgtggaggatagagataattaattttat

SEQ ID NO: 11086 - DNA, 583 bp, Artificial Sequence
  chemically treated genomic DNA (Homo sapiens) CpG-island No: 11086
ataaaattaattatctctatcctccacgttttcaaaaaaacgaaaaaaacccttcctataacaataacccccctcccgactaaccacgaaacgaacgtttttaccgatcccgattaccatcgataacaatatccgccaacccgtaaccctttctaattaaacgcccttccaaacctttcgcgacatattctcgccgtcaaaaaaacgacgactacgatattccacgatcgacctaacccgttaccgaacgcgataaacaacccacaaaccgcgaaaaacgaacgccacaaaaacgccctcccgataccctctataaaaaaaaaaatactattatatcccgttttatccaaaataactacgtacgtattataaccacgtttccgaacaatactatcgatttcatcctcaccgacccgccatatctcgtcgatttccgtaaccgtcaaaaacgtaccatcgccgacgataaaaccgataaataactacaaccgacctataataaaatataccgcgtactaaaaaaaaatacgctaataataaacttctataactaaaaccgcgtcgatcgctttataaccgccta

SEQ ID NO: 11087 - DNA, 583 bp, Artificial Sequence
  chemically treated genomic DNA (Homo sapiens) CpG-island No: 11087
gtaaggttggttgtttttgttttttacgtttttaaggggacgggaggaattttttttgtggtagtggtttttttttcggttggttacgggacgggcgtttttatcggtttcggttgttatcggtgataatgttcgttagttcgtggttttttttgattgaacgtttttttaagtttttcgcggtatattttcgtcgttaaaaagacgacggttgcgatattttacggtcggtttgattcgttatcggacgcggtgaatagtttataggtcgcggggaacgggcgttataggggcgttttttcggtgttttttgtaagagaaggagtgttgttatgtttcgttttatttagggtgattgcgtgcgtgttatggttacgttttcgggtaatgttgtcgattttatttttatcgattcgttatatttcgtcggttttcgtgatcgttaggggcgtattatcgtcggcgataaaatcgatgaatggttgtaatcggtttgtaatgaaatgtatcgcgtgttgaaaaaagatgcgttgatggtgagtttttatggttggaatcgcgtcgatcgttttatggtcgtttg

SEQ ID NO: 11088 - DNA, 583 bp, Artificial Sequence
  chemically treated genomic DNA (Homo sapiens) CpG-island No: 11088
caaacgaccataaaacgatcgacgcgattccaaccataaaaactcaccatcaacgcatcttttttcaacacgcgatacatttcattacaaaccgattacaaccattcatcgattttatcgccgacgataatacgcccctaacgatcacgaaaaccgacgaaatataacgaatcgataaaaataaaatcgacaacattacccgaaaacgtaaccataacacgcacgcaatcaccctaaataaaacgaaacataacaacactccttctcttacaaaaaacaccgaaaaaacgcccctataacgcccgttccccgcgacctataaactattcaccgcgtccgataacgaatcaaaccgaccgtaaaatatcgcaaccgtcgtctttttaacgacgaaaatataccgcgaaaaacttaaaaaaacgttcaatcaaaaaaaaccacgaactaacgaacattatcaccgataacaaccgaaaccgataaaaacgcccgtcccgtaaccaaccgaaaaaaaaaccactaccacaaaaaaaattcctcccgtccccttaaaaacgtaaaaaacaaaaacaaccaaccttac

SEQ ID NO: 11089 - DNA, 512 bp, Artificial Sequence
  chemically treated genomic DNA (Homo sapiens) CpG-island No: 11089
ttcggttgggattggattttaaaaaggtaagaacgttggtacggaagcggcgtcggttatttttttcgtttcgaaattattgagttcggttcgttgcgtttgaagattcgcgtgacggtttagtttttcggagaacgttcgggggtttggtatattatatttcgtttgtatttgttgattatcggttaggatttcgtggtgtcgtacggttgggaagcgttattcgaattgttgggtttgtttacgttgtatgttcggtattcggaagttttgacgtacggttattagggggagcgagtgatgtttttttcgttcggaaacgttacgtcggagggttttttcgggatagacggtttgcggatttttatgtcggcggaggtttttgagacgttggttcgggagttcgttacgcggtgttaagaaggttcgttggcggaggttttgatcgggttgcgttgtttgtacggagatttgtaatatgaagatattgaggtagttgtggaattagaaag

SEQ ID NO: 11090 - DNA, 512 bp, Artificial Sequence
  chemically treated genomic DNA (Homo sapiens) CpG-island No: 11090
ctttctaattccacaactacctcaatatcttcatattacaaatctccgtacaaacaacgcaacccgatcaaaacctccgccaacgaaccttcttaacaccgcgtaacgaactcccgaaccaacgtctcaaaaacctccgccgacataaaaatccgcaaaccgtctatcccgaaaaaaccctccgacgtaacgtttccgaacgaaaaaaacatcactcgctccccctaataaccgtacgtcaaaacttccgaataccgaacatacaacgtaaacaaacccaacaattcgaataacgcttcccaaccgtacgacaccacgaaatcctaaccgataatcaacaaatacaaacgaaatataatataccaaacccccgaacgttctccgaaaaactaaaccgtcacgcgaatcttcaaacgcaacgaaccgaactcaataatttcgaaacgaaaaaaataaccgacgccgcttccgtaccaacgttcttacctttttaaaatccaatcccaaccgaa

SEQ ID NO: 11091 - DNA, 512 bp, Artificial Sequence
  chemically treated genomic DNA (Homo sapiens) CpG-island No: 11091
ttttttggttttatagttgttttagtatttttatattatagattttcgtataggtagcgtagttcggttagggttttcgttagcgggtttttttgatatcgcgtggcgagttttcggattagcgttttaaaggttttcgtcggtataaaaattcgtaggtcgtttatttcgaagaagtttttcggcgtgacgttttcgggcggggagaatattattcgttttttttggtgatcgtgcgttagggttttcggatgtcgggtatatagcgtgaataggtttagtagttcggataacgttttttagtcgtacggtattacgaagttttggtcggtgattagtaagtgtaaacggggtgtggtgtattaggttttcgggcgtttttcggggggttgggtcgttacgcggatttttaggcgtaacgggtcgggtttaatggtttcgggacggaaaaaataatcggcgtcgttttcgtgttagcgtttttgtttttttggggtttagttttagtcggg

SEQ ID NO: 11092 - DNA, 512 bp, Artificial Sequence
  chemically treated genomic DNA (Homo sapiens) CpG-island No: 11092
cccgactaaaactaaaccccaaaaaaacaaaaacgctaacacgaaaacgacgccgattattttttccgtcccgaaaccattaaacccgacccgttacgcctaaaaatccgcgtaacgacccaaccccccgaaaaacgcccgaaaacctaatacaccacaccccgtttacacttactaatcaccgaccaaaacttcgtaataccgtacgactaaaaaacgttatccgaactactaaacctattcacgctatatacccgacatccgaaaaccctaacgcacgatcaccaaaaaaaacgaataatattctccccgcccgaaaacgtcacgccgaaaaacttcttcgaaataaacgacctacgaatttttataccgacgaaaacctttaaaacgctaatccgaaaactcgccacgcgatatcaaaaaaacccgctaacgaaaaccctaaccgaactacgctacctatacgaaaatctataatataaaaatactaaaacaactataaaaccaaaaaa

SEQ ID NO: 11093 - DNA, 596 bp, Artificial Sequence
  chemically treated genomic DNA (Homo sapiens) CpG-island No: 11093
atattttcgttagtagtggtagattgattttttttattgacgtttttttttgtatttgtttcgtgcggttagcgtcgttagttacgttatttttattgcgtaattgtatattacgttggatatatatattatcgtaacgttaggatattattacgttattttcggtacgtattttcggcgtgtacgttttgattttcgttatgtagttaattagttttatttttgttgttagtaggttagattttttatattggggtttttagcgcgtcgtaacgtattattagttcgggtaggcgttttttttttgcgttcgttagtatcgggttcggtttcggtagttgcggtatgttcgggagtttttacggtatttatcgagaggttttatgcgttcggcgtattatttttagtcgtcggtttttcgaaggtgtttagcgatagtttggagtttttttagtagggcggtatcgagcgttacgtagtttatatagttattttcgttatcgttgaataaattagtacgtattcgttaggtgagaaagtattagcgtttacgaagcggaatttagtgttgttttttatcgttattttatttttcg

SEQ ID NO: 11094 - DNA, 596 bp, Artificial Sequence
  chemically treated genomic DNA (Homo sapiens) CpG-island No: 11094
cgaaaaataaaataacgataaaaaacaacactaaattccgcttcgtaaacgctaatactttctcacctaacgaatacgtactaatttattcaacgataacgaaaataactatataaactacgtaacgctcgataccgccctactaaaaaaactccaaactatcgctaaacaccttcgaaaaaccgacgactaaaaataatacgccgaacgcataaaacctctcgataaataccgtaaaaactcccgaacataccgcaactaccgaaaccgaacccgatactaacgaacgcaaaaaaaaaacgcctacccgaactaataatacgttacgacgcgctaaaaaccccaatataaaaaatctaacctactaacaacaaaaataaaactaattaactacataacgaaaatcaaaacgtacacgccgaaaatacgtaccgaaaataacgtaataatatcctaacgttacgataatatatatatccaacgtaatatacaattacgcaataaaaataacgtaactaacgacgctaaccgcacgaaacaaatacaaaaaaaaacgtcaataaaaaaaatcaatctaccactactaacgaaaatat

SEQ ID NO: 11095 - DNA, 596 bp, Artificial Sequence
  chemically treated genomic DNA (Homo sapiens) CpG-island No: 11095
cggaaagtgaagtggcggtgaaggataatattaaatttcgtttcgtgggcgttgatgtttttttatttgacgaatgcgtattgatttgtttagcgatgacgagggtggttatgtggattgcgtggcgttcgatgtcgttttgttggaaaaattttaggttgtcgttgaatattttcgggaagtcgacggttgggaatggtgcgtcggacgtatggagtttttcggtgagtgtcgtgaagattttcgggtatatcgtaattgtcggagtcggattcggtgttgacggacgtagaagaagaacgtttgttcgaattgatgatgcgttacgacgcgttggaaattttagtgtgaggaatttgatttgttggtagtagaaatgaagttgattgattgtatggcgaaggttagggcgtgtacgtcggagatgcgtgtcggaagtggcgtggtggtgttttggcgttacggtaatgtgtgtgtttagcgtggtgtgtagttgcgtagtgaagatgacgtgattgacgacgttgatcgtacggaataggtgtaggaaaaagcgttagtggaggaaattagtttgttattattgacgaaaatgt

SEQ ID NO: 11096 - DNA, 596 bp, Artificial Sequence
  chemically treated genomic DNA (Homo sapiens) CpG-island No: 11096
acattttcgtcaataataacaaactaatttcctccactaacgctttttcctacacctattccgtacgatcaacgtcgtcaatcacgtcatcttcactacgcaactacacaccacgctaaacacacacattaccgtaacgccaaaacaccaccacgccacttccgacacgcatctccgacgtacacgccctaaccttcgccatacaatcaatcaacttcatttctactaccaacaaatcaaattcctcacactaaaatttccaacgcgtcgtaacgcatcatcaattcgaacaaacgttcttcttctacgtccgtcaacaccgaatccgactccgacaattacgatatacccgaaaatcttcacgacactcaccgaaaaactccatacgtccgacgcaccattcccaaccgtcgacttcccgaaaatattcaacgacaacctaaaatttttccaacaaaacgacatcgaacgccacgcaatccacataaccaccctcgtcatcgctaaacaaatcaatacgcattcgtcaaataaaaaaacatcaacgcccacgaaacgaaatttaatattatccttcaccgccacttcactttccg

SEQ ID NO: 11097 - DNA, 629 bp, Artificial Sequence
  chemically treated genomic DNA (Homo sapiens) CpG-island No: 11097
cggttcgtagatgttatcggcggtttggttcgcgtatagttttgttggaaaggtatttatttttaaaattatttggtcggttatagcggtgtgttttaagtcgatgtttacggtggttatcgggcgttatacgaattaggtagaataacggaagtcgcgtgtatggtttatgttcggagaaaaatttacgatgtgtatgtaagagcgttaatcgacgttattacggaagttttgtagcgtattagtgaattgtatgttatcgaggttgcggttcggggttgtttagtagaatagcgtttggcggtaagaaaagttagatttgcgttattgatgtagttattgtacgattggatatagatttagatgaaaatattggcgcgttattcggatacggtaaaagcgtttgtatatttgttgtagtagcgggatgttcggaacgtgtattgtagtaatggttgggtggaaatcgataataatatcgtagagaacgttttacggggagtggttataggtcggaagaattggtttttcgcgggtggatttgttttaaatttttagatattgttaattattaatttattataaagtcgtggtcgcgatattttcgtgggcgatcgattattagcgat

SEQ ID NO: 11098 - DNA, 629 bp, Artificial Sequence
  chemically treated genomic DNA (Homo sapiens) CpG-island No: 11098
atcgctaataatcgatcgcccacgaaaatatcgcgaccacgactttataataaattaataattaacaatatctaaaaatttaaaacaaatccacccgcgaaaaaccaattcttccgacctataaccactccccgtaaaacgttctctacgatattattatcgatttccacccaaccattactacaatacacgttccgaacatcccgctactacaacaaatatacaaacgcttttaccgtatccgaataacgcgccaatattttcatctaaatctatatccaatcgtacaataactacatcaataacgcaaatctaacttttcttaccgccaaacgctattctactaaacaaccccgaaccgcaacctcgataacatacaattcactaatacgctacaaaacttccgtaataacgtcgattaacgctcttacatacacatcgtaaatttttctccgaacataaaccatacacgcgacttccgttattctacctaattcgtataacgcccgataaccaccgtaaacatcgacttaaaacacaccgctataaccgaccaaataattttaaaaataaatacctttccaacaaaactatacgcgaaccaaaccgccgataacatctacgaaccg

SEQ ID NO: 11099 - DNA, 629 bp, Artificial Sequence
  chemically treated genomic DNA (Homo sapiens) CpG-island No: 11099
gtcgttggtaatcggtcgtttacgggaatatcgcggttacggttttgtaatgggttaatgattaatagtgtttggaaatttagggtaaatttattcgcgaagagttagttttttcggtttatggttatttttcgtaaggcgttttttgcgatgttgttgtcgatttttatttaattattattgtagtatacgtttcgagtatttcgttattgtagtaggtatgtaaacgtttttgtcgtattcgagtgacgcgttagtgtttttatttgagtttgtatttagtcgtatagtgattgtattagtggcgtaggtttggttttttttgtcgttagacgttgttttgttgaatagtttcggatcgtaatttcgatggtatatagtttattgatacgttgtagggttttcgtggtgacgtcggttggcgtttttgtatgtatatcgtggattttttttcgggtatgggttatatacgcggttttcgttattttgtttgattcgtataacgttcggtagttatcgtaagtatcggtttgaaatatatcgttgtaatcggttaagtgattttgggaatggatatttttttagtaggattgtacgcgaattagatcgtcggtggtatttacgagtcg

SEQ ID NO: 11100 - DNA, 629 bp, Artificial Sequence
  chemically treated genomic DNA (Homo sapiens) CpG-island No: 11100
cgactcgtaaataccaccgacgatctaattcgcgtacaatcctactaaaaaaatatccattcccaaaatcacttaaccgattacaacgatatatttcaaaccgatacttacgataactaccgaacgttatacgaatcaaacaaaataacgaaaaccgcgtatataacccatacccgaaaaaaaatccacgatatacatacaaaaacgccaaccgacgtcaccacgaaaaccctacaacgtatcaataaactatataccatcgaaattacgatccgaaactattcaacaaaacaacgtctaacgacaaaaaaaaccaaacctacgccactaatacaatcactatacgactaaatacaaactcaaataaaaacactaacgcgtcactcgaatacgacaaaaacgtttacatacctactacaataacgaaatactcgaaacgtatactacaataataattaaataaaaatcgacaacaacatcgcaaaaaacgccttacgaaaaataaccataaaccgaaaaaactaactcttcgcgaataaatttaccctaaatttccaaacactattaatcattaacccattacaaaaccgtaaccgcgatattcccgtaaacgaccgattaccaacgac

SEQ ID NO: 11101 - DNA, 513 bp, Artificial Sequence
  chemically treated genomic DNA (Homo sapiens) CpG-island No: 11101
gtttcgcgcgttcgttcgtttttaaggatttgacgggggtttttaggttgggtttagttatttcgttcgcgtgtcggggaagaagttcgttttcggttgtttttagttattttcgagcgttgatttttagatttgggttttacgtgggagggcgggcgtaagggaggagtcgaggttagagagcgagttttcggaggggtcggttttcgatttgttcgggtcgcgtggtttcgggtttagattttagtagggtttttttcgcggttttttttaatttggaggttgagtttaggttgttacgcgtggggcgcggaggggcgagttagtggagtcggttttcgggaaatttttgggggcggtagagcgataggagcgcgtttttttttgtggcgtttcgcgtaggcggttggtatacgtcgatagggagtttattttttaatagttttagtagagttgaattcggttatttttggcggcgttcggatagcgtttttaggatagttaggattttta

SEQ ID NO: 11102 - DNA, 513 bp, Artificial Sequence
  chemically treated genomic DNA (Homo sapiens) CpG-island No: 11102
taaaaatcctaactatcctaaaaacgctatccgaacgccgccaaaaataaccgaattcaactctactaaaactattaaaaaataaactccctatcgacgtataccaaccgcctacgcgaaacgccacaaaaaaaaacgcgctcctatcgctctaccgcccccaaaaatttcccgaaaaccgactccactaactcgcccctccgcgccccacgcgtaacaacctaaactcaacctccaaattaaaaaaaaccgcgaaaaaaaccctactaaaatctaaacccgaaaccacgcgacccgaacaaatcgaaaaccgacccctccgaaaactcgctctctaacctcgactcctcccttacgcccgccctcccacgtaaaacccaaatctaaaaatcaacgctcgaaaataactaaaaacaaccgaaaacgaacttcttccccgacacgcgaacgaaataactaaacccaacctaaaaacccccgtcaaatccttaaaaacgaacgaacgcgcgaaac

SEQ ID NO: 11103 - DNA, 513 bp, Artificial Sequence
  chemically treated genomic DNA (Homo sapiens) CpG-island No: 11103
tgagggttttggttgttttgaggacgttgttcgggcgtcgttaggggtgatcgaatttagttttgttaggattgttgggaaatgagttttttgtcggcgtgtgttagtcgtttgcgcgaggcgttataggagagggcgcgtttttgtcgttttgtcgtttttagaagtttttcgggaatcgattttattgattcgttttttcgcgttttacgcgtggtagtttaagtttagtttttagattggaggagatcgcggagggaattttgttggggtttgggttcggggttacgcggttcgagtagatcgagggtcgattttttcgagaattcgttttttggtttcggttttttttttgcgttcgtttttttacgtggggtttaggtttgggaattagcgttcgggggtggttggggataatcgagaacgagtttttttttcggtacgcgggcggaatggttgagtttagtttggaagttttcgttaggtttttgggggcgggcgggcgcgcgaagt

SEQ ID NO: 11104 - DNA, 513 bp, Artificial Sequence
  chemically treated genomic DNA (Homo sapiens) CpG-island No: 11104
acttcgcgcgcccgcccgcccccaaaaacctaacgaaaacttccaaactaaactcaaccattccgcccgcgtaccgaaaaaaaaactcgttctcgattatccccaaccacccccgaacgctaattcccaaacctaaaccccacgtaaaaaaacgaacgcaaaaaaaaaaccgaaaccaaaaaacgaattctcgaaaaaatcgaccctcgatctactcgaaccgcgtaaccccgaacccaaaccccaacaaaattccctccgcgatctcctccaatctaaaaactaaacttaaactaccacgcgtaaaacgcgaaaaaacgaatcaataaaatcgattcccgaaaaacttctaaaaacgacaaaacgacaaaaacgcgccctctcctataacgcctcgcgcaaacgactaacacacgccgacaaaaaactcatttcccaacaatcctaacaaaactaaattcgatcacccctaacgacgcccgaacaacgtcctcaaaacaaccaaaaccctca

SEQ ID NO: 11105 - DNA, 534 bp, Artificial Sequence
  chemically treated genomic DNA (Homo sapiens) CpG-island No: 11105
  unsure (159)
ttttgcgtcggcgtttttttttttcgtagggttttttttttcgtcgttgtttttttttttttttttttttttttgtggtttgcggtgtttttttttttttttttcgttgcgttatttttcgttttgcggtttttttttttttttattttatcgttattntggtcgcgtcgcgttacgtcgttttttttttttttttttttttcgtcgtttttcgttgtcggttgtttttttgtttttttttttttttttttcgttgttcggttgtttgttttttttttttcgtttgcggttcgttttcgtttggtttgttttttcgtgtttttgtttcgttttgttttttcgtacgtttttttttttttttttttttcggtcgcgtggttttttttttttttttcgtttttttttttttttttttttttttgtttttttttttgttttcgttttcggggcggttattttttttcgttttttttttttgcgttcgtttattttttttttcgttttttattatcgatgagagtgtgaattttttaa

SEQ ID NO: 11106 - DNA, 534 bp, Artificial Sequence
  chemically treated genomic DNA (Homo sapiens) CpG-island No: 11106
  unsure (376)
ttaaaaaattcacactctcatcgataataaaaaacgaaaaaaaaaataaacgaacgcaaaaaaaaaaaacgaaaaaaaataaccgccccgaaaacgaaaacaaaaaaaaaaacaaaaaaaaaaaaaaaaaaaaaaaaacgaaaaaaaaaaaaaaaaccacgcgaccgaaaaaaaaaaaaaaaaaaaaacgtacgaaaaaacaaaacgaaacaaaaacacgaaaaaacaaaccaaacgaaaacgaaccgcaaacgaaaaaaaaaaaacaaacaaccgaacaacgaaaaaaaaaaaaaaaaaaacaaaaaaacaaccgacaacgaaaaacgacgaaaaaaaaaaaaaaaaaaaaaacgacgtaacgcgacgcgaccanaataacgataaaataaaaaaaaaaaaaaaccgcaaaacgaaaaataacgcaacgaaaaaaaaaaaaaaaaacaccgcaaaccacaaaaaaaaaaaaaaaaaaaaaaaaacaacgacgaaaaaaaaaaccctacgaaaaaaaaaaacgccgacgcaaaa

SEQ ID NO: 11107 - DNA, 534 bp, Artificial Sequence
  chemically treated genomic DNA (Homo sapiens) CpG-island No: 11107
  unsure (376)
ttaaaaagtttatatttttatcggtaatagggagcgagagagagagtagacgaacgtagagggagaggacgaaagaagatgatcgtttcgaagacgaggatagaaaaggagatagaagaagaagaaggagagagagagcggggggaaagaaagagattacgcgatcggaaagaagaaagaaaagggggcgtacgaaaagataaggcgggatagaaatacgagagagtaggttaaacggagacgggtcgtaggcgaaaaggaagaaataaatagtcggatagcgggaaagagaagaaggagagtagaggagtagtcgatagcgaggagcggcggagagagagagaggaagagaaacgacgtggcgcgacgcggttangatagcggtggagtggaagaaagagaagatcgtagaacgggaagtaacgtagcgaaaagagagaaaggagatatcgtaggttataaagagaagagaagaagagaggaggtagcggcgggagagaggattttacggagaggagggacgtcgacgtaaaa

SEQ ID NO: 11108 - DNA, 534 bp, Artificial Sequence
  chemically treated genomic DNA (Homo sapiens) CpG-island No: 11108
  unsure (159)
ttttacgtcgacgtccctcctctccgtaaaatcctctctcccgccgctacctcctctcttcttctcttctctttataacctacgatatctcctttctctcttttcgctacgttacttcccgttctacgatcttctctttcttccactccaccgctatcntaaccgcgtcgcgccacgtcgtttctcttcctctctctctctccgccgctcctcgctatcgactactcctctactctccttcttctctttcccgctatccgactatttatttcttccttttcgcctacgacccgtctccgtttaacctactctctcgtatttctatcccgccttatcttttcgtacgcccccttttctttcttctttccgatcgcgtaatctctttctttccccccgctctctctctccttcttcttcttctatctccttttctatcctcgtcttcgaaacgatcatcttctttcgtcctctccctctacgttcgtctactctctctctcgctccctattaccgataaaaatataaactttttaa

SEQ ID NO: 11109 - DNA, 854 bp, Artificial Sequence
  chemically treated genomic DNA (Homo sapiens) CpG-island No: 11109
gttcggggttaggtcgttatttttcgggagtttgatagggaagagcggttaagtttttagtttcgttcgatagtcgagggaattgtacgaagggcgtcgttgattttattattttgagttcgggaaggtttgcgggcggcggtataagaatttagacgggtgtagaaatagggcggagggtgtagggtggcggttcggattgcgttgttggcggttagcggcgcgattttcggtttcggattcggtttcggtttttaatttttagtttcgcgcgggtagaacgtatcgtttggcgattttagttcgcgttttagcgttaaggttgatttggcggttgagcgggcggggcgtttatttggatattcgtagttttcggcgtttttagaatttttcgcggcgtcgttcggttagttcggcgtttttttttttggcgatttcgttttcggtcgttgtcggggtttcgtttatttgagtcgtcgttacgtttttattttacgttttatacgtttgtttgcgttttggtttttagtttcggtggtttcgtcggggttcgttattttttgcgatttttgggaacgtttaggttattcggtttcgcgggagtcggagtcggagtcggagtcggagttggtcgttcgcgttttttatgtcgttcgtagtttatcgtacgtatttcgcgttcgtttggttttggcgtttttatttgcgggttttggttcgtttttttgtttagtttttgggcgtttggagaggtcgttacgattcgattttttcgtcggggttgtagggagagcgtttttggaggttgacggatttttttgtttgcgtttatgtttattgtttggggggttttg

SEQ ID NO: 11110 - DNA, 854 bp, Artificial Sequence
  chemically treated genomic DNA (Homo sapiens) CpG-island No: 11110
caaaaccccccaaacaataaacataaacgcaaacaaaaaaatccgtcaacctccaaaaacgctctccctacaaccccgacgaaaaaatcgaatcgtaacgacctctccaaacgcccaaaaactaaacaaaaaaacgaaccaaaacccgcaaataaaaacgccaaaaccaaacgaacgcgaaatacgtacgataaactacgaacgacataaaaaacgcgaacgaccaactccgactccgactccgactccgactcccgcgaaaccgaataacctaaacgttcccaaaaatcgcaaaaaataacgaaccccgacgaaaccaccgaaactaaaaaccaaaacgcaaacaaacgtataaaacgtaaaataaaaacgtaacgacgactcaaataaacgaaaccccgacaacgaccgaaaacgaaatcgccaaaaaaaaaaacgccgaactaaccgaacgacgccgcgaaaaattctaaaaacgccgaaaactacgaatatccaaataaacgccccgcccgctcaaccgccaaatcaaccttaacgctaaaacgcgaactaaaatcgccaaacgatacgttctacccgcgcgaaactaaaaattaaaaaccgaaaccgaatccgaaaccgaaaatcgcgccgctaaccgccaacaacgcaatccgaaccgccaccctacaccctccgccctatttctacacccgtctaaattcttataccgccgcccgcaaaccttcccgaactcaaaataataaaatcaacgacgcccttcgtacaattccctcgactatcgaacgaaactaaaaacttaaccgctcttccctatcaaactcccgaaaaataacgacctaaccccgaac

SEQ ID NO: 11111 - DNA, 854 bp, Artificial Sequence
  chemically treated genomic DNA (Homo sapiens) CpG-island No: 11111
tagggttttttaggtaatgggtatgagcgtaggtagggaaattcgttagtttttagggacgttttttttatagtttcggcgaggggatcgggtcgtggcgatttttttagacgtttaggggttgggtaggagggcgggttaaggttcgtaggtgggggcgttaaagttaggcgggcgcggagtacgtgcggtgggttgcgggcggtatgaagggcgcgggcggttagtttcggtttcggtttcggtttcggttttcgcgaggtcgggtagtttgggcgtttttaggggtcgtagaggatggcgaatttcggcggagttatcggagttggggattaggacgtaggtaggcgtgtggagcgtgaggtggggacgtggcggcggtttaagtgggcggagtttcggtagcggtcggaggcggagtcgttaagggaggaggcgtcgagttgatcgggcgacgtcgcgggaggttttggaaacgtcgggagttgcgagtgtttaggtgagcgtttcgttcgtttagtcgttagattaattttagcgttggggcgcgggttggggtcgttaggcggtgcgttttgttcgcgcggggttgagagttaggggtcggggtcggattcggggtcgggggtcgcgtcgttagtcgttagtagcgtagttcgggtcgttattttgtatttttcgttttgtttttgtattcgtttgggtttttgtgtcgtcgttcgtaagttttttcgagtttagggtggtgaggttagcggcgtttttcgtgtagttttttcggttgtcgggcggggttgggaatttggtcgtttttttttgttaggttttcgggaagtggcggtttgatttcgggt

SEQ ID NO: 11112 - DNA, 854 bp, Artificial Sequence
  chemically treated genomic DNA (Homo sapiens) CpG-island No: 11112
acccgaaatcaaaccgccacttcccgaaaacctaacaaaaaaaaacgaccaaattcccaaccccgcccgacaaccgaaaaaactacacgaaaaacgccgctaacctcaccaccctaaactcgaaaaaacttacgaacgacgacacaaaaacccaaacgaatacaaaaacaaaacgaaaaatacaaaataacgacccgaactacgctactaacgactaacgacgcgacccccgaccccgaatccgaccccgacccctaactctcaaccccgcgcgaacaaaacgcaccgcctaacgaccccaacccgcgccccaacgctaaaattaatctaacgactaaacgaacgaaacgctcacctaaacactcgcaactcccgacgtttccaaaacctcccgcgacgtcgcccgatcaactcgacgcctcctcccttaacgactccgcctccgaccgctaccgaaactccgcccacttaaaccgccgccacgtccccacctcacgctccacacgcctacctacgtcctaatccccaactccgataactccgccgaaattcgccatcctctacgacccctaaaaacgcccaaactacccgacctcgcgaaaaccgaaaccgaaaccgaaaccgaaactaaccgcccgcgcccttcataccgcccgcaacccaccgcacgtactccgcgcccgcctaactttaacgcccccacctacgaaccttaacccgccctcctacccaacccctaaacgtctaaaaaaatcgccacgacccgatcccctcgccgaaactataaaaaaaacgtccctaaaaactaacgaatttccctacctacgctcatacccattacctaaaaaacccta

SEQ ID NO: 11113 - DNA, 575 bp, Artificial Sequence
  chemically treated genomic DNA (Homo sapiens) CpG-island No: 11113
tagaacgggatatcgtttgaaaattcgtaatcgttatttttcggcggttgcggttgaggtttcggttgcgcggttttacgtttacggtttttcgtttttgcgttattttttttcgtatcggttttcgtttgtggtttcggttgaggttgatcgttgaattgttgtttttttttcggttgagtttgagtatttgcggtacgtattagtatttgtatggtgttcgtggttttaataagaatttcggtgacgtaacgggtgatatcgttatttttttagttacgggtgcgaagttgattttcgatgtagatttgcgcgtttttgcgtagatatttatttgttattttcgcgagtttgtcgaatagtattacgcgatgttattttgtttgttttcgtatttttttcgtttgtttgttacgttagttttttgacgtggttatttgtaggtttgttattgcgttttcgttggggatgtaacggattttcggatttttttttaggcgttttacgaggatgattttgttaatgttacgaattgttatgatgtgtttttttttgttgatggttttagtttttat

SEQ ID NO: 11114 - DNA, 575 bp, Artificial Sequence
  chemically treated genomic DNA (Homo sapiens) CpG-island No: 11114
ataaaaactaaaaccatcaacaaaaaaaaacacatcataacaattcgtaacattaacaaaatcatcctcgtaaaacgcctaaaaaaaaatccgaaaatccgttacatccccaacgaaaacgcaataacaaacctacaaataaccacgtcaaaaaactaacgtaacaaacaaacgaaaaaaatacgaaaacaaacaaaataacatcgcgtaatactattcgacaaactcgcgaaaataacaaataaatatctacgcaaaaacgcgcaaatctacatcgaaaatcaacttcgcacccgtaactaaaaaaataacgatatcacccgttacgtcaccgaaattcttattaaaaccacgaacaccatacaaatactaatacgtaccgcaaatactcaaactcaaccgaaaaaaaaacaacaattcaacgatcaacctcaaccgaaaccacaaacgaaaaccgatacgaaaaaaaataacgcaaaaacgaaaaaccgtaaacgtaaaaccgcgcaaccgaaacctcaaccgcaaccgccgaaaaataacgattacgaattttcaaacgatatcccgttcta

SEQ ID NO: 11115 - DNA, 575 bp, Artificial Sequence
  chemically treated genomic DNA (Homo sapiens) CpG-island No: 11115
atgggggttgaaattattaatagaaggagatatattatggtagttcgtggtattaataaggttattttcgtaggacgtttgggaaaggattcggaagttcgttatatttttaacgggggcgtagtggtaaatttgtaggtggttacgttagaaagttggcgtgataaatagacgggggagatgcgggagtagatagaatggtatcgcgtggtgttgttcggtaagttcgcggaagtggtaggtgaatgtttgcgtaagggcgcgtaggtttatatcgaaggttagtttcgtattcgtagttgggaggataacggtattattcgttacgttatcgaaatttttgttaagattacgggtattatgtagatgttggtacgtgtcgtaggtgtttagatttagtcggaagaggggtaatagtttagcggttagttttagtcggaattataggcggaggtcggtacgaaaaaaggtggcgtaaaaacgaaaggtcgtggacgtaaggtcgcgtagtcggagttttagtcgtaatcgtcggagggtgacgattacgggtttttagacgatatttcgttttg

SEQ ID NO: 11116 - DNA, 575 bp, Artificial Sequence
  chemically treated genomic DNA (Homo sapiens) CpG-island No: 11116
caaaacgaaatatcgtctaaaaacccgtaatcgtcaccctccgacgattacgactaaaactccgactacgcgaccttacgtccacgacctttcgtttttacgccaccttttttcgtaccgacctccgcctataattccgactaaaactaaccgctaaactattacccctcttccgactaaatctaaacacctacgacacgtaccaacatctacataatacccgtaatcttaacaaaaatttcgataacgtaacgaataataccgttatcctcccaactacgaatacgaaactaaccttcgatataaacctacgcgcccttacgcaaacattcacctaccacttccgcgaacttaccgaacaacaccacgcgataccattctatctactcccgcatctcccccgtctatttatcacgccaactttctaacgtaaccacctacaaatttaccactacgcccccgttaaaaatataacgaacttccgaatcctttcccaaacgtcctacgaaaataaccttattaataccacgaactaccataatatatctccttctattaataatttcaacccccat

SEQ ID NO: 11117 - DNA, 736 bp, Artificial Sequence
  chemically treated genomic DNA (Homo sapiens) CpG-island No: 11117
cgtttttattgttcggggatggggagtaagtttagttagtcgttgtttcgggttgtcgcgtgcgtagttgtacgttatttttagacgaatcgatgattggatggatgtcggtcgtagtcgttatattgatgatacgtatgtgtattttcgtatatattatgttatcggagagttgttaacgtatggtaatcgtcgggtatgggcgttgtttcgtagataggtagaatttgatggtatgtttgcgattaatgttaaacgtgtttatcggattatgcgttagaatgcgttgttgtttgagcgaaaatttgttgtatcgttatcgaaacgggtatatataggtagagtggtcgtgaaagaaagtaattagcgatggtgttttgacgggttcgagttttgttgtgataacggagagagattgcgtgttacgttcgcgttggattgttgtgatcgtgaggtattgtattgggcggttattatcggcggttttaatagtgaaatagtataggacgttatgttgggagcggtggaacgtcgtttcggtaacgatttttcgtcgtttttagtggagtggttgacggataatggtttatgttatcgggttaatgaaatacgttagttcgttcggatgttgggatttgaatcgaagaatacggcggtgcggagttttagagtattataggaggcggttaagttaacgggtgtgttttttgttttgtggtttttaggtgggaaaggt

SEQ ID NO: 11118 - DNA, 736 bp, Artificial Sequence
  chemically treated genomic DNA (Homo sapiens) CpG-island No: 11118
acctttcccacctaaaaaccacaaaacaaaaaacacacccgttaacttaaccgcctcctataatactctaaaactccgcaccgccgtattcttcgattcaaatcccaacatccgaacgaactaacgtatttcattaacccgataacataaaccattatccgtcaaccactccactaaaaacgacgaaaaatcgttaccgaaacgacgttccaccgctcccaacataacgtcctatactatttcactattaaaaccgccgataataaccgcccaatacaatacctcacgatcacaacaatccaacgcgaacgtaacacgcaatctctctccgttatcacaacaaaactcgaacccgtcaaaacaccatcgctaattactttctttcacgaccactctacctatatatacccgtttcgataacgatacaacaaattttcgctcaaacaacaacgcattctaacgcataatccgataaacacgtttaacattaatcgcaaacataccatcaaattctacctatctacgaaacaacgcccatacccgacgattaccatacgttaacaactctccgataacataatatatacgaaaatacacatacgtatcatcaatataacgactacgaccgacatccatccaatcatcgattcgtctaaaaataacgtacaactacgcacgcgacaacccgaaacaacgactaactaaacttactccccatccccgaacaataaaaacg

SEQ ID NO: 11119 - DNA, 736 bp, Artificial Sequence
  chemically treated genomic DNA (Homo sapiens) CpG-island No: 11119
gttttttttatttggaaattatagggtagggggtatattcgttggtttggtcgttttttatagtgttttaaagtttcgtatcgtcgtgtttttcggtttaagttttaatattcgggcgaattggcgtgttttattagttcggtagtatgaattattattcgttagttattttattggagacgacggaagatcgttgtcgaagcggcgttttatcgtttttagtatgacgttttgtattgttttattgttgaagtcgtcggtagtgatcgtttagtgtagtgttttacgattatagtagtttagcgcgaacgtgatacgtagttttttttcgttattatagtagaattcgaattcgttagagtattatcgttgattgtttttttttacggttattttgtttgtatgtgttcgtttcgatggcggtatagtaggttttcgtttaagtaatagcgtattttggcgtatgattcggtaaatacgtttggtattgatcgtaggtatattattaagttttgtttgtttgcgaagtagcgtttatattcgacgattattatacgttggtagtttttcgataatatggtgtatacggagatgtatatacgtattattagtgtgacgattgcggtcggtatttatttagttatcggttcgtttgagaatgacgtgtaattgcgtacgcgataattcgagataacggttgattaagtttattttttattttcgggtaataagggcg

SEQ ID NO: 11120 - DNA, 736 bp, Artificial Sequence
  chemically treated genomic DNA (Homo sapiens) CpG-island No: 11120
cgcccttattacccgaaaataaaaaataaacttaatcaaccgttatctcgaattatcgcgtacgcaattacacgtcattctcaaacgaaccgataactaaataaataccgaccgcaatcgtcacactaataatacgtatatacatctccgtatacaccatattatcgaaaaactaccaacgtataataatcgtcgaatataaacgctacttcgcaaacaaacaaaacttaataatatacctacgatcaataccaaacgtatttaccgaatcatacgccaaaatacgctattacttaaacgaaaacctactataccgccatcgaaacgaacacatacaaacaaaataaccgtaaaaaaaaacaatcaacgataatactctaacgaattcgaattctactataataacgaaaaaaaactacgtatcacgttcgcgctaaactactataatcgtaaaacactacactaaacgatcactaccgacgacttcaacaataaaacaatacaaaacgtcatactaaaaacgataaaacgccgcttcgacaacgatcttccgtcgtctccaataaaataactaacgaataataattcatactaccgaactaataaaacacgccaattcgcccgaatattaaaacttaaaccgaaaaacacgacgatacgaaactttaaaacactataaaaaacgaccaaaccaacgaatataccccctaccctataatttccaaataaaaaaaac

SEQ ID NO: 11121 - DNA, 739 bp, Artificial Sequence
  chemically treated genomic DNA (Homo sapiens) CpG-island No: 11121
agatagaatggaacgtttggtgtttgtcgtttgtttgttggtcgtgatttcggcgtttaattttgttattagtgatgcggcggttgtagtcggttttgtgatgacggtgttgatcgttggtttggtgtcgtgtgtagggaaattattatttcgtttttggttcggagattttttttcgacgttttatgtttgttatttggttgtgttgggcgttttggcgttgtgacgggtgtggtatttttggtcgtaagaggatgattcgttagaggtagaatatagtatgatagagtagaagcgatcggtattgatattgaagcggaagatagaaggggagacgtttgttcgtagtcggaaaattattattaatgttattacgttattaaagtggaaggtgaaaaagtagaagttggtcgagaaagtttgtcgggaagtagagttggcggtaaaaaaagcgtaggttagataggcgttgtttatttatttgaatttgtttacgttggatgatgtcgtgaatattttgaagttttggtggtcgggattatttgacggtgatacgtttcggtttttggtttgcggtattcgggacgtgttattggaagacgtggcgtagcggaatatttcgttttcgtataaaaaattgcgtagggcgttgaaggttattattcgtttagaaagttgattttatttagtaatagtggatacgcggttaagtgagtaaatttttagttagaggtgattt

SEQ ID NO: 11122 - DNA, 739 bp, Artificial Sequence
  chemically treated genomic DNA (Homo sapiens) CpG-island No: 11122
aaatcacctctaactaaaaatttactcacttaaccgcgtatccactattactaaataaaatcaactttctaaacgaataataaccttcaacgccctacgcaattttttatacgaaaacgaaatattccgctacgccacgtcttccaataacacgtcccgaataccgcaaaccaaaaaccgaaacgtatcaccgtcaaataatcccgaccaccaaaacttcaaaatattcacgacatcatccaacgtaaacaaattcaaataaataaacaacgcctatctaacctacgctttttttaccgccaactctacttcccgacaaactttctcgaccaacttctactttttcaccttccactttaataacgtaataacattaataataattttccgactacgaacaaacgtctccccttctatcttccgcttcaatatcaataccgatcgcttctactctatcatactatattctacctctaacgaatcatcctcttacgaccaaaaataccacacccgtcacaacgccaaaacgcccaacacaaccaaataacaaacataaaacgtcgaaaaaaaatctccgaaccaaaaacgaaataataatttccctacacacgacaccaaaccaacgatcaacaccgtcatcacaaaaccgactacaaccgccgcatcactaataacaaaattaaacgccgaaatcacgaccaacaaacaaacgacaaacaccaaacgttccattctatct

SEQ ID NO: 11123 - DNA, 739 bp, Artificial Sequence
  chemically treated genomic DNA (Homo sapiens) CpG-island No: 11123
gagttatttttgattgagagtttatttatttagtcgcgtgtttattattgttgggtaagattagttttttgaacgggtgatggtttttagcgttttgcgtagttttttatgcgagagcgggatatttcgttgcgttacgttttttagtaatacgtttcggatatcgtaggttagaagtcggggcgtgttatcgttaaataatttcggttattagggttttagggtgtttacggtattatttagcgtgggtagatttagataaatggatagcgtttgtttggtttgcgttttttttgtcgttagttttgtttttcggtaggttttttcggttagtttttgtttttttattttttattttggtggcgtggtgatattgatgatggtttttcggttgcggataagcgtttttttttttgtttttcgttttagtgttagtatcggtcgtttttgttttgttatgttgtgttttgtttttgacgaattatttttttgcggttaaagatattatattcgttatagcgttagaacgtttagtatagttagatgataggtatagaacgtcgggaaaaagttttcgggttagaaacgggataataatttttttgtatacgatattagattaacggttagtatcgttattataaggtcggttatagtcgtcgtattattggtggtaaggttaagcgtcggaattacggttagtaggtaagcgataagtattagacgttttattttgttt

SEQ ID NO: 11124 - DNA, 739 bp, Artificial Sequence
  chemically treated genomic DNA (Homo sapiens) CpG-island No: 11124
aaacaaaataaaacgtctaatacttatcgcttacctactaaccgtaattccgacgcttaaccttaccaccaataatacgacgactataaccgaccttataataacgatactaaccgttaatctaatatcgtatacaaaaaaattattatcccgtttctaacccgaaaactttttcccgacgttctatacctatcatctaactatactaaacgttctaacgctataacgaatataatatctttaaccgcaaaaaaataattcgtcaaaaacaaaacacaacataacaaaacaaaaacgaccgatactaacactaaaacgaaaaacaaaaaaaaaaacgcttatccgcaaccgaaaaaccatcatcaatatcaccacgccaccaaaataaaaaataaaaaaacaaaaactaaccgaaaaaacctaccgaaaaacaaaactaacgacaaaaaaaacgcaaaccaaacaaacgctatccatttatctaaatctacccacgctaaataataccgtaaacaccctaaaaccctaataaccgaaattatttaacgataacacgccccgacttctaacctacgatatccgaaacgtattactaaaaaacgtaacgcaacgaaatatcccgctctcgcataaaaaactacgcaaaacgctaaaaaccatcacccgttcaaaaaactaatcttacccaacaataataaacacgcgactaaataaataaactctcaatcaaaaataactc

SEQ ID NO: 11125 - DNA, 595 bp, Artificial Sequence
  chemically treated genomic DNA (Homo sapiens) CpG-island No: 11125
cgatttttgttgatgttttagttgcggagtttagtagtttagtagttgtttatttcgtaggtttacggacgttacggttacgtaggttacggatttgtgttttggtgtatttacgtggttttgatcggttcgcggatagtagtcgtgtaggagacgcggtgtcgagttttaggcgttaaagattttttcgcgtggagagtttagtggtgatcgagtgcggtattttcgcggcgatgatcgcgtttttcgtttgagtcgaaaggcgttggggcgatcggtttttgtgcggtatagtagcgatgtagcgacgtttcgattttttacggatagttcgttttatacggttcgtgggttatcggttcgttcgggtatattagatcgtcgtcgtgtcgtcgaggtgtcgttgacgtgcgttcggtacgtcgtttgttcgtttatagtatcggcgttgacgcggtggacgttggaatgacgttcgcgcggtttgagcgttgacgagttggcgtcgcggatcgtcggacgcgcgtttcgttaggtcgtcgcgtttattgttaagtatttagtgtttagaatatataaaaaattattttagggt

SEQ ID NO: 11126 - DNA, 595 bp, Artificial Sequence
  chemically treated genomic DNA (Homo sapiens) CpG-island No: 11126
accctaaaataattttttatatattctaaacactaaatacttaacaataaacgcgacgacctaacgaaacgcgcgtccgacgatccgcgacgccaactcgtcaacgctcaaaccgcgcgaacgtcattccaacgtccaccgcgtcaacgccgatactataaacgaacaaacgacgtaccgaacgcacgtcaacgacacctcgacgacacgacgacgatctaatatacccgaacgaaccgataacccacgaaccgtataaaacgaactatccgtaaaaaatcgaaacgtcgctacatcgctactataccgcacaaaaaccgatcgccccaacgcctttcgactcaaacgaaaaacgcgatcatcgccgcgaaaataccgcactcgatcaccactaaactctccacgcgaaaaaatctttaacgcctaaaactcgacaccgcgtctcctacacgactactatccgcgaaccgatcaaaaccacgtaaatacaccaaaacacaaatccgtaacctacgtaaccgtaacgtccgtaaacctacgaaataaacaactactaaactactaaactccgcaactaaaacatcaacaaaaatcg

SEQ ID NO: 11127 - DNA, 595 bp, Artificial Sequence
  chemically treated genomic DNA (Homo sapiens) CpG-island No: 11127
attttaaaatagttttttatatattttggatattgaatatttaataatagacgcgacgatttggcggggcgcgcgttcggcggttcgcggcgttagttcgttagcgtttaaatcgcgcgagcgttattttagcgtttatcgcgttagcgtcggtgttgtgggcgagtaggcggcgtgtcggacgtacgttagcgatatttcggcggtacgacggcggtttggtgtattcgggcgggtcggtggtttacgggtcgtgtggggcggattgttcgtggagggtcggggcgtcgttgtatcgttattgtgtcgtatagaggtcggtcgttttaacgtttttcggtttagacgaaggacgcggttatcgtcgcggaggtgtcgtattcggttattattgagttttttacgcgggaagatttttggcgtttggggttcggtatcgcgttttttgtacggttgttgttcgcgggtcggttaggattacgtgggtgtattagggtataggttcgtagtttacgtgatcgtggcgttcgtaggtttgcgaggtgggtaattgttggattgttgggtttcgtagttgaggtattagtaaaggtcg

SEQ ID NO: 11128 - DNA, 595 bp, Artificial Sequence
  chemically treated genomic DNA (Homo sapiens) CpG-island No: 11128
cgacctttactaatacctcaactacgaaacccaacaatccaacaattacccacctcgcaaacctacgaacgccacgatcacgtaaactacgaacctataccctaatacacccacgtaatcctaaccgacccgcgaacaacaaccgtacaaaaaacgcgataccgaaccccaaacgccaaaaatcttcccgcgtaaaaaactcaataataaccgaatacgacacctccgcgacgataaccgcgtccttcgtctaaaccgaaaaacgttaaaacgaccgacctctatacgacacaataacgatacaacgacgccccgaccctccacgaacaatccgccccacacgacccgtaaaccaccgacccgcccgaatacaccaaaccgccgtcgtaccgccgaaatatcgctaacgtacgtccgacacgccgcctactcgcccacaacaccgacgctaacgcgataaacgctaaaataacgctcgcgcgatttaaacgctaacgaactaacgccgcgaaccgccgaacgcgcgccccgccaaatcgtcgcgtctattattaaatattcaatatccaaaatatataaaaaactattttaaaat

SEQ ID NO: 11129 - DNA, 1385 bp, Artificial Sequence
  chemically treated genomic DNA (Homo sapiens) CpG-island No: 11129
tttatagtcgtttaggtttcggggtagagaaattggaagtcgtatcggggggaggttttggttcggggcgggagtgggagattcggttacgtcggggtcgtatttattatggaaggttagttcgtcggtcgatgttatggtcgtttaggggcgttttcgtatttttcgttgaggatagagatcggttaggtatatttttttttcgttttcgagtcggtttttcggtttttagttttatttggcgattaattgtatttacggaggtttgaattcgtcgtttcgtttttataggtgcgtttcgtttttttttatttgaggttatttgggtcggcgtggttggggttttttgcgtttgcgcgtttcgtttattcgttagattttaatcgatttagatttgatagtaatattcggcgtttgttttttttttattttttttcgttgggaagttattttcggtaaagttggcgtttgcgtagaagagattttcgggtttttaacgtcgggtattaggagttttttttcggagtaaggatttttaagacggaagaggatggtcgcggcggttttgaggagattttggtttcggcgtcgcgtagaggcgggcgacgcggtagtggcgaagtcgggagtgtgggcgcggttgggtgagtagcggcggaaggcggtagggtgggtggtcgtcgcgatagggtgggtggtcgtcgcggtcggattatttttatcgcgtttttttttttttagggttttgggttcgcgcgttgtttcgggattacgtcgaggtttgtagggacgtttcggcggaggttagggttcggtcggggcgcgtcgttgtgtatgtgggtttgttgggcggcgcggcggtttgttttacgttggcgtttagcgagggtgttttcgaggaggcgttgttggaggcgtcggggatttttttgttgttggcgtcggttattcgtaatcgcgagttcgaagttttcgtgtagaggttgttttggttgcggggtcgtggtcgtttgcgttacgttaatttggggttttgttcgttggtgtacgaggcgtttttcgacgtttaggttagtttttattaggcgcgttgtcgttatttgtagtttcgttggatcgattttttcggtcgggttttggacgtgggtttcgtgggtcgttggtgggtgttgggggtttggatgcgcgattgcgatattaacgacgacgaatttttgtatttgtcggcgtatttgcgggtggtcgggttttagtagttgtatttcgagattaacgagcggtttttcgatgagaagtataagtttgtcgtgtttatcgacgattaggtggattaggcgttgtgggaggagtaggttttgtagaaggagaagaaggataggttcgtt

SEQ ID NO: 11130 - DNA, 1385 bp, Artificial Sequence
  chemically treated genomic DNA (Homo sapiens) CpG-island No: 11130
aacgaacctatccttcttctccttctacaaaacctactcctcccacaacgcctaatccacctaatcgtcgataaacacgacaaacttatacttctcatcgaaaaaccgctcgttaatctcgaaatacaactactaaaacccgaccacccgcaaatacgccgacaaatacaaaaattcgtcgtcgttaatatcgcaatcgcgcatccaaacccccaacacccaccaacgacccacgaaacccacgtccaaaacccgaccgaaaaaatcgatccaacgaaactacaaataacgacaacgcgcctaataaaaactaacctaaacgtcgaaaaacgcctcgtacaccaacgaacaaaaccccaaattaacgtaacgcaaacgaccacgaccccgcaaccaaaacaacctctacacgaaaacttcgaactcgcgattacgaataaccgacgccaacaacaaaaaaatccccgacgcctccaacaacgcctcctcgaaaacaccctcgctaaacgccaacgtaaaacaaaccgccgcgccgcccaacaaacccacatacacaacgacgcgccccgaccgaaccctaacctccgccgaaacgtccctacaaacctcgacgtaatcccgaaacaacgcgcgaacccaaaaccctaaaaaaaaaaaaacgcgataaaaataatccgaccgcgacgaccacccaccctatcgcgacgaccacccaccctaccgccttccgccgctactcacccaaccgcgcccacactcccgacttcgccactaccgcgtcgcccgcctctacgcgacgccgaaaccaaaatctcctcaaaaccgccgcgaccatcctcttccgtcttaaaaatccttactccgaaaaaaaactcctaatacccgacgttaaaaacccgaaaatctcttctacgcaaacgccaactttaccgaaaataacttcccaacgaaaaaaaataaaaaaaaaacaaacgccgaatattactatcaaatctaaatcgattaaaatctaacgaataaacgaaacgcgcaaacgcaaaaaaccccaaccacgccgacccaaataacctcaaataaaaaaaaacgaaacgcacctataaaaacgaaacgacgaattcaaacctccgtaaatacaattaatcgccaaataaaactaaaaaccgaaaaaccgactcgaaaacgaaaaaaaaatatacctaaccgatctctatcctcaacgaaaaatacgaaaacgcccctaaacgaccataacatcgaccgacgaactaaccttccataataaatacgaccccgacgtaaccgaatctcccactcccgccccgaaccaaaacctccccccgatacgacttccaatttctctaccccgaaacctaaacgactataaa

SEQ ID NO: 11131 - DNA, 1385 bp, Artificial Sequence
  chemically treated genomic DNA (Homo sapiens) CpG-island No: 11131
ggcgagtttgttttttttttttttttgtaagatttgttttttttatagcgtttggtttatttgatcgtcggtgagtacgataggtttgtattttttatcgaagagtcgttcgttggtttcggaatgtagttgttggggttcgattattcgtaaatgcgtcggtaggtgtaggaattcgtcgtcgttgatgtcgtagtcgcgtatttaggtttttagtatttattagcgatttacgaagtttacgtttaggattcggtcggggaagtcggtttagcggggttgtaggtagcggtaacgcgtttggtagaggttggtttgggcgtcgaagggcgtttcgtatattagcgagtagagttttaggttgacgtagcgtaggcggttacggtttcgtagttagagtagtttttgtacgaaggtttcggattcgcggttgcgggtggtcggcgttagtagtaggagggttttcgacgtttttagtagcgttttttcgaaggtattttcgttgggcgttagcgtgaagtaggtcgtcgcgtcgtttagtagatttatatatatagcggcgcgtttcggtcgggttttagttttcgtcgaagcgtttttgtaggtttcggcgtagtttcggagtagcgcgcgggtttaggattttgaggggagaggagcgcggtaagagtgattcggtcgcggcggttatttattttgtcgcggcggttatttattttgtcgtttttcgtcgttatttatttagtcgcgtttatattttcggtttcgttattatcgcgtcgttcgtttttgcgcggcgtcgggattaaaatttttttagagtcgtcgcggttattttttttcgttttgggggtttttgtttcgggaagaaatttttgatattcgacgttaagagttcgggagttttttttgcgtaagcgttaattttatcggaagtggttttttaacgggagaggatagaaagaggataggcgtcggatgttgttgttaggtttgagtcggttggagtttgacgggtaggcgagacgcgtaggcgtagagagttttagttacgtcggtttaggtggttttaggtgagggggggcggagcgtatttgtggggacgggacgacgagtttaagttttcgtgggtgtagttggtcgttaggtagggttgggggtcgagggatcggttcgggggcgggggggaagtgtgtttgatcggtttttgtttttagcgagggatgcggagacgtttttgaacgattatggtatcggtcgacgagttgattttttatggtgagtgcggtttcgacgtggtcggattttttattttcgtttcgggttagaattttttttcgatacggtttttaatttttttatttcgaagtttaggcggttgtgaa

SEQ ID NO: 11132 - DNA, 1385 bp, Artificial Sequence
  chemically treated genomic DNA (Homo sapiens) CpG-island No: 11132
ttcacaaccgcctaaacttcgaaataaaaaaattaaaaaccgtatcgaaaaaaaattctaacccgaaacgaaaataaaaaatccgaccacgtcgaaaccgcactcaccataaaaaatcaactcgtcgaccgataccataatcgttcaaaaacgtctccgcatccctcgctaaaaacaaaaaccgatcaaacacacttcccccccgcccccgaaccgatccctcgacccccaaccctacctaacgaccaactacacccacgaaaacttaaactcgtcgtcccgtccccacaaatacgctccgccccccctcacctaaaaccacctaaaccgacgtaactaaaactctctacgcctacgcgtctcgcctacccgtcaaactccaaccgactcaaacctaacaacaacatccgacgcctatcctctttctatcctctcccgttaaaaaaccacttccgataaaattaacgcttacgcaaaaaaaactcccgaactcttaacgtcgaatatcaaaaatttcttcccgaaacaaaaacccccaaaacgaaaaaaaataaccgcgacgactctaaaaaaattttaatcccgacgccgcgcaaaaacgaacgacgcgataataacgaaaccgaaaatataaacgcgactaaataaataacgacgaaaaacgacaaaataaataaccgccgcgacaaaataaataaccgccgcgaccgaatcactcttaccgcgctcctctcccctcaaaatcctaaacccgcgcgctactccgaaactacgccgaaacctacaaaaacgcttcgacgaaaactaaaacccgaccgaaacgcgccgctatatatataaatctactaaacgacgcgacgacctacttcacgctaacgcccaacgaaaataccttcgaaaaaacgctactaaaaacgtcgaaaaccctcctactactaacgccgaccacccgcaaccgcgaatccgaaaccttcgtacaaaaactactctaactacgaaaccgtaaccgcctacgctacgtcaacctaaaactctactcgctaatatacgaaacgcccttcgacgcccaaaccaacctctaccaaacgcgttaccgctacctacaaccccgctaaaccgacttccccgaccgaatcctaaacgtaaacttcgtaaatcgctaataaatactaaaaacctaaatacgcgactacgacatcaacgacgacgaattcctacacctaccgacgcatttacgaataatcgaaccccaacaactacattccgaaaccaacgaacgactcttcgataaaaaatacaaacctatcgtactcaccgacgatcaaataaaccaaacgctataaaaaaaacaaatcttacaaaaaaaaaaaaaaaacaaactcgcc

SEQ ID NO: 11133 - DNA, 1263 bp, Artificial Sequence
  chemically treated genomic DNA (Homo sapiens) CpG-island No: 11133
tcgtgttcggtcgacgtcggatatatttggaggtttggttgagtttcgatcgtagtttcgttaaaaacgtaatattcgggtcggattcgttattacgtagttagaaaagttttaacgtttgtttattgttgtagtcgttgtaattgggagggcgattgtaggggtgtcgggcgaggggggcgagttttgttcggcgatttcggcgagagcgcgcgcggagaggatcgcgcggtttttacgcggttcgggttttttatttatttcgtcgtttcgcgggggtcgtcgttgttacggtttcgcgatattgtggttttttttacgcgcgcggttgtcggttgggttttttgattttcgggcgtcgtcgtatttcggtttcgtatagggcgcgtcggtagtttttttttttttcggcgtttcggttttatttaaatcgtttttttcggtttcgcgtcgcgttgttttcgcggttcgcgttttttattaggagtcgtcggcgtcgtcgatttttcggcgtttttttcgttttttcgcgcggggtcgggggtagaatgggcgtttcgtttttttttacgaaataaagaagtcgtcgtcgtcgttaaacgaggggaagtttcgcgcgcgcgttcgttcgtttcggttatcgttttttttttatatatacgcgcgttattcgcgttttcgttgcgcgcgcgttcgtcggttttttttttttttagtatcgcggcggtttttttagttttcgtcgtttgttcggtttcgtgcgcgcgttagttcgttttttcgttttcggcgcgcgtgcgcgttcgtttttgggcggacgggggtgggcgtggttcggaggaagtacgcgcgttcgatgtatcgttttattcgggtcgcgatggtttcgcgtttgcgtacgtttcgttttttgtacgtttcgcgttttgacgtttcggagtatgcgtagagcggacgttattgcggcggcggtggcggcggtcgcggtgacgatggggtaattggagaatgggatttcggtggtcgtggggttcgtggggaaaggaggtttttgaggttcggaaataggaattttggatcgtaggacgggtcgtttggattaagatcgggtagtggtttttcgcgggttaagggcgcgtttgggaatcgttttgatttttgatttggggcgcgaggtttatttggggaggtaaggcggggttcgatcgtggtcgttttttttgtaaaattttttaagtgttattaattagtttagtaaatatt

SEQ ID NO: 11134 - DNA, 1263 bp, Artificial Sequence
  chemically treated genomic DNA (Homo sapiens) CpG-island No: 11134
aatatttactaaactaattaataacacttaaaaaattttacaaaaaaaacgaccacgatcgaaccccgccttacctccccaaataaacctcgcgccccaaatcaaaaatcaaaacgattcccaaacgcgcccttaacccgcgaaaaaccactacccgatcttaatccaaacgacccgtcctacgatccaaaattcctatttccgaacctcaaaaacctcctttccccacgaaccccacgaccaccgaaatcccattctccaattaccccatcgtcaccgcgaccgccgccaccgccgccgcaataacgtccgctctacgcatactccgaaacgtcaaaacgcgaaacgtacaaaaaacgaaacgtacgcaaacgcgaaaccatcgcgacccgaataaaacgatacatcgaacgcgcgtacttcctccgaaccacgcccacccccgtccgcccaaaaacgaacgcgcacgcgcgccgaaaacgaaaaaacgaactaacgcgcgcacgaaaccgaacaaacgacgaaaactaaaaaaaccgccgcgatactaaaaaaaaaaaaaaccgacgaacgcgcgcgcaacgaaaacgcgaataacgcgcgtatatataaaaaaaaaacgataaccgaaacgaacgaacgcgcgcgcgaaacttcccctcgtttaacgacgacgacgacttctttatttcgtaaaaaaaaacgaaacgcccattctacccccgaccccgcgcgaaaaaacgaaaaaaacgccgaaaaatcgacgacgccgacgactcctaataaaaaacgcgaaccgcgaaaacaacgcgacgcgaaaccgaaaaaaacgatttaaataaaaccgaaacgccgaaaaaaaaaaaaactaccgacgcgccctatacgaaaccgaaatacgacgacgcccgaaaatcaaaaaacccaaccgacaaccgcgcgcgtaaaaaaaaccacaatatcgcgaaaccgtaacaacgacgacccccgcgaaacgacgaaataaataaaaaacccgaaccgcgtaaaaaccgcgcgatcctctccgcgcgcgctctcgccgaaatcgccgaacaaaactcgcccccctcgcccgacacccctacaatcgccctcccaattacaacgactacaacaataaacaaacgttaaaacttttctaactacgtaataacgaatccgacccgaatattacgtttttaacgaaactacgatcgaaactcaaccaaacctccaaatatatccgacgtcgaccgaacacga

SEQ ID NO: 11135 - DNA, 1263 bp, Artificial Sequence
  chemically treated genomic DNA (Homo sapiens) CpG-island No: 11135
aatatttgttaagttaattaatggtatttgggaagttttgtagagaaggcggttacggtcgggtttcgttttgtttttttaaataggtttcgcgttttaggttagggattaaagcggtttttaggcgcgtttttggttcgcgggaaattattgttcggttttggtttaggcggttcgttttacggtttagggtttttattttcgagttttagggattttttttttttacggattttacggttatcgggattttattttttagttgttttatcgttatcgcggtcgtcgttatcgtcgtcgtagtggcgttcgttttgcgtatgtttcggggcgttaagacgcgaggcgtgtagaaggcgaagcgtgcgtaggcgcggggttatcgcggttcgagtggggcggtgtatcggacgcgcgtgtttttttcgggttacgtttattttcgttcgtttagggacgggcgcgtacgcgcgtcgggagcggaagggcgggttggcgcgcgtacgaggtcgggtaggcggcggaagttggagaggtcgtcgcggtgttgagggggaggggagtcggcgagcgcgcgcgtagcgggggcgcgggtggcgcgcgtgtgtgtgaagggggggcggtggtcgaggcgggcgggcgcgcgcgcgaggttttttttcgtttggcggcggcggcggtttttttgtttcgtgaagagaagcgagacgtttattttgttttcggtttcgcgcggaggggcgggggaggcgtcgggaagtcgacggcgtcggcggtttttggtaaggaacgcgggtcgcgggggtagcgcggcgcggggtcggggagggcggtttgaatggagtcggggcgtcgaggggggagggggttgtcggcgcgttttgtgcggggtcggggtacggcggcgttcgagggttaagaagtttagtcggtagtcgcgcgcgtggggaaggttatagtgtcgcgaggtcgtggtagcggcggttttcgcggagcggcggggtgggtggggggttcgggtcgcgtggaggtcgcgcgatttttttcgcgcgcgttttcgtcggggtcgtcggataaagttcgtttttttcgttcggtatttttatagtcgtttttttaattatagcggttgtaataataggtaggcgttggggtttttttggttgcgtggtaacgggttcgattcgaatgttgcgtttttggcgaagttgcgatcggggtttagttaaatttttagatatgttcggcgtcggtcggatacgg

SEQ ID NO: 11136 - DNA, 1263 bp, Artificial Sequence
  chemically treated genomic DNA (Homo sapiens) CpG-island No: 11136
ccgtatccgaccgacgccgaacatatctaaaaatttaactaaaccccgatcgcaacttcgccaaaaacgcaacattcgaatcgaacccgttaccacgcaaccaaaaaaaccccaacgcctacctattattacaaccgctataattaaaaaaacgactataaaaataccgaacgaaaaaaacgaactttatccgacgaccccgacgaaaacgcgcgcgaaaaaaatcgcgcgacctccacgcgacccgaaccccccacccaccccgccgctccgcgaaaaccgccgctaccacgacctcgcgacactataaccttccccacgcgcgcgactaccgactaaacttcttaaccctcgaacgccgccgtaccccgaccccgcacaaaacgcgccgacaaccccctcccccctcgacgccccgactccattcaaaccgccctccccgaccccgcgccgcgctacccccgcgacccgcgttccttaccaaaaaccgccgacgccgtcgacttcccgacgcctcccccgcccctccgcgcgaaaccgaaaacaaaataaacgtctcgcttctcttcacgaaacaaaaaaaccgccgccgccgccaaacgaaaaaaaacctcgcgcgcgcgcccgcccgcctcgaccaccgcccccccttcacacacacgcgcgccacccgcgcccccgctacgcgcgcgctcgccgactcccctccccctcaacaccgcgacgacctctccaacttccgccgcctacccgacctcgtacgcgcgccaacccgcccttccgctcccgacgcgcgtacgcgcccgtccctaaacgaacgaaaataaacgtaacccgaaaaaaacacgcgcgtccgatacaccgccccactcgaaccgcgataaccccgcgcctacgcacgcttcgccttctacacgcctcgcgtcttaacgccccgaaacatacgcaaaacgaacgccactacgacgacgataacgacgaccgcgataacgataaaacaactaaaaaataaaatcccgataaccgtaaaatccgtaaaaaaaaaaaatccctaaaactcgaaaataaaaaccctaaaccgtaaaacgaaccgcctaaaccaaaaccgaacaataatttcccgcgaaccaaaaacgcgcctaaaaaccgctttaatccctaacctaaaacgcgaaacctatttaaaaaaacaaaacgaaacccgaccgtaaccgccttctctacaaaacttcccaaataccattaattaacttaacaaatatt

SEQ ID NO: 11137 - DNA, 563 bp, Artificial Sequence
  chemically treated genomic DNA (Homo sapiens) CpG-island No: 11137
ggtcggtttttcgtttttcgtttttgttgtataggttaatatcgtatcgggatcgttcgataaagcgtttaattagtatgtcgtatatagcggatttattttttcggttgacgttagtttgacgcgcggtaagtagagtaacggtttgtacggcgattacgacgtcgagagcggtttgtaataattgttggacggtagcggattgtaggtaaaatcgttgggaaataatagttggacgttggagttcgcgttcgtattaaaagaagatgttttgatcgtggtcggcgattggttgggtgatgcgcgtgaaaacgacgtatttgaatatgttggcgcgcgtgacgtgattcgtcgtgaggatttcgttaaaatcggcgtaatattatgcgtgaggtatttaatcgtatttttggcgttagcgcgtcggaaaataacggtatcggtagttatagtttttatgtttgtaggttcggtaatgtgtcgttggcggtaaagcgtaattggatttttcggttgtttgtattttgatttattagttgtaatgagtggttaattagcgtgtt

SEQ ID NO: 11138 - DNA, 563 bp, Artificial Sequence
  chemically treated genomic DNA (Homo sapiens) CpG-island No: 11138
aacacgctaattaaccactcattacaactaataaatcaaaatacaaacaaccgaaaaatccaattacgctttaccgccaacgacacattaccgaacctacaaacataaaaactataactaccgataccgttattttccgacgcgctaacgccaaaaatacgattaaatacctcacgcataatattacgccgattttaacgaaatcctcacgacgaatcacgtcacgcgcgccaacatattcaaatacgtcgttttcacgcgcatcacccaaccaatcgccgaccacgatcaaaacatcttcttttaatacgaacgcgaactccaacgtccaactattatttcccaacgattttacctacaatccgctaccgtccaacaattattacaaaccgctctcgacgtcgtaatcgccgtacaaaccgttactctacttaccgcgcgtcaaactaacgtcaaccgaaaaaataaatccgctatatacgacatactaattaaacgctttatcgaacgatcccgatacgatattaacctatacaacaaaaacgaaaaacgaaaaaccgacc

SEQ ID NO: 11139 - DNA, 563 bp, Artificial Sequence
  chemically treated genomic DNA (Homo sapiens) CpG-island No: 11139
aatacgttgattaattatttattatagttggtaagttaggatgtaaatagtcgggagatttagttacgttttatcgttaacgatatattatcggatttgtaggtatgaaagttgtggttgtcggtgtcgttgtttttcggcgcgttgacgttagggatgcggttaagtattttacgtatggtgttgcgtcggttttggcgaaatttttacggcggattacgttacgcgcgttagtatgtttaaatacgtcgtttttacgcgtattatttagttagtcgtcgattacggttagggtatttttttttggtgcgggcgcgggttttagcgtttagttgttattttttagcggttttatttgtagttcgttgtcgtttagtagttgttgtaggtcgttttcgacgtcgtaatcgtcgtgtaggtcgttgttttgtttgtcgcgcgttaggttggcgttaatcgagagggtaaattcgttgtgtgcggtatattgattgagcgttttatcgagcgatttcggtgcgatattaatttgtgtagtaaaagcggaaaacgagagatcggtt

SEQ ID NO: 11140 - DNA, 563 bp, Artificial Sequence
  chemically treated genomic DNA (Homo sapiens) CpG-island No: 11140
aaccgatctctcgttttccgcttttactacacaaattaatatcgcaccgaaatcgctcgataaaacgctcaatcaatataccgcacacaacgaatttaccctctcgattaacgccaacctaacgcgcgacaaacaaaacaacgacctacacgacgattacgacgtcgaaaacgacctacaacaactactaaacgacaacgaactacaaataaaaccgctaaaaaataacaactaaacgctaaaacccgcgcccgcaccaaaaaaaaataccctaaccgtaatcgacgactaactaaataatacgcgtaaaaacgacgtatttaaacatactaacgcgcgtaacgtaatccgccgtaaaaatttcgccaaaaccgacgcaacaccatacgtaaaatacttaaccgcatccctaacgtcaacgcgccgaaaaacaacgacaccgacaaccacaactttcatacctacaaatccgataatatatcgttaacgataaaacgtaactaaatctcccgactatttacatcctaacttaccaactataataaataattaatcaacgtatt

SEQ ID NO: 11141 - DNA, 586 bp, Artificial Sequence
  chemically treated genomic DNA (Homo sapiens) CpG-island No: 11141
gttcgcgtgatttttgattaggtggattatttgtaatatatttgaagaattggcggcgtttattaagggattcggcgatgtttcggtacgtttgaacgcgttttatgtttacggcgtgtatggcgaggcgtaaagttgggcgagcgttacgtcggaagacgttgagtcgttggttgatgcgttaaaggtgcgcggggtgagtcggttgatattttcggcgttttatttgtgatatgtcggatacggtttacggttcggtatagatttgtaggtttgataagacgcgttaagcgtcgtattaggtattgtgttttaattgtcggatgcggcgcgaacgttttattcggtttacggttcggtataaatttgtaggtatgataagacgcgataagcgtcgtattatgtattatgcgtcgattgtcggatgcggcgtgaacgttttattcgatttacgattcggggtcgtttgtaggttcgataagacgcgttagcgtcgtatcgggtattcgttgtcgcgtaaacgttttattcgtttaggcgtatagggtcgttatatggaaaaattaacggttttgtttttttaata

SEQ ID NO: 11142 - DNA, 586 bp, Artificial Sequence
  chemically treated genomic DNA (Homo sapiens) CpG-island No: 11142
tattaaaaaaacaaaaccgttaatttttccatataacgaccctatacgcctaaacgaataaaacgtttacgcgacaacgaatacccgatacgacgctaacgcgtcttatcgaacctacaaacgaccccgaatcgtaaatcgaataaaacgttcacgccgcatccgacaatcgacgcataatacataatacgacgcttatcgcgtcttatcatacctacaaatttataccgaaccgtaaaccgaataaaacgttcgcgccgcatccgacaattaaaacacaatacctaatacgacgcttaacgcgtcttatcaaacctacaaatctataccgaaccgtaaaccgtatccgacatatcacaaataaaacgccgaaaatatcaaccgactcaccccgcgcacctttaacgcatcaaccaacgactcaacgtcttccgacgtaacgctcgcccaactttacgcctcgccatacacgccgtaaacataaaacgcgttcaaacgtaccgaaacatcgccgaatcccttaataaacgccgccaattcttcaaatatattacaaataatccacctaatcaaaaatcacgcgaac

SEQ ID NO: 11143 - DNA, 586 bp, Artificial Sequence
  chemically treated genomic DNA (Homo sapiens) CpG-island No: 11143
tgttgagaaagtagagtcgttaatttttttatataacggttttgtacgtttggacggataaagcgtttacgcgataacggatgttcgatgcgacgttggcgcgttttatcgggtttataaacggtttcgaatcgtaggtcggataaggcgtttacgtcgtattcggtagtcggcgtataatgtatgatgcgacgtttgtcgcgttttattatgtttataggtttgtgtcgaatcgtaggtcggataaggcgttcgcgtcgtattcggtagttggagtataatgtttgatgcgacgtttgacgcgttttattaggtttataagtttgtgtcgaatcgtaggtcgtattcggtatgttataaatagagcgtcggaaatattaatcggtttatttcgcgtatttttaacgtattagttaacggtttaacgtttttcggcgtggcgttcgtttagttttgcgtttcgttatatacgtcgtgggtatgaaacgcgtttaggcgtatcggaatatcgtcgagttttttgataaacgtcgttagttttttagatgtgttgtaaataatttatttggttagggattacgcgagt

SEQ ID NO: 11144 - DNA, 586 bp, Artificial Sequence
  chemically treated genomic DNA (Homo sapiens) CpG-island No: 11144
actcgcgtaatccctaaccaaataaattatttacaacacatctaaaaaactaacgacgtttatcaaaaaactcgacgatattccgatacgcctaaacgcgtttcatacccacgacgtatataacgaaacgcaaaactaaacgaacgccacgccgaaaaacgttaaaccgttaactaatacgttaaaaatacgcgaaataaaccgattaatatttccgacgctctatttataacataccgaatacgacctacgattcgacacaaacttataaacctaataaaacgcgtcaaacgtcgcatcaaacattatactccaactaccgaatacgacgcgaacgccttatccgacctacgattcgacacaaacctataaacataataaaacgcgacaaacgtcgcatcatacattatacgccgactaccgaatacgacgtaaacgccttatccgacctacgattcgaaaccgtttataaacccgataaaacgcgccaacgtcgcatcgaacatccgttatcgcgtaaacgctttatccgtccaaacgtacaaaaccgttatataaaaaaattaacgactctactttctcaaca

SEQ ID NO: 11145 - DNA, 1166 bp, Artificial Sequence
  chemically treated genomic DNA (Homo sapiens) CpG-island No: 11145
  unsure (54)
cggtttcgcgttgtttttgatttttttttttttacgggggttatagtcgttgancgttatttttttcgattgttagtttttttttttcgagcgcgtttagtgttgcgtcgttcgtttattagattattagtttcgttttttttcgacggttttgtatcgttttgggggttattcggcgtcgcggggtaattgttagttaatatcgcgttttatttcggtttgttgcgttagtatttaggttattaatttaattagtattcggggattttagagtagtttcggtcgcggtcggcgtaggtagtattttattcgttttcggtattcgtttatattaatcgagtagttattacggtttttgcggattgtttgtcgttagataacgatgcggatttaagcggagttttttcggtagcgttgttagagtgcggttatcggtgatttttatttagtttcgttacgtcgtcgcgtattagttatagtgattcgttgcggttgtaatcgtttttatcgggaaataggtgtttaaaatataggtttttgtcgtcgttattattgagtattagtgtgttatcgcgtattgttaagcggagtattcgtaggtagttttttagtcggggtcgaggttttttatcgggcgcgggcgtgttttgttcgggtaattgttggtaggtgcgggagaggatgaacggtagcgggtcgggtagggcgatgtcggttttatcgggaaggatttttgtatcgagtaggggattgatcggatggtcggacgttatttcgtcggggtatatcgaataggttacgcggtgggggtattaatattgattcgggattttttagagttattttcgttttgttcgttagtcggtaaggttaggaatagtaggtcgttgaaaatcgttattagaataaagtttattagcgtgatacgagtttcgtttagacggttagataatgtattatttgtataacgcgttagcgtattaataaacggttcgaagaaagcgtattgtagaatttgaatattcgggaattgcgtttttgatagtattgtaaagttcgcggagaagtcgatgaaggagtcgaaggttgttagatatagtaggtttataatttatagatgatttcgtttgagtatcggtaattgttttttgatggaggttttcgag

SEQ ID NO: 11146 - DNA, 1166 bp, Artificial Sequence
  chemically treated genomic DNA (Homo sapiens) CpG-island No: 11146
  unsure (1113)
ctcgaaaacctccatcaaaaaacaattaccgatactcaaacgaaatcatctataaattataaacctactatatctaacaaccttcgactccttcatcgacttctccgcgaactttacaatactatcaaaaacgcaattcccgaatattcaaattctacaatacgctttcttcgaaccgtttattaatacgctaacgcgttatacaaataatacattatctaaccgtctaaacgaaactcgtatcacgctaataaactttattctaataacgattttcaacgacctactattcctaaccttaccgactaacgaacaaaacgaaaataactctaaaaaatcccgaatcaatattaatacccccaccgcgtaacctattcgatataccccgacgaaataacgtccgaccatccgatcaatcccctactcgatacaaaaatccttcccgataaaaccgacatcgccctacccgacccgctaccgttcatcctctcccgcacctaccaacaattacccgaacaaaacacgcccgcgcccgataaaaaacctcgaccccgactaaaaaactacctacgaatactccgcttaacaatacgcgataacacactaatactcaataataacgacgacaaaaacctatattttaaacacctatttcccgataaaaacgattacaaccgcaacgaatcactataactaatacgcgacgacgtaacgaaactaaataaaaatcaccgataaccgcactctaacaacgctaccgaaaaaactccgcttaaatccgcatcgttatctaacgacaaacaatccgcaaaaaccgtaataactactcgattaatataaacgaataccgaaaacgaataaaatactacctacgccgaccgcgaccgaaactactctaaaatccccgaatactaattaaattaataacctaaatactaacgcaacaaaccgaaataaaacgcgatattaactaacaattaccccgcgacgccgaataacccccaaaacgatacaaaaccgtcgaaaaaaaacgaaactaataatctaataaacgaacgacgcaacactaaacgcgctcgaaaaaaaaaaactaacaatcgaaaaaaataacgntcaacgactataacccccgtaaaaaaaaaaaaatcaaaaacaacgcgaaaccg

SEQ ID NO: 11147 - DNA, 1166 bp, Artificial Sequence
  chemically treated genomic DNA (Homo sapiens) CpG-island No: 11147
  unsure (1113)
ttcgaaagtttttattaaggagtagttgtcggtatttaaacggggttatttgtggattatgagtttgttgtatttggtaattttcggtttttttatcggttttttcgcgggttttgtaatgttgttaaaaacgtagttttcggatgtttagattttgtaatacgtttttttcgggtcgtttattggtgcgttggcgcgttatgtaggtggtgtattatttgatcgtttgggcggaattcgtgttacgttggtgaattttattttgatggcgatttttagcggtttgttgtttttgattttatcgattgacgggtagggcggaagtgattttagaggatttcgggttagtattggtgtttttatcgcgtggtttgttcggtgtgtttcggcggagtgacgttcggttattcggttaattttttgttcggtgtaaaggtttttttcggtgaaatcgatatcgttttgttcggttcgttgtcgtttattttttttcgtatttattagtagttattcggataaaatacgttcgcgttcggtggggagtttcggtttcggttggaaaattgtttgcggatatttcgtttaatagtgcgcgataatatattgatatttagtgataacggcggtagaagtttgtattttgagtatttgtttttcggtgaggacggttatagtcgtagcgagttattgtggttggtgcgcggcggcgtggcgaaattggatgaaggttatcggtggtcgtattttggtagcgttgtcggaagaatttcgtttaagttcgtatcgttatttggcgataaatagttcgtaggggtcgtggtggttgttcggttggtgtgagcgggtgtcggaagcggatgaggtgttgtttgcgtcggtcgcgatcgggattgttttgagattttcgggtattggttggattgataatttgaatgttggcgtagtaggtcggagtagagcgcggtgttggttgatagttatttcgcgacgtcgggtagtttttaaggcgatatagagtcgtcggaggaaaacggagttggtgatttggtggacgagcgacgtaatattgggcgcgttcgaggaggagggattagtaatcgagaggaataacgnttaacggttgtggttttcgtagggggaggaaaattagagataacgcgaggtcg

SEQ ID NO: 11148 - DNA, 1166 bp, Artificial Sequence
  chemically treated genomic DNA (Homo sapiens) CpG-island No: 11148
  unsure (54)
cgacctcgcgttatctctaattttcctccccctacgaaaaccacaaccgttaancgttattcctctcgattactaatccctcctcctcgaacgcgcccaatattacgtcgctcgtccaccaaatcaccaactccgttttcctccgacgactctatatcgccttaaaaactacccgacgtcgcgaaataactatcaaccaacaccgcgctctactccgacctactacgccaacattcaaattatcaatccaaccaatacccgaaaatctcaaaacaatcccgatcgcgaccgacgcaaacaacacctcatccgcttccgacacccgctcacaccaaccgaacaaccaccacgacccctacgaactatttatcgccaaataacgatacgaacttaaacgaaattcttccgacaacgctaccaaaatacgaccaccgataaccttcatccaatttcgccacgccgccgcgcaccaaccacaataactcgctacgactataaccgtcctcaccgaaaaacaaatactcaaaatacaaacttctaccgccgttatcactaaatatcaatatattatcgcgcactattaaacgaaatatccgcaaacaattttccaaccgaaaccgaaactccccaccgaacgcgaacgtattttatccgaataactactaataaatacgaaaaaaaataaacgacaacgaaccgaacaaaacgatatcgatttcaccgaaaaaaacctttacaccgaacaaaaaattaaccgaataaccgaacgtcactccgccgaaacacaccgaacaaaccacgcgataaaaacaccaatactaacccgaaatcctctaaaatcacttccgccctacccgtcaatcgataaaatcaaaaacaacaaaccgctaaaaatcgccatcaaaataaaattcaccaacgtaacacgaattccgcccaaacgatcaaataatacaccacctacataacgcgccaacgcaccaataaacgacccgaaaaaaacgtattacaaaatctaaacatccgaaaactacgtttttaacaacattacaaaacccgcgaaaaaaccgataaaaaaaccgaaaattaccaaatacaacaaactcataatccacaaataaccccgtttaaataccgacaactactccttaataaaaactttcgaa

SEQ ID NO: 11149 - DNA, 861 bp, Artificial Sequence
  chemically treated genomic DNA (Homo sapiens) CpG-island No: 11149
cggcgtcgcgcgcgcgatcggttcgttaattttttgagtcgcgcgcgtttttcgttaagattcgttttttttcgcggttattggtcgagtttcgtatttttttttaagggggaacgtttttttttttcgatagattttgtagatagttaatggaacgtcgtagggtttcgcgtttcgtttttttgggggttcgttggaggcgagcgtgggcgggtcgttaggaaggtggggcgcggagtttggtaatcgttgtcggtaataacgtttcgtttcgtcgggcgggcgggttgcgcgaggttggttggcggcgggagtcggaggaggagcggtcgtcgtcgttatcgtcgtcgttatagagattgtagtcgtggagattgttatttattaacggggattaatacgtagtagtcgttgtcgtcgtcgcgggagtcgttgttcgaattttcggttcgaattttaggtgatcgatgcgatcgtttcgggtttagttcggtcggggagtgtggggggcggcggggatttcgttcggggggtcggggggcgggtagtacgttttcgtcgtttattttaaacgttcgggtggtgcgttcgcgggattcgttttcgttaattttcgtttttcgcgcgcggcggagtttggggggattttggcgacgtttttattttttttattgattgaacgcgggggaggtgcggtgtcgtcgttttattttttataaaattttttgaggttggggcgttcggggattttttttttacgtttatttttaaattcgttgagttgggggcgtttcgggaacgttttttaaattttttaaattttttgaattgggggcgtttggggattttttttttatttta

SEQ ID NO: 11150 - DNA, 861 bp, Artificial Sequence
  chemically treated genomic DNA (Homo sapiens) CpG-island No: 11150
taaaataaaaaaaaaatccccaaacgcccccaattcaaaaaatttaaaaaatttaaaaaacgttcccgaaacgcccccaactcaacgaatttaaaaataaacgtaaaaaaaaaatccccgaacgccccaacctcaaaaaattttataaaaaataaaacgacgacaccgcacctcccccgcgttcaatcaataaaaaaaataaaaacgtcgccaaaatccccccaaactccgccgcgcgcgaaaaacgaaaattaacgaaaacgaatcccgcgaacgcaccacccgaacgtttaaaataaacgacgaaaacgtactacccgccccccgaccccccgaacgaaatccccgccgccccccacactccccgaccgaactaaacccgaaacgatcgcatcgatcacctaaaattcgaaccgaaaattcgaacaacgactcccgcgacgacgacaacgactactacgtattaatccccgttaataaataacaatctccacgactacaatctctataacgacgacgataacgacgacgaccgctcctcctccgactcccgccgccaaccaacctcgcgcaacccgcccgcccgacgaaacgaaacgttattaccgacaacgattaccaaactccgcgccccaccttcctaacgacccgcccacgctcgcctccaacgaacccccaaaaaaacgaaacgcgaaaccctacgacgttccattaactatctacaaaatctatcgaaaaaaaaaaacgttcccccttaaaaaaaaatacgaaactcgaccaataaccgcgaaaaaaaacgaatcttaacgaaaaacgcgcgcgactcaaaaaattaacgaaccgatcgcgcgcgcgacgccg

SEQ ID NO: 11151 - DNA, 861 bp, Artificial Sequence
  chemically treated genomic DNA (Homo sapiens) CpG-island No: 11151
taaggtgagaagagggtttttaagcgtttttaatttagggagtttgaggagtttgagagacgttttcggggcgtttttaatttagcgagtttgaaggtaagcgtgagaaaggggttttcggacgttttaattttaggaagttttgtaaaaagtgaggcgacggtatcgtatttttttcgcgtttagttaataaggaaagtggggacgtcgttagggtttttttaaatttcgtcgcgcgcgggaaacgggggttggcggaggcgggtttcgcgggcgtattattcggacgtttggggtgagcggcggggacgtgttgttcgtttttcggtttttcgaacggggttttcgtcgttttttatatttttcggtcgggttgggttcggggcggtcgtatcggttatttggagttcgggtcgggagttcgggtagcggttttcgcggcggcggtagcggttgttgcgtgttggttttcgttggtaagtaatagtttttacggttatagtttttatggcggcggcggtggcggcggcggtcgtttttttttcggttttcgtcgttagttagtttcgcgtagttcgttcgttcgacggggcggggcgttgttatcggtaacggttattaggtttcgcgttttatttttttaacggttcgtttacgttcgtttttaacgggtttttaagagggcggggcgcgagattttacggcgttttattggttgtttgtagagtttgtcggaaggaggaggcgtttttttttgaaaaagagtgcgagattcggttaatggtcgcgaagaggggcgggttttggcgggaggcgcgcgcggtttagagggttggcgaatcggtcgcgcgcgcggcgtcg

SEQ ID NO: 11152 - DNA, 861 bp, Artificial Sequence
  chemically treated genomic DNA (Homo sapiens) CpG-island No: 11152
cgacgccgcgcgcgcgaccgattcgccaaccctctaaaccgcgcgcgcctcccgccaaaacccgcccctcttcgcgaccattaaccgaatctcgcactctttttcaaaaaaaaacgcctcctccttccgacaaactctacaaacaaccaataaaacgccgtaaaatctcgcgccccgccctcttaaaaacccgttaaaaacgaacgtaaacgaaccgttaaaaaaataaaacgcgaaacctaataaccgttaccgataacaacgccccgccccgtcgaacgaacgaactacgcgaaactaactaacgacgaaaaccgaaaaaaaaacgaccgccgccgccaccgccgccgccataaaaactataaccgtaaaaactattacttaccaacgaaaaccaacacgcaacaaccgctaccgccgccgcgaaaaccgctacccgaactcccgacccgaactccaaataaccgatacgaccgccccgaacccaacccgaccgaaaaatataaaaaacgacgaaaaccccgttcgaaaaaccgaaaaacgaacaacacgtccccgccgctcaccccaaacgtccgaataatacgcccgcgaaacccgcctccgccaacccccgtttcccgcgcgcgacgaaatttaaaaaaaccctaacgacgtccccactttccttattaactaaacgcgaaaaaaatacgataccgtcgcctcactttttacaaaacttcctaaaattaaaacgtccgaaaacccctttctcacgcttaccttcaaactcgctaaattaaaaacgccccgaaaacgtctctcaaactcctcaaactccctaaattaaaaacgcttaaaaaccctcttctcacctta

SEQ ID NO: 11153 - DNA, 521 bp, Artificial Sequence
  chemically treated genomic DNA (Homo sapiens) CpG-island No: 11153
  unsure (477)
cggaggggcggtcgttcggggggatacgcgtgtatagtcggatacgtcggtcgggttcgatatttcgcgtatattcgatggttatacgggtagggcgtcgtatacgtcggtatcgggtatatatagggtcgcgcgggcgtacgtcgggttcgtcgtagcgttacggatatatatttcgaggggttttgcgttttagcgtttagtaggcgttttttgtacgttagattttatagtttttattacgagattttcgtagttttcgtcgttagcgcgaacgtaggtttagggttaattataaaagggattttgtagggcggatttcgttttaggtcgcgggcgtaggattatgtcggggggagagcgggatgtaatttaattttggtttacgttttcggggagttttttgggtttatatacgataggtacgatcgtacgttgttagtatttatttacgtttaggaaatttagattgtgtanaggtaaggggttcggttaggggtttagttatatgttataagcgt

SEQ ID NO: 11154 - DNA, 521 bp, Artificial Sequence
  chemically treated genomic DNA (Homo sapiens) CpG-island No: 11154
  unsure (45)
acgcttataacatataactaaacccctaaccgaaccccttacctntacacaatctaaatttcctaaacgtaaataaatactaacaacgtacgatcgtacctatcgtatataaacccaaaaaactccccgaaaacgtaaaccaaaattaaattacatcccgctctccccccgacataatcctacgcccgcgacctaaaacgaaatccgccctacaaaatcccttttataattaaccctaaacctacgttcgcgctaacgacgaaaactacgaaaatctcgtaataaaaactataaaatctaacgtacaaaaaacgcctactaaacgctaaaacgcaaaacccctcgaaatatatatccgtaacgctacgacgaacccgacgtacgcccgcgcgaccctatatatacccgataccgacgtatacgacgccctacccgtataaccatcgaatatacgcgaaatatcgaacccgaccgacgtatccgactatacacgcgtatccccccgaacgaccgcccctccg

SEQ ID NO: 11155 - DNA, 521 bp, Artificial Sequence
  chemically treated genomic DNA (Homo sapiens) CpG-island No: 11155
  unsure (45)
gcgtttatggtatatgattgggtttttggtcgggttttttatttntgtatagtttggattttttggacgtggatgggtattggtaacgtacggtcgtgtttgtcgtgtatgaatttagggagtttttcgaaggcgtgaattagggttgaattgtatttcgtttttttttcggtatagttttgcgttcgcgatttggagcggagttcgttttgtagggttttttttgtgattgattttgagtttgcgttcgcgttgacgacggggattgcggggatttcgtggtgggaattgtggggtttgacgtataagaggcgtttgttgggcgttaggacgtaggatttttcggagtgtgtgttcgtggcgttgcggcgggttcggcgtgcgttcgcgcggttttatgtgtgttcggtgtcggcgtgtgcggcgttttgttcgtgtggttatcgggtgtgcgcggggtgtcgagttcggtcggcgtgttcggttgtgtacgcgtgttttttcgagcggtcgttttttcg

SEQ ID NO: 11156 - DNA, 521 bp, Artificial Sequence
  chemically treated genomic DNA (Homo sapiens) CpG-island No: 11156
  unsure (477)
cgaaaaaacgaccgctcgaaaaaacacgcgtacacaaccgaacacgccgaccgaactcgacaccccgcgcacacccgataaccacacgaacaaaacgccgcacacgccgacaccgaacacacataaaaccgcgcgaacgcacgccgaacccgccgcaacgccacgaacacacactccgaaaaatcctacgtcctaacgcccaacaaacgcctcttatacgtcaaaccccacaattcccaccacgaaatccccgcaatccccgtcgtcaacgcgaacgcaaactcaaaatcaatcacaaaaaaaaccctacaaaacgaactccgctccaaatcgcgaacgcaaaactataccgaaaaaaaaacgaaatacaattcaaccctaattcacgccttcgaaaaactccctaaattcatacacgacaaacacgaccgtacgttaccaatacccatccacgtccaaaaaatccaaactatacanaaataaaaaacccgaccaaaaacccaatcatataccataaacgc

SEQ ID NO: 11157 - DNA, 801 bp, Artificial Sequence
  chemically treated genomic DNA (Homo sapiens) CpG-island No: 11157
gacgggcgcggggtttttttcgtggggttcggtttttcgaggttcgcgtttcgtattcgttcgtcgtcgtcgttcgcggttcggggtttttgagggggcggggtcgttcgcgcggtttgggtcgttttgaggggagtttcgcgcgtttcgattcgtcgtcgtttcgcgtcggttcggttcgagatttatcgtttcggttttcgtcgttatcgtcgtcgttcgggtttttttaggttatcgtcgtcgtcgtcgttttttttcgggttcgtaagttttttttttttttttcgtatcgattatcgtcgtcgtcgtcgtcgtcgtcgtcgcgttgcgttatcgcgtcgtgcgttatcgtttttggtttcgtttcgacgggggtcgtcgcgcgtcggtattagtttacgttcgggtgacgaacggcgcgttagttaacgggcggcgagggtagttcgaagggcgggaggtgtgagtcgagtaaggcggggtcgcggcgaggggggagcgacggtggtggaacggggtttaagaggttcgtttttttttcggcgggattggtcggacgtgggggtgacgggtagtcggttaggtttggggtttggggttggggggcggggaaggggcggggcgcgcggggcgttgtttagggtaacgggttcggcggagtttgaggttgggtttttaggttcgtagggggtaggttcgcgcgcgtttattttagttgtttcgagcgaagttatagtttttgatttaggcgttttaggttttttttttttcgttttttgggtggttcgttttatttaa

SEQ ID NO: 11158 - DNA, 801 bp, Artificial Sequence
  chemically treated genomic DNA (Homo sapiens) CpG-island No: 11158
ttaaataaaacgaaccacccaaaaaacgaaaaaaaaaaaacctaaaacgcctaaatcaaaaactataacttcgctcgaaacaactaaaataaacgcgcgcgaacctaccccctacgaacctaaaaacccaacctcaaactccgccgaacccgttaccctaaacaacgccccgcgcgccccgccccttccccgccccccaaccccaaaccccaaacctaaccgactacccgtcacccccacgtccgaccaatcccgccgaaaaaaaaacgaacctcttaaaccccgttccaccaccgtcgctcccccctcgccgcgaccccgccttactcgactcacacctcccgcccttcgaactaccctcgccgcccgttaactaacgcgccgttcgtcacccgaacgtaaactaataccgacgcgcgacgacccccgtcgaaacgaaaccaaaaacgataacgcacgacgcgataacgcaacgcgacgacgacgacgacgacgacgacgataatcgatacgaaaaaaaaaaaaaaaacttacgaacccgaaaaaaaacgacgacgacgacgataacctaaaaaaacccgaacgacgacgataacgacgaaaaccgaaacgataaatctcgaaccgaaccgacgcgaaacgacgacgaatcgaaacgcgcgaaactcccctcaaaacgacccaaaccgcgcgaacgaccccgccccctcaaaaaccccgaaccgcgaacgacgacgacgaacgaatacgaaacgcgaacctcgaaaaaccgaaccccacgaaaaaaaccccgcgcccgtc

SEQ ID NO: 11159 - DNA, 801 bp, Artificial Sequence
  chemically treated genomic DNA (Homo sapiens) CpG-island No: 11159
ttgggtgaggcgggttatttaaggggcggggaagaggaggtttggaacgtttgaattaggaattgtgatttcgttcggggtagttggggtggacgcgcgcgagtttgttttttgcgggtttggaggtttaattttagatttcgtcgggttcgttgttttgggtaacgtttcgcgcgtttcgtttttttttcgttttttagttttaaattttaggtttggtcgattgttcgttatttttacgttcgattaatttcgtcgaggagggggcgggttttttgggtttcgttttattatcgtcgtttttttttcgtcgcgatttcgttttattcggtttatatttttcgtttttcgggttgttttcgtcgttcgttggttggcgcgtcgttcgttattcgggcgtgagttaatgtcggcgcgcggcggttttcgtcggggcggggttaggggcggtgacgtacggcgcggtgacgtagcgcgacggcggcggcggcggcggcggcggtggtcggtgcgggaggagggaggggagtttgcgggttcgagagggggcgacggcggcggcggtggtttgaggaggttcgagcggcggcggtggcggcgaaggtcgaggcggtgagtttcgggtcgggtcggcgcggggcggcggcgagtcggggcgcgcggggttttttttagggcgatttaggtcgcgcgggcggtttcgtttttttagggatttcgaatcgcgggcggcggcggcgggcgggtgcggaacgcgggtttcggggggtcgggttttacgggagaagtttcgcgttcgtt

SEQ ID NO: 11160 - DNA, 801 bp, Artificial Sequence
  chemically treated genomic DNA (Homo sapiens) CpG-island No: 11160
aacgaacgcgaaacttctcccgtaaaacccgaccccccgaaacccgcgttccgcacccgcccgccgccgccgcccgcgattcgaaatccctaaaaaaacgaaaccgcccgcgcgacctaaatcgccctaaaaaaaaccccgcgcgccccgactcgccgccgccccgcgccgacccgacccgaaactcaccgcctcgaccttcgccgccaccgccgccgctcgaacctcctcaaaccaccgccgccgccgtcgccccctctcgaacccgcaaactcccctccctcctcccgcaccgaccaccgccgccgccgccgccgccgccgtcgcgctacgtcaccgcgccgtacgtcaccgcccctaaccccgccccgacgaaaaccgccgcgcgccgacattaactcacgcccgaataacgaacgacgcgccaaccaacgaacgacgaaaacaacccgaaaaacgaaaaatataaaccgaataaaacgaaatcgcgacgaaaaaaaaacgacgataataaaacgaaacccaaaaaacccgccccctcctcgacgaaattaatcgaacgtaaaaataacgaacaatcgaccaaacctaaaatttaaaactaaaaaacgaaaaaaaaacgaaacgcgcgaaacgttacccaaaacaacgaacccgacgaaatctaaaattaaacctccaaacccgcaaaaaacaaactcgcgcgcgtccaccccaactaccccgaacgaaatcacaattcctaattcaaacgttccaaacctcctcttccccgccccttaaataacccgcctcacccaa

SEQ ID NO: 11161 - DNA, 567 bp, Artificial Sequence
  chemically treated genomic DNA (Homo sapiens) CpG-island No: 11161
ggattttaggatatttagaggattcgatttcggtttggatgggttttttcgttaagtaggatagattggtaaagcgttggggttcgtcgtgggtttgaggatgtagagaagttggcgggggagaggggcggcggggcgcggtcgttatttacgtaggtcgttatattttttttcgcggtcgttagtagttttaggatcgggtcggcgtcggggagtagtttcgagcggtgtaggtcgttgagtattgtttgggcgttcgcgatgtttcgggttacgtggcggagtcgagcgtaggattgcggggacgagagggcgttagagcgggtcgcgttcgggttatgtttttttcgtttattttcgggttttatcgatggtcgcggaggattttttttggggcggaaggagtagttgcgttgtttttagtttagcgttttttttttttgcgggataagcggcgtttatcgtatacggttaggttttttcgttagggtttttaatttttgtatagtttgggatttttggacgtggatgggtattggtagcgtacggtcgtgtttgtcgtgtatt

SEQ ID NO: 11162 - DNA, 567 bp, Artificial Sequence
  chemically treated genomic DNA (Homo sapiens) CpG-island No: 11162
aatacacgacaaacacgaccgtacgctaccaatacccatccacgtccaaaaatcccaaactatacaaaaattaaaaaccctaacgaaaaaacctaaccgtatacgataaacgccgcttatcccgcaaaaaaaaaaaacgctaaactaaaaacaacgcaactactccttccgccccaaaaaaaatcctccgcgaccatcgataaaacccgaaaataaacgaaaaaaacataacccgaacgcgacccgctctaacgccctctcgtccccgcaatcctacgctcgactccgccacgtaacccgaaacatcgcgaacgcccaaacaatactcaacgacctacaccgctcgaaactactccccgacgccgacccgatcctaaaactactaacgaccgcgaaaaaaaatataacgacctacgtaaataacgaccgcgccccgccgcccctctcccccgccaacttctctacatcctcaaacccacgacgaaccccaacgctttaccaatctatcctacttaacgaaaaaacccatccaaaccgaaatcgaatcctctaaatatcctaaaatcc

SEQ ID NO: 11163 - DNA, 567 bp, Artificial Sequence
  chemically treated genomic DNA (Homo sapiens) CpG-island No: 11163
agtatacgataggtacgatcgtgcgttgttagtatttatttacgtttaggaattttagattgtgtagaggttaggggttttggcgagggggtttagtcgtatgcgataagcgtcgtttgtttcgtaggaggaagaggcgttgagttgggggtagcgtaattgtttttttcgttttaggagggatttttcgcggttatcggtgaggttcgggagtgggcgggagaggtatggttcgggcgcggttcgttttaacgttttttcgttttcgtagttttgcgttcggtttcgttacgtggttcggggtatcgcggacgtttaggtagtgtttagcggtttgtatcgttcggagttgtttttcggcgtcggttcgattttggagttgttggcggtcgcggggagggatgtggcggtttgcgtgagtgacggtcgcgtttcgtcgtttttttttttcgttagtttttttgtatttttaggtttacggcgagttttagcgttttgttaatttgttttgtttagcggaaaaatttatttagatcggagtcgggttttttgggtgttttgaaattt

SEQ ID NO: 11164 - DNA, 567 bp, Artificial Sequence
  chemically treated genomic DNA (Homo sapiens) CpG-island No: 11164
aaatttcaaaacacccaaaaaacccgactccgatctaaataaatttttccgctaaacaaaacaaattaacaaaacgctaaaactcgccgtaaacctaaaaatacaaaaaaactaacgaaaaaaaaaaacgacgaaacgcgaccgtcactcacgcaaaccgccacatccctccccgcgaccgccaacaactccaaaatcgaaccgacgccgaaaaacaactccgaacgatacaaaccgctaaacactacctaaacgtccgcgataccccgaaccacgtaacgaaaccgaacgcaaaactacgaaaacgaaaaaacgttaaaacgaaccgcgcccgaaccatacctctcccgcccactcccgaacctcaccgataaccgcgaaaaatccctcctaaaacgaaaaaaacaattacgctacccccaactcaacgcctcttcctcctacgaaacaaacgacgcttatcgcatacgactaaaccccctcgccaaaacccctaacctctacacaatctaaaattcctaaacgtaaataaatactaacaacgcacgatcgtacctatcgtatact

SEQ ID NO: 11165 - DNA, 518 bp, Artificial Sequence
  chemically treated genomic DNA (Homo sapiens) CpG-island No: 11165
cgcggtggtcgcgggattgtgggtcgtgtgtacggtgggcgcggcgattcgttagcgttgtttgttttcgtattatcgttcgttggagtttcggacgttggcggcggttaaggcgttgaggaatcgttaagtgagtgatcgtttagtttttgcgtttttcggtatattggtttcgtcgggtttttatatattcgtcgttgattcgaggggttttgcgttttagcgtttagtaggcgttttttgtacgttagagtttatagtttttattacgagattttcgtagttttcgtcgttagcgcgaacgtaggtttagggttagttataaaaggagttttgtagggcggattcggttttaggtcgcgggcgtagggttatgtcgggggagagcgggatgtaatttaattttggtttacgttttcggggagttttttggtttagtatacgataggtacgatcgtacgttgttagtatttatttacgtttaggaattttagattgtgtagaggttaggggttttg

SEQ ID NO: 11166 - DNA, 518 bp, Artificial Sequence
  chemically treated genomic DNA (Homo sapiens) CpG-island No: 11166
caaaacccctaacctctacacaatctaaaattcctaaacgtaaataaatactaacaacgtacgatcgtacctatcgtatactaaaccaaaaaactccccgaaaacgtaaaccaaaattaaattacatcccgctctcccccgacataaccctacgcccgcgacctaaaaccgaatccgccctacaaaactccttttataactaaccctaaacctacgttcgcgctaacgacgaaaactacgaaaatctcgtaataaaaactataaactctaacgtacaaaaaacgcctactaaacgctaaaacgcaaaacccctcgaatcaacgacgaatatataaaaacccgacgaaaccaatataccgaaaaacgcaaaaactaaacgatcactcacttaacgattcctcaacgccttaaccgccgccaacgtccgaaactccaacgaacgataatacgaaaacaaacaacgctaacgaatcgccgcgcccaccgtacacacgacccacaatcccgcgaccaccgcg

SEQ ID NO: 11167 - DNA, 518 bp, Artificial Sequence
  chemically treated genomic DNA (Homo sapiens) CpG-island No: 11167
tagggtttttaatttttgtatagtttgggatttttggacgtggatgggtattggtagcgtacggtcgtgtttgtcgtgtattgaattagggagtttttcgaaggcgtgaattagggttgaattgtatttcgttttttttcggtatagttttgcgttcgcgatttggagtcgagttcgttttgtagggttttttttgtgattgattttgagtttgcgttcgcgttgacgacggggattgcggggatttcgtggtgggaattgtgggttttgacgtataagaggcgtttgttgggcgttaggacgtaggatttttcgggttagcgacgggtgtgtgggaattcggcggggttagtgtatcggggggcgtaagggttgggcggttatttatttagcggttttttagcgttttgatcgtcgttagcgttcggggttttagcgagcggtagtgcgagagtaggtagcgttggcggatcgtcgcgtttatcgtgtatacgatttatagtttcgcggttatcgcg

SEQ ID NO: 11168 - DNA, 518 bp, Artificial Sequence
  chemically treated genomic DNA (Homo sapiens) CpG-island No: 11168
cgcgataaccgcgaaactataaatcgtatacacgataaacgcgacgatccgccaacgctacctactctcgcactaccgctcgctaaaaccccgaacgctaacgacgatcaaaacgctaaaaaaccgctaaataaataaccgcccaacccttacgccccccgatacactaaccccgccgaattcccacacacccgtcgctaacccgaaaaatcctacgtcctaacgcccaacaaacgcctcttatacgtcaaaacccacaattcccaccacgaaatccccgcaatccccgtcgtcaacgcgaacgcaaactcaaaatcaatcacaaaaaaaaccctacaaaacgaactcgactccaaatcgcgaacgcaaaactataccgaaaaaaaacgaaatacaattcaaccctaattcacgccttcgaaaaactccctaattcaatacacgacaaacacgaccgtacgctaccaatacccatccacgtccaaaaatcccaaactatacaaaaattaaaaacccta

SEQ ID NO: 11169 - DNA, 843 bp, Artificial Sequence
  chemically treated genomic DNA (Homo sapiens) CpG-island No: 11169
gtgcggcgtggatcggtggcgttttgttcgtcgggcgcggcgcgggtaattgtggttttggaatagtgtttcgtagttttcgtcgaacgaatagcgttgttgcggtttcggtcgggtcgcggtttttttaggaattagagttagagtagggggcgtcgaggttggtggttttagggcgtcggatcggttttttcgagggtttatcgcggttcgagattttttttcggaagttttttcggatggtagtaggtatagcgaggtggtcgagtcgtttagagaacgtttaaggattattttcggtttcgcggatgtcgtttcggtttttatggttttggtttcgacggcgacggcgggggtagtttgggattttatttcgcgtagcgtttcgtagtggttttgggtcggtagggtcggggtttgtgtcgcgtttgtgtttgcgtcgttggtttgcgagtatacgtggttgattcgcgggagcgatttggagtttttgacgcggcggttgttttcgtcgttatatattttatagcggattatgagtagaacgatgaagacgaggatcgaggcgacgatgacgttttcgatggcgatgattatggtgtcgtttaagaaatgggtttttagcgggcggtagggcgtcggatttttagcggtggtgaattgtatatagtttattattcgcgttgtcggtagcgttgtggtttcgtcgtcgtagatcgttagtacgtataagtcgtaggtacggttcgtcgttaggttatttattaggaaggtttgattggtggacgggattattttgtaggagggggcgggtttagggcggggttagttttttcgaattat

SEQ ID NO: 11170 - DNA, 843 bp, Artificial Sequence
  chemically treated genomic DNA (Homo sapiens) CpG-island No: 11170
ataattcgaaaaaactaaccccgccctaaacccgccccctcctacaaaataatcccgtccaccaatcaaaccttcctaataaataacctaacgacgaaccgtacctacgacttatacgtactaacgatctacgacgacgaaaccacaacgctaccgacaacgcgaataataaactatatacaattcaccaccgctaaaaatccgacgccctaccgcccgctaaaaacccatttcttaaacgacaccataatcatcgccatcgaaaacgtcatcgtcgcctcgatcctcgtcttcatcgttctactcataatccgctataaaatatataacgacgaaaacaaccgccgcgtcaaaaactccaaatcgctcccgcgaatcaaccacgtatactcgcaaaccaacgacgcaaacacaaacgcgacacaaaccccgaccctaccgacccaaaaccactacgaaacgctacgcgaaataaaatcccaaactacccccgccgtcgccgtcgaaaccaaaaccataaaaaccgaaacgacatccgcgaaaccgaaaataatccttaaacgttctctaaacgactcgaccacctcgctatacctactaccatccgaaaaaacttccgaaaaaaaatctcgaaccgcgataaaccctcgaaaaaaccgatccgacgccctaaaaccaccaacctcgacgccccctactctaactctaattcctaaaaaaaccgcgacccgaccgaaaccgcaacaacgctattcgttcgacgaaaactacgaaacactattccaaaaccacaattacccgcgccgcgcccgacgaacaaaacgccaccgatccacgccgcac

SEQ ID NO: 11171 - DNA, 843 bp, Artificial Sequence
  chemically treated genomic DNA (Homo sapiens) CpG-island No: 11171
gtggttcggggggattaatttcgttttgaattcgtttttttttataggatgatttcgtttattagttagatttttttggtgaatgatttggcggcgggtcgtgtttacgatttgtgcgtgttggcggtttacgacgacggggttatagcgttgtcggtaacgcgagtggtgggttgtgtatagtttattatcgttggggattcggcgttttgtcgttcgttgagggtttattttttgggcggtattatgattatcgttatcgggggcgttatcgtcgtttcggttttcgtttttatcgttttgtttatgattcgttataaggtgtatggcgacggggatagtcgtcgcgttaagggttttaggtcgttttcgcgggttagttacgtgtgttcgtagattaacggcgtaggtataggcgcggtataggtttcggttttgtcggtttaggattattacgaggcgttgcgcgaggtggagttttaggttgttttcgtcgtcgtcgtcgaggttaaggttatggaggtcgagacggtattcgcggagtcggaggtggtttttggacgttttttgggcggttcggttatttcgttgtgtttgttgttattcgaggaaattttcggggaggagtttcgggtcgcggtgggttttcgaaggagtcgattcggcgttttggagttattaatttcggcgttttttattttagttttagtttttgggggagtcgcggttcggtcgaggtcgtagtagcgttattcgttcgacggggattacggggtattattttagagttatagttattcgcgtcgcgttcggcggataaagcgttatcggtttacgtcgtat

SEQ ID NO: 11172 - DNA, 843 bp, Artificial Sequence
  chemically treated genomic DNA (Homo sapiens) CpG-island No: 11172
atacgacgtaaaccgataacgctttatccgccgaacgcgacgcgaataactataactctaaaataataccccgtaatccccgtcgaacgaataacgctactacgacctcgaccgaaccgcgactcccccaaaaactaaaactaaaataaaaaacgccgaaattaataactccaaaacgccgaatcgactccttcgaaaacccaccgcgacccgaaactcctccccgaaaatttcctcgaataacaacaaacacaacgaaataaccgaaccgcccaaaaaacgtccaaaaaccacctccgactccgcgaataccgtctcgacctccataaccttaacctcgacgacgacgacgaaaacaacctaaaactccacctcgcgcaacgcctcgtaataatcctaaaccgacaaaaccgaaacctataccgcgcctatacctacgccgttaatctacgaacacacgtaactaacccgcgaaaacgacctaaaacccttaacgcgacgactatccccgtcgccatacaccttataacgaatcataaacaaaacgataaaaacgaaaaccgaaacgacgataacgcccccgataacgataatcataataccgcccaaaaaataaaccctcaacgaacgacaaaacgccgaatccccaacgataataaactatacacaacccaccactcgcgttaccgacaacgctataaccccgtcgtcgtaaaccgccaacacgcacaaatcgtaaacacgacccgccgccaaatcattcaccaaaaaaatctaactaataaacgaaatcatcctataaaaaaaaacgaattcaaaacgaaattaatccccccgaaccac

SEQ ID NO: 11173 - DNA, 640 bp, Artificial Sequence
  chemically treated genomic DNA (Homo sapiens) CpG-island No: 11173
ggaggggcggtcgttcggggggatacgcgtgtatagtcggatacgtcggtcgggttcgatatttcgcgtatattcgatggttatacgggtagggcgtcgtatacgtcggtatcgggtatatatagggtcgcgcgggcgtacgtcgggttcgtcgtagcgttacggatatatattcgtacgttcgtacgtttatattcgcgtatatattcgcgttttcgttcgtcgttttcgggtcgttgtaggtcgcgtttatttagttcgggggggtttcgggttcggtttcgtcgtcgttgtttcgtttcgcgttatggtggggggagggtcgggggagggggcgcggtgcgcgggtcgtttttttttcgttttcgggcgtttttttcgagatgttttttagtggtatttttgggcggagataggggttagcgtcgttttttcgtcgtttcgtcggtggaatggtggcgggcggtcgggcggggcggtcgtatattcgggattttcgtttcgaattcgtcgtagatttttttttattgtcgagtcgtcgcgggttcgttttcgatttttttttagttttatttttagtttcgtcggttttttcggagatttttttagattacgttttaattggtttagggatttcgga

SEQ ID NO: 11174 - DNA, 640 bp, Artificial Sequence
  chemically treated genomic DNA (Homo sapiens) CpG-island No: 11174
tccgaaatccctaaaccaattaaaacgtaatctaaaaaaatctccgaaaaaaccgacgaaactaaaaataaaactaaaaaaaaatcgaaaacgaacccgcgacgactcgacaataaaaaaaaatctacgacgaattcgaaacgaaaatcccgaatatacgaccgccccgcccgaccgcccgccaccattccaccgacgaaacgacgaaaaaacgacgctaacccctatctccgcccaaaaataccactaaaaaacatctcgaaaaaaacgcccgaaaacgaaaaaaaaacgacccgcgcaccgcgccccctcccccgaccctccccccaccataacgcgaaacgaaacaacgacgacgaaaccgaacccgaaacccccccgaactaaataaacgcgacctacaacgacccgaaaacgacgaacgaaaacgcgaatatatacgcgaatataaacgtacgaacgtacgaatatatatccgtaacgctacgacgaacccgacgtacgcccgcgcgaccctatatatacccgataccgacgtatacgacgccctacccgtataaccatcgaatatacgcgaaatatcgaacccgaccgacgtatccgactatacacgcgtatccccccgaacgaccgcccctcc

SEQ ID NO: 11175 - DNA, 640 bp, Artificial Sequence
  chemically treated genomic DNA (Homo sapiens) CpG-island No: 11175
ttcggggtttttaggttagttggggcgtggtttgggggggttttcggggaggtcggcggggttgggggtggggttggggaagggtcgggggcgggttcgcggcggttcggtagtggagaggggtttgcggcgggttcggggcggggatttcgggtgtgcgatcgtttcgttcggtcgttcgttattattttatcggcggggcggcgggggggcggcgttggtttttgttttcgtttaaggatgttattggggggtatttcgggagggacgttcggaggcgggagggaggcggttcgcgtatcgcgttttttttttcggttttttttttattatggcgcggagcgaggtagcggcggcggggtcgggttcggggttttttcgggttgggtgagcgcggtttgtagcggttcgggagcggcgggcgggggcgcgggtgtgtgcgcgggtgtgagcgtgcgagcgtgcgagtgtgtgttcgtggcgttgcggcgggttcggcgtgcgttcgcgcggttttatgtgtgttcggtgtcggcgtgtgcggcgttttgttcgtgtggttatcgggtgtgcgcggggtgtcgagttcggtcggcgtgttcggttgtgtacgcgtgttttttcgagcggtcgttttttt

SEQ ID NO: 11176 - DNA, 640 bp, Artificial Sequence
  chemically treated genomic DNA (Homo sapiens) CpG-island No: 11176
aaaaaaacgaccgctcgaaaaaacacgcgtacacaaccgaacacgccgaccgaactcgacaccccgcgcacacccgataaccacacgaacaaaacgccgcacacgccgacaccgaacacacataaaaccgcgcgaacgcacgccgaacccgccgcaacgccacgaacacacactcgcacgctcgcacgctcacacccgcgcacacacccgcgcccccgcccgccgctcccgaaccgctacaaaccgcgctcacccaacccgaaaaaaccccgaacccgaccccgccgccgctacctcgctccgcgccataataaaaaaaaaaccgaaaaaaaaaacgcgatacgcgaaccgcctccctcccgcctccgaacgtccctcccgaaataccccccaataacatccttaaacgaaaacaaaaaccaacgccgcccccccgccgccccgccgataaaataataacgaacgaccgaacgaaacgatcgcacacccgaaatccccgccccgaacccgccgcaaacccctctccactaccgaaccgccgcgaacccgcccccgacccttccccaaccccacccccaaccccgccgacctccccgaaaacccccccaaaccacgccccaactaacctaaaaaccccgaa

SEQ ID NO: 11177 - DNA, 591 bp, Artificial Sequence
  chemically treated genomic DNA (Homo sapiens) CpG-island No: 11177
ggagatcggtcgtttacggggggttatagtagcggtcgttcgtttaggatggagaggcgggttttaggttcggttcggagcgagttttttagggtttgtcgatacggcggggttcggtggtcggtatttggttcgtacgtgttcgaggggttttcgggttttcggtattatggttattatcggggtttcgattacgacgaggtcgatggttcgggtagcgggggcggcgaggaggttatggtcggggtttacgacgcgttatttttcgtacgatacgcgttttcgggcgttatcgggcgttcgtttaggatttttcgggtttcgggttcggtttgcgtttcgttttttcggtacggtcggcgattttttaacggttattattcggcgtacggattggttaggtttcgcgggtcgggttttaggaagggtttgtacgaattttatagcgagagtgacgatgattggtgttaagttcgggcgaggtggcgttcgttcggttttttacgtattttacgtatatattttattcgaggagtcgcgtagaggtcgcgggggtttagtatagagggttcgggagagggttagtcggga

SEQ ID NO: 11178 - DNA, 591 bp, Artificial Sequence
  chemically treated genomic DNA (Homo sapiens) CpG-island No: 11178
tcccgactaaccctctcccgaaccctctatactaaacccccgcgacctctacgcgactcctcgaataaaatatatacgtaaaatacgtaaaaaaccgaacgaacgccacctcgcccgaacttaacaccaatcatcgtcactctcgctataaaattcgtacaaacccttcctaaaacccgacccgcgaaacctaaccaatccgtacgccgaataataaccgttaaaaaatcgccgaccgtaccgaaaaaacgaaacgcaaaccgaacccgaaacccgaaaaatcctaaacgaacgcccgataacgcccgaaaacgcgtatcgtacgaaaaataacgcgtcgtaaaccccgaccataacctcctcgccgcccccgctacccgaaccatcgacctcgtcgtaatcgaaaccccgataataaccataataccgaaaacccgaaaacccctcgaacacgtacgaaccaaataccgaccaccgaaccccgccgtatcgacaaaccctaaaaaactcgctccgaaccgaacctaaaacccgcctctccatcctaaacgaacgaccgctactataaccccccgtaaacgaccgatctcc

SEQ ID NO: 11179 - DNA, 591 bp, Artificial Sequence
  chemically treated genomic DNA (Homo sapiens) CpG-island No: 11179
tttcggttggttttttttcgggttttttgtgttgggttttcgcggtttttgcgcggtttttcgggtggggtgtgtgcgtggggtgcgtggggggtcgggcgggcgttatttcgttcgggtttagtattaattatcgttattttcgttgtagggttcgtgtaggttttttttggagttcggttcgcggggtttggttagttcgtgcgtcgggtagtagtcgttggggagtcgtcggtcgtgtcgagaaggcgaggcgtaggtcgggttcgaggttcggggagttttgggcgagcgttcggtggcgttcgaggacgcgtgtcgtacggggggtggcgcgtcgtaggtttcggttatggttttttcgtcgttttcgttgttcgggttatcggtttcgtcgtagtcggagtttcggtagtagttatggtgtcggggattcgggggtttttcggatacgtgcgggttagatgtcggttatcgggtttcgtcgtgtcgataggttttgggggattcgtttcgggtcgggtttgggattcgtttttttattttgggcgagcggtcgttgttgtggtttttcgtgggcggtcgattttt

SEQ ID NO: 11180 - DNA, 591 bp, Artificial Sequence
  chemically treated genomic DNA (Homo sapiens) CpG-island No: 11180
aaaaatcgaccgcccacgaaaaaccacaacaacgaccgctcgcccaaaataaaaaaacgaatcccaaacccgacccgaaacgaatcccccaaaacctatcgacacgacgaaacccgataaccgacatctaacccgcacgtatccgaaaaacccccgaatccccgacaccataactactaccgaaactccgactacgacgaaaccgataacccgaacaacgaaaacgacgaaaaaaccataaccgaaacctacgacgcgccaccccccgtacgacacgcgtcctcgaacgccaccgaacgctcgcccaaaactccccgaacctcgaacccgacctacgcctcgccttctcgacacgaccgacgactccccaacgactactacccgacgcacgaactaaccaaaccccgcgaaccgaactccaaaaaaaacctacacgaaccctacaacgaaaataacgataattaatactaaacccgaacgaaataacgcccgcccgaccccccacgcaccccacgcacacaccccacccgaaaaaccgcgcaaaaaccgcgaaaacccaacacaaaaaacccgaaaaaaaaccaaccgaaa

SEQ ID NO: 11181 - DNA, 1294 bp, Artificial Sequence
  chemically treated genomic DNA (Homo sapiens) CpG-island No: 11181
gttcgcgttttcggtttagatttttcggtgtcgtttttgtatattgaaggcgatggtttttcggggatagagttttttttcgggttttttagtagttcgggcggcggtttttttttacggttttcgcgggcgttttttttaggatggaggggggtggtttcgttttaggtttgcgttttcgggtcgacggttcgacgcgcgttttgggtttcggtagcgtcgttcggggtttttagaaggttattacggttcgtacgagtacgttgagtatgttgttcgtcgggcggtaagcgggttttgtttcgtacgcgggcggcgtcgtcggaggggtcgcggggttgtagtttaggaggtcggagaagcgtttttgtaggacgcgggttaggttgggaaaggcgtttttcgtttgcgtcggagggggttgtaggcgatcggcgatttcggatgacgttttttttttttttttttttttttttagacgggtttttttgttcgggattagtttagcgttttcgtcgtcgtttaggttgttgttgcgtcgtttgcggttgattttggcggggcgcggggtatagtaggcggaggttttttcggttgtcggcgttttttgcgtgtttattggtttcggaaacgggtgtttatcgtcgggggtcgttgtttcggtcgtggattcggtttttcggggcgggtgtaggcgagggttagaggggagggcggtcggtaacgatatttcgggttcgagggtttttattttggtcgagaggtagagttttcgggcgttgcgtatgattagcgatagttgtagatttcggtgtagtcgtaggttatcgcgttgtatgcgggagtgatatattttttatatcgatagggttatgatgcgttgtgtttttttttgtatttttatggcgattcgacggcgatagcggcgggggttttcgggagggatagaataggtagtaggtgtatttcggataacgggttcgtttacgtttttttatataaattaatttacgtagtgatattgttaggacgttttgtttaggcgttcgttatttaggtttttttatatttttagtgacgttattgagatatttcgtttaatcgaaggacgtattcgggttttttaattcgtcgcggttaaatattttttaaagagatagaatgcgatttatttagtagggaaaggggacgggaattttggcgaggaggagcgtttttcgattttacgttgagttttttgggtgggtttttttttttgagtttcgtcgatgtattagcgttttggtttaaggga

SEQ ID NO: 11182 - DNA, 1294 bp, Artificial Sequence
  chemically treated genomic DNA (Homo sapiens) CpG-island No: 11182
tcccttaaaccaaaacgctaatacatcgacgaaactcaaaaaaaaaaacccacccaaaaaactcaacgtaaaatcgaaaaacgctcctcctcgccaaaattcccgtcccctttccctactaaataaatcgcattctatctctttaaaaaatatttaaccgcgacgaattaaaaaacccgaatacgtccttcgattaaacgaaatatctcaataacgtcactaaaaatataaaaaaacctaaataacgaacgcctaaacaaaacgtcctaacaatatcactacgtaaattaatttatataaaaaaacgtaaacgaacccgttatccgaaatacacctactacctattctatccctcccgaaaacccccgccgctatcgccgtcgaatcgccataaaaatacaaaaaaaaacacaacgcatcataaccctatcgatataaaaaatatatcactcccgcatacaacgcgataacctacgactacaccgaaatctacaactatcgctaatcatacgcaacgcccgaaaactctacctctcgaccaaaataaaaaccctcgaacccgaaatatcgttaccgaccgccctcccctctaaccctcgcctacacccgccccgaaaaaccgaatccacgaccgaaacaacgacccccgacgataaacacccgtttccgaaaccaataaacacgcaaaaaacgccgacaaccgaaaaaacctccgcctactataccccgcgccccgccaaaatcaaccgcaaacgacgcaacaacaacctaaacgacgacgaaaacgctaaactaatcccgaacaaaaaaacccgtctaaaaaaaaaaaaaaaaaaaaaaaaaacgtcatccgaaatcgccgatcgcctacaaccccctccgacgcaaacgaaaaacgcctttcccaacctaacccgcgtcctacaaaaacgcttctccgacctcctaaactacaaccccgcgacccctccgacgacgccgcccgcgtacgaaacaaaacccgcttaccgcccgacgaacaacatactcaacgtactcgtacgaaccgtaataaccttctaaaaaccccgaacgacgctaccgaaacccaaaacgcgcgtcgaaccgtcgacccgaaaacgcaaacctaaaacgaaaccacccccctccatcctaaaaaaaacgcccgcgaaaaccgtaaaaaaaaaccgccgcccgaactactaaaaaacccgaaaaaaaactctatccccgaaaaaccatcgccttcaatatacaaaaacgacaccgaaaaatctaaaccgaaaacgcgaac

SEQ ID NO: 11183 - DNA, 1294 bp, Artificial Sequence
  chemically treated genomic DNA (Homo sapiens) CpG-island No: 11183
ttttttgggttaaggcgttgatgtatcggcggggtttagagaaaggagtttatttagaaagtttagcgtggagtcgggggacgttttttttcgttagggttttcgttttttttttttgttgggtaaatcgtattttgtttttttaaggagtgtttggtcgcgacgagttggaaagttcggatgcgtttttcggttgggcggggtgttttagtgacgttattgggggtataaaagggtttgggtggcgggcgtttgggtagagcgttttagtagtgttattgcgtgggttggtttgtgtagagaggcgtgagcgagttcgttgttcggagtgtatttgttgtttgttttgtttttttcgggagttttcgtcgttgtcgtcgtcgagtcgttatggaagtgtagaaagaggtatagcgtattatgattttgtcggtgtggaagatgtattattttcgtatgtagcgcggtggtttgcggttgtatcggagtttgtagttgtcgttggttatgcgtagcgttcgggagttttatttttcggttaaggtggaggttttcgagttcgaggtgtcgttgtcggtcgtttttttttttgattttcgtttgtattcgtttcgagaagtcgagtttacggtcgagatagcgattttcgacggtgagtattcgttttcggagttaatggatacgtaggaggcgtcgatagtcgaggagattttcgtttgttgtgtttcgcgtttcgttaaagttagtcgtaaacgacgtagtagtagtttgagcgacggcggggacgttggattggtttcgagtaagaaagttcgtttggaagaaaaggaagaagaggagggagcgttattcgaagtcgtcgatcgtttgtagtttttttcggcgtaagcggagggcgttttttttaatttggttcgcgttttgtagaggcgttttttcggttttttgaattgtagtttcgcggttttttcgacggcgtcgttcgcgtgcgaggtaaagttcgtttgtcgttcggcggatagtatgtttaacgtgttcgtgcgggtcgtggtggttttttgaggatttcgagcggcgttgtcggagtttagagcgcgcgtcgaatcgtcggttcgagggcgtagatttgaggcgaggttatttttttttattttgggggaagcgttcgcgaaaatcgtggagagaagtcgtcgttcgggttgttgagaggttcggagagggattttgttttcggggagttatcgtttttagtgtgtagggacggtatcgaggagtttgagtcgggggcgcgggt

SEQ ID NO: 11184 - DNA, 1294 bp, Artificial Sequence
  chemically treated genomic DNA (Homo sapiens) CpG-island No: 11184
acccgcgcccccgactcaaactcctcgataccgtccctacacactaaaaacgataactccccgaaaacaaaatccctctccgaacctctcaacaacccgaacgacgacttctctccacgattttcgcgaacgcttcccccaaaataaaaaaaaataacctcgcctcaaatctacgccctcgaaccgacgattcgacgcgcgctctaaactccgacaacgccgctcgaaatcctcaaaaaaccaccacgacccgcacgaacacgttaaacatactatccgccgaacgacaaacgaactttacctcgcacgcgaacgacgccgtcgaaaaaaccgcgaaactacaattcaaaaaaccgaaaaaacgcctctacaaaacgcgaaccaaattaaaaaaaacgccctccgcttacgccgaaaaaaactacaaacgatcgacgacttcgaataacgctccctcctcttcttccttttcttccaaacgaactttcttactcgaaaccaatccaacgtccccgccgtcgctcaaactactactacgtcgtttacgactaactttaacgaaacgcgaaacacaacaaacgaaaatctcctcgactatcgacgcctcctacgtatccattaactccgaaaacgaatactcaccgtcgaaaatcgctatctcgaccgtaaactcgacttctcgaaacgaatacaaacgaaaatcaaaaaaaaaaacgaccgacaacgacacctcgaactcgaaaacctccaccttaaccgaaaaataaaactcccgaacgctacgcataaccaacgacaactacaaactccgatacaaccgcaaaccaccgcgctacatacgaaaataatacatcttccacaccgacaaaatcataatacgctatacctctttctacacttccataacgactcgacgacgacaacgacgaaaactcccgaaaaaaacaaaacaaacaacaaatacactccgaacaacgaactcgctcacgcctctctacacaaaccaacccacgcaataacactactaaaacgctctacccaaacgcccgccacccaaacccttttatacccccaataacgtcactaaaacaccccgcccaaccgaaaaacgcatccgaactttccaactcgtcgcgaccaaacactccttaaaaaaacaaaatacgatttacccaacaaaaaaaaaaaacgaaaaccctaacgaaaaaaaacgtcccccgactccacgctaaactttctaaataaactcctttctctaaaccccgccgatacatcaacgccttaacccaaaaaa

SEQ ID NO: 11185 - DNA, 542 bp, Artificial Sequence
  chemically treated genomic DNA (Homo sapiens) CpG-island No: 11185
ttttgacgtcgttttacgtttaagggtttttcggttttttttagttacgtttatatttatacggttttgttttttttagttttatttattacgatttttttcggcgttcgttagtttcgtttatttaaagtttcgttttcgttatttagtttcgtttttatttagtgggtagcggaagcgtacgtggtagttggagtagcggcggttacgcggttgttcgcggttgaggtattagaagtcgcgcgtggggtttaagtgtacgcgttcgtcgacggcggacggtagggtttagttcgtggtgcgcgtttttagcgttagcggtcgcgggtatacgcgcgttggttcgtagtagaagcggatggtagttaggttttcgaagtcgtcgtcgttttcggggtggtttacgttgaattaggacgtttattcgttggtttttgcgggtatcgtacgcgttgggattagggcggcggtttgtaggtttttatgtatgcgtgtaaaggttttatttgttgttttagttttttttttcggtgggtatcggt

SEQ ID NO: 11186 - DNA, 542 bp, Artificial Sequence
  chemically treated genomic DNA (Homo sapiens) CpG-island No: 11186
accgatacccaccgaaaaaaaaaactaaaacaacaaataaaacctttacacgcatacataaaaacctacaaaccgccgccctaatcccaacgcgtacgatacccgcaaaaaccaacgaataaacgtcctaattcaacgtaaaccaccccgaaaacgacgacgacttcgaaaacctaactaccatccgcttctactacgaaccaacgcgcgtatacccgcgaccgctaacgctaaaaacgcgcaccacgaactaaaccctaccgtccgccgtcgacgaacgcgtacacttaaaccccacgcgcgacttctaatacctcaaccgcgaacaaccgcgtaaccgccgctactccaactaccacgtacgcttccgctacccactaaataaaaacgaaactaaataacgaaaacgaaactttaaataaacgaaactaacgaacgccgaaaaaaatcgtaataaataaaactaaaaaaaacaaaaccgtataaatataaacgtaactaaaaaaaaccgaaaaacccttaaacgtaaaacgacgtcaaaa

SEQ ID NO: 11187 - DNA, 542 bp, Artificial Sequence
  chemically treated genomic DNA (Homo sapiens) CpG-island No: 11187
gtcggtgtttatcgggggagggggttgagatagtaagtaaggtttttgtacgtatgtatgggggtttataggtcgtcgttttggttttagcgcgtgcggtgttcgtagaggttagcgagtggacgttttggtttaacgtggattatttcggaggcgacggcgatttcgagagtttggttgttattcgtttttattacgggttagcgcgcgtgtgttcgcgatcgttggcgttggaagcgcgtattacggattgggttttgtcgttcgtcgtcggcgagcgcgtgtatttgaattttacgcgcggtttttggtgttttaatcgcgagtaatcgcgtggtcgtcgttgttttaattattacgtgcgttttcgttgtttattaggtgagggcggggttggatgacgggggcggggttttgaatgggcggggttggcgaacgtcgggaagagtcgtggtgggtggggttgggaggggtaggatcgtgtgggtgtgggcgtggttgggaagagtcgggggatttttaggcgtaggacgacgttaggg

SEQ ID NO: 11188 - DNA, 542 bp, Artificial Sequence
  chemically treated genomic DNA (Homo sapiens) CpG-island No: 11188
ccctaacgtcgtcctacgcctaaaaatcccccgactcttcccaaccacgcccacacccacacgatcctacccctcccaaccccacccaccacgactcttcccgacgttcgccaaccccgcccattcaaaaccccgcccccgtcatccaaccccgccctcacctaataaacaacgaaaacgcacgtaataattaaaacaacgacgaccacgcgattactcgcgattaaaacaccaaaaaccgcgcgtaaaattcaaatacacgcgctcgccgacgacgaacgacaaaacccaatccgtaatacgcgcttccaacgccaacgatcgcgaacacacgcgcgctaacccgtaataaaaacgaataacaaccaaactctcgaaatcgccgtcgcctccgaaataatccacgttaaaccaaaacgtccactcgctaacctctacgaacaccgcacgcgctaaaaccaaaacgacgacctataaacccccatacatacgtacaaaaaccttacttactatctcaaccccctcccccgataaacaccgac

SEQ ID NO: 11189 - DNA, 1229 bp, Artificial Sequence
  chemically treated genomic DNA (Homo sapiens) CpG-island No: 11189
tcggatttcgttaataagtttttgtcgcgagagttgtttattttgcggggcgtgcgatattcgtatatcgtgtacgttttcgagtttatcgaggtgtgtaacgggaaattgtatatcgtgatggaagcggtcgttatcgatttgttgtaagtcgtgtagcgtaacgggcgtattttcggagtttaggcgcgcgatttttttgcgtagatcgtcggcgtcgtgcgttatttgtacgattattatttggtgtatcgcgattttaagtgcgaaaacgtgttgttgagttcggacgagcgtcgcgttaagtttatcgatttcggtttcggtcgttaggtttatggttatttagatttgagtattatttattgcggtttagtcgtttacgcgttattcgaggtgtttttgggtattttttacgattttaagaagtacgatgtgtggagtatgggcgtcgtgttttacgttatggttatcgggtgtatgtttttcgacgattcggatatcgtcggtttgtttcggcgttagaaacgcggcgtgttttatttcgaaggtttcgagttgttcgagcgttgtaaggttttgatcgtcgagttgttgtagtttagttcgttcgttaggtttttcgcgggttaggtagcgcgtaattgttggttgcgcgtcggggatttcggttagaagtcgggtggttttagttatttttgtagttaagggtattgggttagggcggcgtacgcgtaagaggcgcgtttcgagggaatatgcgaagttgtcgcgtgttgttgtatatgcgttttttttttttcgtttttttttttttttttttacgggggagttcgtagttgtttttgttcggaatttacgtttttcgcgatttcgggagttggaggcgtatgcgtattcgcgattttttgcgattaggtttcgagagggcgagattagaggggacggaagtattgcgtttgcgcggaatttttagtttttgcgcggagggcgtttttttttaattagtcgtgggtgttaggttttcggttggaatttgtaataaattcgttgtttttcgtatttggttttaacggtggtttttatttgcggattagtggagaagcgatcgttttattcggggaaggtaggcgcgggtattttattttagagttacgtatgttgaggttattgttttaagatttaaaagggagtcgggaggattcgagtttggattttttgagtttttt

SEQ ID NO: 11190 - DNA, 1229 bp, Artificial Sequence
  chemically treated genomic DNA (Homo sapiens) CpG-island No: 11190
aaaaaactcaaaaaatccaaactcgaatcctcccgactcccttttaaatcttaaaacaataacctcaacatacgtaactctaaaataaaatacccgcgcctaccttccccgaataaaacgatcgcttctccactaatccgcaaataaaaaccaccgttaaaaccaaatacgaaaaacaacgaatttattacaaattccaaccgaaaacctaacacccacgactaattaaaaaaaaacgccctccgcgcaaaaactaaaaattccgcgcaaacgcaatacttccgtcccctctaatctcgccctctcgaaacctaatcgcaaaaaatcgcgaatacgcatacgcctccaactcccgaaatcgcgaaaaacgtaaattccgaacaaaaacaactacgaactcccccgtaaaaaaaaaaaaaaaaaaacgaaaaaaaaaaaacgcatatacaacaacacgcgacaacttcgcatattccctcgaaacgcgcctcttacgcgtacgccgccctaacccaatacccttaactacaaaaataactaaaaccacccgacttctaaccgaaatccccgacgcgcaaccaacaattacgcgctacctaacccgcgaaaaacctaacgaacgaactaaactacaacaactcgacgatcaaaaccttacaacgctcgaacaactcgaaaccttcgaaataaaacacgccgcgtttctaacgccgaaacaaaccgacgatatccgaatcgtcgaaaaacatacacccgataaccataacgtaaaacacgacgcccatactccacacatcgtacttcttaaaatcgtaaaaaatacccaaaaacacctcgaataacgcgtaaacgactaaaccgcaataaataatactcaaatctaaataaccataaacctaacgaccgaaaccgaaatcgataaacttaacgcgacgctcgtccgaactcaacaacacgttttcgcacttaaaatcgcgatacaccaaataataatcgtacaaataacgcacgacgccgacgatctacgcaaaaaaatcgcgcgcctaaactccgaaaatacgcccgttacgctacacgacttacaacaaatcgataacgaccgcttccatcacgatatacaatttcccgttacacacctcgataaactcgaaaacgtacacgatatacgaatatcgcacgccccgcaaaataaacaactctcgcgacaaaaacttattaacgaaatccga

SEQ ID NO: 11191 - DNA, 1229 bp, Artificial Sequence
  chemically treated genomic DNA (Homo sapiens) CpG-island No: 11191
ggggagtttaaaaggtttaggttcgaattttttcgatttttttttgagttttggagtaataattttaatatgcgtgattttaaaatagggtattcgcgtttgtttttttcggatggagcgatcgtttttttattagttcgtaaatgggggttatcgttagagttaggtgcgaggaatagcgagtttattgtaggttttaatcgggaatttggtatttacggttggttgggaagggacgtttttcgcgtagaggttgagagtttcgcgtaggcgtaatgttttcgttttttttggtttcgttttttcggggtttggtcgtagggaatcgcggatgcgtatgcgtttttagttttcgggatcgcggggaacgtggatttcgaataagggtaattgcggattttttcgtgggaagaaagggagggaagcggaagggaaaaagcgtatgtgtagtagtacgcggtagtttcgtatattttttcgaagcgcgttttttgcgcgtgcgtcgttttggtttagtgtttttggttgtaggaatggttggaattattcggtttttagtcggagttttcggcgcgtagttagtagttgcgcgttatttggttcgcggagggtttggcggacgggttgaattgtagtagttcggcgattagggttttgtagcgttcggatagttcgaggttttcgggatagagtacgtcgcgtttttggcgtcggggtaggtcggcgatgttcgagtcgtcgaagggtatgtattcggtgattatgacgtagagtacgacgtttatgttttatatatcgtattttttggggtcgtaggggatgtttaggagtatttcgggtgacgcgtaggcggttgagtcgtagtaggtggtgtttaggtttgggtagttatgggtttggcggtcgaagtcgaagtcggtgagtttgacgcggcgttcgttcgggtttagtagtacgttttcgtatttgaggtcgcggtgtattaggtgatgatcgtgtaggtagcgtacggcgtcggcgatttgcgtaaagaggtcgcgcgtttgaatttcggggatgcgttcgttgcgttgtacggtttgtagtaggtcggtggcggtcgtttttattacgatgtatagtttttcgttgtatatttcgatgaattcgaagacgtgtacgatgtgcgggtgtcgtacgtttcgtaggatggatagttttcgcggtaggaatttgttgacgaagttcgg

SEQ ID NO: 11192 - DNA, 1229 bp, Artificial Sequence
  chemically treated genomic DNA (Homo sapiens) CpG-island No: 11192
ccgaacttcgtcaacaaattcctaccgcgaaaactatccatcctacgaaacgtacgacacccgcacatcgtacacgtcttcgaattcatcgaaatatacaacgaaaaactatacatcgtaataaaaacgaccgccaccgacctactacaaaccgtacaacgcaacgaacgcatccccgaaattcaaacgcgcgacctctttacgcaaatcgccgacgccgtacgctacctacacgatcatcacctaatacaccgcgacctcaaatacgaaaacgtactactaaacccgaacgaacgccgcgtcaaactcaccgacttcgacttcgaccgccaaacccataactacccaaacctaaacaccacctactacgactcaaccgcctacgcgtcacccgaaatactcctaaacatcccctacgaccccaaaaaatacgatatataaaacataaacgtcgtactctacgtcataatcaccgaatacatacccttcgacgactcgaacatcgccgacctaccccgacgccaaaaacgcgacgtactctatcccgaaaacctcgaactatccgaacgctacaaaaccctaatcgccgaactactacaattcaacccgtccgccaaaccctccgcgaaccaaataacgcgcaactactaactacgcgccgaaaactccgactaaaaaccgaataattccaaccattcctacaaccaaaaacactaaaccaaaacgacgcacgcgcaaaaaacgcgcttcgaaaaaatatacgaaactaccgcgtactactacacatacgctttttcccttccgcttccctccctttcttcccacgaaaaaatccgcaattacccttattcgaaatccacgttccccgcgatcccgaaaactaaaaacgcatacgcatccgcgattccctacgaccaaaccccgaaaaaacgaaaccaaaaaaaacgaaaacattacgcctacgcgaaactctcaacctctacgcgaaaaacgtcccttcccaaccaaccgtaaataccaaattcccgattaaaacctacaataaactcgctattcctcgcacctaactctaacgataacccccatttacgaactaataaaaaaacgatcgctccatccgaaaaaaacaaacgcgaataccctattttaaaatcacgcatattaaaattattactccaaaactcaaaaaaaaatcgaaaaaattcgaacctaaaccttttaaactcccc

SEQ ID NO: 11193 - DNA, 548 bp, Artificial Sequence
  chemically treated genomic DNA (Homo sapiens) CpG-island No: 11193
gtgaggcggtggcgaaagcggtgggtattaaaggcgattatttgtcggatgtggtggatgttattgtaggatttgggcgcgatgtttttgtattggttttagttcggtgtcgcgtgcggatgttggagcgtaatttagtggttgtcgcgttattcgacgacggtttggcgcgtggttatgcggatgcggaaatcggcggttggttgtaggagcggttgtagttaatttacgtttttagtttgacggcgttgattgatattatttcgcgttcgtaggtggtttatttcgattcgatgttttcgtataagtagaaaagcgcgttagtgaaaaaagagatgcgtgttttttagtcgttggtgggatcggattttgatgtcgatggattattggagtttgtacgtttgttggcgattaaacgcgtggtggtaaagcgttcggattacgcgttatcgttggcgaatgtcgttacgttaaacgcggtagttattaaagggtatcgttttgatatttatgtaggtacgttagtgtaaaattaaaatagggtagcg

SEQ ID NO: 11194 - DNA, 548 bp, Artificial Sequence
  chemically treated genomic DNA (Homo sapiens) CpG-island No: 11194
cgctaccctattttaattttacactaacgtacctacataaatatcaaaacgataccctttaataactaccgcgtttaacgtaacgacattcgccaacgataacgcgtaatccgaacgctttaccaccacgcgtttaatcgccaacaaacgtacaaactccaataatccatcgacatcaaaatccgatcccaccaacgactaaaaaacacgcatctcttttttcactaacgcgcttttctacttatacgaaaacatcgaatcgaaataaaccacctacgaacgcgaaataatatcaatcaacgccgtcaaactaaaaacgtaaattaactacaaccgctcctacaaccaaccgccgatttccgcatccgcataaccacgcgccaaaccgtcgtcgaataacgcgacaaccactaaattacgctccaacatccgcacgcgacaccgaactaaaaccaatacaaaaacatcgcgcccaaatcctacaataacatccaccacatccgacaaataatcgcctttaatacccaccgctttcgccaccgcctcac

SEQ ID NO: 11195 - DNA, 548 bp, Artificial Sequence
  chemically treated genomic DNA (Homo sapiens) CpG-island No: 11195
cgttattttgttttagttttatattggcgtatttgtatagatattaaagcgatgttttttagtgattatcgcgtttggcgtggcgatattcgttagcggtggcgcgtagttcgggcgttttattattacgcgtttggtcgttagtaagcgtgtaggttttagtaatttatcggtattaagattcggttttattagcgattgaaagatacgtatttttttttttattagcgcgtttttttgtttatgcgggaatatcgggtcgagataaattatttgcgggcgcggggtaatattagttagcgtcgttaggttggaggcgtgaattaattgtaatcgtttttgtaattagtcgtcgattttcgtattcgtataattacgcgttaggtcgtcgtcgagtagcgcggtaattattggattacgttttagtattcgtacgcggtatcgagttgaagttagtataaaggtatcgcgtttaagttttgtagtggtatttattatattcggtaaataatcgtttttaatgtttatcgttttcgttatcgttttat

SEQ ID NO: 11196 - DNA, 548 bp, Artificial Sequence
  chemically treated genomic DNA (Homo sapiens) CpG-island No: 11196
ataaaacgataacgaaaacgataaacattaaaaacgattatttaccgaatataataaataccactacaaaacttaaacgcgatacctttatactaacttcaactcgataccgcgtacgaatactaaaacgtaatccaataattaccgcgctactcgacgacgacctaacgcgtaattatacgaatacgaaaatcgacgactaattacaaaaacgattacaattaattcacgcctccaacctaacgacgctaactaatattaccccgcgcccgcaaataatttatctcgacccgatattcccgcataaacaaaaaaacgcgctaataaaaaaaaaaatacgtatctttcaatcgctaataaaaccgaatcttaataccgataaattactaaaacctacacgcttactaacgaccaaacgcgtaataataaaacgcccgaactacgcgccaccgctaacgaatatcgccacgccaaacgcgataatcactaaaaaacatcgctttaatatctatacaaatacgccaatataaaactaaaacaaaataacg

SEQ ID NO: 11197 - DNA, 686 bp, Artificial Sequence
  chemically treated genomic DNA (Homo sapiens) CpG-island No: 11197
  unsure (249, 491)
tggcggcgttgagtgattttttcggtatcggggatttttagagtcgttgtatattagaatgttttgacgcgggattagttaacgtcgacgttatttttggtttgacggaagtggatattgttgtcggtgataaagcggcggtacgtagttagttggcgaaattgttcgttatcgataacgtttcgttgaatatatagcggcgcgtggcgtggtataggcgtatttggcgatatcgtagtagcgtacgancgtttaataagttgatttcgtagtaaaattttagttatcgtcgatggaaagcgcgatggtgttgcgtgatggtgcgaagtttgaagcgtaggcgggcgatttaacgtaggcgttggaaatttataaagacgttatggtcgtattcggtgtgattacgacgcgttcgtaggataacgatatttttattcgattgattcgtaacgacgagaaagatgattggttgaaacgtggcgtgcgtacgnatgcggcggatttttatcgttagtaggattttaacgttatttttgagtacgattattggggttcgagcggtatcggtggttatttcgatttgaaagcgtatattattatgttgtaggtggatgcgtcgtattttgacgggcggatgttttttcgtagtgatttcgttaatatgaacgtcggtagtttttttatta

SEQ ID NO: 11198 - DNA, 686 bp, Artificial Sequence
  chemically treated genomic DNA (Homo sapiens) CpG-island No: 11198
  unsure (196, 438)
taataaaaaaactaccgacgttcatattaacgaaatcactacgaaaaaacatccgcccgtcaaaatacgacgcatccacctacaacataataatatacgctttcaaatcgaaataaccaccgataccgctcgaaccccaataatcgtactcaaaaataacgttaaaatcctactaacgataaaaatccgccgcatncgtacgcacgccacgtttcaaccaatcatctttctcgtcgttacgaatcaatcgaataaaaatatcgttatcctacgaacgcgtcgtaatcacaccgaatacgaccataacgtctttataaatttccaacgcctacgttaaatcgcccgcctacgcttcaaacttcgcaccatcacgcaacaccatcgcgctttccatcgacgataactaaaattttactacgaaatcaacttattaaacgntcgtacgctactacgatatcgccaaatacgcctataccacgccacgcgccgctatatattcaacgaaacgttatcgataacgaacaatttcgccaactaactacgtaccgccgctttatcaccgacaacaatatccacttccgtcaaaccaaaaataacgtcgacgttaactaatcccgcgtcaaaacattctaatatacaacgactctaaaaatccccgataccgaaaaaatcactcaacgccgcca

SEQ ID NO: 11199 - DNA, 686 bp, Artificial Sequence
  chemically treated genomic DNA (Homo sapiens) CpG-island No: 11199
  unsure (196, 438)
tagtggagaaattgtcgacgtttatattgacgaaattattgcgaaagaatattcgttcgttagaatacggcgtatttatttgtaatatggtagtgtgcgtttttagatcggagtaattatcggtgtcgttcgaattttagtaatcgtgtttaagggtgacgttaagattttgttggcgatagaggttcgtcgtatncgtgcgtacgttacgttttagttagttatttttttcgtcgttacgggttagtcgggtaaaggtgtcgttattttgcggacgcgtcgtagttatatcggatgcgattatggcgtttttgtaggtttttagcgtttgcgttggatcgttcgtttgcgttttaaatttcgtattattacgtagtattatcgcgttttttatcgacggtggttgagattttgttgcgggattaatttattaaacgntcgtgcgttgttgcggtatcgttaagtgcgtttgtgttacgttacgcgtcgttgtgtgtttagcgaggcgttatcggtagcgggtagtttcgttagttggttacgtgtcgtcgttttgttatcggtagtaatatttattttcgttagattaagaatggcgtcggcgttagttggtttcgcgttaggatattttgatatgtagcgattttagagattttcggtatcggaaagattatttagcgtcgtta

SEQ ID NO: 11200 - DNA, 686 bp, Artificial Sequence
  chemically treated genomic DNA (Homo sapiens) CpG-island No: 11200
  unsure (249, 491)
taacgacgctaaataatctttccgataccgaaaatctctaaaatcgctacatatcaaaatatcctaacgcgaaaccaactaacgccgacgccattcttaatctaacgaaaataaatattactaccgataacaaaacgacgacacgtaaccaactaacgaaactacccgctaccgataacgcctcgctaaacacacaacgacgcgtaacgtaacacaaacgcacttaacgataccgcaacaacgcacgancgtttaataaattaatcccgcaacaaaatctcaaccaccgtcgataaaaaacgcgataatactacgtaataatacgaaatttaaaacgcaaacgaacgatccaacgcaaacgctaaaaacctacaaaaacgccataatcgcatccgatataactacgacgcgtccgcaaaataacgacacctttacccgactaacccgtaacgacgaaaaaaataactaactaaaacgtaacgtacgcacgnatacgacgaacctctatcgccaacaaaatcttaacgtcacccttaaacacgattactaaaattcgaacgacaccgataattactccgatctaaaaacgcacactaccatattacaaataaatacgccgtattctaacgaacgaatattctttcgcaataatttcgtcaatataaacgtcgacaatttctccacta

SEQ ID NO: 11201 - DNA, 1313 bp, Artificial Sequence
  chemically treated genomic DNA (Homo sapiens) CpG-island No: 11201
  unsure (670..671, 677, 698, 707)
gtgcgggggatcggcgtggcggttatgattaattgatgcggatggaagttttgttgttggttttttttttataatgttagacgttgatgtacgttaaaacgatgttgttcgtcgataattattagcgttaggtcgttaaattgtatttgtttttggaagatggcgtgtgtatcgataattatttgtatttgatcgttggcgatggttttttgttgtgttagtcgtgttttatttttttgtttatcggcgagttagtttatttcgatatcgagcggtgtaaattagttgcggaagttattggcgtgttgttcggcgagtaattcggttggtgttattaatgttatttgtttgtcgtgggtaatcgtacgtaacgcggcgagggcggcgattagcgttttatcggaatttatatcgttttgtattagacgtattatcggtatatttagcgttatatcgcgttcgattttcgttattacgcgtgtttgtgcgttcgttggtttgaacggtaaggcggcgaggagtttattttttagcgtgttattggcgtttagcggttgggtatgaaaacgttgtgtttcggtacgtaaggttaatatgttgaggttgtgcgttagtagttttttagaattagacgacgtgcgtcggatgttgttcggttttagatcgttannttgtancgtcggtggcggggcgtgtanagtgcgtancgttttcggtagcgttattatttttgtgatagtttcggcgttaggatttttttaatggcgtagttgtcgagtagatttagcgtttgtcgttaatttacgtagcgtgttttgttttacgtttttcgttgttggataaatcggcgtgagcgttttcgtaattttggcgtgttgagatcgatttgtacgcggtatttcgggtggattattttcgtattatatttatcgcgttttggttcgttataagttagtatacggcggttcgtcgttaggttattttttattgtcgcgttgaaattgaaaaagcgtatggtgaggatgtcggaatcgtcgttgatttggtaggttattattcgtcgatcgtcgaaggagatattgtagtttagtatttcgttttttatcgtggtataaacgttcggtagtagtttttcgatggggtagagatgggtgcgattttcgtagcgtaggggaaggtgtaagagtagattttgtacggtatgtaggttgattttcgttagtttgttattaagtgttgcgttaacgttcgttagggaattgagtgggatagtatttaataggcgattttttatggtatttattttgtagttt

SEQ ID NO: 11202 - DNA, 1313 bp, Artificial Sequence
  chemically treated genomic DNA (Homo sapiens) CpG-island No: 11202
  unsure (607, 616, 637, 643..)
aaactacaaaataaataccataaaaaatcgcctattaaatactatcccactcaattccctaacgaacgttaacgcaacacttaataacaaactaacgaaaatcaacctacataccgtacaaaatctactcttacaccttcccctacgctacgaaaatcgcacccatctctaccccatcgaaaaactactaccgaacgtttataccacgataaaaaacgaaatactaaactacaatatctccttcgacgatcgacgaataataacctaccaaatcaacgacgattccgacatcctcaccatacgctttttcaatttcaacgcgacaataaaaaataacctaacgacgaaccgccgtatactaacttataacgaaccaaaacgcgataaatataatacgaaaataatccacccgaaataccgcgtacaaatcgatctcaacacgccaaaattacgaaaacgctcacgccgatttatccaacaacgaaaaacgtaaaacaaaacacgctacgtaaattaacgacaaacgctaaatctactcgacaactacgccattaaaaaaatcctaacgccgaaactatcacaaaaataataacgctaccgaaaacgntacgcactntacacgccccgccaccgacgntacaanntaacgatctaaaaccgaacaacatccgacgcacgtcgtctaattctaaaaaactactaacgcacaacctcaacatattaaccttacgtaccgaaacacaacgttttcatacccaaccgctaaacgccaataacacgctaaaaaataaactcctcgccgccttaccgttcaaaccaacgaacgcacaaacacgcgtaataacgaaaatcgaacgcgatataacgctaaatataccgataatacgtctaatacaaaacgatataaattccgataaaacgctaatcgccgccctcgccgcgttacgtacgattacccacgacaaacaaataacattaataacaccaaccgaattactcgccgaacaacacgccaataacttccgcaactaatttacaccgctcgatatcgaaataaactaactcgccgataaacaaaaaaataaaacacgactaacacaacaaaaaaccatcgccaacgatcaaatacaaataattatcgatacacacgccatcttccaaaaacaaatacaatttaacgacctaacgctaataattatcgacgaacaacatcgttttaacgtacatcaacgtctaacattataaaaaaaaaaccaacaacaaaacttccatccgcatcaattaatcataaccgccacgccgatcccccgcac

SEQ ID NO: 11203 - DNA, 1313 bp, Artificial Sequence
  chemically treated genomic DNA (Homo sapiens) CpG-island No: 11203
  unsure (607, 616, 637, 643..)
aggttgtagggtaagtgttatgaaaggtcgtttgttagatgttgttttatttagttttttaacgggcgttggcgtagtatttagtaataaattggcgaaaattaatttgtatatcgtgtaggatttatttttatatttttttttgcgttacgaagatcgtatttatttttattttatcggagaattattgtcgggcgtttatgttacggtggaaggcgaagtgttgaattgtaatatttttttcggcggtcggcggatgatgatttgttagattagcgacggtttcggtatttttattatgcgtttttttaattttagcgcggtaatgaaaaatagtttggcggcgggtcgtcgtgtattggtttatggcgaattaaagcgcggtaaatatggtgcggagatgatttattcggaatatcgcgtgtaggtcgattttagtacgttagaattacggaaacgtttacgtcggtttatttaataacggaaggcgtaaagtaaggtacgttgcgtaaattaacgataagcgttggatttgttcgataattgcgttattgaagaaattttggcgtcgggattgttataagaatgatgacgttatcggaagcgntgcgtattntgtacgtttcgttatcgacgntatagnntagcgatttgaaatcgggtagtattcggcgtacgtcgtttgattttgaagaattgttggcgtataattttagtatgttagttttacgtgtcggagtatagcgtttttatgtttagtcgttgagcgttaatgatacgttgaaaaataaatttttcgtcgttttatcgtttaagttaacgggcgtataggtacgcgtagtggcggagatcgagcgcgatatggcgttggatgtgtcgatgatgcgtttggtgtagggcgatgtaggtttcggtaaaacgttggtcgtcgttttcgtcgcgttgcgtgcgattgtttacggtaaataggtagtattgatggtattaatcgaattattcgtcgagtagtacgttaataattttcgtaattggtttgtatcgttcggtatcgaagtgggttggttcgtcggtaagtagaaaggtaaagtacggttggtatagtaggaagttatcgttagcggttaggtgtagatgattgtcggtatatacgttattttttaggaataggtgtagtttaacggtttggcgttggtgattatcgacgaatagtatcgttttggcgtgtattagcgtttggtattgtgggagaaaggttagtagtagggtttttattcgtattagttgattatgatcgttacgtcgatttttcgtat

SEQ ID NO: 11204 - DNA, 1313 bp, Artificial Sequence
  chemically treated genomic DNA (Homo sapiens) CpG-island No: 11204
  unsure (670..671, 677, 698, 707)
atacgaaaaatcgacgtaacgatcataatcaactaatacgaataaaaaccctactactaacctttctcccacaataccaaacgctaatacacgccaaaacgatactattcgtcgataatcaccaacgccaaaccgttaaactacacctattcctaaaaaataacgtatataccgacaatcatctacacctaaccgctaacgataacttcctactataccaaccgtactttacctttctacttaccgacgaaccaacccacttcgataccgaacgatacaaaccaattacgaaaattattaacgtactactcgacgaataattcgattaataccatcaatactacctatttaccgtaaacaatcgcacgcaacgcgacgaaaacgacgaccaacgttttaccgaaacctacatcgccctacaccaaacgcatcatcgacacatccaacgccatatcgcgctcgatctccgccactacgcgtacctatacgcccgttaacttaaacgataaaacgacgaaaaatttatttttcaacgtatcattaacgctcaacgactaaacataaaaacgctatactccgacacgtaaaactaacatactaaaattatacgccaacaattcttcaaaatcaaacgacgtacgccgaatactacccgatttcaaatcgctannctatancgtcgataacgaaacgtacanaatacgcancgcttccgataacgtcatcattcttataacaatcccgacgccaaaatttcttcaataacgcaattatcgaacaaatccaacgcttatcgttaatttacgcaacgtaccttactttacgccttccgttattaaataaaccgacgtaaacgtttccgtaattctaacgtactaaaatcgacctacacgcgatattccgaataaatcatctccgcaccatatttaccgcgctttaattcgccataaaccaatacacgacgacccgccgccaaactatttttcattaccgcgctaaaattaaaaaaacgcataataaaaataccgaaaccgtcgctaatctaacaaatcatcatccgccgaccgccgaaaaaaatattacaattcaacacttcgccttccaccgtaacataaacgcccgacaataattctccgataaaataaaaataaatacgatcttcgtaacgcaaaaaaaaatataaaaataaatcctacacgatatacaaattaattttcgccaatttattactaaatactacgccaacgcccgttaaaaaactaaataaaacaacatctaacaaacgacctttcataacacttaccctacaacct

SEQ ID NO: 11205 - DNA, 740 bp, Artificial Sequence
  chemically treated genomic DNA (Homo sapiens) CpG-island No: 11205
aattgcgttaggcgagcggaatgagttttagcgtggttgttttgttgatcgttttgtcggtggttattatgggcgggttggcgttggtcggaagttggttttattagtatgttagcgaacgtcgtagtgtcgttattagtttgttgttgattgtcgtcggtgtattgatgcgtgattttattcgtaaagtgcgttgttgtttaacgatgtttggtggggtggggatcggtattatttaggcggtgatgttttcggtgattaaacggcggttttagtagcgtacgttattggtgatggggttgtggttcgcggttttgatgggcggcggtgggtttggtgtcgttataacgttttggttagtttaatatagcgaaatttggtattaaatattcgtttggtgggcgttgttgtcgttgttgcgttttttgtttggtggtggtaaagcgttcgtagggtcgtttttttttataagataataattatttcggttcgcgtggtatttatttttcgcgcgtggacgttgggtgtttatttcggtttgattaacggcggttattaagtttgattgtttggttattcgttttttatattgagattggtgtagcgcgtagtatagcggtttttattggtattgatgacgttgggtaagcgtagagttttgttgattttgttatgttagtttagtatgttattaggtcgttttttttttcgttacgggatattttgtatattatgaattg

SEQ ID NO: 11206 - DNA, 740 bp, Artificial Sequence
  chemically treated genomic DNA (Homo sapiens) CpG-island No: 11206
caattcataatatacaaaatatcccgtaacgaaaaaaaaaacgacctaataacatactaaactaacataacaaaatcaacaaaactctacgcttacccaacgtcatcaataccaataaaaaccgctatactacgcgctacaccaatctcaatataaaaaacgaataaccaaacaatcaaacttaataaccgccgttaatcaaaccgaaataaacacccaacgtccacgcgcgaaaaataaataccacgcgaaccgaaataattattatcttataaaaaaaaacgaccctacgaacgctttaccaccaccaaacaaaaaacgcaacaacgacaacaacgcccaccaaacgaatatttaataccaaatttcgctatattaaactaaccaaaacgttataacgacaccaaacccaccgccgcccatcaaaaccgcgaaccacaaccccatcaccaataacgtacgctactaaaaccgccgtttaatcaccgaaaacatcaccgcctaaataataccgatccccaccccaccaaacatcgttaaacaacaacgcactttacgaataaaatcacgcatcaatacaccgacgacaatcaacaacaaactaataacgacactacgacgttcgctaacatactaataaaaccaacttccgaccaacgccaacccgcccataataaccaccgacaaaacgatcaacaaaacaaccacgctaaaactcattccgctcgcctaacgcaatt

SEQ ID NO: 11207 - DNA, 740 bp, Artificial Sequence
  chemically treated genomic DNA (Homo sapiens) CpG-island No: 11207
taatttatggtgtatagggtgtttcgtaacggaaagagaaacgatttggtggtatattagattagtatagtaggattagtaaagttttgcgtttgtttagcgttattaatgttagtaagaatcgttgtattgcgcgttgtattaattttaatatagaaagcgggtaattaggtaattaggtttggtaatcgtcgttaattagatcgaagtaaatatttagcgtttacgcgcggggagtgaatattacgcgaatcggagtggttgttgttttgtgggaagaggcgattttgcgggcgttttgttattattaggtaaagagcgtaataacggtagtagcgtttattaggcgagtgtttgatattaggtttcgttatgttgaattaattagggcgttatggcggtattaagtttatcgtcgtttattagagtcgcggattatagttttattattagtggcgtgcgttgttgaaatcgtcgtttaattatcgaaggtattatcgtttgaatgatgtcgatttttattttattaagtatcgttaagtagtagcgtattttgcgggtaaagttacgtattaatgtatcgacggtaattagtaatagattgatggcgatattgcgacgttcgttgatatgttgatgaagttagttttcggttagcgttagttcgtttatggtaattatcggtagagcggttaatagggtagttacgttaaagtttatttcgttcgtttggcgtaatt

SEQ ID NO: 11208 - DNA, 740 bp, Artificial Sequence
  chemically treated genomic DNA (Homo sapiens) CpG-island No: 11208
aattacgccaaacgaacgaaataaactttaacgtaactaccctattaaccgctctaccgataattaccataaacgaactaacgctaaccgaaaactaacttcatcaacatatcaacgaacgtcgcaatatcgccatcaatctattactaattaccgtcgatacattaatacgtaactttacccgcaaaatacgctactacttaacgatacttaataaaataaaaatcgacatcattcaaacgataataccttcgataattaaacgacgatttcaacaacgcacgccactaataataaaactataatccgcgactctaataaacgacgataaacttaataccgccataacgccctaattaattcaacataacgaaacctaatatcaaacactcgcctaataaacgctactaccgttattacgctctttacctaataataacaaaacgcccgcaaaatcgcctcttcccacaaaacaacaaccactccgattcgcgtaatattcactccccgcgcgtaaacgctaaatatttacttcgatctaattaacgacgattaccaaacctaattacctaattacccgctttctatattaaaattaatacaacgcgcaatacaacgattcttactaacattaataacgctaaacaaacgcaaaactttactaatcctactatactaatctaatataccaccaaatcgtttctctttccgttacgaaacaccctatacaccataaatta

SEQ ID NO: 11209 - DNA, 508 bp, Artificial Sequence
  chemically treated genomic DNA (Homo sapiens) CpG-island No: 11209
acggtatatcgtattgtggttgaatgtcggatttcgtattcgtgtttttgtatttttcggttgttttatcgggttgttaggattacgcgggattagtttcgaaataaacggtagtgttattgggttggtaatcgttattttacgatttggattaacggaaatttcgttttattcgaatatttttaggttattcgggaagattagcgtattttgtttagatggcggggtgaaaatgtttttatagcgtatttggtggaatattacgcggtatattagttggttaaatatggtggttttttatatattcgtatcgtttaaatttttcgtcggacggaagtttagtttagaaaacggttgagttggggttacgtaatcgtttttcgttgtattttggggaatcggttttttcggtgtcggaattattagttcgttattacgacgatcgagtataaaaatgttgtcggttttcgtcggagttaaataattggtattttttgattattaacgg

SEQ ID NO: 11210 - DNA, 508 bp, Artificial Sequence
  chemically treated genomic DNA (Homo sapiens) CpG-island No: 11210
ccgttaataatcaaaaaataccaattatttaactccgacgaaaaccgacaacatttttatactcgatcgtcgtaataacgaactaataattccgacaccgaaaaaaccgattccccaaaatacaacgaaaaacgattacgtaaccccaactcaaccgttttctaaactaaacttccgtccgacgaaaaatttaaacgatacgaatatataaaaaaccaccatatttaaccaactaatataccgcgtaatattccaccaaatacgctataaaaacattttcaccccgccatctaaacaaaatacgctaatcttcccgaataacctaaaaatattcgaataaaacgaaatttccgttaatccaaatcgtaaaataacgattaccaacccaataacactaccgtttatttcgaaactaatcccgcgtaatcctaacaacccgataaaacaaccgaaaaatacaaaaacacgaatacgaaatccgacattcaaccacaatacgatataccgt

SEQ ID NO: 11211 - DNA, 508 bp, Artificial Sequence
  chemically treated genomic DNA (Homo sapiens) CpG-island No: 11211
tcgttaatggttagaaagtgttagttatttagtttcggcgaaaatcggtaatatttttgtgttcgatcgtcgtaatggcgaattggtggtttcggtatcggaaaaatcggttttttaaggtgtagcgaaaggcgattacgtaattttaatttaatcgttttttgaattgagttttcgttcgacgaaagatttgagcggtgcggatatgtggggagttattatgtttgattaattggtgtgtcgcgtgatgttttattagatgcgttatgaaggtatttttatttcgttatttgaatagggtacgttggttttttcgggtaatttggggatgttcgaatggggcgggattttcgttgatttaaatcgtgaagtggcgattgttaatttaatggtattgtcgtttgtttcgaaattgatttcgcgtggttttggtaattcgatggagtagtcgaaagatgtaaaggtacgggtacggaattcggtatttagttatagtacggtgtatcgt

SEQ ID NO: 11212 - DNA, 508 bp, Artificial Sequence
  chemically treated genomic DNA (Homo sapiens) CpG-island No: 11212
acgatacaccgtactataactaaataccgaattccgtacccgtacctttacatctttcgactactccatcgaattaccaaaaccacgcgaaatcaatttcgaaacaaacgacaataccattaaattaacaatcgccacttcacgatttaaatcaacgaaaatcccgccccattcgaacatccccaaattacccgaaaaaaccaacgtaccctattcaaataacgaaataaaaataccttcataacgcatctaataaaacatcacgcgacacaccaattaatcaaacataataactccccacatatccgcaccgctcaaatctttcgtcgaacgaaaactcaattcaaaaaacgattaaattaaaattacgtaatcgcctttcgctacaccttaaaaaaccgatttttccgataccgaaaccaccaattcgccattacgacgatcgaacacaaaaatattaccgattttcgccgaaactaaataactaacactttctaaccattaacga

SEQ ID NO: 11213 - DNA, 556 bp, Artificial Sequence
  chemically treated genomic DNA (Homo sapiens) CpG-island No: 11213
  unsure (7)
gcgtatntttttgttcgcgtgtgcgttcggttttttcggtttcgcgtttcgtgtgttcggcgtgcgggttttgttttggcgcgtggttgtttgggtttttgttttgcgtgtgcgtttcgtcgcgtcgggttgtttcggcgcgcgcgtcgcgtgtcgcgtgttttcgtattatgtttggagtagttgttcgtttgtttcgtttttttttttgcgttgttttgattttcgttttaggttcgtttttggcggcgttcgggtgttttttttgggcgtttgggcggttgtcggttcgttgtgggtcgtttcgtgcgttcggttcgttttggcggttcgtgtttcgttttttgtgagtcgtgtcggtgcggtgcgtttcgggggtttcggggtttgcgtcggtttcggtcgcgcgttttttcgcggttgcggggttttgcgttgtttggtggtttcgtggcgggagttttttttcgggggtttcggggttttttttttcggggttttcggttttgggttttttttggtttttttcgttaaggaaattagtttatcgaagaga

SEQ ID NO: 11214 - DNA, 556 bp, Artificial Sequence
  chemically treated genomic DNA (Homo sapiens) CpG-island No: 11214
  unsure (550)
tctcttcgataaactaatttccttaacgaaaaaaaccaaaaaaaacccaaaaccgaaaaccccgaaaaaaaaaaccccgaaacccccgaaaaaaaactcccgccacgaaaccaccaaacaacgcaaaaccccgcaaccgcgaaaaaacgcgcgaccgaaaccgacgcaaaccccgaaacccccgaaacgcaccgcaccgacacgactcacaaaaaacgaaacacgaaccgccaaaacgaaccgaacgcacgaaacgacccacaacgaaccgacaaccgcccaaacgcccaaaaaaaacacccgaacgccgccaaaaacgaacctaaaacgaaaatcaaaacaacgcaaaaaaaaaaacgaaacaaacgaacaactactccaaacataatacgaaaacacgcgacacgcgacgcgcgcgccgaaacaacccgacgcgacgaaacgcacacgcaaaacaaaaacccaaacaaccacgcgccaaaacaaaacccgcacgccgaacacacgaaacgcgaaaccgaaaaaaccgaacgcacacgcgaacaaaaanatacgc

SEQ ID NO: 11215 - DNA, 556 bp, Artificial Sequence
  chemically treated genomic DNA (Homo sapiens) CpG-island No: 11215
  unsure (550)
ttttttcgatggattgatttttttggcgggggaaattaaagggggtttaaagtcgggaatttcggggaaaaaagtttcgaaattttcgggaggggattttcgttacggaattattaagtaacgtaaggtttcgtagtcgcgaggagacgcgcgatcgggatcggcgtaggtttcggggttttcggggcgtatcgtatcgatacgatttataggagacggggtacgggtcgttagggcgagtcgggcgtacgaagcggtttatagcggatcggtaatcgtttaagcgtttaaagaagatattcgggcgtcgttaaagacgggtttggggcggagattagggtagcgtaaagggggagacgaggtaaacgggtagttgttttaggtatgatgcgggggtacgcggtacgcggcgcgcgcgtcggagtagttcggcgcgacggagcgtatacgtaaggtaggagtttaggtagttacgcgttaagataagattcgtacgtcgggtatacgaggcgcggagtcggagggatcgggcgtatacgcgagtaggggngtacgt

SEQ ID NO: 11216 - DNA, 556 bp, Artificial Sequence
  chemically treated genomic DNA (Homo sapiens) CpG-island No: 11216
  unsure (7)
acgtacncccctactcgcgtatacgcccgatccctccgactccgcgcctcgtatacccgacgtacgaatcttatcttaacgcgtaactacctaaactcctaccttacgtatacgctccgtcgcgccgaactactccgacgcgcgcgccgcgtaccgcgtacccccgcatcatacctaaaacaactacccgtttacctcgtctccccctttacgctaccctaatctccgccccaaacccgtctttaacgacgcccgaatatcttctttaaacgcttaaacgattaccgatccgctataaaccgcttcgtacgcccgactcgccctaacgacccgtaccccgtctcctataaatcgtatcgatacgatacgccccgaaaaccccgaaacctacgccgatcccgatcgcgcgtctcctcgcgactacgaaaccttacgttacttaataattccgtaacgaaaatcccctcccgaaaatttcgaaacttttttccccgaaattcccgactttaaaccccctttaatttcccccgccaaaaaaatcaatccatcgaaaaaa

SEQ ID NO: 11217 - DNA, 803 bp, Artificial Sequence
  chemically treated genomic DNA (Homo sapiens) CpG-island No: 11217
ggttttcgttgtcgtcgaatttataacgttaggtgattcgatttttcggttgtacggtttcggttttatcgatattcgttagatttattattagacgcggacgtatttggaaggggttaaaatcggaattcggtttttgaattattttttcggtaattcgtaaggtggtatcgtttacgttaatggtgtcgttcgtttttaggttaagtagtgttattaggcgtggggttagtaatacgttgttcgtttgcggttttaggttagggggattagtttgtagatcgttatatatcgggtagatattatttatcgttttgacgttcgttagttgcggtgtgtcgtttgtaaaggttattgtggcgaaagttagttgtttgtcgatttttaggtcgcgtttttgcgtttttttagttacgtttgggtatttcgcgtgaattgcgtaacgtcgatggttcgttataaatttacggttttgttggtttaagtttttttttatgcgatcgttgatattgtttaacgttatacggtaggttatcgttaggtttagcgttacgtagataattaatagcgacggcggacgtatttcgcgttagaataacgtgtaattatgttttttttgtaattgtcgtttataagttggtatgagattagttaagtcggcgttattattacgaaattattttcgtgtttcgcggattttcggtagagggttagttaatacgtcgatacgtcgatgtatatgaatgttagttacgacgtcgggcggaaaattttttttaggattttcgcgtacgaaattagtt

SEQ ID NO: 11218 - DNA, 803 bp, Artificial Sequence
  chemically treated genomic DNA (Homo sapiens) CpG-island No: 11218
aactaatttcgtacgcgaaaatcctaaaaaaaattttccgcccgacgtcgtaactaacattcatatacatcgacgtatcgacgtattaactaaccctctaccgaaaatccgcgaaacacgaaaataatttcgtaataataacgccgacttaactaatctcataccaacttataaacgacaattacaaaaaaaacataattacacgttattctaacgcgaaatacgtccgccgtcgctattaattatctacgtaacgctaaacctaacgataacctaccgtataacgttaaacaatatcaacgatcgcataaaaaaaaacttaaaccaacaaaaccgtaaatttataacgaaccatcgacgttacgcaattcacgcgaaatacccaaacgtaactaaaaaaacgcaaaaacgcgacctaaaaatcgacaaacaactaactttcgccacaataacctttacaaacgacacaccgcaactaacgaacgtcaaaacgataaataatatctacccgatatataacgatctacaaactaatccccctaacctaaaaccgcaaacgaacaacgtattactaaccccacgcctaataacactacttaacctaaaaacgaacgacaccattaacgtaaacgataccaccttacgaattaccgaaaaaataattcaaaaaccgaattccgattttaaccccttccaaatacgtccgcgtctaataataaatctaacgaatatcgataaaaccgaaaccgtacaaccgaaaaatcgaatcacctaacgttataaattcgacgacaacgaaaacc

SEQ ID NO: 11219 - DNA, 803 bp, Artificial Sequence
  chemically treated genomic DNA (Homo sapiens) CpG-island No: 11219
ggttgatttcgtacgcggaaattttgaagaaagtttttcgttcgacgtcgtggttggtatttatatgtatcgacgtatcgacgtattgattgattttttgtcggaagttcgcgaagtacgggagtggtttcgtagtgataacgtcgatttgattgattttatgttaatttgtgaacggtagttgtagaggaagtatgattgtacgttgttttggcgcgaaatgcgttcgtcgtcgttattaattgtttgcgtggcgttaagtttggcggtggtttgtcgtgtggcgttgggtaatattagcgatcgtatggagaagggtttaagttagtaaagtcgtgagtttatggcgggttatcggcgttgcgtagtttacgcgaagtgtttaagcgtggttggaggaacgtaaaagcgcggtttgaaagtcggtaagtagttgattttcgttataatgatttttgtaggcgatatatcgtagttggcgaacgttaaagcggtggatgatatttattcgatgtatggcgatttgtaaattaatttttttggtttgaaatcgtaggcgggtagcgtattgttggttttacgtttgatggtattgtttaatttgaaaacgggcgatattattgacgtgggcgatgttattttgcggattgtcggagaagtgatttaggaatcggatttcggttttaattttttttagatgcgttcgcgtttgatgatgaatttggcggatgtcgataaaatcggagtcgtgtagtcggggagtcgggttatttggcgttataaattcggcggtaacgagaatt

SEQ ID NO: 11220 - DNA, 803 bp, Artificial Sequence
  chemically treated genomic DNA (Homo sapiens) CpG-island No: 11220
aattctcgttaccgccgaatttataacgccaaataacccgactccccgactacacgactccgattttatcgacatccgccaaattcatcatcaaacgcgaacgcatctaaaaaaaattaaaaccgaaatccgattcctaaatcacttctccgacaatccgcaaaataacatcgcccacgtcaataatatcgcccgttttcaaattaaacaataccatcaaacgtaaaaccaacaatacgctacccgcctacgatttcaaaccaaaaaaattaatttacaaatcgccatacatcgaataaatatcatccaccgctttaacgttcgccaactacgatatatcgcctacaaaaatcattataacgaaaatcaactacttaccgactttcaaaccgcgcttttacgttcctccaaccacgcttaaacacttcgcgtaaactacgcaacgccgataacccgccataaactcacgactttactaacttaaacccttctccatacgatcgctaatattacccaacgccacacgacaaaccaccgccaaacttaacgccacgcaaacaattaataacgacgacgaacgcatttcgcgccaaaacaacgtacaatcatacttcctctacaactaccgttcacaaattaacataaaatcaatcaaatcgacgttatcactacgaaaccactcccgtacttcgcgaacttccgacaaaaaatcaatcaatacgtcgatacgtcgatacatataaataccaaccacgacgtcgaacgaaaaactttcttcaaaatttccgcgtacgaaatcaacc

SEQ ID NO: 11221 - DNA, 764 bp, Artificial Sequence
  chemically treated genomic DNA (Homo sapiens) CpG-island No: 11221
ggttgcggataggggtcgggggcgcgttcgggtcggtgtcgcgtggtgggagtagtaggcgcgtaggtaggcggggagttttcgcgtatcgtagttcgcgggtgattattatgcggcggtagttgttttttgcgcggtgacggcgtttttaattgattttattatttttttttcgtaaggtgaagtgcggtcgttcgcgggttcgggcgcgcgagaggcggttggtagtcgcgggtcggcgggggtagcgttcggtttcggggtggtattatcgtcgggcgtcgtttaacgaacgtaggcggcgggaggttcggcggcggggttcgcgtttttgtatcgcgatcggttagaaaatatttcggggttgggcggcgtttcggagacgtatttttttgttatttttatcgtttttggtaacgattattaatgttattatgttttatttttttttattttttttcgtttttagagtcgcgttcgcgcgttcgatttttaggcgtttcgttttttttggaattaataataatgatttttaattaattttttgttagggttgtttgttcgtgaatggggcgttttttcggttcgcgggcggtaggcgttttagttcgggcggggggttagttttcgttttttcggtcggattcgcgggggttcgtaattcgttcgggcgtcggttgggggtggtttcgtagttttttcggtttttttttaggatgaaattcgttttttttggaggagagagggtagagacggttcgagaa

SEQ ID NO: 11222 - DNA, 764 bp, Artificial Sequence
  chemically treated genomic DNA (Homo sapiens) CpG-island No: 11222
ttctcgaaccgtctctaccctctctcctccaaaaaaaacgaatttcatcctaaaaaaaaaccgaaaaaactacgaaaccacccccaaccgacgcccgaacgaattacgaacccccgcgaatccgaccgaaaaaacgaaaactaaccccccgcccgaactaaaacgcctaccgcccgcgaaccgaaaaaacgccccattcacgaacaaacaaccctaacaaaaaattaattaaaaatcattattattaattccaaaaaaaacgaaacgcctaaaaatcgaacgcgcgaacgcgactctaaaaacgaaaaaaaataaaaaaaaataaaacataataacattaataatcgttaccaaaaacgataaaaataacaaaaaaatacgtctccgaaacgccgcccaaccccgaaatattttctaaccgatcgcgatacaaaaacgcgaaccccgccgccgaacctcccgccgcctacgttcgttaaacgacgcccgacgataataccaccccgaaaccgaacgctacccccgccgacccgcgactaccaaccgcctctcgcgcgcccgaacccgcgaacgaccgcacttcaccttacgaaaaaaaaataataaaatcaattaaaaacgccgtcaccgcgcaaaaaacaactaccgccgcataataatcacccgcgaactacgatacgcgaaaactccccgcctacctacgcgcctactactcccaccacgcgacaccgacccgaacgcgcccccgacccctatccgcaacc

SEQ ID NO: 11223 - DNA, 764 bp, Artificial Sequence
  chemically treated genomic DNA (Homo sapiens) CpG-island No: 11223
ttttcggatcgtttttgtttttttttttttagagagggcgagttttattttggagggaggtcgggggagttgcgaggttatttttagtcggcgttcgggcggattgcgagttttcgcgggttcggtcgggggagcggagattggtttttcgttcgggttggggcgtttgtcgttcgcgagtcggaagagcgttttatttacgagtaggtagttttggtagagggttaattgaggattattgttgttggttttaggaggagcgaagcgtttggagatcgggcgcgcgggcgcggttttgggagcgggggaaggtgaggggaaatgggatatgatggtattaataatcgttattaaagacggtgggagtaataaaggaatgcgttttcgagacgtcgtttagtttcggggtgttttttggtcggtcgcggtgtaggaacgcgagtttcgtcgtcgagtttttcgtcgtttgcgttcgttgggcggcgttcggcggtagtgttatttcgaggtcgagcgttgttttcgtcggttcgcggttgttagtcgtttttcgcgcgttcgggttcgcgagcggtcgtattttattttacggaggggagataatgagattaattagaggcgtcgttatcgcgtaggagatagttgtcgtcgtatagtaattattcgcgggttgcggtgcgcgggggtttttcgtttatttgcgcgtttgttgtttttattacgcggtatcgattcgggcgcgttttcggtttttgttcgtagtt

SEQ ID NO: 11224 - DNA, 764 bp, Artificial Sequence
  chemically treated genomic DNA (Homo sapiens) CpG-island No: 11224
aactacgaacaaaaaccgaaaacgcgcccgaatcgataccgcgtaataaaaacaacaaacgcgcaaataaacgaaaaacccccgcgcaccgcaacccgcgaataattactatacgacgacaactatctcctacgcgataacgacgcctctaattaatctcattatctcccctccgtaaaataaaatacgaccgctcgcgaacccgaacgcgcgaaaaacgactaacaaccgcgaaccgacgaaaacaacgctcgacctcgaaataacactaccgccgaacgccgcccaacgaacgcaaacgacgaaaaactcgacgacgaaactcgcgttcctacaccgcgaccgaccaaaaaacaccccgaaactaaacgacgtctcgaaaacgcattcctttattactcccaccgtctttaataacgattattaataccatcatatcccatttcccctcaccttcccccgctcccaaaaccgcgcccgcgcgcccgatctccaaacgcttcgctcctcctaaaaccaacaacaataatcctcaattaaccctctaccaaaactacctactcgtaaataaaacgctcttccgactcgcgaacgacaaacgccccaacccgaacgaaaaaccaatctccgctcccccgaccgaacccgcgaaaactcgcaatccgcccgaacgccgactaaaaataacctcgcaactcccccgacctccctccaaaataaaactcgccctctctaaaaaaaaaaaaacaaaaacgatccgaaaa

SEQ ID NO: 11225 - DNA, 501 bp, Artificial Sequence
  chemically treated genomic DNA (Homo sapiens) CpG-island No: 11225
tgtttcgtcgttgttagagtttttgttaggtttgcgcgcgttgtgcgacgaatttggcgcgttgttgattatcgatgaagtgatgatcggttttcgcgtagcgttagttggcgtataggattattacggcgtagtgttagatttaatttgtttcggtaaaattatcggcggtggaatgtcggtaggcgtattcggtggtcgtcgtgatgtaatggatgcgttggcgtcgacgggttcggtttattaggcgggtacgtttttcggtaattcgattgcgatggtagcgggtttcgtttgtttgaatgaagtcgcgtagtcgggcgtttacgaaacgttggatgagttgataagacgtttggtagaaagtttgttggaagcggttgaagaagtcggaatttcgttggtcgtttattacgttggcggtttgttcggtattttttttatcgatatcgagttcgtgacgtgttattaagatgtgatgagttgtgacgtggaacgttt

SEQ ID NO: 11226 - DNA, 501 bp, Artificial Sequence
  chemically treated genomic DNA (Homo sapiens) CpG-island No: 11226
aaacgttccacgtcacaactcatcacatcttaataacacgtcacgaactcgatatcgataaaaaaaataccgaacaaaccgccaacgtaataaacgaccaacgaaattccgacttcttcaaccgcttccaacaaactttctaccaaacgtcttatcaactcatccaacgtttcgtaaacgcccgactacgcgacttcattcaaacaaacgaaacccgctaccatcgcaatcgaattaccgaaaaacgtacccgcctaataaaccgaacccgtcgacgccaacgcatccattacatcacgacgaccaccgaatacgcctaccgacattccaccgccgataattttaccgaaacaaattaaatctaacactacgccgtaataatcctatacgccaactaacgctacgcgaaaaccgatcatcacttcatcgataatcaacaacgcgccaaattcgtcgcacaacgcgcgcaaacctaacaaaaactctaacaacgacgaaaca

SEQ ID NO: 11227 - DNA, 501 bp, Artificial Sequence
  chemically treated genomic DNA (Homo sapiens) CpG-island No: 11227
aagcgttttacgttatagtttattatattttgataatacgttacggattcggtgtcggtaaagaaaatgtcgaataggtcgttaacgtgataaacgattagcggagtttcggtttttttagtcgtttttagtagattttttgttagacgttttgttagtttatttagcgtttcgtgaacgttcggttgcgcgattttatttagataggcgaagttcgttgttatcgtaatcgggttatcggaaagcgtattcgtttgatagatcggattcgtcggcgttagcgtatttattatattacgacgattatcgaatgcgtttatcggtattttatcgtcgatgattttgtcgaggtaggttaaatttggtattacgtcgtaataattttgtgcgttagttagcgttacgcggaaatcggttattattttatcgatgattagtaacgcgttaaattcgtcgtatagcgcgcgtagatttggtaggaattttggtagcggcggaata

SEQ ID NO: 11228 - DNA, 501 bp, Artificial Sequence
  chemically treated genomic DNA (Homo sapiens) CpG-island No: 11228
tattccgccgctaccaaaattcctaccaaatctacgcgcgctatacgacgaatttaacgcgttactaatcatcgataaaataataaccgatttccgcgtaacgctaactaacgcacaaaattattacgacgtaataccaaatttaacctacctcgacaaaatcatcgacgataaaataccgataaacgcattcgataatcgtcgtaatataataaatacgctaacgccgacgaatccgatctatcaaacgaatacgctttccgataacccgattacgataacaacgaacttcgcctatctaaataaaatcgcgcaaccgaacgttcacgaaacgctaaataaactaacaaaacgtctaacaaaaaatctactaaaaacgactaaaaaaaccgaaactccgctaatcgtttatcacgttaacgacctattcgacattttctttaccgacaccgaatccgtaacgtattatcaaaatataataaactataacgtaaaacgctt

SEQ ID NO: 11229 - DNA, 848 bp, Artificial Sequence
  chemically treated genomic DNA (Homo sapiens) CpG-island No: 11229
  unsure (62, 341, 346..)
tggtggtcggtagtacgttataggagatgttcgacgcgggttattagtaggtagggcggtgnttttttgtgtttttgtattcgtaaacgtatgaagagtatgcgttggtacgtatcgaacggaaattcggtttcggttatatcggttttatttgttatgtcgtatcggatgttacgttggaagatgattttaagcgtcgcgttttgattattaatgcgttggtttaggacgataacggcgagattatcgattcgtataacggtttgggcgatttgtaaaatcgtttgttgcgttatgtttttttcgtttttggcgaagattcgttacgcgtattgcgttgngcgtnntttgttgcgcgttatgtttatttcggttttcgtattgtcgatgaaattttggcgttgatgcgcgagatgatttatgcgggtgaattggaatatttgacgtttgaacgggtatggaaagagacggaaagcgtttttattattcgtaatttataggtgtttttttaggtattgcgcgattgcggcgtattgcgtgtttattttcggaaattgacgtattgtttggcgtttcggtttttgttaagtggtattcggaaatcgatacgggtatttatattttaatgacgtttttaatggcggcgatgttgagttcgtagtcgatgttcgtttcgtaattttatgttacgatttcggtaaagggttgacgtcgttagaattttggtcgcgttattatggttatggttcggcgggtgttaagttagtggaataattatgttagcgtttgcgcgtgttaaatgaaattcgcgatttagttagattggtggttgagttttacgattttat

SEQ ID NO: 11230 - DNA, 848 bp, Artificial Sequence
  chemically treated genomic DNA (Homo sapiens) CpG-island No: 11230
  unsure (502..503, 508, 787)
ataaaatcgtaaaactcaaccaccaatctaactaaatcgcgaatttcatttaacacgcgcaaacgctaacataattattccactaacttaacacccgccgaaccataaccataataacgcgaccaaaattctaacgacgtcaaccctttaccgaaatcgtaacataaaattacgaaacgaacatcgactacgaactcaacatcgccgccattaaaaacgtcattaaaatataaatacccgtatcgatttccgaataccacttaacaaaaaccgaaacgccaaacaatacgtcaatttccgaaaataaacacgcaatacgccgcaatcgcgcaatacctaaaaaaacacctataaattacgaataataaaaacgctttccgtctctttccatacccgttcaaacgtcaaatattccaattcacccgcataaatcatctcgcgcatcaacgccaaaatttcatcgacaatacgaaaaccgaaataaacataacgcgcaacaaannacgcncaacgcaatacgcgtaacgaatcttcgccaaaaacgaaaaaaacataacgcaacaaacgattttacaaatcgcccaaaccgttatacgaatcgataatctcgccgttatcgtcctaaaccaacgcattaataatcaaaacgcgacgcttaaaatcatcttccaacgtaacatccgatacgacataacaaataaaaccgatataaccgaaaccgaatttccgttcgatacgtaccaacgcatactcttcatacgtttacgaatacaaaaacacaaaaaancaccgccctacctactaataacccgcgtcgaacatctcctataacgtactaccgaccacca

SEQ ID NO: 11231 - DNA, 848 bp, Artificial Sequence
  chemically treated genomic DNA (Homo sapiens) CpG-island No: 11231
  unsure (502..503, 508, 787)
atgagatcgtgaaatttagttattagtttggttaaatcgcgaattttatttggtacgcgtagacgttggtatagttgttttattaatttaatattcgtcgggttatgattatgatgacgcggttagagttttggcggcgttagttttttatcgagatcgtggtataaagttgcgaaacggatatcgattgcggatttagtatcgtcgttattgagagcgttattaaggtatgaatattcgtatcgattttcggatgttatttggtaggggtcggaacgttaaatagtgcgttaattttcgggaataaatacgtagtgcgtcgtaatcgcgtagtatttggaagaatatttgtggattgcgggtggtgagggcgtttttcgtttttttttatattcgtttaggcgttaggtgttttagtttattcgtatgggttatttcgcgtattaacgttagagttttatcggtaatacgaaaatcgaggtgggtataacgcgtagtaaannacgtntagcgtaatacgcgtaacggattttcgttaaaagcgggggaaatatggcgtaatagacgattttgtagatcgtttagatcgttgtacgggtcgataatttcgtcgttatcgttttgggttagcgtattaatggttagaacgcgacgtttaagattattttttagcgtgatattcggtgcggtatagtaagtaaaatcggtgtaatcggaatcggattttcgttcggtacgtgttagcgtatattttttatgcgtttgcggatgtagaaatataggaaantatcgttttatttgttggtagttcgcgtcgagtattttttgtggcgtattgtcgattatta

SEQ ID NO: 11232 - DNA, 848 bp, Artificial Sequence
  chemically treated genomic DNA (Homo sapiens) CpG-island No: 11232
  unsure (62, 341, 346..)
taataatcgacaatacgccacaaaaaatactcgacgcgaactaccaacaaataaaacgatantttcctatatttctacatccgcaaacgcataaaaaatatacgctaacacgtaccgaacgaaaatccgattccgattacaccgattttacttactataccgcaccgaatatcacgctaaaaaataatcttaaacgtcgcgttctaaccattaatacgctaacccaaaacgataacgacgaaattatcgacccgtacaacgatctaaacgatctacaaaatcgtctattacgccatatttcccccgcttttaacgaaaatccgttacgcgtattacgctanacgtnntttactacgcgttatacccacctcgattttcgtattaccgataaaactctaacgttaatacgcgaaataacccatacgaataaactaaaacacctaacgcctaaacgaatataaaaaaaaacgaaaaacgccctcaccacccgcaatccacaaatattcttccaaatactacgcgattacgacgcactacgtatttattcccgaaaattaacgcactatttaacgttccgacccctaccaaataacatccgaaaatcgatacgaatattcataccttaataacgctctcaataacgacgatactaaatccgcaatcgatatccgtttcgcaactttataccacgatctcgataaaaaactaacgccgccaaaactctaaccgcgtcatcataatcataacccgacgaatattaaattaataaaacaactataccaacgtctacgcgtaccaaataaaattcgcgatttaaccaaactaataactaaatttcacgatctcat

SEQ ID NO: 11233 - DNA, 780 bp, Artificial Sequence
  chemically treated genomic DNA (Homo sapiens) CpG-island No: 11233
  unsure (744, 756)
gttggtagcgcgtcgtggatatggcggcgtattgggtgtcgacgcgttgattttcgtcgatttcgttatgttggagtacgtcgtcgaggttattcgtatattgagcgttacgtatcggtgtaggtttcggcgattaatgaagaggcgattaatttttattatcgtattttgacgttgttcgcgtggtgttgtcgcgcgtgttgtcgagttattaggtgaaataattggtacgggttatatttgtattattggaagtttttgttttcggtagtttgtgtattatgtcggaaggtcgttgttatttgtcgtcgtatttgacgggtgagtcgtttaatattatatgcgcgtgtttttcggttcgtttcgtgcgttggtaataaacgtcgtaggggttggaatttcgtttgaacgaagtgttgatcgatcgttattaggacggcgaaaacgtaggttattcgacgttatgtaaagggcgttatttggtggacggcgagcgttattacgcgttggaagaattaattagttttaatattttggaattgttgtcggagttaatggcggcgaatattgtttcggtgaaaattgaaggtcgttagcgtagttcggcgtatgttagttaggtggcgaaagtttggcgttaggttatcgatcgttgtaaggtcgattcgtaaaattttgtatcgtaaaacgcgtggatggagacgttgggtcgatgttcgaaggtacgtaaaatatttttggcgnttattatcgtanatggtagtgagaaaagtaatgaaa

SEQ ID NO: 11234 - DNA, 780 bp, Artificial Sequence
  chemically treated genomic DNA (Homo sapiens) CpG-island No: 11234
  unsure (25, 37)
tttcattacttttctcactaccatntacgataataancgccaaaaatattttacgtaccttcgaacatcgacccaacgtctccatccacgcgttttacgatacaaaattttacgaatcgaccttacaacgatcgataacctaacgccaaactttcgccacctaactaacatacgccgaactacgctaacgaccttcaattttcaccgaaacaatattcgccgccattaactccgacaacaattccaaaatattaaaactaattaattcttccaacgcgtaataacgctcgccgtccaccaaataacgccctttacataacgtcgaataacctacgttttcgccgtcctaataacgatcgatcaacacttcgttcaaacgaaattccaacccctacgacgtttattaccaacgcacgaaacgaaccgaaaaacacgcgcatataatattaaacgactcacccgtcaaatacgacgacaaataacaacgaccttccgacataatacacaaactaccgaaaacaaaaacttccaataatacaaatataacccgtaccaattatttcacctaataactcgacaacacgcgcgacaacaccacgcgaacaacgtcaaaatacgataataaaaattaatcgcctcttcattaatcgccgaaacctacaccgatacgtaacgctcaatatacgaataacctcgacgacgtactccaacataacgaaatcgacgaaaatcaacgcgtcgacacccaatacgccgccatatccacgacgcgctaccaac

SEQ ID NO: 11235 - DNA, 780 bp, Artificial Sequence
  chemically treated genomic DNA (Homo sapiens) CpG-island No: 11235
  unsure (25, 37)
ttttattgttttttttattgttatntacggtgatagncgttaagagtgttttgcgtgttttcggatatcgatttagcgtttttatttacgcgttttgcggtataaagttttgcggatcggttttataacggtcgatagtttgacgttagattttcgttatttggttgatatacgtcgggttacgttggcggtttttaatttttatcgaagtaatattcgtcgttattaatttcggtagtagttttagggtattgagattggttggtttttttagcgcgtgatagcgttcgtcgtttattagataacgttttttatatagcgtcggataatttgcgttttcgtcgttttgataacggtcgattagtatttcgtttaggcgggattttagtttttgcggcgtttgttgttagcgtacgaaacgggtcggagaatacgcgtatatggtgttgggcgatttattcgttagatacgacgatagatagtaacgatttttcgatataatgtataggttgtcgaaagtaaagatttttagtggtataggtgtgattcgtgttagttgttttatttgatgattcgataatacgcgcggtagtattacgcgagtaacgttaaaatgcgatgataaaggttaatcgtttttttattggtcgtcgaagtttgtatcgatacgtggcgtttaatatgcggataatttcggcggcgtattttagtatggcgaggtcggcgaggattagcgcgtcggtatttagtgcgtcgttatatttacggcgcgttgttaat

SEQ ID NO: 11236 - DNA, 780 bp, Artificial Sequence
  chemically treated genomic DNA (Homo sapiens) CpG-island No: 11236
  unsure (744, 756)
attaacaacgcgccgtaaatataacgacgcactaaataccgacgcgctaatcctcgccgacctcgccatactaaaatacgccgccgaaattatccgcatattaaacgccacgtatcgatacaaacttcgacgaccaataaaaaaacgattaacctttatcatcgcattttaacgttactcgcgtaatactaccgcgcgtattatcgaatcatcaaataaaacaactaacacgaatcacacctataccactaaaaatctttactttcgacaacctatacattatatcgaaaaatcgttactatctatcgtcgtatctaacgaataaatcgcccaacaccatatacgcgtattctccgacccgtttcgtacgctaacaacaaacgccgcaaaaactaaaatcccgcctaaacgaaatactaatcgaccgttatcaaaacgacgaaaacgcaaattatccgacgctatataaaaaacgttatctaataaacgacgaacgctatcacgcgctaaaaaaaccaaccaatctcaataccctaaaactactaccgaaattaataacgacgaatattacttcgataaaaattaaaaaccgccaacgtaacccgacgtatatcaaccaaataacgaaaatctaacgtcaaactatcgaccgttataaaaccgatccgcaaaactttataccgcaaaacgcgtaaataaaaacgctaaatcgatatccgaaaacacgcaaaacactcttaacgnctatcaccgtanataacaataaaaaaaacaataaaa

SEQ ID NO: 11237 - DNA, 634 bp, Artificial Sequence
  chemically treated genomic DNA (Homo sapiens) CpG-island No: 11237
gttggcgagggtggtaattagtattaacgttagggtgtaattttcgggaattttaaagtgtagcgttacgttcgtaatgattaattcgattacggtttttacggagcgatttataatttttagacgggttgcgttatagttattttgtgttattagtaatatcgttattaggatttagtacgatttcggtagatgtagcgcggtgtttattaggttggtaacgtttaatattatattgagtcgttcggtaattgcgtaggcgtcggagattttagtgatagataattttttagcgtcggaagtaatggtattcgtcgttgtttatcggttagtaagttacgggtatagagcggtttttgggtgcgtagtacgtaggcgatgcggttgaaatgttagtagtagaattgtttaatcggattattcggatgttggcgggcgattttttttagtgcgttaatttgtttttttatcgtaaaacgcgttggtaggcgatggtaaagaatgttattagttagtacgcgtaggcgagcggcgacggtttgcgtattttagcggataatttttttcgtatggttacgttcgattagtttttgtatttttttcggttgatgtaaattgatcgaaatatgttttt

SEQ ID NO: 11238 - DNA, 634 bp, Artificial Sequence
  chemically treated genomic DNA (Homo sapiens) CpG-island No: 11238
aaaaacatatttcgatcaatttacatcaaccgaaaaaaatacaaaaactaatcgaacgtaaccatacgaaaaaaattatccgctaaaatacgcaaaccgtcgccgctcgcctacgcgtactaactaataacattctttaccatcgcctaccaacgcgttttacgataaaaaaacaaattaacgcactaaaaaaaatcgcccgccaacatccgaataatccgattaaacaattctactactaacatttcaaccgcatcgcctacgtactacgcacccaaaaaccgctctatacccgtaacttactaaccgataaacaacgacgaataccattacttccgacgctaaaaaattatctatcactaaaatctccgacgcctacgcaattaccgaacgactcaatataatattaaacgttaccaacctaataaacaccgcgctacatctaccgaaatcgtactaaatcctaataacgatattactaataacacaaaataactataacgcaacccgtctaaaaattataaatcgctccgtaaaaaccgtaatcgaattaatcattacgaacgtaacgctacactttaaaattcccgaaaattacaccctaacgttaatactaattaccaccctcgccaac

SEQ ID NO: 11239 - DNA, 634 bp, Artificial Sequence
  chemically treated genomic DNA (Homo sapiens) CpG-island No: 11239
aggaatatatttcggttagtttgtattagtcggaagaagtgtaaaagttggtcgagcgtagttatgcggaagaagttattcgttggaatgcgtaaatcgtcgtcgttcgtttgcgcgtgttggttgatgatattttttattatcgtttgttaacgcgttttacgatggaaaagtaaattggcgtattggaaaaaatcgttcgttagtattcggataattcggttgggtaattttgttattggtattttagtcgtatcgtttgcgtgttgcgtatttaaaaatcgttttatgttcgtgatttattggtcgataaatagcggcgaatgttattattttcggcgttgaaaagttatttgttattaaagttttcggcgtttacgtaattgtcggacgatttagtgtgatgttaagcgttgttagtttgatgggtatcgcgttgtatttgtcgaagtcgtattggattttgatgacggtattgttggtgatataaaatggttatggcgtaattcgtttgaggattgtgaatcgtttcgtgggaatcgtggtcgggttaattattgcgggcgtggcgttgtattttaaaattttcgaaggttatattttgacgttgatgttgattattattttcgttagt

SEQ ID NO: 11240 - DNA, 634 bp, Artificial Sequence
  chemically treated genomic DNA (Homo sapiens) CpG-island No: 11240
actaacgaaaataataatcaacatcaacgtcaaaatataaccttcgaaaattttaaaatacaacgccacgcccgcaataattaacccgaccacgattcccacgaaacgattcacaatcctcaaacgaattacgccataaccattttatatcaccaacaataccgtcatcaaaatccaatacgacttcgacaaatacaacgcgatacccatcaaactaacaacgcttaacatcacactaaatcgtccgacaattacgtaaacgccgaaaactttaataacaaataacttttcaacgccgaaaataataacattcgccgctatttatcgaccaataaatcacgaacataaaacgatttttaaatacgcaacacgcaaacgatacgactaaaataccaataacaaaattacccaaccgaattatccgaatactaacgaacgattttttccaatacgccaatttacttttccatcgtaaaacgcgttaacaaacgataataaaaaatatcatcaaccaacacgcgcaaacgaacgacgacgatttacgcattccaacgaataacttcttccgcataactacgctcgaccaacttttacacttcttccgactaatacaaactaaccgaaatatattcct

SEQ ID NO: 11241 - DNA, 708 bp, Artificial Sequence
  chemically treated genomic DNA (Homo sapiens) CpG-island No: 11241
  unsure (657)
agttagcgcgtcgttggcgttgaatatttttatttagtcgttatcgataatggttagttttcgggtatttgtttcgttgatttagataatcggtttatcgcgagagagcgttagtattagtaggtttttattgtaggttgagtgaatgttttatttttggtgcggcgttaggaagttaagtgtttttttcgggaagtcgtttggcggtatttggcgtattttattgacgttacgggtgtcgataggcgggcgataagttattaggtttttattaaaagtacgtatttacggatgattttgatagagttgttggcgtttcgatagcgtgcgttacggaattaatttatgaacgttggtgtatttcgcgttataggagacgtgatcgttttttagatcggattaggtggggttggagataattttacgcggttgcgtttgaatatcgcgaaagcgaattttttcgttttttttgtgtagcgttagatgggtatgttcgcgttcggtgatttcgtttagcgtttgttacgttttgattgtaatatgatcgttggttttcggtgttagtgttagaattatttttgaagcgttaatggcggtgttaattagcggacgtttttgtgtcgggttattacgtttggtgtaattgagtttgtttangaaatcgattttattttgggtattttacgaaattttttatcgttattgtta

SEQ ID NO: 11242 - DNA, 708 bp, Artificial Sequence
  chemically treated genomic DNA (Homo sapiens) CpG-island No: 11242
  unsure (52)
taacaataacgataaaaaatttcgtaaaatacccaaaataaaatcgatttcntaaacaaactcaattacaccaaacgtaataacccgacacaaaaacgtccgctaattaacaccgccattaacgcttcaaaaataattctaacactaacaccgaaaaccaacgatcatattacaatcaaaacgtaacaaacgctaaacgaaatcaccgaacgcgaacatacccatctaacgctacacaaaaaaaacgaaaaaattcgctttcgcgatattcaaacgcaaccgcgtaaaattatctccaaccccacctaatccgatctaaaaaacgatcacgtctcctataacgcgaaatacaccaacgttcataaattaattccgtaacgcacgctatcgaaacgccaacaactctatcaaaatcatccgtaaatacgtacttttaataaaaacctaataacttatcgcccgcctatcgacacccgtaacgtcaataaaatacgccaaataccgccaaacgacttcccgaaaaaaacacttaacttcctaacgccgcaccaaaaataaaacattcactcaacctacaataaaaacctactaatactaacgctctctcgcgataaaccgattatctaaatcaacgaaacaaatacccgaaaactaaccattatcgataacgactaaataaaaatattcaacgccaacgacgcgctaact

SEQ ID NO: 11243 - DNA, 708 bp, Artificial Sequence
  chemically treated genomic DNA (Homo sapiens) CpG-island No: 11243
  unsure (52)
tggtaatggcggtaaaggatttcgtggaatatttaggatgaaatcgattttntgggtaaatttaattatattaagcgtgatggttcggtataggggcgttcgttgattgatatcgttattgacgttttagaagtgattttggtattggtatcggaaattaacggttatgttgtagttaaagcgtggtaggcgttgggcgagattatcgggcgcgaatatatttatttggcgttgtataaagaggacgagaagattcgttttcgcgatatttaggcgtagtcgcgtaaaattatttttagttttatttggttcggtttggaaagcgattacgttttttataacgcgggatatattaacgtttatgagttaatttcgtggcgtacgttgtcgggacgttagtagttttattaggattattcgtggatgcgtgtttttggtgaaagtttggtggtttatcgttcgtttatcgatattcgtagcgttagtgagatgcgttagatatcgttaaacggtttttcggaaaaagtatttaattttttgacgtcgtattagaaatggggtatttatttaatttatagtgaaaatttgttaatgttgacgttttttcgcggtggatcgattgtttggattagcgaaatagatgttcgagaattgattattgtcgataacgattgggtggaagtatttaacgttaacggcgcgttgatt

SEQ ID NO: 11244 - DNA, 708 bp, Artificial Sequence
  chemically treated genomic DNA (Homo sapiens) CpG-island No: 11244
  unsure (657)
aatcaacgcgccgttaacgttaaatacttccacccaatcgttatcgacaataatcaattctcgaacatctatttcgctaatccaaacaatcgatccaccgcgaaaaaacgtcaacattaacaaattttcactataaattaaataaataccccatttctaatacgacgtcaaaaaattaaatactttttccgaaaaaccgtttaacgatatctaacgcatctcactaacgctacgaatatcgataaacgaacgataaaccaccaaactttcaccaaaaacacgcatccacgaataatcctaataaaactactaacgtcccgacaacgtacgccacgaaattaactcataaacgttaatatatcccgcgttataaaaaacgtaatcgctttccaaaccgaaccaaataaaactaaaaataattttacgcgactacgcctaaatatcgcgaaaacgaatcttctcgtcctctttatacaacgccaaataaatatattcgcgcccgataatctcgcccaacgcctaccacgctttaactacaacataaccgttaatttccgataccaataccaaaatcacttctaaaacgtcaataacgatatcaatcaacgaacgcccctataccgaaccatcacgcttaatataattaaatttacccanaaaatcgatttcatcctaaatattccacgaaatcctttaccgccattacca

SEQ ID NO: 11245 - DNA, 530 bp, Artificial Sequence
  chemically treated genomic DNA (Homo sapiens) CpG-island No: 11245
  unsure (394)
ttattatgcgcgtggtcgatattatgttggcgttgtaagtttgttgttggcgttggtgttggtggtaattttcggttcgtcgattggtaacgtcgcgttggtattgattttcgttgttttgtcgtattatgtgttttaattcgcgtcgtcgtgttggtggaagttaatcgcgattacgttatcgcgtttcgttggcgggtgtcggggcgatgcgttagatgtttattaatattttttcgaattgttttgcgtcgttgattgtttaggcgtcgttcggtttttttaacgttattttcgatatggttgtttttggttttttcggtatgggggtatagcgttaacgtttgagtggggtattatgtttttcgacgtgttgtagttcgcgtaaagtttntgggtgggtcgtgattttttcgggtttggcgattttgttgacggtgttggtatttaatttgatgggtgacggtttgcgtgacgcgttcgattttaaattgaagtagtaagaggttcgagatggcgttattaaatgt

SEQ ID NO: 11246 - DNA, 530 bp, Artificial Sequence
  chemically treated genomic DNA (Homo sapiens) CpG-island No: 11246
  unsure (137)
acatttaataacgccatctcgaacctcttactacttcaatttaaaatcgaacgcgtcacgcaaaccgtcacccatcaaattaaataccaacaccgtcaacaaaatcgccaaacccgaaaaaatcacgacccacccanaaactttacgcgaactacaacacgtcgaaaaacataataccccactcaaacgttaacgctatacccccataccgaaaaaaccaaaaacaaccatatcgaaaataacgttaaaaaaaccgaacgacgcctaaacaatcaacgacgcaaaacaattcgaaaaaatattaataaacatctaacgcatcgccccgacacccgccaacgaaacgcgataacgtaatcgcgattaacttccaccaacacgacgacgcgaattaaaacacataatacgacaaaacaacgaaaatcaataccaacgcgacgttaccaatcgacgaaccgaaaattaccaccaacaccaacgccaacaacaaacttacaacgccaacataatatcgaccacgcgcataataa

SEQ ID NO: 11247 - DNA, 530 bp, Artificial Sequence
  chemically treated genomic DNA (Homo sapiens) CpG-island No: 11247
  unsure (137)
atatttaataacgttatttcgaattttttattgttttagtttgggatcgagcgcgttacgtagatcgttatttattaggttaaatgttagtatcgttagtaggatcgttagattcgggaaggttacgatttatttangggttttgcgcgaattgtaatacgtcggagagtatggtgttttatttaggcgttggcgttgtgtttttatgtcgaggaaattaagagtagttatatcgagaatggcgttagagaaatcgagcgacgtttgaataattagcggcgtaaggtagttcgggaagatgttaataaatatttgacgtatcgtttcggtattcgttagcgagacgcggtgacgtaatcgcggttaatttttattagtacggcggcgcgggttaaggtatatagtgcggtaaggtaacgaaggttagtgttagcgcggcgttattaatcgacgggtcgaaaattgttattagtattagcgttagtagtagatttgtagcgttagtatgatatcgattacgcgtataatga

SEQ ID NO: 11248 - DNA, 530 bp, Artificial Sequence
  chemically treated genomic DNA (Homo sapiens) CpG-island No: 11248
  unsure (394)
tcattatacgcgtaatcgatatcatactaacgctacaaatctactactaacgctaatactaataacaattttcgacccgtcgattaataacgccgcgctaacactaaccttcgttaccttaccgcactatataccttaacccgcgccgccgtactaataaaaattaaccgcgattacgtcaccgcgtctcgctaacgaataccgaaacgatacgtcaaatatttattaacatcttcccgaactaccttacgccgctaattattcaaacgtcgctcgatttctctaacgccattctcgatataactactcttaatttcctcgacataaaaacacaacgccaacgcctaaataaaacaccatactctccgacgtattacaattcgcgcaaaacccntaaataaatcgtaaccttcccgaatctaacgatcctactaacgatactaacatttaacctaataaataacgatctacgtaacgcgctcgatcccaaactaaaacaataaaaaattcgaaataacgttattaaatat

SEQ ID NO: 11249 - DNA, 880 bp, Artificial Sequence
  chemically treated genomic DNA (Homo sapiens) CpG-island No: 11249
gtcgttagtattttcgttagcgttcgcgagacgtcgagggatttattttgaaacgcggcgtaatcgttagtgcgtgttcgaatttgtgaggggacgcgtttaattatttttacgtttagcgtaggaaagataagcgaatattcggtttcggttaacgtcgcgttcgttaatgcgatttatgtatttggggtttgtagagtagtaataagtttatcgtttttataagtagagagataatcgttatttttacgtcgttaaaacggttcggtatttagttaaatatgacgcgtattacgataaatgcgtcgttaaacgcggtaagagtaaagttcgttatcgtttattttttgttggtaaagtagagcgaaacgaaagtttcgataatagtaaaattaacgttttgtagtgttagatttaattttggtttttagataagttcgataacgttttatagcgatggacgttttttcgttaggtcggttattttgcgtattgtgtcgttataggtttacgttagtacgggtaatattattgtggtgatcgttagtgcggtaaaattcgtaatggttatgaattaataggttaagcggcgattaatagcgagggtattttaaatcgttatttcgttttatgatattattttgttcgagttgttttggttttacgatgttaagtttttaggttaggacgtttgtaattatttgtttttataaagtaagaattaacgtcgacgataataggtagattgacggttcgagtagtaaatcgcgtatataagcgcgtagttagtatattatattttgagtcgaagttttatatatgttggtatgcggttataggttacgtatagaatgatcgaggatcgttagttttatatatt

SEQ ID NO: 11250 - DNA, 880 bp, Artificial Sequence
  chemically treated genomic DNA (Homo sapiens) CpG-island No: 11250
aatatataaaactaacgatcctcgatcattctatacgtaacctataaccgcataccaacatatataaaacttcgactcaaaatataatatactaactacgcgcttatatacgcgatttactactcgaaccgtcaatctacctattatcgtcgacgttaattcttactttataaaaacaaataattacaaacgtcctaacctaaaaacttaacatcgtaaaaccaaaacaactcgaacaaaataatatcataaaacgaaataacgatttaaaataccctcgctattaatcgccgcttaacctattaattcataaccattacgaattttaccgcactaacgatcaccacaataatattacccgtactaacgtaaacctataacgacacaatacgcaaaataaccgacctaacgaaaaaacgtccatcgctataaaacgttatcgaacttatctaaaaaccaaaattaaatctaacactacaaaacgttaattttactattatcgaaactttcgtttcgctctactttaccaacaaaaaataaacgataacgaactttactcttaccgcgtttaacgacgcatttatcgtaatacgcgtcatatttaactaaataccgaaccgttttaacgacgtaaaaataacgattatctctctacttataaaaacgataaacttattactactctacaaaccccaaatacataaatcgcattaacgaacgcgacgttaaccgaaaccgaatattcgcttatctttcctacgctaaacgtaaaaataattaaacgcgtcccctcacaaattcgaacacgcactaacgattacgccgcgtttcaaaataaatccctcgacgtctcgcgaacgctaacgaaaatactaacgac

SEQ ID NO: 11251 - DNA, 880 bp, Artificial Sequence
  chemically treated genomic DNA (Homo sapiens) CpG-island No: 11251
gatgtatgaaattggcgattttcgattattttgtacgtgatttgtagtcgtatgttaatatatgtgaaatttcggtttaggatgtagtgtgttggttgcgcgtttgtgtgcgcgatttgttgttcgaatcgttaatttgtttgttgtcgtcggcgttgatttttgttttgtgaaagtaggtaattataggcgttttgatttggggatttggtatcgtagggttaaaataattcgggtaaagtgatgttatggaacggaatggcgatttaaggtgttttcgttgttggtcgtcgtttggtttgttgatttatagttattacgggttttgtcgtattggcgattattataatggtattattcgtattggcgtgggtttgtaacggtatagtgcgtaaagtaatcggtttggcgggagaacgtttatcgttgtggagcgttgtcgggtttatttggaaattagggttaggtttggtattataaggcgttggttttgttgttatcgggattttcgtttcgttttattttgttagtaaaggatgggcgatggcgggttttatttttatcgcgtttggcggcgtatttgtcgtgatgcgcgttatgtttggttggatgtcggatcgttttggcggcgtgaaagtggcgattgtttttttgtttgtagaaacggtgggtttgttgttgttttgtaagttttaggtgtatgggtcgtattagcgggcgcggcgttaatcggagtcggatgttcgtttattttttttgcgttgggcgtggaggtggttaaacgcgtttttttataagttcgggtacgtattggcggttacgtcgcgttttaggatgagtttttcggcgtttcgcgggcgttggcgggaatgttggcgat

SEQ ID NO: 11252 - DNA, 880 bp, Artificial Sequence
  chemically treated genomic DNA (Homo sapiens) CpG-island No: 11252
atcgccaacattcccgccaacgcccgcgaaacgccgaaaaactcatcctaaaacgcgacgtaaccgccaatacgtacccgaacttataaaaaaacgcgtttaaccacctccacgcccaacgcaaaaaaaataaacgaacatccgactccgattaacgccgcgcccgctaatacgacccatacacctaaaacttacaaaacaacaacaaacccaccgtttctacaaacaaaaaaacaatcgccactttcacgccgccaaaacgatccgacatccaaccaaacataacgcgcatcacgacaaatacgccgccaaacgcgataaaaataaaacccgccatcgcccatcctttactaacaaaataaaacgaaacgaaaatcccgataacaacaaaaccaacgccttataataccaaacctaaccctaatttccaaataaacccgacaacgctccacaacgataaacgttctcccgccaaaccgattactttacgcactataccgttacaaacccacgccaatacgaataataccattataataatcgccaatacgacaaaacccgtaataactataaatcaacaaaccaaacgacgaccaacaacgaaaacaccttaaatcgccattccgttccataacatcactttacccgaattattttaaccctacgataccaaatccccaaatcaaaacgcctataattacctactttcacaaaacaaaaatcaacgccgacgacaacaaacaaattaacgattcgaacaacaaatcgcgcacacaaacgcgcaaccaacacactacatcctaaaccgaaatttcacatatattaacatacgactacaaatcacgtacaaaataatcgaaaatcgccaatttcatacatc

SEQ ID NO: 11253 - DNA, 730 bp, Artificial Sequence
  chemically treated genomic DNA (Homo sapiens) CpG-island No: 11253
gatgtagcgattcggcgtagatgagttggttggattaatcgttagtagtgaatttattggtcgcgaaacgtttgttataaatgttgggggtattggagggtgaacggtttagtgcgtaagggtaaaaaatggtagcgttgggtaacgattcgcgtttagtttaatgttggttagcgcgaagaacgacgacgaagttgttatcgcggtaaaaattgtcgtatttttcgaagagtcgttacggatgggtaatagtgatttgggcgtggcgttttcgcgtaattaattagtttggtagtaacgtagttagtaattgttaaaacgtttaaacgtacgtgtcggtgaggtagatagttcgtttatcgcgtcgttatttgtcggggcgtttgtcgatcgtattgttcgtcgtcgtgggtaagatggacgttattaattggtaaacggtatgggagcgatgttcgatgttaacgacgcgttaagtcgttacgaatggttgatcgtatcgttattattgtagggtagcgttcgtcggatgttcggattttattggcgttgttggtcgatattgatgagttagtataacgttattcgtagttgtgtatatagttttgatattgtggagtgggatgatttttatgtacgttgaaatttgggcgtcgttataaatcggttattgacggtgaaagtgtagcgttgcgaaaacgttaaaagatagttgtattagcgattttaa

SEQ ID NO: 11254 - DNA, 730 bp, Artificial Sequence
  chemically treated genomic DNA (Homo sapiens) CpG-island No: 11254
ttaaaatcgctaatacaactatcttttaacgttttcgcaacgctacactttcaccgtcaataaccgatttataacgacgcccaaatttcaacgtacataaaaatcatcccactccacaatatcaaaactatatacacaactacgaataacgttatactaactcatcaatatcgaccaacaacgccaataaaatccgaacatccgacgaacgctaccctacaataataacgatacgatcaaccattcgtaacgacttaacgcgtcgttaacatcgaacatcgctcccataccgtttaccaattaataacgtccatcttacccacgacgacgaacaatacgatcgacaaacgccccgacaaataacgacgcgataaacgaactatctacctcaccgacacgtacgtttaaacgttttaacaattactaactacgttactaccaaactaattaattacgcgaaaacgccacgcccaaatcactattacccatccgtaacgactcttcgaaaaatacgacaatttttaccgcgataacaacttcgtcgtcgttcttcgcgctaaccaacattaaactaaacgcgaatcgttacccaacgctaccattttttacccttacgcactaaaccgttcaccctccaatacccccaacatttataacaaacgtttcgcgaccaataaattcactactaacgattaatccaaccaactcatctacgccgaatcgctacatc

SEQ ID NO: 11255 - DNA, 730 bp, Artificial Sequence
  chemically treated genomic DNA (Homo sapiens) CpG-island No: 11255
ttaagatcgttgatgtaattgttttttgacgttttcgtagcgttgtatttttatcgttaatgatcgatttgtagcgacgtttaggttttagcgtatatgggggttattttattttatagtgttagaattgtgtatatagttgcgggtagcgttgtattaatttattaatatcgattagtagcgttagtaaaattcgagtattcggcgagcgttgttttgtaataataacggtgcgattaattattcgtggcggtttagcgcgtcgttggtatcgagtatcgtttttatgtcgtttgttagttgatagcgtttattttgtttacggcgacgagtaatgcgatcggtaaacgtttcggtaagtagcggcgcgataagcgaattgtttgttttatcgatacgtacgtttaagcgttttaatagttgttgattacgttgttgttaggttggttgattgcgcgaaaacgttacgtttaggttattattgtttattcgtggcggtttttcgagaaatgcggtaatttttgtcgcggtagtagtttcgtcgtcgtttttcgcgttaattagtattaggttaaacgcggatcgttatttagcgttgttattttttgtttttgcgtattaagtcgtttattttttagtgtttttagtatttgtaatagacgtttcgcggttagtagatttattattggcggttgatttagttagtttatttgcgtcggatcgttgtatt

SEQ ID NO: 11256 - DNA, 730 bp, Artificial Sequence
  chemically treated genomic DNA (Homo sapiens) CpG-island No: 11256
aatacaacgatccgacgcaaataaactaactaaatcaaccgccaataataaatctactaaccgcgaaacgtctattacaaatactaaaaacactaaaaaataaacgacttaatacgcaaaaacaaaaaataacaacgctaaataacgatccgcgtttaacctaatactaattaacgcgaaaaacgacgacgaaactactaccgcgacaaaaattaccgcatttctcgaaaaaccgccacgaataaacaataataacctaaacgtaacgttttcgcgcaatcaaccaacctaacaacaacgtaatcaacaactattaaaacgcttaaacgtacgtatcgataaaacaaacaattcgcttatcgcgccgctacttaccgaaacgtttaccgatcgcattactcgtcgccgtaaacaaaataaacgctatcaactaacaaacgacataaaaacgatactcgataccaacgacgcgctaaaccgccacgaataattaatcgcaccgttattattacaaaacaacgctcgccgaatactcgaattttactaacgctactaatcgatattaataaattaatacaacgctacccgcaactatatacacaattctaacactataaaataaaataacccccatatacgctaaaacctaaacgtcgctacaaatcgatcattaacgataaaaatacaacgctacgaaaacgtcaaaaaacaattacatcaacgatcttaa

SEQ ID NO: 11257 - DNA, 681 bp, Artificial Sequence
  chemically treated genomic DNA (Homo sapiens) CpG-island No: 11257
  unsure (653, 658, 662, 664)
gaaatcgttaagattgttatttatcgcgtgggcgtattcgtaaaggattagcgggcgcgtttttttaggtagcgaaagttattttttgatggattatttcggtatagtcgggaagggttggtttttatttacgcgcgcgtatatcgggtaaataatatcggtggtcgtggtgtcggtttcgtcgtttttatattgtatcgggcgggaaggatcgatagatttgatttagcgatatagcgcgtcgtgattagcgtcgtggtttgatttattttttagcgattagatgattatattcgggtgattacgatcgcgttgtattattcgcgttacgcgttcgtttatcgtcggtagttagcgcggattatcggttagacgatttattggtattatgtcgtgggttttaatattggttttatttattatatataggtcgtagcggtcgtatagcgtgtattatagcggatggttcggataatgcgaatagcgtacggcgttaaagttgttttgttttattagtaggatattttgtattatcgtttgtttatttatgatttgattatgtagaggatgatgttcgtgacggttaacgtttcgaattagttacggtttgtcgtttagtagtagtagaggttttgatttgtagtagtgatagnttttncgananaaggtaggattttaaaa

SEQ ID NO: 11258 - DNA, 681 bp, Artificial Sequence
  chemically treated genomic DNA (Homo sapiens) CpG-island No: 11258
  unsure (18, 20, 24, 29)
ttttaaaatcctaccttntntcgnaaaanctatcactactacaaatcaaaacctctactactactaaacgacaaaccgtaactaattcgaaacgttaaccgtcacgaacatcatcctctacataatcaaatcataaataaacaaacgataatacaaaatatcctactaataaaacaaaacaactttaacgccgtacgctattcgcattatccgaaccatccgctataatacacgctatacgaccgctacgacctatatataataaataaaaccaatattaaaacccacgacataataccaataaatcgtctaaccgataatccgcgctaactaccgacgataaacgaacgcgtaacgcgaataatacaacgcgatcgtaatcacccgaatataatcatctaatcgctaaaaaataaatcaaaccacgacgctaatcacgacgcgctatatcgctaaatcaaatctatcgatccttcccgcccgatacaatataaaaacgacgaaaccgacaccacgaccaccgatattatttacccgatatacgcgcgcgtaaataaaaaccaacccttcccgactataccgaaataatccatcaaaaaataactttcgctacctaaaaaaacgcgcccgctaatcctttacgaatacgcccacgcgataaataacaatcttaacgatttc

SEQ ID NO: 11259 - DNA, 681 bp, Artificial Sequence
  chemically treated genomic DNA (Homo sapiens) CpG-island No: 11259
  unsure (18, 20, 24, 29)
ttttggggttttgttttntntcgnagaanttattattgttgtaggttaaaatttttgttgttgttgaacggtaagtcgtggttgattcgaggcgttaatcgttacgagtattattttttgtatggttaggttatggatgagtagacgatggtgtaggatattttgttgatgaagtagaataattttaacgtcgtgcgttgttcgtattattcgaattattcgttgtggtatacgttgtgcgatcgttacggtttgtatgtggtggatgaagttaatattgaaatttacggtatggtgttaatgaatcgtttgatcgatgattcgcgttggttatcggcgatgagcgaacgcgtaacgcgaatggtgtagcgcgatcgtaattattcgagtgtgattatttggtcgttggggaatgaattaggttacggcgttaattacgacgcgttgtatcgttggattaaatttgtcgatttttttcgttcggtgtagtatgaaggcggcggagtcgatattacggttatcgatattatttgttcgatgtacgcgcgcgtggatgaagattagtttttttcggttgtgtcgaaatggtttattaaaaaatggttttcgttatttggagagacgcgttcgttgattttttgcgaatacgtttacgcgatgggtaatagttttggcggtttt

SEQ ID NO: 11260 - DNA, 681 bp, Artificial Sequence
  chemically treated genomic DNA (Homo sapiens) CpG-island No: 11260
  unsure (653, 658, 662, 664)
aaaaccgccaaaactattacccatcgcgtaaacgtattcgcaaaaaatcaacgaacgcgtctctccaaataacgaaaaccattttttaataaaccatttcgacacaaccgaaaaaaactaatcttcatccacgcgcgcgtacatcgaacaaataatatcgataaccgtaatatcgactccgccgccttcatactacaccgaacgaaaaaaatcgacaaatttaatccaacgatacaacgcgtcgtaattaacgccgtaacctaattcattccccaacgaccaaataatcacactcgaataattacgatcgcgctacaccattcgcgttacgcgttcgctcatcgccgataaccaacgcgaatcatcgatcaaacgattcattaacaccataccgtaaatttcaatattaacttcatccaccacatacaaaccgtaacgatcgcacaacgtataccacaacgaataattcgaataatacgaacaacgcacgacgttaaaattattctacttcatcaacaaaatatcctacaccatcgtctactcatccataacctaaccatacaaaaaataatactcgtaacgattaacgcctcgaatcaaccacgacttaccgttcaacaacaacaaaaattttaacctacaacaataataanttctncgananaaaacaaaaccccaaaa

SEQ ID NO: 11261 - DNA, 958 bp, Artificial Sequence
  chemically treated genomic DNA (Homo sapiens) CpG-island No: 11261
  unsure (802, 825, 831, 836, 842..843, 886, 893, 907, 925, 941, 954)
ttagacggttatcgaggtatgcggttttatcgttatatggttttggttcggggtcgtgtaggtagtattaatttttatcgtagcggaggtgaaagtttcgttaaagttatcgacgtttttgtcgggcgtgtttttcggcggttgattgacggtttgtttttcgttcgttagggagtaagtttttttattacggcgatagtgtgtttgtaatagcgaggtcgtcgttggcgtttgttcgaaggattcggttattattagcgtaatggtttgatgatagtgtttaatagtggggtcgtttaatagtttggcggtgtttttgtcgtttttgtcgagtgtttcggcgttattggcggtaatgatagttagtacgttcggcgttttttgcgcggcgttcgtattaagggcggtgaggcgttttttggtaatggcggaatcgacgatatagttataggcggcgttgggggtttttttatgttattcgtaggcgtagcgtgtcgtgtcggtagtttttagcggttcgtcgatgcggttatggggacgatcgataatttttagttgatcgatcgggtttttttttgcgggtttattaaattttatgtttgtgttttcgttttagttagtacggaggtaagcgttcgtttcgttaataggagtttaaaggtgtttttagcggtgggatgggcgttggcgaatagcgtgttatatacggtttgcgttttttgggatagttgagtattcgtagttttaatgcgttagggtttatgtgttatttttgttagcgcgacgcgttcgttgtcgttangttgaataatcgtcgcgacgatnataggntaaangcgtanngaggcgtatcgcgtattttacggtagatatgttttcggcgagncggtgangtgacgttacgtancgatgagtttattggaantaggcggttttatgtncggtttttttcgnaggt

SEQ ID NO: 11262 - DNA, 958 bp, Artificial Sequence
  chemically treated genomic DNA (Homo sapiens) CpG-island No: 11262
  unsure (5, 18, 34, 52, 66, 73, 116..117, 123, 128, 134, 157)
acctncgaaaaaaaccgnacataaaaccgcctanttccaataaactcatcgntacgtaacgtcacntcaccgnctcgccgaaaacatatctaccgtaaaatacgcgatacgcctcnntacgcntttancctatnatcgtcgcgacgattattcaacntaacgacaacgaacgcgtcgcgctaacaaaaataacacataaaccctaacgcattaaaactacgaatactcaactatcccaaaaaacgcaaaccgtatataacacgctattcgccaacgcccatcccaccgctaaaaacacctttaaactcctattaacgaaacgaacgcttacctccgtactaactaaaacgaaaacacaaacataaaatttaataaacccgcaaaaaaaaacccgatcgatcaactaaaaattatcgatcgtccccataaccgcatcgacgaaccgctaaaaactaccgacacgacacgctacgcctacgaataacataaaaaaacccccaacgccgcctataactatatcgtcgattccgccattaccaaaaaacgcctcaccgcccttaatacgaacgccgcgcaaaaaacgccgaacgtactaactatcattaccgccaataacgccgaaacactcgacaaaaacgacaaaaacaccgccaaactattaaacgaccccactattaaacactatcatcaaaccattacgctaataataaccgaatccttcgaacaaacgccaacgacgacctcgctattacaaacacactatcgccgtaataaaaaaacttactccctaacgaacgaaaaacaaaccgtcaatcaaccgccgaaaaacacgcccgacaaaaacgtcgataactttaacgaaactttcacctccgctacgataaaaattaatactacctacacgaccccgaaccaaaaccatataacgataaaaccgcatacctcgataaccgtctaa

SEQ ID NO: 11263 - DNA, 958 bp, Artificial Sequence
  chemically treated genomic DNA (Homo sapiens) CpG-island No: 11263
  unsure (5, 18, 34, 52, 66, 73, 116..117, 123, 128, 134, 157)
atttncggaaaaagtcgnatatgaaatcgtttgnttttagtgagtttatcgntgcgtgacgttatnttatcgnttcgtcgaaaatatatttatcgtaaggtgcgcgatgcgttttnntacgtntttgntttgtnatcgtcgcggcgattatttagtntgacggtagcgggcgcgtcgcgttggtaggagtagtatataagttttggcgtattgaggttgcggatgtttagttattttagggggcgtaggtcgtatatgatacgttgttcgttagcgtttattttatcgttgaaaatatttttaaatttttgttggcgaagcgaacgtttgttttcgtattggttgaagcgagggtataggtatgaaatttgataaattcgtaggggaaaattcgatcgattagttgaaggttgtcggtcgtttttatgatcgtatcgacggatcgttgaaaattatcggtacggtacgttacgtttacgaatggtatgaagaagtttttaacgtcgtttatggttatatcgtcggtttcgttattgttaaaggacgttttatcgtttttgatacggacgtcgcgtaaaaagcgtcgggcgtattggttgttattatcgttagtaacgtcggggtattcggtaaaggcgataaaaatatcgttaggttgttaggcggttttattattgagtattattattaggttattgcgttggtagtggtcgagtttttcgaataggcgttagcggcggtttcgttgttgtaggtatattatcgtcgtaataaaggagtttattttttggcggacgaaaaataggtcgttaattagtcgtcggaagatacgttcgataaaaacgtcggtgattttgacggggtttttattttcgttgcggtgaagattgatgttatttatacgatttcggattagagttatatggcgatggagtcgtatgtttcgatggtcgtttgg

SEQ ID NO: 11264 - DNA, 958 bp, Artificial Sequence
  chemically treated genomic DNA (Homo sapiens) CpG-island No: 11264
  unsure (802, 825, 831, 836, 842..843, 886, 893, 907, 925, 941, 954)
ccaaacgaccatcgaaacatacgactccatcgccatataactctaatccgaaatcgtataaataacatcaatcttcaccgcaacgaaaataaaaaccccgtcaaaatcaccgacgtttttatcgaacgtatcttccgacgactaattaacgacctatttttcgtccgccaaaaaataaactcctttattacgacgataatatacctacaacaacgaaaccgccgctaacgcctattcgaaaaactcgaccactaccaacgcaataacctaataataatactcaataataaaaccgcctaacaacctaacgatatttttatcgcctttaccgaataccccgacgttactaacgataataacaaccaatacgcccgacgctttttacgcgacgtccgtatcaaaaacgataaaacgtcctttaacaataacgaaaccgacgatataaccataaacgacgttaaaaacttcttcataccattcgtaaacgtaacgtaccgtaccgataattttcaacgatccgtcgatacgatcataaaaacgaccgacaaccttcaactaatcgatcgaattttcccctacgaatttatcaaatttcatacctataccctcgcttcaaccaatacgaaaacaaacgttcgcttcgccaacaaaaatttaaaaatattttcaacgataaaataaacgctaacgaacaacgtatcatatacgacctacgccccctaaaataactaaacatccgcaacctcaatacgccaaaacttatatactactcctaccaacgcgacgcgcccgctaccgtcanactaaataatcgccgcgacgatnacaaancaaanacgtannaaaacgcatcgcgcaccttacgataaatatattttcgacgaancgataanataacgtcacgcancgataaactcactaaaancaaacgatttcatatncgactttttccgnaaat

SEQ ID NO: 11265 - DNA, 791 bp, Artificial Sequence
  chemically treated genomic DNA (Homo sapiens) CpG-island No: 11265
cgtatttagaatttttacggatgtttttgggcgacgttgaaattgttttgattcgcgaataattgggttggaaatatgcgtcgttcgaaatttcgtttgaaatttatgtttagtgggatgcgaaagaagtaggttaggcgaaagaattcgtatggaacgagaaattcgttgtttacgcgaaagtttattcgtaggaagtcgttgaatttattcgtcgtatgaaaggcgaaatgtcgtttgatttcgacgttaaagcgaaagagtttatcgttaaattgtaggttaattcggcgaaaatcgttagtcgtaaagcgttttagaatgttatcgaagcgttcggttcgttgttgtcggaatttttcggcggttttgttgatttggcgtcgtttaatttgattttgtggtttggttttaaagtaattaacgaagatgttgcgggtaattatatttattacggtgttcgcgagttcggtatgatcgcgattgttaacggtatttttttgtacggtggttttttgtcgtatatttttatttttttgatgttcgtggaatacgtacgtaacgtcgtacgtatggcgcgttgatgaatatcgtagggatggtttaaatattatttttggtttggggaaacggcgattatagtcgttggtagtgtttttgcgtaatcgatattaatgggcgtgatagtgaacgcggtcggatcggtgaggggggcgcgttattttttaattgacgaaataagaagaattgcggttgtaaatcggcgggttttgcgaataaggtttaagaaa

SEQ ID NO: 11266 - DNA, 791 bp, Artificial Sequence
  chemically treated genomic DNA (Homo sapiens) CpG-island No: 11266
tttcttaaaccttattcgcaaaacccgccgatttacaaccgcaattcttcttatttcgtcaattaaaaaataacgcgcccccctcaccgatccgaccgcgttcactatcacgcccattaatatcgattacgcaaaaacactaccaacgactataatcgccgtttccccaaaccaaaaataatatttaaaccatccctacgatattcatcaacgcgccatacgtacgacgttacgtacgtattccacgaacatcaaaaaaataaaaatatacgacaaaaaaccaccgtacaaaaaaataccgttaacaatcgcgatcataccgaactcgcgaacaccgtaataaatataattacccgcaacatcttcgttaattactttaaaaccaaaccacaaaatcaaattaaacgacgccaaatcaacaaaaccgccgaaaaattccgacaacaacgaaccgaacgcttcgataacattctaaaacgctttacgactaacgattttcgccgaattaacctacaatttaacgataaactctttcgctttaacgtcgaaatcaaacgacatttcgcctttcatacgacgaataaattcaacgacttcctacgaataaactttcgcgtaaacaacgaatttctcgttccatacgaattctttcgcctaacctacttctttcgcatcccactaaacataaatttcaaacgaaatttcgaacgacgcatatttccaacccaattattcgcgaatcaaaacaatttcaacgtcgcccaaaaacatccgtaaaaattctaaatacg

SEQ ID NO: 11267 - DNA, 791 bp, Artificial Sequence
  chemically treated genomic DNA (Homo sapiens) CpG-island No: 11267
ttttttggattttattcgtagaattcgtcggtttataatcgtaattttttttatttcgttagttgagaagtaacgcgttttttttatcgattcggtcgcgtttattgttacgtttattaatatcggttacgtaaaaatattgttaacggttgtagtcgtcgtttttttagattaagaatggtgtttaaattatttttgcggtgtttattagcgcgttatacgtacggcgttacgtgcgtattttacgaatattaggaaggtggaggtgtacggtaggaagttatcgtgtagggagatatcgttagtaatcgcggttatatcgaattcgcgaatatcgtagtggatgtagttattcgtagtattttcgttgattgttttagaattagattatagggttaggttagacggcgttaggttagtagaatcgtcgaggaatttcggtaatagcggatcgaacgtttcgatagtattttgagacgttttacggttggcgattttcgtcggattagtttgtagtttagcgatgaattttttcgttttagcgtcgaagttagacggtatttcgttttttatacggcgggtaaatttagcggttttttgcggataagttttcgcgtaagtagcgaatttttcgttttatgcggattttttcgtttggtttgtttttttcgtattttattgagtatagattttagacgggatttcgaacggcgtatatttttagtttagttgttcgcgggttagggtaattttagcgtcgtttagaggtattcgtgggagttttgggtacg

SEQ ID NO: 11268 - DNA, 791 bp, Artificial Sequence
  chemically treated genomic DNA (Homo sapiens) CpG-island No: 11268
cgtacccaaaactcccacgaatacctctaaacgacgctaaaattaccctaacccgcgaacaactaaactaaaaatatacgccgttcgaaatcccgtctaaaatctatactcaataaaatacgaaaaaaacaaaccaaacgaaaaaatccgcataaaacgaaaaattcgctacttacgcgaaaacttatccgcaaaaaaccgctaaatttacccgccgtataaaaaacgaaataccgtctaacttcgacgctaaaacgaaaaaattcatcgctaaactacaaactaatccgacgaaaatcgccaaccgtaaaacgtctcaaaatactatcgaaacgttcgatccgctattaccgaaattcctcgacgattctactaacctaacgccgtctaacctaaccctataatctaattctaaaacaatcaacgaaaatactacgaataactacatccactacgatattcgcgaattcgatataaccgcgattactaacgatatctccctacacgataacttcctaccgtacacctccaccttcctaatattcgtaaaatacgcacgtaacgccgtacgtataacgcgctaataaacaccgcaaaaataatttaaacaccattcttaatctaaaaaaacgacgactacaaccgttaacaatatttttacgtaaccgatattaataaacgtaacaataaacgcgaccgaatcgataaaaaaaacgcgttacttctcaactaacgaaataaaaaaaattacgattataaaccgacgaattctacgaataaaatccaaaaaa

SEQ ID NO: 11269 - DNA, 700 bp, Artificial Sequence
  chemically treated genomic DNA (Homo sapiens) CpG-island No: 11269
cgcgttattattagcgaggtgagaatcgcgtcgatgatcgttatgataatggttatcgtatcggggataatgaagtgttggttaatcgtcgtcgggttaaattagtagcgggtttgtatattaataagcggtttaaaagtttgttcgttgtttttcgttcgttgtatttgttagatttgttagattttttcgatatatttttgtataaagttagcggtattcggtttattgtcgtcggtgattatttgaatcggtgcggtggcgttggcgcgttttatttgtttcgtaaaatttatcggaataattattagatcgcgaatttttttcgtttgtattttggcgattagtttttgacggttatcgttgatggtggcgtcgatgtagggcgaatcggttatggtgtgggtgaaatttagcgtcgtttcgttacgttgttttagtaaaatttcgattcgtagtttgttggagtcgaggttaatgtcgtaattaaaaataaatagtagtagtagcgggattattatcgtaattagttagttattcggatcgcgaacgatttgtcgcgtttttttaacgtatagcgttcgtacgcgacggtaggataggatcgggttatttattgttatgttttttattttagtcgtggattaattgaataaaggttttttttatggtgggatcggggttgtttatcgttagtcga

SEQ ID NO: 11270 - DNA, 700 bp, Artificial Sequence
  chemically treated genomic DNA (Homo sapiens) CpG-island No: 11270
tcgactaacgataaacaaccccgatcccaccataaaaaaaacctttattcaattaatccacgactaaaataaaaaacataacaataaataacccgatcctatcctaccgtcgcgtacgaacgctatacgttaaaaaaacgcgacaaatcgttcgcgatccgaataactaactaattacgataataatcccgctactactactatttatttttaattacgacattaacctcgactccaacaaactacgaatcgaaattttactaaaacaacgtaacgaaacgacgctaaatttcacccacaccataaccgattcgccctacatcgacgccaccatcaacgataaccgtcaaaaactaatcgccaaaatacaaacgaaaaaaattcgcgatctaataattattccgataaattttacgaaacaaataaaacgcgccaacgccaccgcaccgattcaaataatcaccgacgacaataaaccgaataccgctaactttatacaaaaatatatcgaaaaaatctaacaaatctaacaaatacaacgaacgaaaaacaacgaacaaacttttaaaccgcttattaatatacaaacccgctactaatttaacccgacgacgattaaccaacacttcattatccccgatacgataaccattatcataacgatcatcgacgcgattctcacctcgctaataataacgcg

SEQ ID NO: 11271 - DNA, 700 bp, Artificial Sequence
  chemically treated genomic DNA (Homo sapiens) CpG-island No: 11271
tcggttaacgatgagtaatttcgattttattatggagaaagtttttatttagttgatttacgattgggataaggagtatagtaatgagtaattcgattttgttttgtcgtcgcgtacgggcgttgtgcgttaaagagacgcggtagatcgttcgcgattcgagtagttggttgattgcggtagtgatttcgttgttattgttgtttatttttggttacggtattaatttcgattttagtaagttgcgggtcgggattttattggaatagcgtagcgaagcggcgttggattttatttatattatgatcggttcgttttatatcgacgttattattagcgataatcgttaggaattgatcgttaaaatgtaggcggggaaaattcgcggtttggtggttatttcggtggattttgcggaatagatggagcgcgttaacgttatcgtatcgatttaggtgattatcgacggtagtgagtcgaatatcgttaattttgtataggggtatgtcgaagggatttggtagatttggtaaatgtagcgagcggaggataacgggtagatttttgaatcgtttattgatgtataaattcgttattggtttaattcggcggcgattagttagtattttattattttcggtgcggtgattattattatgacggttatcggcgcgatttttatttcgttggtggtggcgcg

SEQ ID NO: 11272 - DNA, 700 bp, Artificial Sequence
  chemically treated genomic DNA (Homo sapiens) CpG-island No: 11272
cgcgccaccaccaacgaaataaaaatcgcgccgataaccgtcataataataatcaccgcaccgaaaataataaaatactaactaatcgccgccgaattaaaccaataacgaatttatacatcaataaacgattcaaaaatctacccgttatcctccgctcgctacatttaccaaatctaccaaatcccttcgacatacccctatacaaaattaacgatattcgactcactaccgtcgataatcacctaaatcgatacgataacgttaacgcgctccatctattccgcaaaatccaccgaaataaccaccaaaccgcgaattttccccgcctacattttaacgatcaattcctaacgattatcgctaataataacgtcgatataaaacgaaccgatcataatataaataaaatccaacgccgcttcgctacgctattccaataaaatcccgacccgcaacttactaaaatcgaaattaataccgtaaccaaaaataaacaacaataacaacgaaatcactaccgcaatcaaccaactactcgaatcgcgaacgatctaccgcgtctctttaacgcacaacgcccgtacgcgacgacaaaacaaaatcgaattactcattactatactccttatcccaatcgtaaatcaactaaataaaaactttctccataataaaatcgaaattactcatcgttaaccga

SEQ ID NO: 11273 - DNA, 972 bp, Artificial Sequence
  chemically treated genomic DNA (Homo sapiens) CpG-island No: 11273
  unsure (930, 932)
tttttacgtagtcggtaattagttgcgtattatttattagatacgtattagatatgtcgttttgtattcggttagacggtaagcgatatttaggtttgattttatatattcgcgcggttttgtaagtttttatattgcggtaagtcgttcgatcgttatcgttagtgtaatttaacggatgtttttaattagatcgttataagttttatatgttgtaggttttcgggaagattacgttgttgaagtcgattttcgcgcgtttgacgtcgtagtagggggaaatttattacgagaatcgttcgttgtatgtaatgagcgaggtcgatcgtcgtcgtttgttgcgtatcgaatggggcgtggtgtattagtatttattcgacggtttgcgtcgttagtgtcggtaggcggtaatatcggcgagcggttgatggcgatcggggtacgttattacggcgatattcgtgttatcgcgtagaagtggttggaagaggtggagattttcgttaatcggatcgacgatttgtcgattatttttttcggcggtatgtagtagcgtttgtagattgttcgtaatttggtgacgtattcgaagttggtgtttatggatgaatcgatcggcgggttggatgtgtcggtgtaggttcgtttgttcgatttgttgcgcggtttggtggtggagttgaatttcgcggtggtgattgttatttatgatttaggcgtcgtcgtttgttgggatatcgtttgttggtgatgaagtaggggtaagtggtggagagtgggttaatcgatcgcgtgttcgacgattcgtattattcgtatatatagttgttggtgttatcggttttgtagaattgagtcggtgtcggatgcgcgtaaacgtttattcgggttataaatgcgtttttcgtagtcggataagacgcgtcggtnanttcgataatcggaatacgaggcgaaaatattaattataaa

SEQ ID NO: 11274 - DNA, 972 bp, Artificial Sequence
  chemically treated genomic DNA (Homo sapiens) CpG-island No: 11274
  unsure (41, 43)
tttataattaatattttcgcctcgtattccgattatcgaantnaccgacgcgtcttatccgactacgaaaaacgcatttataacccgaataaacgtttacgcgcatccgacaccgactcaattctacaaaaccgataacaccaacaactatatatacgaataatacgaatcgtcgaacacgcgatcgattaacccactctccaccacttacccctacttcatcaccaacaaacgatatcccaacaaacgacgacgcctaaatcataaataacaatcaccaccgcgaaattcaactccaccaccaaaccgcgcaacaaatcgaacaaacgaacctacaccgacacatccaacccgccgatcgattcatccataaacaccaacttcgaatacgtcaccaaattacgaacaatctacaaacgctactacataccgccgaaaaaaataatcgacaaatcgtcgatccgattaacgaaaatctccacctcttccaaccacttctacgcgataacacgaatatcgccgtaataacgtaccccgatcgccatcaaccgctcgccgatattaccgcctaccgacactaacgacgcaaaccgtcgaataaatactaatacaccacgccccattcgatacgcaacaaacgacgacgatcgacctcgctcattacatacaacgaacgattctcgtaataaatttccccctactacgacgtcaaacgcgcgaaaatcgacttcaacaacgtaatcttcccgaaaacctacaacatataaaacttataacgatctaattaaaaacatccgttaaattacactaacgataacgatcgaacgacttaccgcaatataaaaacttacaaaaccgcgcgaatatataaaatcaaacctaaatatcgcttaccgtctaaccgaatacaaaacgacatatctaatacgtatctaataaataatacgcaactaattaccgactacgtaaaaa

SEQ ID NO: 11275 - DNA, 972 bp, Artificial Sequence
  chemically treated genomic DNA (Homo sapiens) CpG-island No: 11275
  unsure (41, 43)
tttgtagttaatattttcgtttcgtgtttcggttgtcggantngtcgacgcgttttattcgattacggggagcgtatttgtagttcggataagcgtttacgcgtattcggtatcggtttaattttgtaaaatcgatgatattagtagttgtgtatacggatgatgcgggtcgtcgagtacgcggtcggttaatttattttttattatttgtttttgttttattattagtaaacggtgttttagtaggcggcgacgtttaaattatgggtgataattattatcgcgaggtttagttttattattaggtcgcgtagtaggtcgagtaggcgggtttgtatcgatatatttagttcgtcggtcggtttatttataaatattagtttcggatgcgttattaggttgcgggtaatttgtaaacgttgttgtatatcgtcggaaaaggtggtcggtaggtcgtcgattcggttggcgggaatttttattttttttagttatttttgcgcggtggtacgaatatcgtcgtaatgacgtgtttcggtcgttattagtcgttcgtcgatattgtcgtttgtcgatattggcggcgtaggtcgtcgagtggatgttgatgtattacgttttattcggtacgtagtaggcgacggcggtcggtttcgtttattgtatatagcgaacggttttcgtagtgaatttttttttgttgcggcgttaggcgcgcggagatcgattttagtagcgtggttttttcgaggatttgtagtatatgaagtttgtggcggtttgattgaaaatattcgttaggttgtattggcgatagcgatcgggcggtttgtcgtagtgtgaaagtttgtagagtcgcgcggatatgtgagattaaatttgaatgtcgtttgtcgtttgatcgggtgtagaacggtatgtttggtgcgtgtttgatgggtaatgcgtagttggttgtcgattgcgtgaaag

SEQ ID NO: 11276 - DNA, 972 bp, Artificial Sequence
  chemically treated genomic DNA (Homo sapiens) CpG-island No: 11276
  unsure (930, 932)
ctttcacgcaatcgacaaccaactacgcattacccatcaaacacgcaccaaacataccgttctacacccgatcaaacgacaaacgacattcaaatttaatctcacatatccgcgcgactctacaaactttcacactacgacaaaccgcccgatcgctatcgccaatacaacctaacgaatattttcaatcaaaccgccacaaacttcatatactacaaatcctcgaaaaaaccacgctactaaaatcgatctccgcgcgcctaacgccgcaacaaaaaaaaattcactacgaaaaccgttcgctatatacaataaacgaaaccgaccgccgtcgcctactacgtaccgaataaaacgtaatacatcaacatccactcgacgacctacgccgccaatatcgacaaacgacaatatcgacgaacgactaataacgaccgaaacacgtcattacgacgatattcgtaccaccgcgcaaaaataactaaaaaaaataaaaattcccgccaaccgaatcgacgacctaccgaccaccttttccgacgatatacaacaacgtttacaaattacccgcaacctaataacgcatccgaaactaatatttataaataaaccgaccgacgaactaaatatatcgatacaaacccgcctactcgacctactacgcgacctaataataaaactaaacctcgcgataataattatcacccataatttaaacgtcgccgcctactaaaacaccgtttactaataataaaacaaaaacaaataataaaaaataaattaaccgaccgcgtactcgacgacccgcatcatccgtatacacaactactaatatcatcgattttacaaaattaaaccgataccgaatacgcgtaaacgcttatccgaactacaaatacgctccccgtaatcgaataaaacgcgtcgacnantccgacaaccgaaacacgaaacgaaaatattaactacaaa

SEQ ID NO: 11277 - DNA, 596 bp, Artificial Sequence
  chemically treated genomic DNA (Homo sapiens) CpG-island No: 11277
acgcgtcgtcggtttatatggtaaacgttagtttagtaggtttcgtatcgattatcgttagattttttttttgtacggcgggaaggattggtattttggtttcgtggtaggcgcgaggatttattaggtacgaggtgattttgttaacgaagatttgatcgagataggtttgattgtagttaatataagtgttgattttatcggttcgtttcgattgcgtttttgatagtagtttcgtattagtaagaaacggtcgcgttatcgatattatatcggtatcgtcgtcgagagaatatcgtcggtaatttgcggatcgttaattcggttggtggttattagcggtagtgtacgtggttttttagtttgcgcgtgattagttaaatgcgtcgcggtacgggtttggtaatggtcggaatacgtgttttatgttagtaatgttcgtgttgataatggtcgcgttttcgttttaatggtttgcgtattttatcgttttcgtaaagtttttcgttttcgattaggttagtattatagtcggtaataataagaagttttgttaatttttttatcgacgtattattttacgtaatcgtatcgtt

SEQ ID NO: 11278 - DNA, 596 bp, Artificial Sequence
  chemically treated genomic DNA (Homo sapiens) CpG-island No: 11278
aacgatacgattacgtaaaataatacgtcgataaaaaaattaacaaaacttcttattattaccgactataatactaacctaatcgaaaacgaaaaactttacgaaaacgataaaatacgcaaaccattaaaacgaaaacgcgaccattatcaacacgaacattactaacataaaacacgtattccgaccattaccaaacccgtaccgcgacgcatttaactaatcacgcgcaaactaaaaaaccacgtacactaccgctaataaccaccaaccgaattaacgatccgcaaattaccgacgatattctctcgacgacgataccgatataatatcgataacgcgaccgtttcttactaatacgaaactactatcaaaaacgcaatcgaaacgaaccgataaaatcaacacttatattaactacaatcaaacctatctcgatcaaatcttcgttaacaaaatcacctcgtacctaataaatcctcgcgcctaccacgaaaccaaaataccaatccttcccgccgtacaaaaaaaaaatctaacgataatcgatacgaaacctactaaactaacgtttaccatataaaccgacgacgcgt

SEQ ID NO: 11279 - DNA, 596 bp, Artificial Sequence
  chemically treated genomic DNA (Homo sapiens) CpG-island No: 11279
aacgatgcgattgcgtagaatagtgcgtcggtgggaaggttggtaagattttttattattatcgattgtgatgttgatttggtcgaagacgggggattttgcgaaaacggtagagtgcgtaggttattgaagcgggggcgcgattattattaatacgggtattgttggtatgaagtacgtatttcgattattgttaagttcgtgtcgcggcgtatttagttggttacgcgtaaattgaaaggttacgtgtattgtcgttggtaattattaatcggattaacgattcgtaggttgtcgacgatattttttcgacggcgatgtcgatatggtatcgatggcgcgatcgttttttgttgatgcggagttgttgttaaaagcgtaatcgggacgagtcgatgagattaatatttgtattggttgtaattaggtttgtttcgattaaattttcgttggtaaagttatttcgtgtttggtgaattttcgcgtttgttacgaaattaaaatgttaatttttttcgtcgtgtagaaaaaaaatttggcggtggtcggtgcgggatttgttgggttggcgtttgttatgtaagtcggcggcgcgt

SEQ ID NO: 11280 - DNA, 596 bp, Artificial Sequence
  chemically treated genomic DNA (Homo sapiens) CpG-island No: 11280
acgcgccgccgacttacataacaaacgccaacccaacaaatcccgcaccgaccaccgccaaattttttttctacacgacgaaaaaaattaacattttaatttcgtaacaaacgcgaaaattcaccaaacacgaaataactttaccaacgaaaatttaatcgaaacaaacctaattacaaccaatacaaatattaatctcatcgactcgtcccgattacgcttttaacaacaactccgcatcaacaaaaaacgatcgcgccatcgataccatatcgacatcgccgtcgaaaaaatatcgtcgacaacctacgaatcgttaatccgattaataattaccaacgacaatacacgtaacctttcaatttacgcgtaaccaactaaatacgccgcgacacgaacttaacaataatcgaaatacgtacttcataccaacaatacccgtattaataataatcgcgcccccgcttcaataacctacgcactctaccgttttcgcaaaatcccccgtcttcgaccaaatcaacatcacaatcgataataataaaaaatcttaccaaccttcccaccgacgcactattctacgcaatcgcatcgtt

SEQ ID NO: 11281 - DNA, 672 bp, Artificial Sequence
  chemically treated genomic DNA (Homo sapiens) CpG-island No: 11281
tgtcgatgaaatttggaacgaatgtaacgaattgttggcgtaggataattttttcgcgcgcggtattatgtagtagatgaacgtgaaaatggtcggtattatcgatgattcgatcgattttttggagtattacgtagagatcgttaaagacggtttttttattattaaagtgttgtcgagttggcgttcggataaagtttttaatatcgaataggcgatttttaacgattatatggcgaagttgggcgaagttttcgatatcgatattcgtcgttttgttgatttgtaaattgttttgattaaacgtttggattatttcgtcgtttacggttgtaaagtgtttgattacgcgttggatgtggtgatgtttgttgaagcgaacgaagcggaattggatagtattttggcgcgtcgtttggttggcgaaattttgagcgagtacgaagtggcgtagtttaaaattgcggtattggtgttttttggtgtcgaatatgtacgtcgcggttgggtatagtagtattatattggcgcgttgcgtaataataatttgcgttagtttaaattgttggggtcggatgtaggttttgattttattaacgatcgttcgatggcggaagagttgtttaagttgttgagtaagtagaatgaagaaaatttgttgtcgaaaattat

SEQ ID NO: 11282 - DNA, 672 bp, Artificial Sequence
  chemically treated genomic DNA (Homo sapiens) CpG-island No: 11282
ataattttcgacaacaaattttcttcattctacttactcaacaacttaaacaactcttccgccatcgaacgatcgttaataaaatcaaaacctacatccgaccccaacaatttaaactaacgcaaattattattacgcaacgcgccaatataatactactatacccaaccgcgacgtacatattcgacaccaaaaaacaccaataccgcaattttaaactacgccacttcgtactcgctcaaaatttcgccaaccaaacgacgcgccaaaatactatccaattccgcttcgttcgcttcaacaaacatcaccacatccaacgcgtaatcaaacactttacaaccgtaaacgacgaaataatccaaacgtttaatcaaaacaatttacaaatcaacaaaacgacgaatatcgatatcgaaaacttcgcccaacttcgccatataatcgttaaaaatcgcctattcgatattaaaaactttatccgaacgccaactcgacaacactttaataataaaaaaaccgtctttaacgatctctacgtaatactccaaaaaatcgatcgaatcatcgataataccgaccattttcacgttcatctactacataataccgcgcgcgaaaaaattatcctacgccaacaattcgttacattcgttccaaatttcatcgaca

SEQ ID NO: 11283 - DNA, 672 bp, Artificial Sequence
  chemically treated genomic DNA (Homo sapiens) CpG-island No: 11283
atggttttcggtagtaggttttttttattttgtttgtttagtaatttagatagttttttcgttatcggacggtcgttgatggagttaaagtttatattcggttttagtagtttgaattgacgtaggttgttattacgtagcgcgttaatgtggtattgttgtatttagtcgcgacgtgtatattcggtattaaggaatattagtatcgtagttttgaattgcgttatttcgtgttcgtttagggtttcgttagttagacggcgcgttagaatgttgtttagtttcgtttcgttcgttttagtaaatattattatatttagcgcgtggttagatattttatagtcgtgagcggcgaagtgatttagacgtttggttagggtagtttgtaggttagtaaagcggcgaatgtcggtatcggaaatttcgtttagtttcgttatgtagtcgttaaaggtcgtttgttcgatgttgaaggttttgttcggacgttagttcggtagtattttgatggtgaaagagtcgtttttggcgatttttgcgtgatgttttagagaatcgatcgggttatcggtggtgtcgattatttttacgtttatttgttgtatgatgtcgcgcgcggagaagttattttgcgttagtagttcgttatattcgttttagattttatcggta

SEQ ID NO: 11284 - DNA, 672 bp, Artificial Sequence
  chemically treated genomic DNA (Homo sapiens) CpG-island No: 11284
taccgataaaatctaaaacgaatataacgaactactaacgcaaaataacttctccgcgcgcgacatcatacaacaaataaacgtaaaaataatcgacaccaccgataacccgatcgattctctaaaacatcacgcaaaaatcgccaaaaacgactctttcaccatcaaaatactaccgaactaacgtccgaacaaaaccttcaacatcgaacaaacgacctttaacgactacataacgaaactaaacgaaatttccgataccgacattcgccgctttactaacctacaaactaccctaaccaaacgtctaaatcacttcgccgctcacgactataaaatatctaaccacgcgctaaatataataatatttactaaaacgaacgaaacgaaactaaacaacattctaacgcgccgtctaactaacgaaaccctaaacgaacacgaaataacgcaattcaaaactacgatactaatattccttaataccgaatatacacgtcgcgactaaatacaacaataccacattaacgcgctacgtaataacaacctacgtcaattcaaactactaaaaccgaatataaactttaactccatcaacgaccgtccgataacgaaaaaactatctaaattactaaacaaacaaaataaaaaaaacctactaccgaaaaccat

SEQ ID NO: 11285 - DNA, 521 bp, Artificial Sequence
  chemically treated genomic DNA (Homo sapiens) CpG-island No: 11285
ggtagtgataattcgaatattagtgagtgcgtttatttcggttttttcgtattaggagtagttttttttagttttttagcgtttacggtagatagggatcgaattgttttacgacgttttaaatttagttcgcgtattattttaaatggcgaatagtatagtttttgggatttattttagttttaggatgtgatgagtcgatatcgaggtgttaaatatcgtcgtcgatatgaatttttgggcggtattagtttgttattttcggagtattttttattcgttgagcgatggtttttttatttagaattatcggattattatgatttgttttcgtatttgttcgcgtcgttacgttcgtagttaagttggtttatgtattgtattaattttttgatgttcgagtaggattatgtaagtttcgtgttttttcgttattttttaggaggagaacgttttagttaaattatttatagatattgttcgtaagtcggattacggttaacgttagaatattaaatagt

SEQ ID NO: 11286 - DNA, 521 bp, Artificial Sequence
  chemically treated genomic DNA (Homo sapiens) CpG-island No: 11286
actatttaatattctaacgttaaccgtaatccgacttacgaacaatatctataaataatttaactaaaacgttctcctcctaaaaaataacgaaaaaacacgaaacttacataatcctactcgaacatcaaaaaattaatacaatacataaaccaacttaactacgaacgtaacgacgcgaacaaatacgaaaacaaatcataataatccgataattctaaataaaaaaaccatcgctcaacgaataaaaaatactccgaaaataacaaactaataccgcccaaaaattcatatcgacgacgatatttaacacctcgatatcgactcatcacatcctaaaactaaaataaatcccaaaaactatactattcgccatttaaaataatacgcgaactaaatttaaaacgtcgtaaaacaattcgatccctatctaccgtaaacgctaaaaaactaaaaaaaactactcctaatacgaaaaaaccgaaataaacgcactcactaatattcgaattatcactacc

SEQ ID NO: 11287 - DNA, 521 bp, Artificial Sequence
  chemically treated genomic DNA (Homo sapiens) CpG-island No: 11287
attgtttgatgttttaacgttgatcgtaattcggtttgcggatagtgtttgtgggtagtttgattggggcgttttttttttaaagagtaacggaggagtacgaagtttgtataattttgttcggatattaggaggttagtgtaatgtataagttagtttgattgcgagcgtgacggcgcgagtaggtgcgaaagtaggttatagtgattcggtggttttgaatggaagggttatcgtttaacggataaaaggtatttcggggataataggttgatatcgtttaagagtttatatcgacggcggtgtttggtatttcgatgtcggtttattatattttggggttgaagtaggttttaagggttatgttgttcgttatttaaagtggtacgcgagttgggtttagaacgtcgtgagatagttcggtttttatttgtcgtgggcgttggagaattgaggggggttgtttttagtacgagaggatcggagtggacgtatttattggtgttcgggttgttattgtt

SEQ ID NO: 11288 - DNA, 521 bp, Artificial Sequence
  chemically treated genomic DNA (Homo sapiens) CpG-island No: 11288
aacaataacaacccgaacaccaataaatacgtccactccgatcctctcgtactaaaaacaacccccctcaattctccaacgcccacgacaaataaaaaccgaactatctcacgacgttctaaacccaactcgcgtaccactttaaataacgaacaacataacccttaaaacctacttcaaccccaaaatataataaaccgacatcgaaataccaaacaccgccgtcgatataaactcttaaacgatatcaacctattatccccgaaataccttttatccgttaaacgataacccttccattcaaaaccaccgaatcactataacctactttcgcacctactcgcgccgtcacgctcgcaatcaaactaacttatacattacactaacctcctaatatccgaacaaaattatacaaacttcgtactcctccgttactctttaaaaaaaaaacgccccaatcaaactacccacaaacactatccgcaaaccgaattacgatcaacgttaaaacatcaaacaat

SEQ ID NO: 11289 - DNA, 805 bp, Artificial Sequence
  chemically treated genomic DNA (Homo sapiens) CpG-island No: 11289
  unsure (5, 164)
ttgtngcgaggtgtgtgtgggatgttgggggtggggtgtgggggtggttttggggttttgtgggtgcggtttggttgtgttgtgggtgggggggggggggttgggtggggtgggtgggtgggggggggtgggggcgggggggggcgattgggggggtggggggntggtgtttgtggggtgggggtcgcgggtttcgttttcgggttcggcgtggtgcgtttgtgtttcgggttggggggttttcgggtcgtcgcggtgcggggttcggtcgggcgcgcgcggtcgcgggtggtgcgtgcgggtttcgacggggtgttttggtgcgttggcgtcgtgggcgtcgcgtgtcgcgcggtttggcgttgggggtgcgcggtgggcgtcgtcgcgtggggcggcgggcgcggggtgtttttacggtgcggggcggggggattagcgtggatgtcggcgcgtggtaagtagaacgggtgcggtatagaagtagatgcgggaggagttcgcgggttatttatcgcggtgtaaggttacgtcgtaaggagggttgagtcgggggcggagacgggggcgcgttgcgaaaggggtcgagggatgagagaaggaatcggggggagttacggagttttatttgtaggaggggcgagggatcgataagtcgggttaggggggttaggggggcgtagtaggtgatggcgggacgcggacggaaagagagagggagggaggaggaagtcgagtagggatttagtttaaaggggtaaagtagtggaaaacgggggcgcgttgggttcgggagggattagaa

SEQ ID NO: 11290 - DNA, 805 bp, Artificial Sequence
  chemically treated genomic DNA (Homo sapiens) CpG-island No: 11290
  unsure (642, 801)
ttctaatccctcccgaacccaacgcgcccccgttttccactactttacccctttaaactaaatccctactcgacttcctcctccctccctctctctttccgtccgcgtcccgccatcacctactacgcccccctaacccccctaacccgacttatcgatccctcgcccctcctacaaataaaactccgtaactccccccgattccttctctcatccctcgacccctttcgcaacgcgcccccgtctccgcccccgactcaaccctccttacgacgtaaccttacaccgcgataaataacccgcgaactcctcccgcatctacttctataccgcacccgttctacttaccacgcgccgacatccacgctaatccccccgccccgcaccgtaaaaacaccccgcgcccgccgccccacgcgacgacgcccaccgcgcacccccaacgccaaaccgcgcgacacgcgacgcccacgacgccaacgcaccaaaacaccccgtcgaaacccgcacgcaccacccgcgaccgcgcgcgcccgaccgaaccccgcaccgcgacgacccgaaaaccccccaacccgaaacacaaacgcaccacgccgaacccgaaaacgaaacccgcgacccccaccccacaaacaccanccccccacccccccaatcgcccccccccgcccccacccccccccacccacccaccccacccaacccccccccccccacccacaacacaaccaaaccgcacccacaaaaccccaaaaccacccccacaccccacccccaacatcccacacacacctcgcnacaa

SEQ ID NO: 11291 - DNA, 805 bp, Artificial Sequence
  chemically treated genomic DNA (Homo sapiens) CpG-island No: 11291
  unsure (642, 801)
ttttggtttttttcgggtttaacgcgttttcgttttttattattttgtttttttgggttaggtttttgttcggttttttttttttttttttttttttttcgttcgcgtttcgttattatttgttgcgtttttttggtttttttagttcgatttatcggtttttcgttttttttgtaggtgggatttcgtggtttttttcgatttttttttttatttttcggtttttttcgtagcgcgttttcgttttcgttttcggtttaattttttttgcggcgtgattttatatcgcggtgggtgattcgcgggtttttttcgtatttatttttgtgtcgtattcgttttgtttgttacgcgtcggtatttacgttggttttttcgtttcgtatcgtgggggtatttcgcgttcgtcgttttacgcggcggcgtttatcgcgtatttttagcgttaaatcgcgcggtacgcgacgtttacgacgttagcgtattagggtatttcgtcggagttcgtacgtattattcgcgatcgcgcgcgttcgatcgggtttcgtatcgcggcgattcgggggttttttagttcggagtataagcgtattacgtcgggttcggaggcgggattcgcggtttttattttataaatattanttttttatttttttagtcgttttttttcgtttttatttttttttatttatttattttatttaatttttttttttttatttataatataattaaatcgtatttataaaattttaaaattatttttatattttatttttaatattttatatatatttcgtnataa

SEQ ID NO: 11292 - DNA, 805 bp, Artificial Sequence
  chemically treated genomic DNA (Homo sapiens) CpG-island No: 11292
  unsure (5, 164)
ttatnacgaaatatatataaaatattaaaaataaaatataaaaataattttaaaattttataaatacgatttaattatattataaataaaaaaaaaaaaattaaataaaataaataaataaaaaaaaataaaaacgaaaaaaaacgactaaaaaaataaaaaantaatatttataaaataaaaaccgcgaatcccgcctccgaacccgacgtaatacgcttatactccgaactaaaaaacccccgaatcgccgcgatacgaaacccgatcgaacgcgcgcgatcgcgaataatacgtacgaactccgacgaaataccctaatacgctaacgtcgtaaacgtcgcgtaccgcgcgatttaacgctaaaaatacgcgataaacgccgccgcgtaaaacgacgaacgcgaaatacccccacgatacgaaacgaaaaaaccaacgtaaataccgacgcgtaacaaacaaaacgaatacgacacaaaaataaatacgaaaaaaacccgcgaatcacccaccgcgatataaaatcacgccgcaaaaaaaattaaaccgaaaacgaaaacgaaaacgcgctacgaaaaaaaccgaaaaataaaaaaaaaaatcgaaaaaaaccacgaaatcccacctacaaaaaaaacgaaaaaccgataaatcgaactaaaaaaaccaaaaaaacgcaacaaataataacgaaacgcgaacgaaaaaaaaaaaaaaaaaaaaaaaaaaccgaacaaaaacctaacccaaaaaaacaaaataataaaaaacgaaaacgcgttaaacccgaaaaaaaccaaaa

SEQ ID NO: 11293 - DNA, 1165 bp, Artificial Sequence
  chemically treated genomic DNA (Homo sapiens) CpG-island No: 11293
tagcgtcgtacgttttttcgcggttacgcgtgttcgtcgcggtttcgttataatacgcgttgtttagttagttatcgatatcgtagcgcggcgttttttagacgtttcgtttgtgcgttatagttatttttcggcgtttttattatgttttgtattgtattatatttgttaacgacggtagagcgtttcgttaatattttgttatatttattatcgtttacgattttattgattcggtcggtgttattcgttacgttggcgtttttatatcgtcgtattgttttttttattagttttattacgttatgtcggtatattattattgcgcgcgtattgtttatatttttagtcggttgtttcgtcgtatatttatattacgagtttgacgatcgagtaacgtcgtttttttgttttgtagtgttttataattttcgtgaattgtattatcgattattatattttagttcgcgattcgcgattttcggtgttaaacggtagcgcgatattttttttatggtcgatagcgattaagttatcgttatcgttaagcgtagggagtttttttattattattcgttcgtatgttttcgacgagatttaattcgtcgtaatttattaacgcggcgatgttatatgtcgttagtacgcggatgaagatttcgttcgtgtcggaataagaaatcgttatattggcgttattggcgtagtattcggtatttattaagggattatcgttaattcgtcggggaaatttatgggttatttcgtttgtggacgtggttgtcgttaaattgtcgtttaaatttaacgttacggtttttacggtgtttattttttgttttttatttagtggcgtatcgttatggtcgaggacggttgttttttttttgcgcgttgttagtagttgtttataacgtaaagacgtggagaaaattttcggcgagacgcgttttatgttacgagtaaacgtaaaattttttgttttttcgttaattattattatatgcgggttttgttttattattagtcgggcggtaagaatcggatacgtagatgaataaagttcgtatcgtaacggtttttagggtgttattattattatataggcgtttagtttaggggttttattaatcgtaaagatagtttaatttcggcgttaaaaatg

SEQ ID NO: 11294 - DNA, 1165 bp, Artificial Sequence
  chemically treated genomic DNA (Homo sapiens) CpG-island No: 11294
catttttaacgccgaaattaaactatctttacgattaataaaacccctaaactaaacgcctatataataataataacaccctaaaaaccgttacgatacgaactttattcatctacgtatccgattcttaccgcccgactaataataaaacaaaacccgcatataataataattaacgaaaaaacaaaaaattttacgtttactcgtaacataaaacgcgtctcgccgaaaattttctccacgtctttacgttataaacaactactaacaacgcgcaaaaaaaaaacaaccgtcctcgaccataacgatacgccactaaataaaaaacaaaaaataaacaccgtaaaaaccgtaacgttaaatttaaacgacaatttaacgacaaccacgtccacaaacgaaataacccataaatttccccgacgaattaacgataatcccttaataaataccgaatactacgccaataacgccaatataacgatttcttattccgacacgaacgaaatcttcatccgcgtactaacgacatataacatcgccgcgttaataaattacgacgaattaaatctcgtcgaaaacatacgaacgaataataataaaaaaactccctacgcttaacgataacgataacttaatcgctatcgaccataaaaaaaatatcgcgctaccgtttaacaccgaaaatcgcgaatcgcgaactaaaatataataatcgataatacaattcacgaaaattataaaacactacaaaacaaaaaaacgacgttactcgatcgtcaaactcgtaatataaatatacgacgaaacaaccgactaaaaatataaacaatacgcgcgcaataataatataccgacataacgtaataaaactaataaaaaaaacaatacgacgatataaaaacgccaacgtaacgaataacaccgaccgaatcaataaaatcgtaaacgataataaatataacaaaatattaacgaaacgctctaccgtcgttaacaaatataatacaatacaaaacataataaaaacgccgaaaaataactataacgcacaaacgaaacgtctaaaaaacgccgcgctacgatatcgataactaactaaacaacgcgtattataacgaaaccgcgacgaacacgcgtaaccgcgaaaaaacgtacgacgcta

SEQ ID NO: 11295 - DNA, 1165 bp, Artificial Sequence
  chemically treated genomic DNA (Homo sapiens) CpG-island No: 11295
tatttttaacgtcggaattgggttgtttttacggttgatgaaatttttgaattggacgtttgtgtgatgatggtaatattttgaaagtcgttgcggtgcgggttttatttatttgcgtattcggtttttgtcgttcggttggtgatggagtaaagttcgtatgtgatgatgattggcgaaggggtagaaaattttgcgtttgttcgtggtatggagcgcgtttcgtcggagattttttttacgtttttgcgttatgaataattattggtagcgcgtaaggaaggggtaatcgttttcgattatagcggtgcgttattggatgaaaaatagaaaatgggtatcgtggaggtcgtggcgttggatttagacggtaatttggcggtagttacgtttataggcggaatgatttataaattttttcgacgagttggcgatagttttttagtgggtgtcggatgttacgttaataacgttagtgtggcggttttttgtttcggtacgggcgaagtttttattcgcgtgttggcggtatatgatatcgtcgcgttaatggattacggcggattaagtttcgtcggaagtatgcgagcgggtagtaatggaaaaattttttgcgtttggcggtagcggtggtttaatcgttatcgattatgaagggaatgtcgcgttatcgtttaatatcgaagatcgcgaatcgcgagttagggtgtagtagtcggtagtgtagtttacgagggttgtggagtattgtaaggtagggaggcgacgttattcggtcgttaggttcgtggtgtggatgtgcggcggagtaatcgattgagggtgtgggtagtgcgcgcgtagtagtggtgtatcgatatggcgtgatgaggttggtaaagggggtagtgcgacggtgtaggagcgttaacgtaacgaatagtatcggtcggattagtgaggtcgtgggcgatggtaggtgtggtagggtattagcgaagcgttttgtcgtcgttgatagatgtagtgtagtatagggtatggtgagagcgtcggagagtggttgtggcgtatagacggagcgtttgaggagcgtcgcgttgcggtgtcggtggttgattgagtagcgcgtgttgtagcggagtcgcggcggatacgcgtgatcgcgggagggcgtacggcgtta

SEQ ID NO: 11296 - DNA, 1165 bp, Artificial Sequence
  chemically treated genomic DNA (Homo sapiens) CpG-island No: 11296
taacgccgtacgccctcccgcgatcacgcgtatccgccgcgactccgctacaacacgcgctactcaatcaaccaccgacaccgcaacgcgacgctcctcaaacgctccgtctatacgccacaaccactctccgacgctctcaccataccctatactacactacatctatcaacgacgacaaaacgcttcgctaataccctaccacacctaccatcgcccacgacctcactaatccgaccgatactattcgttacgttaacgctcctacaccgtcgcactaccccctttaccaacctcatcacgccatatcgatacaccactactacgcgcgcactacccacaccctcaatcgattactccgccgcacatccacaccacgaacctaacgaccgaataacgtcgcctccctaccttacaatactccacaaccctcgtaaactacactaccgactactacaccctaactcgcgattcgcgatcttcgatattaaacgataacgcgacattcccttcataatcgataacgattaaaccaccgctaccgccaaacgcaaaaaatttttccattactacccgctcgcatacttccgacgaaacttaatccgccgtaatccattaacgcgacgatatcatataccgccaacacgcgaataaaaacttcgcccgtaccgaaacaaaaaaccgccacactaacgttattaacgtaacatccgacacccactaaaaaactatcgccaactcgtcgaaaaaatttataaatcattccgcctataaacgtaactaccgccaaattaccgtctaaatccaacgccacgacctccacgatacccattttctatttttcatccaataacgcaccgctataatcgaaaacgattaccccttccttacgcgctaccaataattattcataacgcaaaaacgtaaaaaaaatctccgacgaaacgcgctccataccacgaacaaacgcaaaattttctaccccttcgccaatcatcatcacatacgaactttactccatcaccaaccgaacgacaaaaaccgaatacgcaaataaataaaacccgcaccgcaacgactttcaaaatattaccatcatcacacaaacgtccaattcaaaaatttcatcaaccgtaaaaacaacccaattccgacgttaaaaata

SEQ ID NO: 11297 - DNA, 778 bp, Artificial Sequence
  chemically treated genomic DNA (Homo sapiens) CpG-island No: 11297
acgggtcgtcgttgaagggcgggaaattatataaattaaggaggaggaatatacggttcgtcgttaaaaggtcggaaaatttcgatgttaagggttagggtttagcgtttcgtttttaaaaggtcgggaacgtttcgagttcgaggtttcgggtatttaatcgttcggtttataaagggttcgggtataatttcgtggttttacggtacggcggggcgagtagtggttcgcggcgattgagtcgttcgtcgtaaggttcgtatgggcgtagtcggtttaggggtggtttattcgggttgagttcgtcggtttaaggtatttagggatagatatcgcgaggattatagtgcgtggcgtaggagtgtttcgcggggacgcgcgtgaggcgaagagacgtattcggaggtacgtggttcggtttttaaggggatagaggttgtcgtgtggtcgtcgttgtgtgcggagcgtttacgtacggagcgtacgttatcgcgaggaatgcgttggcgtgagtgttaggagtagcgttgcgcgacgatcgcgtttttaagttacgtcgtcgcggtgacgagtgcggagagtgacggagagtagatgacgcgtacgacgtgtgacgaatatagtttcggcgttattagtttcggagtcgggtgttgtaggagcggtcggcggtagagtcgttcgattaggtaggttattattcggtgtgagttcgtttgaggagtagcgagatggtggtgaagtagtgtgatatcggttagtgtgtttataagttacg

SEQ ID NO: 11298 - DNA, 778 bp, Artificial Sequence
  chemically treated genomic DNA (Homo sapiens) CpG-island No: 11298
cgtaacttataaacacactaaccgatatcacactacttcaccaccatctcgctactcctcaaacgaactcacaccgaataataacctacctaatcgaacgactctaccgccgaccgctcctacaacacccgactccgaaactaataacgccgaaactatattcgtcacacgtcgtacgcgtcatctactctccgtcactctccgcactcgtcaccgcgacgacgtaacttaaaaacgcgatcgtcgcgcaacgctactcctaacactcacgccaacgcattcctcgcgataacgtacgctccgtacgtaaacgctccgcacacaacgacgaccacacgacaacctctatccccttaaaaaccgaaccacgtacctccgaatacgtctcttcgcctcacgcgcgtccccgcgaaacactcctacgccacgcactataatcctcgcgatatctatccctaaataccttaaaccgacgaactcaacccgaataaaccacccctaaaccgactacgcccatacgaaccttacgacgaacgactcaatcgccgcgaaccactactcgccccgccgtaccgtaaaaccacgaaattatacccgaaccctttataaaccgaacgattaaatacccgaaacctcgaactcgaaacgttcccgaccttttaaaaacgaaacgctaaaccctaacccttaacatcgaaattttccgaccttttaacgacgaaccgtatattcctcctccttaatttatataatttcccgcccttcaacgacgacccgt

SEQ ID NO: 11299 - DNA, 778 bp, Artificial Sequence
  chemically treated genomic DNA (Homo sapiens) CpG-island No: 11299
cgtggtttatgaatatattagtcggtgttatattgttttattattatttcgttgttttttaagcgagtttatatcgggtggtggtttgtttggtcggacgattttgtcgtcgatcgtttttgtaatattcggtttcgaagttagtgacgtcggggttgtgttcgttatacgtcgtgcgcgttatttgtttttcgttatttttcgtattcgttatcgcggcggcgtgatttgggggcgcggtcgtcgcgtagcgttgtttttagtatttacgttaacgtatttttcgcgatgacgtgcgtttcgtacgtgggcgtttcgtatatagcggcgattatacgataatttttgtttttttgggggtcgaattacgtgttttcgggtgcgttttttcgttttacgcgcgttttcgcgagatatttttgcgttacgtattgtggttttcgcggtgtttgtttttgggtgttttgagtcgacgggtttagttcgggtgagttatttttgaatcggttgcgtttatgcgggttttacggcgggcggtttagtcgtcgcgggttattgttcgtttcgtcgtatcgtggggttacggggttgtgttcgggttttttgtgggtcgggcggttgggtattcgaaatttcgggttcgaggcgttttcggttttttgaaggcggggcgttgaattttgatttttggtatcggggtttttcggttttttaacggcgggtcgtgtgttttttttttttggtttgtgtggtttttcgttttttaacggcggttcgt

SEQ ID NO: 11300 - DNA, 778 bp, Artificial Sequence
  chemically treated genomic DNA (Homo sapiens) CpG-island No: 11300
acgaaccgccgttaaaaaacgaaaaaccacacaaaccaaaaaaaaaaaacacacgacccgccgttaaaaaaccgaaaaaccccgataccaaaaatcaaaattcaacgccccgccttcaaaaaaccgaaaacgcctcgaacccgaaatttcgaatacccaaccgcccgacccacaaaaaacccgaacacaaccccgtaaccccacgatacgacgaaacgaacaataacccgcgacgactaaaccgcccgccgtaaaacccgcataaacgcaaccgattcaaaaataactcacccgaactaaacccgtcgactcaaaacacccaaaaacaaacaccgcgaaaaccacaatacgtaacgcaaaaatatctcgcgaaaacgcgcgtaaaacgaaaaaacgcacccgaaaacacgtaattcgacccccaaaaaaacaaaaattatcgtataatcgccgctatatacgaaacgcccacgtacgaaacgcacgtcatcgcgaaaaatacgttaacgtaaatactaaaaacaacgctacgcgacgaccgcgcccccaaatcacgccgccgcgataacgaatacgaaaaataacgaaaaacaaataacgcgcacgacgtataacgaacacaaccccgacgtcactaacttcgaaaccgaatattacaaaaacgatcgacgacaaaatcgtccgaccaaacaaaccaccacccgatataaactcgcttaaaaaacaacgaaataataataaaacaatataacaccgactaatatattcataaaccacg

SEQ ID NO: 11301 - DNA, 520 bp, Artificial Sequence
  chemically treated genomic DNA (Homo sapiens) CpG-island No: 11301
atatgttcggagcgcggggtggtgataggtcgtgagcggggtacgacgagatacggcgtataatatacggcggtgtgttatggtggtttgcgtagatagtgtaggagagcgatattttgcgcgcgatagtggtgtggagagttatagtattagtgtttagattgtcgttggtcgtatcgaggtttagtcgtttcggacgtttgttgcgagtgttatatagatttatacgagtggtggtgcgacgtagaggacgacgtgtattggaagttatggcgtagtcgagtagtggtcgatacgcgtttgtagtgcggtggtgggtttgagacgcgatgcgtggatacgtgagacgcgtcgtcggtttttatgacgtatagaagcgtggagtgagcgaggagtgtagtgagcgcgaggatcgtcggacggtgcggcgtgttatacgttatacgtcgttgtgcgggatatagaacgttttttaaatttcgagaatgtttttaaattagtaagtttttattaaaatttt

SEQ ID NO: 11302 - DNA, 520 bp, Artificial Sequence
  chemically treated genomic DNA (Homo sapiens) CpG-island No: 11302
aaaattttaataaaaacttactaatttaaaaacattctcgaaatttaaaaaacgttctatatcccgcacaacgacgtataacgtataacacgccgcaccgtccgacgatcctcgcgctcactacactcctcgctcactccacgcttctatacgtcataaaaaccgacgacgcgtctcacgtatccacgcatcgcgtctcaaacccaccaccgcactacaaacgcgtatcgaccactactcgactacgccataacttccaatacacgtcgtcctctacgtcgcaccaccactcgtataaatctatataacactcgcaacaaacgtccgaaacgactaaacctcgatacgaccaacgacaatctaaacactaatactataactctccacaccactatcgcgcgcaaaatatcgctctcctacactatctacgcaaaccaccataacacaccgccgtatattatacgccgtatctcgtcgtaccccgctcacgacctatcaccaccccgcgctccgaacatat

SEQ ID NO: 11303 - DNA, 520 bp, Artificial Sequence
  chemically treated genomic DNA (Homo sapiens) CpG-island No: 11303
aggattttaatgggggtttattgatttaaaaatattttcgggatttggggaacgttttgtatttcgtataacgacgtgtggcgtgtgatacgtcgtatcgttcgacgattttcgcgtttattgtatttttcgtttattttacgtttttgtgcgttatgagagtcgacgacgcgttttacgtgtttacgtatcgcgttttaggtttattatcgtattgtaggcgcgtgtcgattattgttcgattgcgttatggtttttagtgtacgtcgttttttgcgtcgtattattattcgtgtgggtttgtgtagtattcgtagtagacgttcgagacgattagatttcgatgcggttagcgatagtttgagtattggtgttgtggttttttatattattgtcgcgcgtaaggtgtcgtttttttgtattgtttgcgtagattattataatatatcgtcgtgtgttgtgcgtcgtgtttcgtcgtgtttcgtttacggtttattattatttcgcgtttcgagtatgt

SEQ ID NO: 11304 - DNA, 520 bp, Artificial Sequence
  chemically treated genomic DNA (Homo sapiens) CpG-island No: 11304
acatactcgaaacgcgaaataataataaaccgtaaacgaaacacgacgaaacacgacgcacaacacacgacgatatattataataatctacgcaaacaatacaaaaaaacgacaccttacgcgcgacaataatataaaaaaccacaacaccaatactcaaactatcgctaaccgcatcgaaatctaatcgtctcgaacgtctactacgaatactacacaaacccacacgaataataatacgacgcaaaaaacgacgtacactaaaaaccataacgcaatcgaacaataatcgacacgcgcctacaatacgataataaacctaaaacgcgatacgtaaacacgtaaaacgcgtcgtcgactctcataacgcacaaaaacgtaaaataaacgaaaaatacaataaacgcgaaaatcgtcgaacgatacgacgtatcacacgccacacgtcgttatacgaaatacaaaacgttccccaaatcccgaaaatatttttaaatcaataaacccccattaaaatcct

SEQ ID NO: 11305 - DNA, 519 bp, Artificial Sequence
  chemically treated genomic DNA (Homo sapiens) CpG-island No: 11305
aatagagacgggggcggggtcgcgtttgaagtacgtggttcgcgtgacgggaggaggtcgggtcggtcgcgacgaagggcggggtcgtttcgttttaacgttagaggaatgcggtggggggagggggagagagagggtttttttttttttcgttttcgcggtcggttcggacgtttttcgcgtcggcgcgtacggtcggagtacggcggaacggttttttcggcgtcgtacgttttaggtcgtcggttcggtttggtgattcgtatttttcgcgttttcggttatcgtttcgtttttatttcgttgttcggattttggttttcggtcgcgcgcggcgtcgttcgttagtgtttcggttattttttcgtatttttcgtttttagtttttattagttcggcggcgagtttgatcggtcgtttcggatcgaaaagagtagatattgggaagttttgggagagggaggggcgggttttaaagggattacgatttttttttagtttcgtggggggaagaaaaat

SEQ ID NO: 11306 - DNA, 519 bp, Artificial Sequence
  chemically treated genomic DNA (Homo sapiens) CpG-island No: 11306
atttttcttccccccacgaaactaaaaaaaaatcgtaatccctttaaaacccgcccctccctctcccaaaacttcccaatatctactcttttcgatccgaaacgaccgatcaaactcgccgccgaactaataaaaactaaaaacgaaaaatacgaaaaaataaccgaaacactaacgaacgacgccgcgcgcgaccgaaaaccaaaatccgaacaacgaaataaaaacgaaacgataaccgaaaacgcgaaaaatacgaatcaccaaaccgaaccgacgacctaaaacgtacgacgccgaaaaaaccgttccgccgtactccgaccgtacgcgccgacgcgaaaaacgtccgaaccgaccgcgaaaacgaaaaaaaaaaaaaccctctctctccccctccccccaccgcattcctctaacgttaaaacgaaacgaccccgcccttcgtcgcgaccgacccgacctcctcccgtcacgcgaaccacgtacttcaaacgcgaccccgcccccgtctctatt

SEQ ID NO: 11307 - DNA, 519 bp, Artificial Sequence
  chemically treated genomic DNA (Homo sapiens) CpG-island No: 11307
attttttttttttttacggggttgaaaaaaggtcgtggtttttttaaggttcgttttttttttttttaaaattttttagtgtttgtttttttcgattcgggacggtcggttaggttcgtcgtcgagttggtaggggttgggggcgaggggtgcgggaaggtgatcggggtattggcgggcggcgtcgcgcgcggtcgggggttagggttcgagtagcggggtgggggcggggcggtggtcgggagcgcggggggtgcgggttattaggtcgggtcggcggtttggaacgtgcggcgtcggggagatcgtttcgtcgtgtttcggtcgtgcgcgtcggcgcgaggggcgttcgggtcggtcgcgggggcggggaggggaggggttttttttttttttttttttttatcgtatttttttgacgttgggacggagcgatttcgtttttcgtcgcgatcggttcggttttttttcgttacgcgggttacgtgttttagacgcggtttcgttttcgtttttgtt

SEQ ID NO: 11308 - DNA, 519 bp, Artificial Sequence
  chemically treated genomic DNA (Homo sapiens) CpG-island No: 11308
aacaaaaacgaaaacgaaaccgcgtctaaaacacgtaacccgcgtaacgaaaaaaaaccgaaccgatcgcgacgaaaaacgaaatcgctccgtcccaacgtcaaaaaaatacgataaaaaaaaaaaaaaaaaaaaaacccctcccctccccgcccccgcgaccgacccgaacgcccctcgcgccgacgcgcacgaccgaaacacgacgaaacgatctccccgacgccgcacgttccaaaccgccgacccgacctaataacccgcaccccccgcgctcccgaccaccgccccgcccccaccccgctactcgaaccctaacccccgaccgcgcgcgacgccgcccgccaataccccgatcaccttcccgcacccctcgcccccaacccctaccaactcgacgacgaacctaaccgaccgtcccgaatcgaaaaaaacaaacactaaaaaattttaaaaaaaaaaaaaacgaaccttaaaaaaaccacgaccttttttcaaccccgtaaaaaaaaaaaaaat

SEQ ID NO: 11309 - DNA, 900 bp, Artificial Sequence
  chemically treated genomic DNA (Homo sapiens) CpG-island No: 11309
ttatttttcgaagcgttttttatttttcgttttatcgcggttatttttgggtttcggggtttgtagtatttagttaggtttcggcgcggttcgatttttttattcggattttcgatttacggtttggttttgttatgggcgcggtgttgaagtttttgaggttgttatcgatcgttttgtttcgttattaattattgtgtttcgttatcgattgttttgttttgttatcgattgttttgtttcgtgacggtattagaaatgggagtggtcgtgatagggtatagaattataatttttagtagatattgcggtcgtagacgcgttttcgtataatatttagagcgttttagttaggtaagaaagcgcgcgaggatcggattacgagttttagaaggcgtggcgttagtagttatgttggtaaagggcgttcggaaaatgtgggaacggttagagagttgtagttttttcgaatattttgattggttaggatgtagtacgagggcggggtgtgagcgatttagtatattattattgggtgaattagggggcgtggtggggaatttttcgtagggcggaagttttagaattttcggtaaagtttagttataggcgggcgattgcggggggtttttgaggcggcgggggttatggttggggtcgcgtgtttgggaaaagttgtcgacgtagatgaatggtgcgatagcggtttgggttttttgggttcggacgtagcggttttcggaggatttgggttgggcgcggagttgggttcggggttgtcgtgggtttttttcgttttcggttacgttattgaggatggggatacgtgagtgaattttaggttgttaaacggagttttaggattcggcgttatattttttattaatttttgatttttga

SEQ ID NO: 11310 - DNA, 900 bp, Artificial Sequence
  chemically treated genomic DNA (Homo sapiens) CpG-island No: 11310
tcaaaaatcaaaaattaataaaaaatataacgccgaatcctaaaactccgtttaacaacctaaaattcactcacgtatccccatcctcaataacgtaaccgaaaacgaaaaaaacccacgacaaccccgaacccaactccgcgcccaacccaaatcctccgaaaaccgctacgtccgaacccaaaaaacccaaaccgctatcgcaccattcatctacgtcgacaacttttcccaaacacgcgaccccaaccataacccccgccgcctcaaaaaccccccgcaatcgcccgcctataactaaactttaccgaaaattctaaaacttccgccctacgaaaaattccccaccacgccccctaattcacccaataataatatactaaatcgctcacaccccgccctcgtactacatcctaaccaatcaaaatattcgaaaaaactacaactctctaaccgttcccacattttccgaacgccctttaccaacataactactaacgccacgccttctaaaactcgtaatccgatcctcgcgcgctttcttacctaactaaaacgctctaaatattatacgaaaacgcgtctacgaccgcaatatctactaaaaattataattctataccctatcacgaccactcccatttctaataccgtcacgaaacaaaacaatcgataacaaaacaaaacaatcgataacgaaacacaataattaataacgaaacaaaacgatcgataacaacctcaaaaacttcaacaccgcgcccataacaaaaccaaaccgtaaatcgaaaatccgaataaaaaaatcgaaccgcgccgaaacctaactaaatactacaaaccccgaaacccaaaaataaccgcgataaaacgaaaaataaaaaacgcttcgaaaaataa

SEQ ID NO: 11311 - DNA, 900 bp, Artificial Sequence
  chemically treated genomic DNA (Homo sapiens) CpG-island No: 11311
ttagggattagagattaatgaggaatgtgacgtcgggttttagggtttcgtttggtagtttaaggtttatttacgtgtttttatttttagtgacgtagtcgaagacgaggggagtttacgatagtttcgggtttaatttcgcgtttaatttaggtttttcgggggtcgttgcgttcggatttagggagtttaggtcgttgtcgtattatttatttgcgtcggtagttttttttaagtacgcgattttagttatggttttcgtcgttttaggggtttttcgtagtcgttcgtttgtagttgggttttgtcgggagttttggagttttcgttttgcgggaaattttttattacgttttttgatttatttaatgataatatgttgaatcgtttatatttcgttttcgtattgtattttgattaattagagtattcgggaggattataattttttagtcgtttttatatttttcgggcgttttttattaatatggttgttgacgttacgttttttgggattcgtagttcggttttcgcgcgtttttttatttaattggggcgttttgggtgttgtacgaaagcgcgtttgcggtcgtaatgtttgttgagagttgtagttttgtgttttattacggttatttttatttttggtgtcgttacgggatagagtagtcggtgataggatagagtagtcggtgacgggatatagtggttggtgacgggatagagcggtcggtgatagttttaagggttttagtatcgcgtttatggtagagttagatcgtgagtcggggattcgggtaggagggtcgggtcgcgtcggggtttggttgaatgttgtaggtttcggggtttaagggtggtcgcggtggggcgggaagtagggagcgtttcggggagtgg

SEQ ID NO: 11312 - DNA, 900 bp, Artificial Sequence
  chemically treated genomic DNA (Homo sapiens) CpG-island No: 11312
ccactccccgaaacgctccctacttcccgccccaccgcgaccacccttaaaccccgaaacctacaacattcaaccaaaccccgacgcgacccgaccctcctacccgaatccccgactcacgatctaactctaccataaacgcgatactaaaacccttaaaactatcaccgaccgctctatcccgtcaccaaccactatatcccgtcaccgactactctatcctatcaccgactactctatcccgtaacgacaccaaaaataaaaataaccgtaataaaacacaaaactacaactctcaacaaacattacgaccgcaaacgcgctttcgtacaacacccaaaacgccccaattaaataaaaaaacgcgcgaaaaccgaactacgaatcccaaaaaacgtaacgtcaacaaccatattaataaaaaacgcccgaaaaatataaaaacgactaaaaaattataatcctcccgaatactctaattaatcaaaatacaatacgaaaacgaaatataaacgattcaacatattatcattaaataaatcaaaaaacgtaataaaaaatttcccgcaaaacgaaaactccaaaactcccgacaaaacccaactacaaacgaacgactacgaaaaacccctaaaacgacgaaaaccataactaaaatcgcgtacttaaaaaaaactaccgacgcaaataaataatacgacaacgacctaaactccctaaatccgaacgcaacgacccccgaaaaacctaaattaaacgcgaaattaaacccgaaactatcgtaaactcccctcgtcttcgactacgtcactaaaaataaaaacacgtaaataaaccttaaactaccaaacgaaaccctaaaacccgacgtcacattcctcattaatctctaatccctaa

SEQ ID NO: 11313 - DNA, 593 bp, Artificial Sequence
  chemically treated genomic DNA (Homo sapiens) CpG-island No: 11313
cgtttttcggtcggcgtaggcgtatttacgatcgcgggtaggttcgtcgagcgtagtttttttttgcggagttttagggcgtgtgcggttttttttgggtatgcgtagaatcgttttatgtttagttgagggagtgcgttgtagttttcgcgcgtatattcgtataggaggtttcggtttcgtttttttgtagtgaaatttttttttggattatcgttggagatgtagttttttcggggtcggaattttcgacgagttagtaaaggttataagcgtcgcgttatggacgtagttattttggatcgggaataaggcggtatttcgtttcgtttatttcgcgtttagattaattgtaaggtagcgaatttgatcgtgacgagttaattagattttgaggaaagttgatcgcgatagagtttttcgtcgtttaatcgtcgtttgtgtttcgtttttttagtgacgcgaggtagaattagttaatttttgtacggatagcgttcggaagaggttagaagttggatttagcgtgttcgcgattttatttttaggttttgtgaggtcggtggaattttggggttttttaaatttattag

SEQ ID NO: 11314 - DNA, 593 bp, Artificial Sequence
  chemically treated genomic DNA (Homo sapiens) CpG-island No: 11314
ctaataaatttaaaaaaccccaaaattccaccgacctcacaaaacctaaaaataaaatcgcgaacacgctaaatccaacttctaacctcttccgaacgctatccgtacaaaaattaactaattctacctcgcgtcactaaaaaaacgaaacacaaacgacgattaaacgacgaaaaactctatcgcgatcaactttcctcaaaatctaattaactcgtcacgatcaaattcgctaccttacaattaatctaaacgcgaaataaacgaaacgaaataccgccttattcccgatccaaaataactacgtccataacgcgacgcttataacctttactaactcgtcgaaaattccgaccccgaaaaaactacatctccaacgataatccaaaaaaaaatttcactacaaaaaaacgaaaccgaaacctcctatacgaatatacgcgcgaaaactacaacgcactccctcaactaaacataaaacgattctacgcatacccaaaaaaaaccgcacacgccctaaaactccgcaaaaaaaaactacgctcgacgaacctacccgcgatcgtaaatacgcctacgccgaccgaaaaacg

SEQ ID NO: 11315 - DNA, 593 bp, Artificial Sequence
  chemically treated genomic DNA (Homo sapiens) CpG-island No: 11315
ttggtagatttggaggattttaggattttatcgattttataggatttaaaggtgaggtcgcggatacgttgaatttagtttttagtttttttcgggcgttattcgtgtagggattggttggttttgtttcgcgttattgaagaggcgggatatagacgacgattgggcgacgaaggattttatcgcggttaattttttttaggatttgattggttcgttacggttaggttcgttgttttgtaattggtttaaacgcggagtgggcgggacgaagtgtcgttttgttttcggtttaagatggttgcgtttatggcgcggcgtttgtggtttttgttgattcgtcgggggtttcggtttcggggaggttgtatttttaacgatagtttaaggagaagttttattatagagaaacgaaatcggaattttttgtacgagtatgcgcgcgagggttatagcgtatttttttagttggatatagagcggttttgcgtatgtttagaagaggtcgtatacgttttggagtttcgtaagggggagttgcgttcggcggatttgttcgcgatcgtgagtgcgtttgcgtcggtcggggggcg

SEQ ID NO: 11316 - DNA, 593 bp, Artificial Sequence
  chemically treated genomic DNA (Homo sapiens) CpG-island No: 11316
cgccccccgaccgacgcaaacgcactcacgatcgcgaacaaatccgccgaacgcaactcccccttacgaaactccaaaacgtatacgacctcttctaaacatacgcaaaaccgctctatatccaactaaaaaaatacgctataaccctcgcgcgcatactcgtacaaaaaattccgatttcgtttctctataataaaacttctccttaaactatcgttaaaaatacaacctccccgaaaccgaaacccccgacgaatcaacaaaaaccacaaacgccgcgccataaacgcaaccatcttaaaccgaaaacaaaacgacacttcgtcccgcccactccgcgtttaaaccaattacaaaacaacgaacctaaccgtaacgaaccaatcaaatcctaaaaaaaattaaccgcgataaaatccttcgtcgcccaatcgtcgtctatatcccgcctcttcaataacgcgaaacaaaaccaaccaatccctacacgaataacgcccgaaaaaaactaaaaactaaattcaacgtatccgcgacctcacctttaaatcctataaaatcgataaaatcctaaaatcctccaaatctaccaa

SEQ ID NO: 11317 - DNA, 614 bp, Artificial Sequence
  chemically treated genomic DNA (Homo sapiens) CpG-island No: 11317
ttcggttttattttttttagtttcgtttatcgggtttatcgtttaggtattgcgttttttagtttcgttttttggtttttttagcggtttcgtttattggttatattttttagattttgtttcggtttcgttttcgtttcgttcgcgcggttttttttagttttttgggtttcgttttcgttatttacgtttttcgtaggagttgaagatgagattgcggtcgaagggcgcgcgtagatagtagcgcgttagggcgtatagcgggaatttttttttgttttcgttgttgggtaggtagcgttgagttattgcgtagagtgcgcggttttcggcgttgcggtcgcgggttagttgtagtagttatatagtgggttcgtttattatgtcgcgttaggcgcggtatattgggcggtatcgcgtgattaaggagcgtggcggtacgtggtttagtatttgtattagtagtttcgggggtagcgcgtttagggttagggatgggttcgtcggtagtcgtcgtcgcgatagtcgggcgtttatttttagtagttagagttttgtaggtcgagaggggtcggtaggcgggttagcgtagttaggttattttttttttattt

SEQ ID NO: 11318 - DNA, 614 bp, Artificial Sequence
  chemically treated genomic DNA (Homo sapiens) CpG-island No: 11318
aaataaaaaaaaaataacctaactacgctaacccgcctaccgacccctctcgacctacaaaactctaactactaaaaataaacgcccgactatcgcgacgacgactaccgacgaacccatccctaaccctaaacgcgctacccccgaaactactaatacaaatactaaaccacgtaccgccacgctccttaatcacgcgataccgcccaatataccgcgcctaacgcgacataataaacgaacccactatataactactacaactaacccgcgaccgcaacgccgaaaaccgcgcactctacgcaataactcaacgctacctacccaacaacgaaaacaaaaaaaaattcccgctatacgccctaacgcgctactatctacgcgcgcccttcgaccgcaatctcatcttcaactcctacgaaaaacgtaaataacgaaaacgaaacccaaaaaactaaaaaaaaccgcgcgaacgaaacgaaaacgaaaccgaaacaaaatctaaaaaatataaccaataaacgaaaccgctaaaaaaaccaaaaaacgaaactaaaaaacgcaatacctaaacgataaacccgataaacgaaactaaaaaaaataaaaccgaa

SEQ ID NO: 11319 - DNA, 614 bp, Artificial Sequence
  chemically treated genomic DNA (Homo sapiens) CpG-island No: 11319
aggtagggagggggtggtttggttgcgttgattcgtttatcgatttttttcgatttgtaggattttggttattggagatgggcgttcggttatcgcggcgacggttgtcggcggatttatttttggttttggacgcgttgttttcggagttgttggtgtaggtgttgagttacgtgtcgttacgttttttggttacgcgatgtcgtttagtgtgtcgcgtttggcgcgatatagtggacgggtttattgtgtggttgttgtagttggttcgcgatcgtagcgtcgagggtcgcgtattttacgtagtggtttaacgttgtttgtttagtaacgaagataaggaggagttttcgttgtgcgttttggcgcgttattgtttgcgcgcgtttttcggtcgtaattttatttttaatttttgcggagagcgtgggtgacgggggcggggtttaggaggttgaggggggtcgcgcgagcgaggcgggggcggggtcgggatagagtttgagagatgtagttaatgggcgagatcgttggaggagttagggggcggggttgagggacgtagtgtttgggcggtaggttcggtgggcggggttggagaaggtgaagtcggg

SEQ ID NO: 11320 - DNA, 614 bp, Artificial Sequence
  chemically treated genomic DNA (Homo sapiens) CpG-island No: 11320
cccgacttcaccttctccaaccccgcccaccgaacctaccgcccaaacactacgtccctcaaccccgccccctaactcctccaacgatctcgcccattaactacatctctcaaactctatcccgaccccgcccccgcctcgctcgcgcgacccccctcaacctcctaaaccccgcccccgtcacccacgctctccgcaaaaattaaaaataaaattacgaccgaaaaacgcgcgcaaacaataacgcgccaaaacgcacaacgaaaactcctccttatcttcgttactaaacaaacaacgttaaaccactacgtaaaatacgcgaccctcgacgctacgatcgcgaaccaactacaacaaccacacaataaacccgtccactatatcgcgccaaacgcgacacactaaacgacatcgcgtaaccaaaaaacgtaacgacacgtaactcaacacctacaccaacaactccgaaaacaacgcgtccaaaaccaaaaataaatccgccgacaaccgtcgccgcgataaccgaacgcccatctccaataaccaaaatcctacaaatcgaaaaaaatcgataaacgaatcaacgcaaccaaaccaccccctccctacct

SEQ ID NO: 11321 - DNA, 521 bp, Artificial Sequence
  chemically treated genomic DNA (Homo sapiens) CpG-island No: 11321
ggttcgggaaagcgacgttgcgggttatgggatttttagggattcgttttttcgggtagggtttggcgcgggaatttttttcggggcgttttagttgtgggcgagaacgggattgacgtttgggtttcgatttgggttttttatttgtttcggcgtttatttggcgggttgttcggaggcggtagtcgcggggttaagttttttttttttattttgttttgggaggtagtcgaggggtttttcgtgatcggcgtggtttagggggttttcgggacggcggtttgggcggtcggttttttttcggggcgtggcggttgtagttcggcgtcgggggcggcgatttttgagtatttagcgggcgggggcgggaggtcgtttttttttcggttgcggggtttagcgggcgcgagggcggggcgggcgggggagtttggagggttgcgtgtagcgagggggaggtttagttgtcgcgaggttagcggggagcggggttagtttcgcgtttttaggattcggggttt

SEQ ID NO: 11322 - DNA, 521 bp, Artificial Sequence
  chemically treated genomic DNA (Homo sapiens) CpG-island No: 11322
aaaccccgaatcctaaaaacgcgaaactaaccccgctccccgctaacctcgcgacaactaaacctccccctcgctacacgcaaccctccaaactcccccgcccgccccgccctcgcgcccgctaaaccccgcaaccgaaaaaaaaacgacctcccgcccccgcccgctaaatactcaaaaatcgccgcccccgacgccgaactacaaccgccacgccccgaaaaaaaaccgaccgcccaaaccgccgtcccgaaaaccccctaaaccacgccgatcacgaaaaacccctcgactacctcccaaaacaaaataaaaaaaaaaaacttaaccccgcgactaccgcctccgaacaacccgccaaataaacgccgaaacaaataaaaaacccaaatcgaaacccaaacgtcaatcccgttctcgcccacaactaaaacgccccgaaaaaaattcccgcgccaaaccctacccgaaaaaacgaatccctaaaaatcccataacccgcaacgtcgctttcccgaacc

SEQ ID NO: 11323 - DNA, 521 bp, Artificial Sequence
  chemically treated genomic DNA (Homo sapiens) CpG-island No: 11323
gggtttcggattttaggggcgcggggttggtttcgtttttcgttggtttcgcggtaattgggtttttttttcgttgtacgtagttttttaagttttttcgttcgtttcgttttcgcgttcgttgggtttcgtagtcggaggaagggcggtttttcgttttcgttcgttggatgtttagaggtcgtcgttttcggcgtcgggttgtagtcgttacgtttcgggagaggatcgatcgtttagatcgtcgtttcgagggttttttgggttacgtcgattacggggagtttttcgattgttttttagaataaagtgggaaagggaagtttagtttcgcggttgtcgttttcgagtagttcgttaggtgagcgtcgggataggtaggggatttaggtcgggatttaagcgttagtttcgttttcgtttatagttggggcgtttcgggaaggattttcgcgttaggttttgttcggaggggcgggtttttgggagttttataattcgtagcgtcgttttttcgggtt

SEQ ID NO: 11324 - DNA, 521 bp, Artificial Sequence
  chemically treated genomic DNA (Homo sapiens) CpG-island No: 11324
aacccgaaaaaacgacgctacgaattataaaactcccaaaaacccgcccctccgaacaaaacctaacgcgaaaatccttcccgaaacgccccaactataaacgaaaacgaaactaacgcttaaatcccgacctaaatcccctacctatcccgacgctcacctaacgaactactcgaaaacgacaaccgcgaaactaaacttccctttcccactttattctaaaaaacaatcgaaaaactccccgtaatcgacgtaacccaaaaaaccctcgaaacgacgatctaaacgatcgatcctctcccgaaacgtaacgactacaacccgacgccgaaaacgacgacctctaaacatccaacgaacgaaaacgaaaaaccgcccttcctccgactacgaaacccaacgaacgcgaaaacgaaacgaacgaaaaaacttaaaaaactacgtacaacgaaaaaaaaacccaattaccgcgaaaccaacgaaaaacgaaaccaaccccgcgcccctaaaatccgaaaccc

SEQ ID NO: 11325 - DNA, 617 bp, Artificial Sequence
  chemically treated genomic DNA (Homo sapiens) CpG-island No: 11325
tattatcggtttaataggtgcggggaaaattattttgttggacgttatttgtttggcgttgtattacgaaatttcgcgtttttttaacgttttataatcgtaaaatgattttatgattcgcgatatcgtcgaatgtttggcggaggtggagtttgaagtgaaaggtgaagcgtatcgtgtattttggagttagaatcgggcgcgtaattaattcgacggtaatttgtaggtgttacgcgtagagtttcgcgttgcgcgacggtaaaattttcgtcgataaagtgaaagataagttggaattgatagcgacgttaatcgggttggattacgggcgttttattcgttcgatgttgtttcgtaggggtaatttgttgtttttttgaatgttaaatttaaagaacgcgcggaattgttcgaggagttaatcggtattgaaatttacgggtaaatttcggcgatggtttttgagtagtataaatcggttcgtatagagttggagaagttgtaagcgtagttagcggcgttacgtttttacgtcggaataagtgtaatcgttgatagcgagtttgtaggtatttattgacgaagaaaaatagttaattatcgcgtagtagtat

SEQ ID NO: 11326 - DNA, 617 bp, Artificial Sequence
  chemically treated genomic DNA (Homo sapiens) CpG-island No: 11326
atactactacgcgataattaactatttttcttcgtcaataaatacctacaaactcgctatcaacgattacacttattccgacgtaaaaacgtaacgccgctaactacgcttacaacttctccaactctatacgaaccgatttatactactcaaaaaccatcgccgaaatttacccgtaaatttcaataccgattaactcctcgaacaattccgcgcgttctttaaatttaacattcaaaaaaacaacaaattacccctacgaaacaacatcgaacgaataaaacgcccgtaatccaacccgattaacgtcgctatcaattccaacttatctttcactttatcgacgaaaattttaccgtcgcgcaacgcgaaactctacgcgtaacacctacaaattaccgtcgaattaattacgcgcccgattctaactccaaaatacacgatacgcttcacctttcacttcaaactccacctccgccaaacattcgacgatatcgcgaatcataaaatcattttacgattataaaacgttaaaaaaacgcgaaatttcgtaatacaacgccaaacaaataacgtccaacaaaataattttccccgcacctattaaaccgataata

SEQ ID NO: 11327 - DNA, 617 bp, Artificial Sequence
  chemically treated genomic DNA (Homo sapiens) CpG-island No: 11327
atgttgttgcgcggtaattaattgttttttttcgttagtaagtatttgtaaattcgttgttagcgattgtatttgtttcggcgtgaaagcgtgacgtcgttggttgcgtttgtagtttttttagttttgtgcgggtcgatttgtgttgtttaaaaattatcgtcgagatttgttcgtagattttagtgtcggttaatttttcgagtaatttcgcgcgttttttgggtttggtatttaggaaggtagtaaattgtttttgcgaaatagtatcgaacgggtgaagcgttcgtaatttagttcggttaacgtcgttgttagttttagtttattttttattttgtcggcgagaattttgtcgtcgcgtagcgcgaggttttacgcgtggtatttgtaaattatcgtcgggttggttacgcgttcgattttggttttagaatgtacggtacgttttattttttattttaaattttattttcgttagatattcggcggtatcgcgggttatgagattattttgcgattgtgaaacgttagagagacgcggagtttcgtgatatagcgttagataaatggcgtttagtagggtggtttttttcgtatttgttgggtcggtaata

SEQ ID NO: 11328 - DNA, 617 bp, Artificial Sequence
  chemically treated genomic DNA (Homo sapiens) CpG-island No: 11328
tattaccgacccaacaaatacgaaaaaaaccaccctactaaacgccatttatctaacgctatatcacgaaactccgcgtctctctaacgtttcacaatcgcaaaataatctcataacccgcgataccgccgaatatctaacgaaaataaaatttaaaataaaaaataaaacgtaccgtacattctaaaaccaaaatcgaacgcgtaaccaacccgacgataatttacaaataccacgcgtaaaacctcgcgctacgcgacgacaaaattctcgccgacaaaataaaaaataaactaaaactaacaacgacgttaaccgaactaaattacgaacgcttcacccgttcgatactatttcgcaaaaacaatttactaccttcctaaataccaaacccaaaaaacgcgcgaaattactcgaaaaattaaccgacactaaaatctacgaacaaatctcgacgataatttttaaacaacacaaatcgacccgcacaaaactaaaaaaactacaaacgcaaccaacgacgtcacgctttcacgccgaaacaaatacaatcgctaacaacgaatttacaaatacttactaacgaaaaaaaacaattaattaccgcgcaacaacat

SEQ ID NO: 11329 - DNA, 523 bp, Artificial Sequence
  chemically treated genomic DNA (Homo sapiens) CpG-island No: 11329
cggtcgcgtcgggggcggtgtcgttcggaatcgtagtttttttgtttttttttcgtttcgcggttttttagtcgtttttattttcggcgcgggatttttatttcggtatttgtatattttatgcgttcgtagtttcgagtttgcggggttgagttattcggcgattcgaaaattttcgtcgtgatttcgcgttgttcgggcggagttttaggtggttttgggttcgcgttttcgtttcggatttttaatttttttagttttatttcgttttttttttcgtgtttaatcggtcgtcgagttataagttattttttgattcgatttggtttttatcgttcggattttcgtttagtttcggttttgttagttcgtagtattagcgagtcgcggttttttgtgcgaggtttatttttgcggttttagttgattatcgggcgtacgttagggttttgtaatttcgttttcgtattttttattttgggatagcgttgttttttgtaaagttcggttttgttttgttttg

SEQ ID NO: 11330 - DNA, 523 bp, Artificial Sequence
  chemically treated genomic DNA (Homo sapiens) CpG-island No: 11330
caaaacaaaacaaaaccgaactttacaaaaaacaacgctatcccaaaataaaaaatacgaaaacgaaattacaaaaccctaacgtacgcccgataatcaactaaaaccgcaaaaataaacctcgcacaaaaaaccgcgactcgctaatactacgaactaacaaaaccgaaactaaacgaaaatccgaacgataaaaaccaaatcgaatcaaaaaataacttataactcgacgaccgattaaacacgaaaaaaaaaacgaaataaaactaaaaaaattaaaaatccgaaacgaaaacgcgaacccaaaaccacctaaaactccgcccgaacaacgcgaaatcacgacgaaaattttcgaatcgccgaataactcaaccccgcaaactcgaaactacgaacgcataaaatatacaaataccgaaataaaaatcccgcgccgaaaataaaaacgactaaaaaaccgcgaaacgaaaaaaaaacaaaaaaactacgattccgaacgacaccgcccccgacgcgaccg

SEQ ID NO: 11331 - DNA, 523 bp, Artificial Sequence
  chemically treated genomic DNA (Homo sapiens) CpG-island No: 11331
tagggtagggtagggtcgggttttgtagggggtagcgttgttttagggtgaggggtacgggggcgggattgtaaaattttagcgtgcgttcgatgattagttggggtcgtagaggtgggtttcgtataggaggtcgcggttcgttgatattgcgagttggtaaagtcgaagttgggcgggggttcgggcggtgggagttaagtcggattagggagtggtttgtaattcggcggtcgattggatacgaagaagagagcggggtggggttgggagggttgggggttcggagcgggggcgcggatttaagattatttggagtttcgttcgggtagcgcggggttacggcgggaattttcgggtcgtcgagtgatttagtttcgtaggttcgaaattgcgggcgtatgaggtgtgtaggtatcggggtgggggtttcgcgtcggaaataggggcgattgaggggtcgcgaggcggggaggaaataggggggttgcggtttcgggcgatatcgttttcgacgcggtcg

SEQ ID NO: 11332 - DNA, 523 bp, Artificial Sequence
  chemically treated genomic DNA (Homo sapiens) CpG-island No: 11332
cgaccgcgtcgaaaacgatatcgcccgaaaccgcaacccccctatttcctccccgcctcgcgacccctcaatcgcccctatttccgacgcgaaacccccaccccgatacctacacacctcatacgcccgcaatttcgaacctacgaaactaaatcactcgacgacccgaaaattcccgccgtaaccccgcgctacccgaacgaaactccaaataatcttaaatccgcgcccccgctccgaacccccaaccctcccaaccccaccccgctctcttcttcgtatccaatcgaccgccgaattacaaaccactccctaatccgacttaactcccaccgcccgaacccccgcccaacttcgactttaccaactcgcaatatcaacgaaccgcgacctcctatacgaaacccacctctacgaccccaactaatcatcgaacgcacgctaaaattttacaatcccgcccccgtacccctcaccctaaaacaacgctaccccctacaaaacccgaccctaccctacccta

SEQ ID NO: 11333 - DNA, 977 bp, Artificial Sequence
  chemically treated genomic DNA (Homo sapiens) CpG-island No: 11333
  unsure (377, 417)
tttattcgttataatcgataattgtatagaaagacgtagcgtagaaaattcgcgttgacggatgtagtagttagtaatgtcgatgtcgagcggcgttagacggtaaattgcgttttttttcgtttgttcgttggtaaagcggtttagtagacgttgacgtattatgtcgttgatcgcgttattggcgcgtacgtcgatggtttcgttggtttgtttaaacgtattatttatatggcggaatgtatttattagttcgtttttatttattttaaaatttagacgttcgcggtttagcgtggtaggcgacgttacgtttagcgaggatttagtcgtcgtttagtaatagtcgattggacgtcgacgtgagttaaggatanacgggacgtggttttaaaggacgttgttaaatcgttagtngggttagacgttgcgttcgttggcgtagttgttttagatagttattggcggtaggcgataatagcgttattatgtcgtcgcgggtgagttgcgaggtatttagcgttcgttttacgttagtagtcgttttgtcgttgatacgtaggcggatgtcgttttagtttagttgtcgttagcgatcgttgaaggtttttatgtcgatgtttttagaaattcggttagcgggttggtggtatgagtaaaataattgcggttgttcggttcggattgacgtgttagtaggtttgtttttatcgttagacgaaatgttttcgttatgttgacgggatcgttcgcgacggtaatcgtcgtatttattaatatcgcgtcggtttttatttttagcgtttgcggggtatggttgggaacgtcgatgttagtatcgataattatcggtattgtggtttgttggataataatttttagtatggcgcgggtttttagttttttcgaacgtcgcgtatcgttattcgatggcggtcgcgggaattcgattgggagtaaatagagtttggaatagt

SEQ ID NO: 11334 - DNA, 977 bp, Artificial Sequence
  chemically treated genomic DNA (Homo sapiens) CpG-island No: 11334
  unsure (561, 601)
actattccaaactctatttactcccaatcgaattcccgcgaccgccatcgaataacgatacgcgacgttcgaaaaaactaaaaacccgcgccatactaaaaattattatccaacaaaccacaataccgataattatcgatactaacatcgacgttcccaaccataccccgcaaacgctaaaaataaaaaccgacgcgatattaataaatacgacgattaccgtcgcgaacgatcccgtcaacataacgaaaacatttcgtctaacgataaaaacaaacctactaacacgtcaatccgaaccgaacaaccgcaattattttactcataccaccaacccgctaaccgaatttctaaaaacatcgacataaaaaccttcaacgatcgctaacgacaactaaactaaaacgacatccgcctacgtatcaacgacaaaacgactactaacgtaaaacgaacgctaaatacctcgcaactcacccgcgacgacataataacgctattatcgcctaccgccaataactatctaaaacaactacgccaacgaacgcaacgtctaacccnactaacgatttaacaacgtcctttaaaaccacgtcccgtntatccttaactcacgtcgacgtccaatcgactattactaaacgacgactaaatcctcgctaaacgtaacgtcgcctaccacgctaaaccgcgaacgtctaaattttaaaataaataaaaacgaactaataaatacattccgccatataaataatacgtttaaacaaaccaacgaaaccatcgacgtacgcgccaataacgcgatcaacgacataatacgtcaacgtctactaaaccgctttaccaacgaacaaacgaaaaaaaacgcaatttaccgtctaacgccgctcgacatcgacattactaactactacatccgtcaacgcgaattttctacgctacgtctttctatacaattatcgattataacgaataaa

SEQ ID NO: 11335 - DNA, 977 bp, Artificial Sequence
  chemically treated genomic DNA (Homo sapiens) CpG-island No: 11335
  unsure (561, 601)
attgttttaagttttatttgtttttaatcgaattttcgcggtcgttatcggatggcgatgcgcgacgttcggggggattggaaattcgcgttatgttggagattattatttagtaggttatagtgtcggtggttgtcgatgttggtatcggcgtttttagttatgtttcgtaggcgttggaaatgggggtcgacgcggtgttagtgaatacggcgattgtcgtcgcggacgatttcgttaatatggcgaaggtatttcgtttggcggtagaagtaggtttattggtacgttagttcggatcgggtagtcgtagttattttgtttatgttattagttcgttgatcggatttttggaggtatcggtatgaaaatttttagcgatcgttggcgataattggattgggacgatattcgtttgcgtattaacggtaaaacggttgttgacgtagagcgggcgttaaatgtttcgtaatttattcgcgacgatatgatggcgttgttatcgtttgtcgttagtggttatttggaataattgcgttaacgggcgtagcgtttgatttngttagcgatttggtaacgttttttaaaattacgtttcgtntatttttaatttacgtcgacgtttagtcggttattattggacgacgattagattttcgttggacgtgacgtcgtttattacgttaaatcgcgagcgtttggattttgagatgagtgaaggcgagttggtggatgtatttcgttatgtgagtgatgcgtttgagtaaattagcgaaattatcggcgtgcgcgttaataacgcgattaacgatatggtgcgttaacgtttgttgaatcgttttattagcgagtaggcggaagggaacgtaatttatcgtttgacgtcgttcggtatcggtattattgattattatattcgttagcgcgagttttttacgttgcgtttttttatgtagttgtcgattgtggcgggtgag

SEQ ID NO: 11336 - DNA, 977 bp, Artificial Sequence
  chemically treated genomic DNA (Homo sapiens) CpG-island No: 11336
  unsure (377, 417)
ctcacccgccacaatcgacaactacataaaaaaacgcaacgtaaaaaactcgcgctaacgaatataataatcaataataccgataccgaacgacgtcaaacgataaattacgttcccttccgcctactcgctaataaaacgattcaacaaacgttaacgcaccatatcgttaatcgcgttattaacgcgcacgccgataatttcgctaatttactcaaacgcatcactcacataacgaaatacatccaccaactcgccttcactcatctcaaaatccaaacgctcgcgatttaacgtaataaacgacgtcacgtccaacgaaaatctaatcgtcgtccaataataaccgactaaacgtcgacgtaaattaaaaatanacgaaacgtaattttaaaaaacgttaccaaatcgctaacnaaatcaaacgctacgcccgttaacgcaattattccaaataaccactaacgacaaacgataacaacgccatcatatcgtcgcgaataaattacgaaacatttaacgcccgctctacgtcaacaaccgttttaccgttaatacgcaaacgaatatcgtcccaatccaattatcgccaacgatcgctaaaaattttcataccgatacctccaaaaatccgatcaacgaactaataacataaacaaaataactacgactacccgatccgaactaacgtaccaataaacctacttctaccgccaaacgaaataccttcgccatattaacgaaatcgtccgcgacgacaatcgccgtattcactaacaccgcgtcgacccccatttccaacgcctacgaaacataactaaaaacgccgataccaacatcgacaaccaccgacactataacctactaaataataatctccaacataacgcgaatttccaatccccccgaacgtcgcgcatcgccatccgataacgaccgcgaaaattcgattaaaaacaaataaaacttaaaacaat

SEQ ID NO: 11337 - DNA, 653 bp, Artificial Sequence
  chemically treated genomic DNA (Homo sapiens) CpG-island No: 11337
gtcgcggtaggaaaagtaaaagttacggcgtataaatgcgatttttgtgcggggcgcgaaaacggttttgtttgtgttgagaattgttcggcggacgcgttgtaattggttattgacgtcgtatttttcggtatggcgaaatttcgtcgtttggtatcgcggttaggaatattaatcgtggtatgttagtatcgcggcgtaagaaatgtcggtaatgagtaaagtcgaataaatgtaggtaacgttcgcgcgtggtcgagtcggtataaattggcgattgaagcgcgtaaaatcggttttgaagaaatttatttgttatttcgcgacgattaggtattacgtgaattatatcgttgttttaagtgcggcgagtatagcgtttgttaatggatttgttcgtagtataattatatatcgtagtggaatgaattggtgaaagtcggaaatattcgacgtcgtcgtcgagtttttttattagattaataatttgtcgtatattatcggacgcgtttgttcgtaagatcgtttgtgtgaaggcgtttgtattattcgcgatgagtacggcgcggtaattatcgttaatattgaacgttatattttagattaggcgttggcgaaaggttggcgtttttgatataagtttatgttattaa

SEQ ID NO: 11338 - DNA, 653 bp, Artificial Sequence
  chemically treated genomic DNA (Homo sapiens) CpG-island No: 11338
ttaataacataaacttatatcaaaaacgccaacctttcgccaacgcctaatctaaaatataacgttcaatattaacgataattaccgcgccgtactcatcgcgaataatacaaacgccttcacacaaacgatcttacgaacaaacgcgtccgataatatacgacaaattattaatctaataaaaaaactcgacgacgacgtcgaatatttccgactttcaccaattcattccactacgatatataattatactacgaacaaatccattaacaaacgctatactcgccgcacttaaaacaacgatataattcacgtaatacctaatcgtcgcgaaataacaaataaatttcttcaaaaccgattttacgcgcttcaatcgccaatttataccgactcgaccacgcgcgaacgttacctacatttattcgactttactcattaccgacatttcttacgccgcgatactaacataccacgattaatattcctaaccgcgataccaaacgacgaaatttcgccataccgaaaaatacgacgtcaataaccaattacaacgcgtccgccgaacaattctcaacacaaacaaaaccgttttcgcgccccgcacaaaaatcgcatttatacgccgtaacttttacttttcctaccgcgac

SEQ ID NO: 11339 - DNA, 653 bp, Artificial Sequence
  chemically treated genomic DNA (Homo sapiens) CpG-island No: 11339
ttggtgatatgagtttatgttagagacgttaatttttcgttaacgtttgatttgaaatgtagcgtttaatgttgacgatagttatcgcgtcgtgtttatcgcgaatagtataggcgtttttatataaacggttttgcgggtagacgcgttcggtaatatgcggtaggttgttggtttggtgagaaagttcgacggcggcgtcgagtgttttcggtttttattagtttattttattgcggtatatggttatgttgcgggtaggtttattgataaacgttgtgttcgtcgtatttaaggtagcggtgtagtttacgtagtgtttggtcgtcgcgaaatggtagataagtttttttaaaatcggttttgcgcgttttaatcgttagtttatgtcggttcggttacgcgcgggcgttgtttgtatttgttcgattttatttattatcggtattttttgcgtcgcggtattggtatgttacggttgatgtttttgatcgcggtgttaagcggcgggatttcgttatgtcggagagtgcgacgttagtgattagttgtagcgcgttcgtcgggtaatttttaatataggtaggatcgttttcgcgtttcgtataaaggtcgtatttatgcgtcgtggtttttattttttttgtcgcgat

SEQ ID NO: 11340 - DNA, 653 bp, Artificial Sequence
  chemically treated genomic DNA (Homo sapiens) CpG-island No: 11340
atcgcgacaaaaaaaataaaaaccacgacgcataaatacgacctttatacgaaacgcgaaaacgatcctacctatattaaaaattacccgacgaacgcgctacaactaatcactaacgtcgcactctccgacataacgaaatcccgccgcttaacaccgcgatcaaaaacatcaaccgtaacataccaataccgcgacgcaaaaaataccgataataaataaaatcgaacaaatacaaacaacgcccgcgcgtaaccgaaccgacataaactaacgattaaaacgcgcaaaaccgattttaaaaaaacttatctaccatttcgcgacgaccaaacactacgtaaactacaccgctaccttaaatacgacgaacacaacgtttatcaataaacctacccgcaacataaccatataccgcaataaaataaactaataaaaaccgaaaacactcgacgccgccgtcgaactttctcaccaaaccaacaacctaccgcatattaccgaacgcgtctacccgcaaaaccgtttatataaaaacgcctatactattcgcgataaacacgacgcgataactatcgtcaacattaaacgctacatttcaaatcaaacgttaacgaaaaattaacgtctctaacataaactcatatcaccaa

SEQ ID NO: 11341 - DNA, 525 bp, Artificial Sequence
  chemically treated genomic DNA (Homo sapiens) CpG-island No: 11341
  unsure (314)
cgcgtgttgtaggaatagcgattggaagttatcgcgtaaattaaagaggtataaagcgtcgttgttgtcgcgtaggttttgttggagtaacgataaagcgaaattcgtgtcgtatagtcgttggttaattaacgttaggtagaattggatttcgtagtaaaacgttatacgcgttttcgtttattggtttaacgaggggttatttttgcgtaatagttggatgacgatcgcgtcgtcgttgagagcgttcgagttgcgttggaatcggcgaaagttaggtatcggtttttaaagcggttatagaagcggtacgnattaatattatttaggcgtaaattcgcgtcgaagcggtataagttattgaacggcgtattgtttagatatcgatgatagcgaattgaaagtttcgcgtgacggacgcgtgtagtatcgggttgttaagtaggcgaagtgttggtttttttatgtttatatggtcggtatggaagaagggtttttgtcgtattagagtagtatcgatgaaga

SEQ ID NO: 11342 - DNA, 525 bp, Artificial Sequence
  chemically treated genomic DNA (Homo sapiens) CpG-island No: 11342
  unsure (212)
tcttcatcgatactactctaatacgacaaaaacccttcttccataccgaccatataaacataaaaaaaccaacacttcgcctacttaacaacccgatactacacgcgtccgtcacgcgaaactttcaattcgctatcatcgatatctaaacaatacgccgttcaataacttataccgcttcgacgcgaatttacgcctaaataatattaatncgtaccgcttctataaccgctttaaaaaccgatacctaactttcgccgattccaacgcaactcgaacgctctcaacgacgacgcgatcgtcatccaactattacgcaaaaataacccctcgttaaaccaataaacgaaaacgcgtataacgttttactacgaaatccaattctacctaacgttaattaaccaacgactatacgacacgaatttcgctttatcgttactccaacaaaacctacgcgacaacaacgacgctttatacctctttaatttacgcgataacttccaatcgctattcctacaacacgcg

SEQ ID NO: 11343 - DNA, 525 bp, Artificial Sequence
  chemically treated genomic DNA (Homo sapiens) CpG-island No: 11343
  unsure (212)
tttttatcgatgttgttttggtgcggtaaaaattttttttttatatcgattatgtagatataaggaaattagtatttcgtttgtttggtaattcgatattgtacgcgttcgttacgcggggtttttagttcgttgttatcgatatttgggtaatgcgtcgtttagtggtttgtgtcgtttcgacgcgggtttgcgtttgaatgatattggtncgtgtcgtttttatagtcgttttagaagtcgatatttgattttcgtcgattttagcgtagttcgggcgtttttagcggcggcgcgatcgttatttagttgttgcgtagaaatagtttttcgttgggttagtgaacgggaacgcgtatgacgttttgttacggagtttagttttgtttggcgttgattaattagcgattgtgcggtacgagtttcgttttgtcgttgttttagtaaagtttgcgcggtagtaacggcgttttgtgtttttttgatttgcgcgatggtttttagtcgttgtttttgtaatacgcg

SEQ ID NO: 11344 - DNA, 525 bp, Artificial Sequence
  chemically treated genomic DNA (Homo sapiens) CpG-island No: 11344
  unsure (314)
cgcgtattacaaaaacaacgactaaaaaccatcgcgcaaatcaaaaaaacacaaaacgccgttactaccgcgcaaactttactaaaacaacgacaaaacgaaactcgtaccgcacaatcgctaattaatcaacgccaaacaaaactaaactccgtaacaaaacgtcatacgcgttcccgttcactaacccaacgaaaaactatttctacgcaacaactaaataacgatcgcgccgccgctaaaaacgcccgaactacgctaaaatcgacgaaaatcaaatatcgacttctaaaacgactataaaaacgacacgnaccaatatcattcaaacgcaaacccgcgtcgaaacgacacaaaccactaaacgacgcattacccaaatatcgataacaacgaactaaaaaccccgcgtaacgaacgcgtacaatatcgaattaccaaacaaacgaaatactaatttccttatatctacataatcgatataaaaaaaaaatttttaccgcaccaaaacaacatcgataaaaa

SEQ ID NO: 11345 - DNA, 1460 bp, Artificial Sequence
  chemically treated genomic DNA (Homo sapiens) CpG-island No: 11345
  unsure (38, 75, 98, 126, 132, 141, 250, 783, 810, 1042, 1236)
gtgtcgttcgtgatttgtgcgtcgtgagtgtcggattngatggatgtatgacgtgtattgcgtcgagtgttcgtngcgtcgttagcgtcgttgcgggntaggagtgtatattaggcgtcgcgcgtngtcgangtggtgttncgtcgcgttcgcgtgttacgcgatgcggatgtttcgatatgcgttgcgcggattcggttgtgtggatcgagtgttagtcgtacggtgtacgtcgacggggatgattttntgcgtaggtgtatgttcgtcgtttgtcgtgtttcgacgcgttggacgatgcgacgtagtttggtcgaggatgtttttcgtgcgtttttgtttttcgttttcgtatagcgtgggtgttcgagtttggcgttattgcgtcgttatggtgagtgggtagcgtcgttgtggcggtggttgtacgaagtgcgtgttcgatggtgtttcgcgcgagttgtcgttgtatggagtgaaggtacgcgtagggagttgttaggattcgttgggagggggcgggcgtatggcgtagtcgacgtaggggttttgtcgtacgcgtatgcgaattgagtcggggttggaggtttggttatgtgcgagtgcgagagcgtgtgggcgagcgtgtgcgcggtgcggtgtgggagcgaacggtgcggtggagcgtgggggagaaacgtttggggcggtgtacgtcgaacgtgtagatcggtcgtgtgcgaggacgatgttcgttcgttgtgcggcgaggcgtggggtgagagtaggcgggagaggagggtncgcggcgagtcggattgcggcggcgtntcgcggagacgaggtgtgcggcgacggtgggaagtgggcgagatgggcgcggcgttggatgcgggtatgttgtttgcgttgtgacgggatgttggtggcgggtgatgtgttacgacgggggatgatgggtgggagtgcgtaggtacgaatgttggcgtgttggatgcgcggcgatgaggtgtagaggcgcgaggtcgttcggacgagcggcggcgcgagacgacgcgcggtntggagcggcggcgcgttggaggcgggcgttgtggttttggcgtgtcgcggggcgagtggcgggtgtgagcgagaggagaggcgtggtggacggcggtcgtcgcgggggaagcgtggcgatgggtggtcgaggagggtgtgtttaacgcggtcgagtggacgcggaagagcggcgggcggaggagcgaagagggncgttcggtggatgtacgcgcgtaggttgtgtatgagggtggtgatggtgcggtggatgagatggagtggggttgtttttaagagcggtgtacgggtggcgacgtgtgtcggggggagagatggtggcgggcgagattcgcgtatggtgtgtgagagggttgtaaagatgcgttggaagatatggtatggcggttcgatgaggagagagaaaggcggtatttttt

SEQ ID NO: 11346 - DNA, 1460 bp, Artificial Sequence
  chemically treated genomic DNA (Homo sapiens) CpG-island No: 11346
  unsure (225, 419, 651, 678, 1211, 1320, 1329, 1335, 1363, 1386, 1423)
aaaaaataccgcctttctctctcctcatcgaaccgccataccatatcttccaacgcatctttacaaccctctcacacaccatacgcgaatctcgcccgccaccatctctccccccgacacacgtcgccacccgtacaccgctcttaaaaacaaccccactccatctcatccaccgcaccatcaccaccctcatacacaacctacgcgcgtacatccaccgaacgnccctcttcgctcctccgcccgccgctcttccgcgtccactcgaccgcgttaaacacaccctcctcgaccacccatcgccacgcttcccccgcgacgaccgccgtccaccacgcctctcctctcgctcacacccgccactcgccccgcgacacgccaaaaccacaacgcccgcctccaacgcgccgccgctccanaccgcgcgtcgtctcgcgccgccgctcgtccgaacgacctcgcgcctctacacctcatcgccgcgcatccaacacgccaacattcgtacctacgcactcccacccatcatcccccgtcgtaacacatcacccgccaccaacatcccgtcacaacgcaaacaacatacccgcatccaacgccgcgcccatctcgcccacttcccaccgtcgccgcacacctcgtctccgcganacgccgccgcaatccgactcgccgcgnaccctcctctcccgcctactctcaccccacgcctcgccgcacaacgaacgaacatcgtcctcgcacacgaccgatctacacgttcgacgtacaccgccccaaacgtttctcccccacgctccaccgcaccgttcgctcccacaccgcaccgcgcacacgctcgcccacacgctctcgcactcgcacataaccaaacctccaaccccgactcaattcgcatacgcgtacgacaaaacccctacgtcgactacgccatacgcccgccccctcccaacgaatcctaacaactccctacgcgtaccttcactccatacaacgacaactcgcgcgaaacaccatcgaacacgcacttcgtacaaccaccgccacaacgacgctacccactcaccataacgacgcaataacgccaaactcgaacacccacgctatacgaaaacgaaaaacaaaaacgcacgaaaaacatcctcgaccaaactacgtcgcatcgtccaacgcgtcgaaacacgacaaacgacgaacatacacctacgcanaaaatcatccccgtcgacgtacaccgtacgactaacactcgatccacacaaccgaatccgcgcaacgcatatcgaaacatccgcatcgcgtaacacgcgaacgcgacgnaacaccacntcgacnacgcgcgacgcctaatatacactcctancccgcaacgacgctaacgacgcnacgaacactcgacgcaatacacgtcatacatccatcnaatccgacactcacgacgcacaaatcacgaacgacac

SEQ ID NO: 11347 - DNA, 1460 bp, Artificial Sequence
  chemically treated genomic DNA (Homo sapiens) CpG-island No: 11347
  unsure (225, 419, 651, 678, 1211, 1320, 1329, 1335, 1363, 1386, 1423)
aaaaagtatcgtttttttttttttttatcgagtcgttatattatattttttaacgtatttttataatttttttatatattatacgcgggtttcgttcgttattattttttttttcgatatacgtcgttattcgtgtatcgtttttaaggataattttattttattttatttatcgtattattattatttttatatataatttacgcgcgtatatttatcgagcgntttttttcgttttttcgttcgtcgttttttcgcgtttattcgatcgcgttgaatatatttttttcgattatttatcgttacgtttttttcgcgacgatcgtcgtttattacgttttttttttcgtttatattcgttattcgtttcgcggtacgttaggattatagcgttcgtttttagcgcgtcgtcgttttangtcgcgcgtcgtttcgcgtcgtcgttcgttcgagcggtttcgcgtttttatattttatcgtcgcgtatttagtacgttagtattcgtatttgcgtatttttatttattatttttcgtcgtgatatattattcgttattagtatttcgttatagcgtagataatatattcgtatttagcgtcgcgtttatttcgtttattttttatcgtcgtcgtatatttcgttttcgcganacgtcgtcgtaattcggttcgtcgcgngtttttttttttcgtttatttttattttacgtttcgtcgtataacgggcgggtatcgttttcgtatacggtcgatttatacgttcggcgtatatcgttttaggcgttttttttttacgttttatcgtatcgttcgtttttatatcgtatcgcgtatacgttcgtttatacgttttcgtattcgtatatggttaggtttttagtttcgatttagttcgtatgcgcgtgcgatagagtttttgcgtcgattgcgttatgcgttcgtttttttttaacgggttttggtaattttttgcgcgtgtttttattttatgtagcgataattcgcgcggagtattatcggatacgtatttcgtgtagttatcgttatagcggcgttatttatttattatggcggcgtaatgacgttaagttcggatatttacgttgtacgagaacgagagatagaggcgtacggagagtattttcggttagattacgtcgtatcgtttagcgcgtcgaggtacggtaagcgacggatatgtatttacgtanggagttattttcgtcggcgtgtatcgtgcgattggtattcgatttatatagtcggattcgcgtaacgtatgtcgaggtattcgtatcgcgtagtacgcgagcgcgacgngatattatntcgatnacgcgcggcgtttaatatatatttttanttcgtagcgacgttggcggcgtnacgagtattcgacgtaatatacgttatatatttattngattcggtatttacggcgtatagattacgagcgatat

SEQ ID NO: 11348 - DNA, 1460 bp, Artificial Sequence
  chemically treated genomic DNA (Homo sapiens) CpG-island No: 11348
  unsure (38, 75, 98, 126, 132, 141, 250, 783, 810, 1042, 1236)
atatcgctcgtaatctatacgccgtaaataccgaatcnaataaatatataacgtatattacgtcgaatactcgtnacgccgccaacgtcgctacgaantaaaaatatatattaaacgccgcgcgtnatcganataatatcncgtcgcgctcgcgtactacgcgatacgaatacctcgacatacgttacgcgaatccgactatataaatcgaataccaatcgcacgatacacgccgacgaaaataactccntacgtaaatacatatccgtcgcttaccgtacctcgacgcgctaaacgatacgacgtaatctaaccgaaaatactctccgtacgcctctatctctcgttctcgtacaacgtaaatatccgaacttaacgtcattacgccgccataataaataaataacgccgctataacgataactacacgaaatacgtatccgataatactccgcgcgaattatcgctacataaaataaaaacacgcgcaaaaaattaccaaaacccgttaaaaaaaaacgaacgcataacgcaatcgacgcaaaaactctatcgcacgcgcatacgaactaaatcgaaactaaaaacctaaccatatacgaatacgaaaacgtataaacgaacgtatacgcgatacgatataaaaacgaacgatacgataaaacgtaaaaaaaaaacgcctaaaacgatatacgccgaacgtataaatcgaccgtatacgaaaacgatacccgcccgttatacgacgaaacgtaaaataaaaataaacgaaaaaaaaaaacncgcgacgaaccgaattacgacgacgtntcgcgaaaacgaaatatacgacgacgataaaaaataaacgaaataaacgcgacgctaaatacgaatatattatctacgctataacgaaatactaataacgaataatatatcacgacgaaaaataataaataaaaatacgcaaatacgaatactaacgtactaaatacgcgacgataaaatataaaaacgcgaaaccgctcgaacgaacgacgacgcgaaacgacgcgcgacntaaaacgacgacgcgctaaaaacgaacgctataatcctaacgtaccgcgaaacgaataacgaatataaacgaaaaaaaaaacgtaataaacgacgatcgtcgcgaaaaaaacgtaacgataaataatcgaaaaaaatatattcaacgcgatcgaataaacgcgaaaaaacgacgaacgaaaaaacgaaaaaaancgctcgataaatatacgcgcgtaaattatatataaaaataataataatacgataaataaaataaaataaaattatccttaaaaacgatacacgaataacgacgtatatcgaaaaaaaaaataataacgaacgaaacccgcgtataatatataaaaaaattataaaaatacgttaaaaaatataatataacgactcgataaaaaaaaaaaaaaacgatacttttt

SEQ ID NO: 11349 - DNA, 764 bp, Artificial Sequence
  chemically treated genomic DNA (Homo sapiens) CpG-island No: 11349
gtcgcgtattagggcgttgttgcggcgtttttttcgtatgttgttggtggatcggttgtcggggttgtagggcgcgttggatttgttggtcgtgttgtgcgtggacggttcgggtcgtgcgcgttaggttgtttgttgcgtggcgcgttcgggtatatcgagtttgttgcgtttcgcgttcgcgtcgttgttgtagagcgcgttagacgttaagggtcgcgtgcgttgttttatcgtcgggttcgaggtggcggcgtagttgtttgtagtgcgttagttgttgttttgcgcgcgcgtgtagatttgtcgcgcgtagggtttggagacgttttttagtaaggcgtaggagttgggcggtttcggtcgcgaggatcggggtttgtggtcgtttttgtgtcgtttggttgtcgcgtcgtcgttcgtagttatcgacgaggcgttggttgagttttacgtttacggtttagtcgttttcgtggattatttcgagcgtaattgggagtttcgtcgcgatatgtgggttcgttttcgcgttttcgaggcggttagagatttggacgcgtgtgttttggtgcgaggttatcgtcggcgattgttgcgtcgttttagtttttcgcgtggcgtggcgtagtgttttcgcgatttggtggttatgtagtgggtcgacgcggtcggggaggcggtgttcgaggggttcgatggcggggggttttggttggaggatgagttagggaggggagtttagggggagaacgagagggtga

SEQ ID NO: 11350 - DNA, 764 bp, Artificial Sequence
  chemically treated genomic DNA (Homo sapiens) CpG-island No: 11350
tcaccctctcgttctccccctaaactcccctccctaactcatcctccaaccaaaaccccccgccatcgaacccctcgaacaccgcctccccgaccgcgtcgacccactacataaccaccaaatcgcgaaaacactacgccacgccacgcgaaaaactaaaacgacgcaacaatcgccgacgataacctcgcaccaaaacacacgcgtccaaatctctaaccgcctcgaaaacgcgaaaacgaacccacatatcgcgacgaaactcccaattacgctcgaaataatccacgaaaacgactaaaccgtaaacgtaaaactcaaccaacgcctcgtcgataactacgaacgacgacgcgacaaccaaacgacacaaaaacgaccacaaaccccgatcctcgcgaccgaaaccgcccaactcctacgccttactaaaaaacgtctccaaaccctacgcgcgacaaatctacacgcgcgcgcaaaacaacaactaacgcactacaaacaactacgccgccacctcgaacccgacgataaaacaacgcacgcgacccttaacgtctaacgcgctctacaacaacgacgcgaacgcgaaacgcaacaaactcgatatacccgaacgcgccacgcaacaaacaacctaacgcgcacgacccgaaccgtccacgcacaacacgaccaacaaatccaacgcgccctacaaccccgacaaccgatccaccaacaacatacgaaaaaaacgccgcaacaacgccctaatacgcgac

SEQ ID NO: 11351 - DNA, 764 bp, Artificial Sequence
  chemically treated genomic DNA (Homo sapiens) CpG-island No: 11351
ttattttttcgttttttttttgggtttttttttttggtttattttttagttaaggtttttcgttatcgggtttttcgggtatcgttttttcggtcgcgtcggtttattgtatggttattaggtcgcgaaggtattgcgttacgttacgcgaggggttgagacgacgtagtagtcgtcggcggtggtttcgtattagggtatacgcgtttaggtttttggtcgtttcgaaggcgcggaagcggatttatatgtcgcggcggggtttttagttgcgttcgaagtagtttacgaaggcggttgggtcgtgggcgtggagtttagttagcgtttcgtcggtagttgcgggcgacgacgcggtagttaggcggtataggagcgattataggtttcggttttcgcggtcggggtcgtttagtttttgcgttttgttgaagagcgtttttaggttttgcgcgcggtagatttgtacgcgcgcgtagggtagtagttggcgtattgtaggtaattgcgtcgttatttcgggttcggcggtgaggtagcgtacgcggtttttgacgtttggcgcgttttgtagtagcgacgcgagcgcgaagcgtagtaggttcggtgtgttcgggcgcgttacgtagtaggtagtttggcgcgtacggttcgagtcgtttacgtatagtacggttagtagatttagcgcgttttgtagtttcggtagtcggtttattagtagtatgcgagggaagcgtcgtagtagcgttttggtgcgcgat

SEQ ID NO: 11352 - DNA, 764 bp, Artificial Sequence
  chemically treated genomic DNA (Homo sapiens) CpG-island No: 11352
atcgcgcaccaaaacgctactacgacgcttccctcgcatactactaataaaccgactaccgaaactacaaaacgcgctaaatctactaaccgtactatacgtaaacgactcgaaccgtacgcgccaaactacctactacgtaacgcgcccgaacacaccgaacctactacgcttcgcgctcgcgtcgctactacaaaacgcgccaaacgtcaaaaaccgcgtacgctacctcaccgccgaacccgaaataacgacgcaattacctacaatacgccaactactaccctacgcgcgcgtacaaatctaccgcgcgcaaaacctaaaaacgctcttcaacaaaacgcaaaaactaaacgaccccgaccgcgaaaaccgaaacctataatcgctcctataccgcctaactaccgcgtcgtcgcccgcaactaccgacgaaacgctaactaaactccacgcccacgacccaaccgccttcgtaaactacttcgaacgcaactaaaaaccccgccgcgacatataaatccgcttccgcgccttcgaaacgaccaaaaacctaaacgcgtataccctaatacgaaaccaccgccgacgactactacgtcgtctcaacccctcgcgtaacgtaacgcaataccttcgcgacctaataaccatacaataaaccgacgcgaccgaaaaaacgatacccgaaaaacccgataacgaaaaaccttaactaaaaaataaaccaaaaaaaaaaacccaaaaaaaaaacgaaaaaataa

SEQ ID NO: 11353 - DNA, 958 bp, Artificial Sequence
  chemically treated genomic DNA (Homo sapiens) CpG-island No: 11353
attattcggtttaggttgggaatattgagcgtttcggagttaattattattgcgtcgtagtcgttgatcgttatgtattgttgcgcgttttgttagttttagattttatcgttggtaattatcggaatatttagtcgttgggatatatcgttaatcgtttgttagttaatatgtttcgcgcggtaattttgttttttcgttcgtttattgtattattagtttcgtagcgttaggttgttgaatcggtatcggcgattttaaatttttttttagcggtgttttaggtttagacgtatttttacgttgacgggtaaatgcgtcggtatagttttacgtatcggttttgtattttggtagatgagtttaggatttttgagtaacgtcgtttcgtcgtcgttatcgttaatcgttttcgacgggtagtcgtaattgagatttacgttttaggaatttaattttatcgtacgggcggcgttttttgttagttattgtgggaattgatttaataattgtacgcgtattagcgtattagatggtgtcgaggtagaaggaatttattttaacggagtagaagcgtattagacgttgtatatttcgtggaaatcgtatgtttcgtacgttttgaggatgtttttttgtgttcgtttcgtataatttacggtttagcgatttagtattattatttttttcggttttattatattttttgttggattaaaatcgtttaggtttgttagtaggaagcgcgcggtgttatagggtagttattatttcggtaatggtattattaaatagatttgcgagtaaatagaaaatgtttgtaacggtacggttattaacgttgatttttattcggatgcgttttcgggttttggtaaatagtcgcggtgattgtcgtaatatcgacggaataaacgtcgaaaggggaaaaaattagtgttagtaatttagtaaatat

SEQ ID NO: 11354 - DNA, 958 bp, Artificial Sequence
  chemically treated genomic DNA (Homo sapiens) CpG-island No: 11354
atatttactaaattactaacactaattttttcccctttcgacgtttattccgtcgatattacgacaatcaccgcgactatttaccaaaacccgaaaacgcatccgaataaaaatcaacgttaataaccgtaccgttacaaacattttctatttactcgcaaatctatttaataataccattaccgaaataataactaccctataacaccgcgcgcttcctactaacaaacctaaacgattttaatccaacaaaaaatataataaaaccgaaaaaaataataatactaaatcgctaaaccgtaaattatacgaaacgaacacaaaaaaacatcctcaaaacgtacgaaacatacgatttccacgaaatatacaacgtctaatacgcttctactccgttaaaataaattccttctacctcgacaccatctaatacgctaatacgcgtacaattattaaatcaattcccacaataactaacaaaaaacgccgcccgtacgataaaattaaattcctaaaacgtaaatctcaattacgactacccgtcgaaaacgattaacgataacgacgacgaaacgacgttactcaaaaatcctaaactcatctaccaaaatacaaaaccgatacgtaaaactataccgacgcatttacccgtcaacgtaaaaatacgtctaaacctaaaacaccgctaaaaaaaaatttaaaatcgccgataccgattcaacaacctaacgctacgaaactaataatacaataaacgaacgaaaaaacaaaattaccgcgcgaaacatattaactaacaaacgattaacgatatatcccaacgactaaatattccgataattaccaacgataaaatctaaaactaacaaaacgcgcaacaatacataacgatcaacgactacgacgcaataataattaactccgaaacgctcaatattcccaacctaaaccgaataat

SEQ ID NO: 11355 - DNA, 958 bp, Artificial Sequence
  chemically treated genomic DNA (Homo sapiens) CpG-island No: 11355
gtatttattggattgttggtattggtttttttttttttcggcgtttatttcgtcggtattgcggtaattatcgcggttatttgttaaagttcggaagcgtattcggataaagattaacgttggtggtcgtgtcgttgtaggtattttttatttgttcgtaggtttgtttggtagtgttattatcgggatgatggttgttttgtaatatcgcgcgttttttgttggtaaatttgaacggttttgatttagtaaaagatatggtgaaatcggaagagatggtggtattggatcgttgggtcgtaggttgtgcgaaacgggtataggaagatatttttaaggcgtacgaagtatacgatttttacgaagtgtatagcgtttgatgcgtttttgtttcgttgagatgggttttttttatttcgatattatttggtacgttggtgcgcgtgtagttgttaggttagtttttataatggttggtagagaacgtcgttcgtgcggtggagttaggtttttggggcgtggattttaattgcggttgttcgtcgaaaacggttaacggtagcggcggcggggcgacgttatttaaagattttgaatttatttattagggtgtaaaatcgatgcgtgaagttgtatcggcgtatttgttcgttagcgtgaaagtgcgtttgggtttgggatatcgttgagaagaaatttgaaatcgtcgatgtcggtttaatagtttggcgttacggagttggtggtgtaatgggcggacgaaagagtagggttatcgcgcggagtatattgattggtaggcgattggcgatatattttagcggttgaatatttcggtgattgttaacggtgaaatttgggattggtagagcgcgtaataatgtatggcgattagcggttgcgacgtagtgatgattggtttcggggcgtttaatatttttaatttgagtcgggtggt

SEQ ID NO: 11356 - DNA, 958 bp, Artificial Sequence
  chemically treated genomic DNA (Homo sapiens) CpG-island No: 11356
accacccgactcaaattaaaaatattaaacgccccgaaaccaatcatcactacgtcgcaaccgctaatcgccatacattattacgcgctctaccaatcccaaatttcaccgttaacaatcaccgaaatattcaaccgctaaaatatatcgccaatcgcctaccaatcaatatactccgcgcgataaccctactctttcgtccgcccattacaccaccaactccgtaacgccaaactattaaaccgacatcgacgatttcaaatttcttctcaacgatatcccaaacccaaacgcactttcacgctaacgaacaaatacgccgatacaacttcacgcatcgattttacaccctaataaataaattcaaaatctttaaataacgtcgccccgccgccgctaccgttaaccgttttcgacgaacaaccgcaattaaaatccacgccccaaaaacctaactccaccgcacgaacgacgttctctaccaaccattataaaaactaacctaacaactacacgcgcaccaacgtaccaaataatatcgaaataaaaaaaacccatctcaacgaaacaaaaacgcatcaaacgctatacacttcgtaaaaatcgtatacttcgtacgccttaaaaatatcttcctatacccgtttcgcacaacctacgacccaacgatccaataccaccatctcttccgatttcaccatatcttttactaaatcaaaaccgttcaaatttaccaacaaaaaacgcgcgatattacaaaacaaccatcatcccgataataacactaccaaacaaacctacgaacaaataaaaaatacctacaacgacacgaccaccaacgttaatctttatccgaatacgcttccgaactttaacaaataaccgcgataattaccgcaataccgacgaaataaacgccgaaaaaaaaaaaaaccaataccaacaatccaataaatac

SEQ ID NO: 11357 - DNA, 517 bp, Artificial Sequence
  chemically treated genomic DNA (Homo sapiens) CpG-island No: 11357
  unsure (180)
ttggaagtatttagacgttgacgcgaataaaacgtaaagtgcgtttggttgttggtttgaatagcgaaaatgttttttttaatgaagtaatggagcgcggttggtaatgtttgcgtttgtttgttgaacgtttgtaagatatttttttttcgtaaattcgcgttgtcgttacgggcgatntacgttttgtcgttaatgcgggtgattttattgttaaagcgtaggaaattttcggttgttcggtataggtgattagcggtgaagaggaagtacgtttgatttattagggcgttgtttatattattggtggtgtcggattagcgtttggtggtggatataggcggatagtattgaattggtaatcggtacggtgtatagatatttcgttgttcggttgtcgatgggttgggtaattggttggacgttatttggcgatcgaatttggggcggaaaatttgaggtgtagaaaagcggaggaagtgttacgtcggttgcgatgattacggtattaggttgg

SEQ ID NO: 11358 - DNA, 517 bp, Artificial Sequence
  chemically treated genomic DNA (Homo sapiens) CpG-island No: 11358
  unsure (338)
ccaacctaataccgtaatcatcgcaaccgacgtaacacttcctccgcttttctacacctcaaattttccgccccaaattcgatcgccaaataacgtccaaccaattacccaacccatcgacaaccgaacaacgaaatatctatacaccgtaccgattaccaattcaatactatccgcctatatccaccaccaaacgctaatccgacaccaccaataatataaacaacgccctaataaatcaaacgtacttcctcttcaccgctaatcacctataccgaacaaccgaaaatttcctacgctttaacaataaaatcacccgcattaacgacaaaacgtanatcgcccgtaacgacaacgcgaatttacgaaaaaaaaatatcttacaaacgttcaacaaacaaacgcaaacattaccaaccgcgctccattacttcattaaaaaaaacattttcgctattcaaaccaacaaccaaacgcactttacgttttattcgcgtcaacgtctaaatacttccaa

SEQ ID NO: 11359 - DNA, 517 bp, Artificial Sequence
  chemically treated genomic DNA (Homo sapiens) CpG-island No: 11359
  unsure (338)
ttagtttgatatcgtaattatcgtaatcgacgtaatatttttttcgtttttttgtattttaaatttttcgttttagattcgatcgttaaatagcgtttagttagttatttagtttatcgatagtcgaataacgaggtgtttgtgtatcgtgtcggttattagtttagtattgttcgtttatatttattattaggcgttgattcggtattattagtggtgtgagtaacgttttgataaattagacgtgttttttttttatcgttgattatttgtatcggataatcgagaattttttgcgttttggtaataaaattattcgtattgacggtaaggcgtanatcgttcgtagcgataacgcgaatttgcgagggaggaatattttgtagacgtttagtaaataggcgtaaatattgttaatcgcgttttattgttttattggagagggtattttcgttatttaggttagtagttagacgtattttgcgttttattcgcgttagcgtttggatgtttttag

SEQ ID NO: 11360 - DNA, 517 bp, Artificial Sequence
  chemically treated genomic DNA (Homo sapiens) CpG-island No: 11360
  unsure (180)
ctaaaaacatccaaacgctaacgcgaataaaacgcaaaatacgtctaactactaacctaaataacgaaaataccctctccaataaaacaataaaacgcgattaacaatatttacgcctatttactaaacgtctacaaaatattcctccctcgcaaattcgcgttatcgctacgaacgatntacgccttaccgtcaatacgaataattttattaccaaaacgcaaaaaattctcgattatccgatacaaataatcaacgataaaaaaaaaacacgtctaatttatcaaaacgttactcacaccactaataataccgaatcaacgcctaataataaatataaacgaacaatactaaactaataaccgacacgatacacaaacacctcgttattcgactatcgataaactaaataactaactaaacgctatttaacgatcgaatctaaaacgaaaaatttaaaatacaaaaaaacgaaaaaaatattacgtcgattacgataattacgatatcaaactaa

SEQ ID NO: 11361 - DNA, 964 bp, Artificial Sequence
  chemically treated genomic DNA (Homo sapiens) CpG-island No: 11361
gggtttttcgtatttcgggagtttgtcggaataattatatacgttacggcgcgttgaatcgcgtttattcgtttcggtaggttttgtcgggatcggcgggtcgtagattggtgtttattcgttggtaacgtcgggtggttggtagttgattggttatattttatttagtttgtttgattcggcgcgtgacgaatttattttattacgttcgggagatagcgtgcgttttgtatcgtagaaggagggagtatgttgaagattattcgtgcgggtatgtatattattgtgtaggatggcggtcgttacggttttcgttagtcgggtattagttattgcggcgtattggatatgttcgcgttacgtattgttaatttattggtgggtaatgacgttaatgttttcgcgttggagattacgttcggttagttaattgttgagttcgaaattgatgggtggtttgttttgacgggtgtcggttgcgaagcgcggttggatgataatgtcgtttggatcggttggcgattgtcgatgaaagtaggttagcgtttaacgtttaaacgttcgtagtacgggatgcgtagttatttggcggtcgcgggtggtattgatgtttcgtcggtaatgggtttatgtagtatcgattttaaagtggggattggcgggttggaaggtcgtttattgaaggatggtgatcgattttcgattggtaaatcgaagcgtgattttatggaagttagggcgttaaatagttgttgtggggtaatttattcgcgttttgtcggggtcggaatattattagttcgatcgcgtttcgtaggatgtattcgtggttcgttttggtagtttagttcgtaaagtaatcgcgcggtattaatataggattttaggtattttgtatttacgtttaattagtatttatattttttttatggtatgcgtgggattcgtgtattttcggtgtggg

SEQ ID NO: 11362 - DNA, 964 bp, Artificial Sequence
  chemically treated genomic DNA (Homo sapiens) CpG-island No: 11362
cccacaccgaaaatacacgaatcccacgcataccataaaaaaaatataaatactaattaaacgtaaatacaaaatacctaaaatcctatattaataccgcgcgattactttacgaactaaactaccaaaacgaaccacgaatacatcctacgaaacgcgatcgaactaataatattccgaccccgacaaaacgcgaataaattaccccacaacaactatttaacgccctaacttccataaaatcacgcttcgatttaccaatcgaaaatcgatcaccatccttcaataaacgaccttccaacccgccaatccccactttaaaatcgatactacataaacccattaccgacgaaacatcaataccacccgcgaccgccaaataactacgcatcccgtactacgaacgtttaaacgttaaacgctaacctactttcatcgacaatcgccaaccgatccaaacgacattatcatccaaccgcgcttcgcaaccgacacccgtcaaaacaaaccacccatcaatttcgaactcaacaattaactaaccgaacgtaatctccaacgcgaaaacattaacgtcattacccaccaataaattaacaatacgtaacgcgaacatatccaatacgccgcaataactaatacccgactaacgaaaaccgtaacgaccgccatcctacacaataatatacatacccgcacgaataatcttcaacatactccctccttctacgatacaaaacgcacgctatctcccgaacgtaataaaataaattcgtcacgcgccgaatcaaacaaactaaataaaatataaccaatcaactaccaaccacccgacgttaccaacgaataaacaccaatctacgacccgccgatcccgacaaaacctaccgaaacgaataaacgcgattcaacgcgccgtaacgtatataattattccgacaaactcccgaaatacgaaaaaccc

SEQ ID NO: 11363 - DNA, 964 bp, Artificial Sequence
  chemically treated genomic DNA (Homo sapiens) CpG-island No: 11363
tttatatcgaagatgtacgggttttacgtatattatggagggaatatagatgttagttggacgtgagtgtaggatgtttgaggttttgtattgatatcgcgcgattattttgcgagttaagttgttagggcgaattacggatgtattttgcgaggcgcgatcgaattgatgatatttcggtttcggtaaggcgcgaatggattgttttatagtagttgtttaacgttttggtttttatagaattacgtttcgatttgttaatcgggagtcggttattattttttagtaaacggttttttagttcgttaatttttattttgagatcggtgttgtatgagtttattatcggcggaatattaatattattcgcgatcgttagataattgcgtatttcgtgttgcgggcgtttaagcgttaaacgttggtttgtttttatcggtaatcgttagtcggtttagacggtattattatttagtcgcgtttcgtaatcggtattcgttagagtaaattatttattagtttcgaatttaatagttaattgatcgagcgtgatttttagcgcgggggtattggcgttattatttattagtaggttagtaatgcgtaacgcgggtatatttagtgcgtcgtagtggttgatattcgattggcgaaaatcgtgacgatcgttattttgtatagtggtatatatgttcgtacgaataatttttagtatattttttttttttgcggtataaagcgtacgttgtttttcggacgtaataagatgggttcgttacgcgtcggattaaataggttgagtgaggtatgattaattaattgttagttattcggcgttgttagcggataaatattagtttgcggttcgtcgatttcgatagaatttgtcggaacgagtaagcgcggtttagcgcgtcgtggcgtgtgtagttgtttcggtaaattttcgagatacgggaagttt

SEQ ID NO: 11364 - DNA, 964 bp, Artificial Sequence
  chemically treated genomic DNA (Homo sapiens) CpG-island No: 11364
aaacttcccgtatctcgaaaatttaccgaaacaactacacacgccacgacgcgctaaaccgcgcttactcgttccgacaaattctatcgaaatcgacgaaccgcaaactaatatttatccgctaacaacgccgaataactaacaattaattaatcatacctcactcaacctatttaatccgacgcgtaacgaacccatcttattacgtccgaaaaacaacgtacgctttataccgcaaaaaaaaaaaatatactaaaaattattcgtacgaacatatataccactatacaaaataacgatcgtcacgattttcgccaatcgaatatcaaccactacgacgcactaaatatacccgcgttacgcattactaacctactaataaataataacgccaatacccccgcgctaaaaatcacgctcgatcaattaactattaaattcgaaactaataaataatttactctaacgaataccgattacgaaacgcgactaaataataataccgtctaaaccgactaacgattaccgataaaaacaaaccaacgtttaacgcttaaacgcccgcaacacgaaatacgcaattatctaacgatcgcgaataatattaatattccgccgataataaactcatacaacaccgatctcaaaataaaaattaacgaactaaaaaaccgtttactaaaaaataataaccgactcccgattaacaaatcgaaacgtaattctataaaaaccaaaacgttaaacaactactataaaacaatccattcgcgccttaccgaaaccgaaatatcatcaattcgatcgcgcctcgcaaaatacatccgtaattcgccctaacaacttaactcgcaaaataatcgcgcgatatcaatacaaaacctcaaacatcctacactcacgtccaactaacatctatattccctccataatatacgtaaaacccgtacatcttcgatataaa

SEQ ID NO: 11365 - DNA, 606 bp, Artificial Sequence
  chemically treated genomic DNA (Homo sapiens) CpG-island No: 11365
ggtttgaattgttagttggcgtaggtagtagagcgggtaaattggttcggattagggtcgtaagaaaattatttcgatcgttttattgtcgtttgttttgatcgttgggatttgttattgttagatatgtatatttcgtacgttttttcgagcgaaaacggtttgcgttgcgggacgcgcgaattgaattatggtttatattagtggcgcggcgatttttagtttaatattagtcgttatagttaatagtaattgatggaaattagttatcgttatttgtgtacgcggaagattttagagttgtttgttgtattcgattattcgcgttgacgggtttttcgtattaggtcgcgatttaggttattgttgaattggaatcgttcgatcgcgaattgtttggcggtattgttattttgtatgaaaatggcgttttagttagtgtcgcgattcgtggcgatggtattatcggggaagatattacgtttaatgtgcgtattattcgcgttatttcgttgaagtatagtcgttttaggcgttatgtgggttggttacgattagtgttatttgcgttttttttgggagaaataggttatttatcgacgagaa

SEQ ID NO: 11366 - DNA, 606 bp, Artificial Sequence
  chemically treated genomic DNA (Homo sapiens) CpG-island No: 11366
ttctcgtcgataaataacctatttctcccaaaaaaaacgcaaataacactaatcgtaaccaacccacataacgcctaaaacgactatacttcaacgaaataacgcgaataatacgcacattaaacgtaatatcttccccgataataccatcgccacgaatcgcgacactaactaaaacgccattttcatacaaaataacaataccgccaaacaattcgcgatcgaacgattccaattcaacaataacctaaatcgcgacctaatacgaaaaacccgtcaacgcgaataatcgaatacaacaaacaactctaaaatcttccgcgtacacaaataacgataactaatttccatcaattactattaactataacgactaatattaaactaaaaatcgccgcgccactaatataaaccataattcaattcgcgcgtcccgcaacgcaaaccgttttcgctcgaaaaaacgtacgaaatatacatatctaacaataacaaatcccaacgatcaaaacaaacgacaataaaacgatcgaaataattttcttacgaccctaatccgaaccaatttacccgctctactacctacgccaactaacaattcaaacc

SEQ ID NO: 11367 - DNA, 606 bp, Artificial Sequence
  chemically treated genomic DNA (Homo sapiens) CpG-island No: 11367
ttttcgtcggtgagtagtttgttttttttaaaagaagcgtaaatggtattagtcgtagttagtttatatgacgtttaaaacgattatgttttagcggaatggcgcgaatagtacgtatattagacgtgatatttttttcggtggtgttatcgttacgggtcgcggtattgattaaaacgttatttttatatagaataataatgtcgttaaatagttcgcggtcgaacggttttagtttagtaataatttgggtcgcggtttgatgcgggaaattcgttagcgcgggtggtcggatgtagtagatagttttagagtttttcgcgtgtatagatggcgatggttggtttttattagttgttgttgattgtagcggttgatgttgaattggaagtcgtcgcgttattggtgtgggttataatttaattcgcgcgtttcgtagcgtagatcgttttcgttcgggaagacgtacggggtatatatgtttgataatggtagattttagcggttaaaataggcggtagtaaggcggtcgggatagtttttttgcggttttaattcgagttagtttattcgttttgttatttgcgttagttggtagtttaggtt

SEQ ID NO: 11368 - DNA, 606 bp, Artificial Sequence
  chemically treated genomic DNA (Homo sapiens) CpG-island No: 11368
aacctaaactaccaactaacgcaaataacaaaacgaataaactaactcgaattaaaaccgcaaaaaaactatcccgaccgccttactaccgcctattttaaccgctaaaatctaccattatcaaacatatataccccgtacgtcttcccgaacgaaaacgatctacgctacgaaacgcgcgaattaaattataacccacaccaataacgcgacgacttccaattcaacatcaaccgctacaatcaacaacaactaataaaaaccaaccatcgccatctatacacgcgaaaaactctaaaactatctactacatccgaccacccgcgctaacgaatttcccgcatcaaaccgcgacccaaattattactaaactaaaaccgttcgaccgcgaactatttaacgacattattattctatataaaaataacgttttaatcaataccgcgacccgtaacgataacaccaccgaaaaaaatatcacgtctaatatacgtactattcgcgccattccgctaaaacataatcgttttaaacgtcatataaactaactacgactaataccatttacgcttcttttaaaaaaaacaaactactcaccgacgaaaa

SEQ ID NO: 11369 - DNA, 524 bp, Artificial Sequence
  chemically treated genomic DNA (Homo sapiens) CpG-island No: 11369
tttggttcgcgtttgtgtttgggtgggggtgttgggggacgacggtgtgttgggtggttttttgttgtggttgggggttgtcggtcggtcgttggtcgttttgcgtgtcgatttggtcgtttgtgtcggcgttgtttgcgtttgcgtgtcgtttgtggtgttgtcgatttgtgtcgcgttggttcgtgttggttgttcgttggtggaagcggcgttggggtttcggtgtacgatcgttgaagacgttttttgttgtggtcgtgtcgttgattaaaggtggggttgttgtcggatcgatgttggtgtttgtttcggttgtgggcgagtttgtgatttcggaattgttcggtggttcggatagtatcgtgatcgggcgcgtgttatggtaagagttttttaataatcgcgattggtcggtggttcggcggtacgattattatgttgttgttgttaattgtgtcgatgatgtggttttaaaatattagtaaaaaagcgtgggagaatacgggtgagtggtttgtcgg

SEQ ID NO: 11370 - DNA, 524 bp, Artificial Sequence
  chemically treated genomic DNA (Homo sapiens) CpG-island No: 11370
ccgacaaaccactcacccgtattctcccacgcttttttactaatattttaaaaccacatcatcgacacaattaacaacaacaacataataatcgtaccgccgaaccaccgaccaatcgcgattattaaaaaactcttaccataacacgcgcccgatcacgatactatccgaaccaccgaacaattccgaaatcacaaactcgcccacaaccgaaacaaacaccaacatcgatccgacaacaaccccacctttaatcaacgacacgaccacaacaaaaaacgtcttcaacgatcgtacaccgaaaccccaacgccgcttccaccaacgaacaaccaacacgaaccaacgcgacacaaatcgacaacaccacaaacgacacgcaaacgcaaacaacgccgacacaaacgaccaaatcgacacgcaaaacgaccaacgaccgaccgacaacccccaaccacaacaaaaaaccacccaacacaccgtcgtcccccaacacccccacccaaacacaaacgcgaaccaaa

SEQ ID NO: 11371 - DNA, 524 bp, Artificial Sequence
  chemically treated genomic DNA (Homo sapiens) CpG-island No: 11371
tcggtaaattatttattcgtgtttttttacgtttttttgttggtgttttggaattatattatcggtataattagtagtagtaatatgatgatcgtatcgtcgagttatcggttagtcgcggttattgaaaaatttttgttatagtacgcgttcgattacgatgttgttcgggttatcgagtagtttcgggattataaattcgtttatagtcgggataaatattagtatcgattcggtaataattttatttttagttagcggtacgattatagtaaagaacgtttttagcggtcgtgtatcgagattttagcgtcgtttttattagcgaataattaatacgaattaacgcggtataaatcggtagtattataaacggtacgtaagcgtaaataacgtcgatataaacggttagatcggtacgtagaacggttagcggtcgatcgataatttttagttatagtagaaaattatttagtatatcgtcgttttttaatatttttatttaggtataaacgcggattaga

SEQ ID NO: 11372 - DNA, 524 bp, Artificial Sequence
  chemically treated genomic DNA (Homo sapiens) CpG-island No: 11372
tctaatccgcgtttatacctaaataaaaatattaaaaaacgacgatatactaaataattttctactataactaaaaattatcgatcgaccgctaaccgttctacgtaccgatctaaccgtttatatcgacgttatttacgcttacgtaccgtttataatactaccgatttataccgcgttaattcgtattaattattcgctaataaaaacgacgctaaaatctcgatacacgaccgctaaaaacgttctttactataatcgtaccgctaactaaaaataaaattattaccgaatcgatactaatatttatcccgactataaacgaatttataatcccgaaactactcgataacccgaacaacatcgtaatcgaacgcgtactataacaaaaatttttcaataaccgcgactaaccgataactcgacgatacgatcatcatattactactactaattataccgataatataattccaaaacaccaacaaaaaaacgtaaaaaaacacgaataaataatttaccga

SEQ ID NO: 11373 - DNA, 1053 bp, Artificial Sequence
  chemically treated genomic DNA (Homo sapiens) CpG-island No: 11373
gtcgaattacgtagtgtcgggtttggtaagtgtacgtcggcgagtaggtaggtcgagaaaaagcggcggaaaagtttaggaggcgttaatgttgggttttacggaagtaaggtaggaagggaagtattaaatggtcgcgtttggtatgttattgttacgttagtggcgagggtcgcggtgggtacggtgcgtatgtggcgtaggaaaaaggttaggggttatttgggtcgcgagggagggtcgggggttcgtaattcgtcgaggttaagcgggaggcgagatttgcggcgtcggttaggagtcgcgagtttttaagttcggtggtgggatttcggagcgacgtgtagtgggcgattagtgtgcggggaaggtcggtgggggaggttcgaggagggggtcgtattcgggggggaggtggggcgcggaggcgcgggtggagggtggaaggatttcgcgaggttagaatgttcgggagaaaacggtgggggcgggagagtttcgtgacgggatatgggggacgggggagcgcggggggggcgggtgggggtacgcgggagagtgttcgagaaggtggtcggagggaggagggcgggaggcggaggcgtcggggagggtcgagaggaggagggcgagaggcgggtggaggagggcgcggggtggtttgtatgtttgtagtcggtaattattttttataatttgagtgtattgttttgatgaatcgaatttatgcgtgtttcgttgcggatgtgtcggaggttgaggtttttcggatcgatatttcgttcgttatcgttttgtttaacgttggcggcgagttttatgttattaacgatcgttgtagttatggtaatgcgttaatgttagaagggtatttggaagatgacgttacggtggagtgttcgttatacgtcgttagtttttgtttgaaaacggggaaagcgttatgtttgttcgttatcgattcgtttattatttatttagtatacgttgaaggtggtgatatttttatcgatttatcggagcgtatattgagcgatttgtataacgagttta

SEQ ID NO: 11374 - DNA, 1053 bp, Artificial Sequence
  chemically treated genomic DNA (Homo sapiens) CpG-island No: 11374
taaactcgttatacaaatcgctcaatatacgctccgataaatcgataaaaatatcaccaccttcaacgtatactaaataaataataaacgaatcgataacgaacaaacataacgctttccccgttttcaaacaaaaactaacgacgtataacgaacactccaccgtaacgtcatcttccaaatacccttctaacattaacgcattaccataactacaacgatcgttaataacataaaactcgccgccaacgttaaacaaaacgataacgaacgaaatatcgatccgaaaaacctcaacctccgacacatccgcaacgaaacacgcataaattcgattcatcaaaacaatacactcaaattataaaaaataattaccgactacaaacatacaaaccaccccgcgccctcctccacccgcctctcgccctcctcctctcgaccctccccgacgcctccgcctcccgccctcctccctccgaccaccttctcgaacactctcccgcgtacccccacccgccccccccgcgctcccccgtcccccatatcccgtcacgaaactctcccgcccccaccgttttctcccgaacattctaacctcgcgaaatccttccaccctccacccgcgcctccgcgccccacctcccccccgaatacgaccccctcctcgaacctcccccaccgaccttccccgcacactaatcgcccactacacgtcgctccgaaatcccaccaccgaacttaaaaactcgcgactcctaaccgacgccgcaaatctcgcctcccgcttaacctcgacgaattacgaacccccgaccctccctcgcgacccaaataacccctaacctttttcctacgccacatacgcaccgtacccaccgcgaccctcgccactaacgtaacaataacataccaaacgcgaccatttaatacttcccttcctaccttacttccgtaaaacccaacattaacgcctcctaaacttttccgccgctttttctcgacctacctactcgccgacgtacacttaccaaacccgacactacgtaattcgac

SEQ ID NO: 11375 - DNA, 1053 bp, Artificial Sequence
  chemically treated genomic DNA (Homo sapiens) CpG-island No: 11375
tggattcgttatgtagatcgtttagtgtgcgtttcggtaagtcgatgaaaatgttattatttttaacgtgtattggataagtggtgagcggatcggtggcgggtaggtataacgtttttttcgtttttaggtaaaaattggcggcgtgtagcgggtattttatcgtggcgttattttttagatatttttttgatattgacgtattattatggttgtaacgatcgttaatggtataaaattcgtcgttaacgttgaatagggcgatgacgggcgaggtatcgattcggagagttttagttttcggtatattcgtaacgggatacgtataaattcgatttattagaatagtatatttaggttatgggaagtgattatcgattgtaggtatgtaggttatttcgcgtttttttttattcgtttttcgttttttttttttcggtttttttcggcgttttcgtttttcgttttttttttttcggttattttttcgggtattttttcgcgtatttttattcgtttttttcgcgttttttcgttttttatgtttcgttacggggttttttcgtttttatcgttttttttcgggtattttggtttcgcggaatttttttattttttattcgcgttttcgcgttttatttttttttcgggtgcggtttttttttcgggttttttttatcggtttttttcgtatattggtcgtttattgtacgtcgtttcgggattttattatcgggtttggaaattcgcggtttttggtcgacgtcgtaggtttcgtttttcgtttaatttcggcgggttacggattttcggttttttttcgcggtttaggtggtttttaattttttttttgcgttatatgcgtatcgtgtttatcgcggttttcgttattggcgtaatagtgatatgttaggcgcgattatttggtatttttttttttgttttattttcgtgggatttagtattggcgttttttggattttttcgtcgttttttttcggtttgtttgttcgtcggcgtgtatttgttaggttcggtattgcgtggttcggt

SEQ ID NO: 11376 - DNA, 1053 bp, Artificial Sequence
  chemically treated genomic DNA (Homo sapiens) CpG-island No: 11376
accgaaccacgcaataccgaacctaacaaatacacgccgacgaacaaacaaaccgaaaaaaaacgacgaaaaaatccaaaaaacgccaatactaaatcccacgaaaataaaacaaaaaaaaaaataccaaataatcgcgcctaacatatcactattacgccaataacgaaaaccgcgataaacacgatacgcatataacgcaaaaaaaaaattaaaaaccacctaaaccgcgaaaaaaaaccgaaaatccgtaacccgccgaaattaaacgaaaaacgaaacctacgacgtcgaccaaaaaccgcgaatttccaaacccgataataaaatcccgaaacgacgtacaataaacgaccaatatacgaaaaaaaccgataaaaaaaacccgaaaaaaaaaccgcacccgaaaaaaaaataaaacgcgaaaacgcgaataaaaaataaaaaaattccgcgaaaccaaaatacccgaaaaaaaacgataaaaacgaaaaaaccccgtaacgaaacataaaaaacgaaaaaacgcgaaaaaaacgaataaaaatacgcgaaaaaatacccgaaaaaataaccgaaaaaaaaaaaacgaaaaacgaaaacgccgaaaaaaaccgaaaaaaaaaaaacgaaaaacgaataaaaaaaaacgcgaaataacctacatacctacaatcgataatcacttcccataacctaaatatactattctaataaatcgaatttatacgtatcccgttacgaatataccgaaaactaaaactctccgaatcgatacctcgcccgtcatcgccctattcaacgttaacgacgaattttataccattaacgatcgttacaaccataataatacgtcaatatcaaaaaaatatctaaaaaataacgccacgataaaatacccgctacacgccgccaatttttacctaaaaacgaaaaaaacgttatacctacccgccaccgatccgctcaccacttatccaatacacgttaaaaataataacattttcatcgacttaccgaaacgcacactaaacgatctacataacgaatcca

SEQ ID NO: 11377 - DNA, 793 bp, Artificial Sequence
  chemically treated genomic DNA (Homo sapiens) CpG-island No: 11377
  unsure (457..)
ggatcgggattagggttggcgttggtcgagcgatttatcgaagaaggcgcgtaggttgttacgttggaattgtcggcggtaaaagtcgttagtttgcgttacgatttggcgaatatattttggcggtggaaggtaacgtgatttgttatgtcgattattaacgcgcggtcgattagattttgattcgtttcggtaagttggattgttttatcggtaatgtaggtatttgggattataatgttttattggttaatattttcgtagagacgttcgaaatcggtttttacgagttgtttaacgttaatgttttcggttatttgttgggcgtaaaagtttgcgtttcgcgttaatcgttagtgaaggtagtatgatttttatattgttaaatgtcgtttggtatttttggcggtgtggttcgttgtatatcgttagtaaatatgtcgtaatcggatttatnntttaattggtttatgaattggtatcgaaagtgcgggtgaatggcgtcggttcgtgtggtatgtttagcgatttgcgcggtttataggcgttcgggtaaagtgaaatttcgataatgtagtttttgacgtcggagaaaattgtcgttattttatcgttgtaatttttttcgtaatcggcggattttacggggtcgtatgtgatgttgatatcgcggcgtaataatcgcgtattaagcggtgtgatgattaacgttgatgcgggtttagcgattcgcgtattcgttacgtagcggttgggttggatttttaaggaagtacgatgaaagaaaaaacga

SEQ ID NO: 11378 - DNA, 793 bp, Artificial Sequence
  chemically treated genomic DNA (Homo sapiens) CpG-island No: 11378
  unsure (336..)
tcgttttttctttcatcgtacttccttaaaaatccaacccaaccgctacgtaacgaatacgcgaatcgctaaacccgcatcaacgttaatcatcacaccgcttaatacgcgattattacgccgcgatatcaacatcacatacgaccccgtaaaatccgccgattacgaaaaaaattacaacgataaaataacgacaattttctccgacgtcaaaaactacattatcgaaatttcactttacccgaacgcctataaaccgcgcaaatcgctaaacataccacacgaaccgacgccattcacccgcactttcgataccaattcataaaccaattaaannataaatccgattacgacatatttactaacgatatacaacgaaccacaccgccaaaaataccaaacgacatttaacaatataaaaatcatactaccttcactaacgattaacgcgaaacgcaaacttttacgcccaacaaataaccgaaaacattaacgttaaacaactcgtaaaaaccgatttcgaacgtctctacgaaaatattaaccaataaaacattataatcccaaatacctacattaccgataaaacaatccaacttaccgaaacgaatcaaaatctaatcgaccgcgcgttaataatcgacataacaaatcacgttaccttccaccgccaaaatatattcgccaaatcgtaacgcaaactaacgacttttaccgccgacaattccaacgtaacaacctacgcgccttcttcgataaatcgctcgaccaacgccaaccctaatcccgatcc

SEQ ID NO: 11379 - DNA, 793 bp, Artificial Sequence
  chemically treated genomic DNA (Homo sapiens) CpG-island No: 11379
  unsure (336..)
tcgtttttttttttatcgtgtttttttaaagatttagtttagtcgttacgtggcgaatgcgcgaatcgttaaattcgtattagcgttgattattatatcgtttaatgcgcgattattgcgtcgcgatgttaatattatatacggtttcgtaaaattcgtcggttgcgggaaaaattgtagcggtaaaatggcggtaatttttttcggcgttagagattgtattatcgaggttttattttgttcgagcgtttgtgggtcgcgtaggtcgttgggtatattatacgggtcgacgttatttattcgtattttcggtgttagtttataagttagttgggnnataagttcggttgcggtatgtttattggcggtgtatagcgggttatatcgttagggatattaggcggtatttgatagtgtgaaaattatgttgtttttattggcgattaacgcggagcgtaggtttttgcgtttagtaggtaatcgagaatattgacgttaaatagttcgtggaagtcggtttcgagcgtttttgcgggagtattaattagtgaggtattgtgattttagatgtttgtattgtcgataaaataatttagtttgtcggaacgagttaggatttgatcgatcgcgcgttgataatcggtataataggttacgttattttttatcgttagaatatgttcgttaaatcgtgacgtagattggcgatttttgtcgtcgatagttttagcgtggtaatttgcgcgtttttttcgataaatcgttcgattagcgttagttttaatttcgattt

SEQ ID NO: 11380 - DNA, 793 bp, Artificial Sequence
  chemically treated genomic DNA (Homo sapiens) CpG-island No: 11380
  unsure (457..)
aaatcgaaattaaaactaacgctaatcgaacgatttatcgaaaaaaacgcgcaaattaccacgctaaaactatcgacgacaaaaatcgccaatctacgtcacgatttaacgaacatattctaacgataaaaaataacgtaacctattataccgattatcaacgcgcgatcgatcaaatcctaactcgttccgacaaactaaattattttatcgacaatacaaacatctaaaatcacaatacctcactaattaatactcccgcaaaaacgctcgaaaccgacttccacgaactatttaacgtcaatattctcgattacctactaaacgcaaaaacctacgctccgcgttaatcgccaataaaaacaacataattttcacactatcaaataccgcctaatatccctaacgatataacccgctatacaccgccaataaacataccgcaaccgaacttatnncccaactaacttataaactaacaccgaaaatacgaataaataacgtcgacccgtataatatacccaacgacctacgcgacccacaaacgctcgaacaaaataaaacctcgataatacaatctctaacgccgaaaaaaattaccgccattttaccgctacaatttttcccgcaaccgacgaattttacgaaaccgtatataatattaacatcgcgacgcaataatcgcgcattaaacgatataataatcaacgctaatacgaatttaacgattcgcgcattcgccacgtaacgactaaactaaatctttaaaaaaacacgataaaaaaaaaaacga

SEQ ID NO: 11381 - DNA, 567 bp, Artificial Sequence
  chemically treated genomic DNA (Homo sapiens) CpG-island No: 11381
tggtatagcgattgcggatcgttggtttagatcggtaagatacgtatgttatcgttgtaaataaagttgtcgtcgtagtttacgtttatatttgtaatattttttggcggaataagatttagcggcgttggcgtttggttagttagataacgttgataaatcgatattgtttcgttggtattatatagtttggtcggttggttgttattacggtcgatttaggtgatggttatcgtgttgtcgttaatgttcgtaaattaggtatttacgttattgttggtagttttgtttttttgttagatgtaggttcgggtatttcgttttaagttgacgattcgtatcgcgttgtattattgttgtatggttatagtgttagatacgtcgttgcgtcggaatagcgcgttcgtttgcggaagttttgatatagtattttgtaattttcgcgattatcgaacgtaacgagatatgtttgtacgggtattacgttggcgatggtttgggattcggggaagtatgggggggagtaatttatttaagtttttatcggagtttttttgagatattttt

SEQ ID NO: 11382 - DNA, 567 bp, Artificial Sequence
  chemically treated genomic DNA (Homo sapiens) CpG-island No: 11382
aaaaatatctcaaaaaaactccgataaaaacttaaataaattactcccccccatacttccccgaatcccaaaccatcgccaacgtaatacccgtacaaacatatctcgttacgttcgataatcgcgaaaattacaaaatactatatcaaaacttccgcaaacgaacgcgctattccgacgcaacgacgtatctaacactataaccatacaacaataatacaacgcgatacgaatcgtcaacttaaaacgaaatacccgaacctacatctaacaaaaaaacaaaactaccaacaataacgtaaatacctaatttacgaacattaacgacaacacgataaccatcacctaaatcgaccgtaataacaaccaaccgaccaaactatataataccaacgaaacaatatcgatttatcaacgttatctaactaaccaaacgccaacgccgctaaatcttattccgccaaaaaatattacaaatataaacgtaaactacgacgacaactttatttacaacgataacatacgtatcttaccgatctaaaccaacgatccgcaatcgctatacca

SEQ ID NO: 11383 - DNA, 567 bp, Artificial Sequence
  chemically treated genomic DNA (Homo sapiens) CpG-island No: 11383
gggggtattttagaggggtttcgatagagatttgaatagattatttttttttatattttttcgggttttagattatcgttagcgtgatattcgtgtaagtatatttcgttgcgttcggtaatcgcgaagattgtaaagtgttgtattagagttttcgtaggcgaacgcgttgtttcggcgtagcggcgtatttgatattatgattatgtagtagtggtataacgcggtacgggtcgttagtttggggcgaaatattcgaatttgtatttggtaggaaaataggattattaataataacgtagatatttggtttgcgggtattgacggtagtacggtgattattatttgggtcggtcgtgataataattagtcgattaaattgtatggtgttagcggggtaatgtcgatttattagcgttatttggttaattagacgttaacgtcgttgaattttgtttcgttagaagatattgtagatatgggcgtggattacgacggtaattttgtttgtagcggtggtatgcgtattttgtcggtttggattagcgattcgtaatcgttgtgtta

SEQ ID NO: 11384 - DNA, 567 bp, Artificial Sequence
  chemically treated genomic DNA (Homo sapiens) CpG-island No: 11384
taacacaacgattacgaatcgctaatccaaaccgacaaaatacgcataccaccgctacaaacaaaattaccgtcgtaatccacgcccatatctacaatatcttctaacgaaacaaaattcaacgacgttaacgtctaattaaccaaataacgctaataaatcgacattaccccgctaacaccatacaatttaatcgactaattattatcacgaccgacccaaataataatcaccgtactaccgtcaatacccgcaaaccaaatatctacgttattattaataatcctattttcctaccaaatacaaattcgaatatttcgccccaaactaacgacccgtaccgcgttataccactactacataatcataatatcaaatacgccgctacgccgaaacaacgcgttcgcctacgaaaactctaatacaacactttacaatcttcgcgattaccgaacgcaacgaaatatacttacacgaatatcacgctaacgataatctaaaacccgaaaaaatataaaaaaaaataatctattcaaatctctatcgaaacccctctaaaataccccc

SEQ ID NO: 11385 - DNA, 557 bp, Artificial Sequence
  chemically treated genomic DNA (Homo sapiens) CpG-island No: 11385
cgttttcgtaaagtaatatagggtagtagcgtatttttttatgcgcgatgtagattagtggttattacggggttagtttggtcggcgaatttttatattttagtaggttaatttgtcgaagtgtattcgttttgttcgtcggagtaggtcgaaggttattagtagatgattgcgtagttggttgattggttggtgaaattgatcggttacgacgtcgtttgtatgtagtcgaattttggcgtatagggcgaatacgcgggtttgttggcgattcgttattattatgaaagtcgtaacgaagggtatcgcgatatttgtttgatttcggtttttgcgtacggaattaatttcgtttttgtatatatggtaggaatgtacgtggtggttgtggcgtgtgataaaaacggtaatatcgatttgattgatttgcgcgcgaaatcggaataggtcgggcgataattttttttgtattatggtgatttatttttttatttacggcgtgtatgaagaaacgattcgtgaagtgtgtgaagtcgtgtattagttcggcggttagg

SEQ ID NO: 11386 - DNA, 557 bp, Artificial Sequence
  chemically treated genomic DNA (Homo sapiens) CpG-island No: 11386
cctaaccgccgaactaatacacgacttcacacacttcacgaatcgtttcttcatacacgccgtaaataaaaaaataaatcaccataatacaaaaaaaattatcgcccgacctattccgatttcgcgcgcaaatcaatcaaatcgatattaccgtttttatcacacgccacaaccaccacgtacattcctaccatatatacaaaaacgaaattaattccgtacgcaaaaaccgaaatcaaacaaatatcgcgatacccttcgttacgactttcataataataacgaatcgccaacaaacccgcgtattcgccctatacgccaaaattcgactacatacaaacgacgtcgtaaccgatcaatttcaccaaccaatcaaccaactacgcaatcatctactaataaccttcgacctactccgacgaacaaaacgaatacacttcgacaaattaacctactaaaatataaaaattcgccgaccaaactaaccccgtaataaccactaatctacatcgcgcataaaaaaatacgctactaccctatattactttacgaaaacg

SEQ ID NO: 11387 - DNA, 557 bp, Artificial Sequence
  chemically treated genomic DNA (Homo sapiens) CpG-island No: 11387
tttgatcgtcgaattgatgtacgattttatatattttacggatcgtttttttatatacgtcgtgggtagaaggataagttattatgatataggagaggttatcgttcggtttgtttcggtttcgcgcgtagattagttagatcgatgttgtcgtttttattatacgttataattattacgtgtatttttgttatatgtgtagaagcggggttagtttcgtgcgtagaagtcgggattaggtagatatcgcgatgtttttcgttgcggtttttatgataatgacgaatcgttagtaggttcgcgtattcgttttgtgcgttagagttcggttgtatataaacggcgtcgtaatcggttagttttattagttagttagttagttgcgtaattatttgttgataattttcggtttgtttcggcgggtagaacgggtgtatttcggtaaattgatttgttagagtataagggttcgtcgattaggttggtttcgtgataattattggtttatatcgcgtatgagagggtgcgttattgttttgtgttgttttgcggaaacg

SEQ ID NO: 11388 - DNA, 557 bp, Artificial Sequence
  chemically treated genomic DNA (Homo sapiens) CpG-island No: 11388
cgtttccgcaaaacaacacaaaacaataacgcaccctctcatacgcgatataaaccaataattatcacgaaaccaacctaatcgacgaacccttatactctaacaaatcaatttaccgaaatacacccgttctacccgccgaaacaaaccgaaaattatcaacaaataattacgcaactaactaactaactaataaaactaaccgattacgacgccgtttatatacaaccgaactctaacgcacaaaacgaatacgcgaacctactaacgattcgtcattatcataaaaaccgcaacgaaaaacatcgcgatatctacctaatcccgacttctacgcacgaaactaaccccgcttctacacatataacaaaaatacacgtaataattataacgtataataaaaacgacaacatcgatctaactaatctacgcgcgaaaccgaaacaaaccgaacgataacctctcctatatcataataacttatccttctacccacgacgtatataaaaaaacgatccgtaaaatatataaaatcgtacatcaattcgacgatcaaa

SEQ ID NO: 11389 - DNA, 762 bp, Artificial Sequence
  chemically treated genomic DNA (Homo sapiens) CpG-island No: 11389
tttgttttttttgcgggttaatacggtgtattttttagtcgacgttgttgtttattatttttgttattattattggcgttttttttttacgttagtcggtcgtgatttttgttaatatcgtagtcggagatttttcgtttaggcgcgtgagttgtttttgattgtttgttttttaggtagtggtcgttttgataaagttaggcgcgtagattggtcgatttttagttaattgcgatgtagcgagttgttatgtgattttttttaattttcgtgtcgagttggcgattatggtaagcgtcgtttgttttgtcgtatcgtcgttttgatgtcgtatcgtatcgaatagcgttttatgtttttggagcgtttgcggtatgttggttttatcgtttatttaggttcgtttaaaaatcgttcgttgtagcgaattgatcgtaatgttaagttgttgtaatatcgggttatgtatcgattgtagtatcgtttcgtggtagcgaatattcgtttcgttaaacgtttcggggttttggattgttggtaattatttcgtttagcgtcgatttaatttgcgttagatcgttggaagtcgcgcgttttgttgtttaacggaagttcgtcggtttttattagatttcgtatttcgtttatgggtattgataagttttgggtcgtagttattttttaggatttattgtagtacgttagtgtcgaggtaattttattggttacgcggtgtataaacgtttcgtttaacgttttatt

SEQ ID NO: 11390 - DNA, 762 bp, Artificial Sequence
  chemically treated genomic DNA (Homo sapiens) CpG-island No: 11390
aataaaacgttaaacgaaacgtttatacaccgcgtaaccaataaaattacctcgacactaacgtactacaataaatcctaaaaaataactacgacccaaaacttatcaatacccataaacgaaatacgaaatctaataaaaaccgacgaacttccgttaaacaacaaaacgcgcgacttccaacgatctaacgcaaattaaatcgacgctaaacgaaataattaccaacaatccaaaaccccgaaacgtttaacgaaacgaatattcgctaccacgaaacgatactacaatcgatacataacccgatattacaacaacttaacattacgatcaattcgctacaacgaacgatttttaaacgaacctaaataaacgataaaaccaacataccgcaaacgctccaaaaacataaaacgctattcgatacgatacgacatcaaaacgacgatacgacaaaacaaacgacgcttaccataatcgccaactcgacacgaaaattaaaaaaaatcacataacaactcgctacatcgcaattaactaaaaatcgaccaatctacgcgcctaactttatcaaaacgaccactacctaaaaaacaaacaatcaaaaacaactcacgcgcctaaacgaaaaatctccgactacgatattaacaaaaatcacgaccgactaacgtaaaaaaaaaacgccaataataataacaaaaataataaacaacaacgtcgactaaaaaatacaccgtattaacccgcaaaaaaaacaaa

SEQ ID NO: 11391 - DNA, 762 bp, Artificial Sequence
  chemically treated genomic DNA (Homo sapiens) CpG-island No: 11391
aatgaaacgttaagcggggcgtttgtgtatcgcgtaattagtggaattatttcgatattgacgtattgtaatgggttttggaaaatgattacgatttaaggtttattagtgtttatgagcgaagtgcgaaatttggtggaaatcggcggattttcgttgggtagtagagcgcgcgatttttagcgatttggcgtagattgaatcggcgttgaacgagatgattgttaataatttaggatttcgaagcgtttaacgaagcggatattcgttattacgaggcggtgttgtagtcggtgtataattcggtgttatagtaatttagtattgcgattagttcgttgtagcgggcggtttttgaacgaatttggatgggcgatgaggttaatatgtcgtaaacgttttaggaatataaggcgttgttcgatgcgatacgatattaggacggcgatgcggtagagtaggcggcgtttattatgatcgttagttcgatacgaaggttaaaggaaattatatgatagttcgttatatcgtaattgattggggatcgattaatttgcgcgtttggttttattagggcgattattgtttggagagtaggtaattagaagtagtttacgcgtttgaacggaaaattttcggttgcggtgttagtagaagttacgatcgattggcgtgaagagaaaacgttagtggtaatggtaggaatggtaggtagtaacgtcggttggaaagtgtatcgtattgattcgtagggaggataag

SEQ ID NO: 11392 - DNA, 762 bp, Artificial Sequence
  chemically treated genomic DNA (Homo sapiens) CpG-island No: 11392
cttatcctccctacgaatcaatacgatacactttccaaccgacgttactacctaccattcctaccattaccactaacgttttctcttcacgccaatcgatcgtaacttctactaacaccgcaaccgaaaattttccgttcaaacgcgtaaactacttctaattacctactctccaaacaataatcgccctaataaaaccaaacgcgcaaattaatcgatccccaatcaattacgatataacgaactatcatataatttcctttaaccttcgtatcgaactaacgatcataataaacgccgcctactctaccgcatcgccgtcctaatatcgtatcgcatcgaacaacgccttatattcctaaaacgtttacgacatattaacctcatcgcccatccaaattcgttcaaaaaccgcccgctacaacgaactaatcgcaatactaaattactataacaccgaattatacaccgactacaacaccgcctcgtaataacgaatatccgcttcgttaaacgcttcgaaatcctaaattattaacaatcatctcgttcaacgccgattcaatctacgccaaatcgctaaaaatcgcgcgctctactacccaacgaaaatccgccgatttccaccaaatttcgcacttcgctcataaacactaataaaccttaaatcgtaatcattttccaaaacccattacaatacgtcaatatcgaaataattccactaattacgcgatacacaaacgccccgcttaacgtttcatt

SEQ ID NO: 11393 - DNA, 902 bp, Artificial Sequence
  chemically treated genomic DNA (Homo sapiens) CpG-island No: 11393
cgcgtgattttttcgtcgttgataataatttcgttttgtttatatttttttagtttaataatcgtttttagtaatttattgcgttttgtttttagtagattagtaatgtcgagtatttcgttacgacgtagcgtaaaattgatattttttagtttgggtttatggcgtaacgtacggatttttagtacggtttgatttataattttttgaggggttatcggcgtaatattaacgtgatcgcgttcgagtattagcgatataatatgaatgcgtggaggtgttttcgagtattatatcgtttcgttatttgattatcgcgtataacggtggtataggaggtaatgcggcgaattttttttattcggtggttgatataaattatcgttacgtttagtgtcgatattttttttatcgcgttgattattagtttaattttcgtattcgtaagcgaattggtaggtttattaagaatgattacgcgcggttcgttttttattattcgcgtaatttttattagttgtttttgcgtcgggtttagcgttgaaataagttgtttaggattaacgttaacgtttagcgtttgtaagtaacgttgggtattttgcgttatttgtaggtaattaattatgtcgttgcggcggggttattgatcgaggtagaggtttttcgttattgttagtttttttattagatttaatttttgataaatcgcgcgtatttttagtttagcggtacggcgagttagcgtagtttcgttattttttagtcgcgtttcgttaatttagatattatcgttattcgggcgttcgttgtcggtaagtattcgaatgagagtcgatttgttcgcgtcgtttttatttaatagcgtacgaatttcgtttttattgagcgtgaagttaacg

SEQ ID NO: 11394 - DNA, 902 bp, Artificial Sequence
  chemically treated genomic DNA (Homo sapiens) CpG-island No: 11394
cgttaacttcacgctcaataaaaacgaaattcgtacgctattaaataaaaacgacgcgaacaaatcgactctcattcgaatacttaccgacaacgaacgcccgaataacgataatatctaaattaacgaaacgcgactaaaaaataacgaaactacgctaactcgccgtaccgctaaactaaaaatacgcgcgatttatcaaaaattaaatctaataaaaaaactaacaataacgaaaaacctctacctcgatcaataaccccgccgcaacgacataattaattacctacaaataacgcaaaatacccaacgttacttacaaacgctaaacgttaacgttaatcctaaacaacttatttcaacgctaaacccgacgcaaaaacaactaataaaaattacgcgaataataaaaaacgaaccgcgcgtaatcattcttaataaacctaccaattcgcttacgaatacgaaaattaaactaataatcaacgcgataaaaaaaatatcgacactaaacgtaacgataatttatatcaaccaccgaataaaaaaaattcgccgcattacctcctataccaccgttatacgcgataatcaaataacgaaacgatataatactcgaaaacacctccacgcattcatattatatcgctaatactcgaacgcgatcacgttaatattacgccgataacccctcaaaaaattataaatcaaaccgtactaaaaatccgtacgttacgccataaacccaaactaaaaaatatcaattttacgctacgtcgtaacgaaatactcgacattactaatctactaaaaacaaaacgcaataaattactaaaaacgattattaaactaaaaaaatataaacaaaacgaaattattatcaacgacgaaaaaatcacgcg

SEQ ID NO: 11395 - DNA, 902 bp, Artificial Sequence
  chemically treated genomic DNA (Homo sapiens) CpG-island No: 11395
cgttaattttacgtttaataaaggcgaagttcgtgcgttgttaggtaaaaacggcgcgggtaaatcgatttttattcgaatgtttatcggtagcgaacgttcggatagcggtgatatttggattggcgagacgcgattggaaggtgacgaagttacgttgattcgtcgtgtcgttgaattgggggtgcgcgcggtttattaggagttaagtttggtggaagggttgatagtggcggaaaatttttgtttcggttagtggtttcgtcgtaacggtatgattgattatttgtaaatggcgtaggatgtttaacgttgtttataggcgttgggcgttgacgttagttttgaataatttgttttaacgttaagttcggcgtaaaagtagttggtggaaattgcgcgggtgatgaagggcgagtcgcgcgtggttatttttgatgaatttattagttcgtttgcgagtgcggaagttgaattggtgattagcgcggtgaaaaagatgtcggtattgggcgtggcggtgatttatgttagttatcggatggaagaaattcgtcgtattgttttttgtgttatcgttatgcgcgatggttaggtggcggggcgatgtgatgttcgaaaatatttttacgtatttatattgtgtcgttgatgttcgggcgcgattacgttgatattgcgtcggtagttttttaggaaattgtggattaggtcgtgttggaagttcgtgcgttacgttataagtttaagttggaggatattagttttacgttacgtcgtggcgaagtgttcggtattgttggtttgttgggggtagggcgtagtgaattgttgaaggcgattgttgggttggaggagtatgaatagggcgaaattgttattaacggcgagaaaattacgcg

SEQ ID NO: 11396 - DNA, 902 bp, Artificial Sequence
  chemically treated genomic DNA (Homo sapiens) CpG-island No: 11396
cgcgtaattttctcgccgttaataacaatttcgccctattcatactcctccaacccaacaatcgccttcaacaattcactacgccctacccccaacaaaccaacaataccgaacacttcgccacgacgtaacgtaaaactaatatcctccaacttaaacttataacgtaacgcacgaacttccaacacgacctaatccacaatttcctaaaaaactaccgacgcaatatcaacgtaatcgcgcccgaacatcaacgacacaatataaatacgtaaaaatattttcgaacatcacatcgccccgccacctaaccatcgcgcataacgataacacaaaaaacaatacgacgaatttcttccatccgataactaacataaatcaccgccacgcccaataccgacatctttttcaccgcgctaatcaccaattcaacttccgcactcgcaaacgaactaataaattcatcaaaaataaccacgcgcgactcgcccttcatcacccgcgcaatttccaccaactacttttacgccgaacttaacgttaaaacaaattattcaaaactaacgtcaacgcccaacgcctataaacaacgttaaacatcctacgccatttacaaataatcaatcataccgttacgacgaaaccactaaccgaaacaaaaattttccgccactatcaacccttccaccaaacttaactcctaataaaccgcgcgcacccccaattcaacgacacgacgaatcaacgtaacttcgtcaccttccaatcgcgtctcgccaatccaaatatcaccgctatccgaacgttcgctaccgataaacattcgaataaaaatcgatttacccgcgccgtttttacctaacaacgcacgaacttcgcctttattaaacgtaaaattaacg

SEQ ID NO: 11397 - DNA, 820 bp, Artificial Sequence
  chemically treated genomic DNA (Homo sapiens) CpG-island No: 11397
  unsure (815)
ggggcgggcgggatattgcgtgcggtaaatgtcgtgtatgtaggttatatcgttggtaggttttttacggtcgggttatagcgatagcgcgttttaatatttattagttcgttttggttggcgggtgtcgattgtcggttcgttatattttgtaattagttttggtgtatggtttgtacgtaattttttatcgttttagtacggttcggtatcgtttcgtcgatttagacgtcgagttttataggcgtattacgcgcgatatcgcgttcgaaattgggcgggattttaatcgttatcgtgatatcgttcgtacgtattcgacgattaagttcgttataattggtgagcggcggttgttcgataaagtaacgggaatcggagaggttgagtgtttacgtttggttattgacggtttggtcgcggtcgagtatcgtaaagcgtaggttttttatatttatattgatgtcgtaatttattattagtattaggattatcgtttttattagcgttagcgtcgaacgtattggatcgcgtcgtagttttagcgtttcgcggcggttgtagttaaatagacggcgtaggttaaatttttgacgcggcgcgtgggtggtgtcgtgtattacgggcggcgtttcggtttcgttgttttgttttgtcgttttttgtaaataggcgataaatgttttttttagattggcggtttcgcgttttttaattagtttttgcggtgtatcgttggtaagtattttttcggcgtgtattagtgagatgcggtcgtaatcgttcgtttttttataaaatgggtggagatgaanaatat

SEQ ID NO: 11398 - DNA, 820 bp, Artificial Sequence
  chemically treated genomic DNA (Homo sapiens) CpG-island No: 11398
  unsure (6)
atattnttcatctccacccattttataaaaaaacgaacgattacgaccgcatctcactaatacacgccgaaaaaatacttaccaacgatacaccgcaaaaactaattaaaaaacgcgaaaccgccaatctaaaaaaaacatttatcgcctatttacaaaaaacgacaaaacaaaacaacgaaaccgaaacgccgcccgtaatacacgacaccacccacgcgccgcgtcaaaaatttaacctacgccgtctatttaactacaaccgccgcgaaacgctaaaactacgacgcgatccaatacgttcgacgctaacgctaataaaaacgataatcctaatactaataataaattacgacatcaatataaatataaaaaacctacgctttacgatactcgaccgcgaccaaaccgtcaataaccaaacgtaaacactcaacctctccgattcccgttactttatcgaacaaccgccgctcaccaattataacgaacttaatcgtcgaatacgtacgaacgatatcacgataacgattaaaatcccgcccaatttcgaacgcgatatcgcgcgtaatacgcctataaaactcgacgtctaaatcgacgaaacgataccgaaccgtactaaaacgataaaaaattacgtacaaaccatacaccaaaactaattacaaaatataacgaaccgacaatcgacacccgccaaccaaaacgaactaataaatattaaaacgcgctatcgctataacccgaccgtaaaaaacctaccaacgatataacctacatacacgacatttaccgcacgcaatatcccgcccgcccc

SEQ ID NO: 11399 - DNA, 820 bp, Artificial Sequence
  chemically treated genomic DNA (Homo sapiens) CpG-island No: 11399
  unsure (6)
atattntttatttttatttattttataaagaagcggacggttgcgatcgtattttattgatgtacgtcggaaaagtgtttgttagcggtatatcgtaggaattggttgagaaacgcggagtcgttagtttggaagaggtatttatcgtttatttgtaggaagcggtagggtagagtaacgaagtcgaagcgtcgttcgtggtatacgatattatttacgcgtcgcgttagggatttagtttgcgtcgtttgtttagttatagtcgtcgcgaagcgttggaattgcgacgcgatttagtacgttcgacgttggcgttgatgggaacggtgattttgatgttgataatgggttacggtattagtatggatgtggaaaatttgcgttttgcggtgttcgatcgcgattagatcgttagtagttaggcgtggatatttaattttttcggttttcgttattttatcgaatagtcgtcgtttattagttatgacgagtttgatcgtcggatgcgtgcgggcgatattacggtggcgattgagatttcgtttaatttcgggcgcgatatcgcgcgtggtacgtttgtggaattcggcgtttggatcgacggagcgatgtcgagtcgtgttgaaacggtaaaaggttacgtgtaggttatgtattagagttggttataggatgtggcgagtcgataatcgatattcgttagttaaagcgggttgatgaatattgagacgcgttatcgttataattcggtcgtaaaaagtttgttagcgatatggtttgtatgtacggtatttatcgtacgtaatatttcgttcgtttt

SEQ ID NO: 11400 - DNA, 820 bp, Artificial Sequence
  chemically treated genomic DNA (Homo sapiens) CpG-island No: 11400
  unsure (815)
aaaacgaacgaaatattacgtacgataaataccgtacatacaaaccatatcgctaacaaactttttacgaccgaattataacgataacgcgtctcaatattcatcaacccgctttaactaacgaatatcgattatcgactcgccacatcctataaccaactctaatacataacctacacgtaaccttttaccgtttcaacacgactcgacatcgctccgtcgatccaaacgccgaattccacaaacgtaccacgcgcgatatcgcgcccgaaattaaacgaaatctcaatcgccaccgtaatatcgcccgcacgcatccgacgatcaaactcgtcataactaataaacgacgactattcgataaaataacgaaaaccgaaaaaattaaatatccacgcctaactactaacgatctaatcgcgatcgaacaccgcaaaacgcaaattttccacatccatactaataccgtaacccattatcaacatcaaaatcaccgttcccatcaacgccaacgtcgaacgtactaaatcgcgtcgcaattccaacgcttcgcgacgactataactaaacaaacgacgcaaactaaatccctaacgcgacgcgtaaataatatcgtataccacgaacgacgcttcgacttcgttactctaccctaccgcttcctacaaataaacgataaatacctcttccaaactaacgactccgcgtttctcaaccaattcctacgatataccgctaacaaacacttttccgacgtacatcaataaaatacgatcgcaaccgtccgcttctttataaaataaataaaaataaanaatat

SEQ ID NO: 11401 - DNA, 1222 bp, Artificial Sequence
  chemically treated genomic DNA (Homo sapiens) CpG-island No: 11401
cgttagtcgcgttgttgcgaagtttagtgatgtttcgattgtttcgttttattaggggtatcggagttattcgatttttatcggcgtatttagttgtatagggttgttatgattatgtttgcgttgttcgggaataattatattagagtgttaggttgtggtgacgttgttgaggacgaagggtgatagagggtatttgtttggtacgtttgcggacggggtagtatgtatcggtaagtttgaggttgatgggagcgatttattgtgatcgtagtcgacggagtttatcgtgtaggtttggtttaggtcgttatatgttgtgttttgtgggaagattcggttacgtagtgatgcgacgtagtatgttttgttattggtcgtcgcgagtgcgatattagagagtcgtcggtcgttagtgagggcgcggagttttcgaggggtagtagtgtatagtttcgagagttgattcgatggtcgggatgtaggtggatgcgttggtgcgtacgtcgtagtgacggaagagattggatcggggcgtggatcgttgtcgttagagtattagcgagcgtagcgtcgattaggtttgcgagttcgtttattagttgaggagcggagacgattgcgattgtatatgggcgggtgtaggtacgtcggacgttgcgatgtcgaggcgtcggggagcgtgagcgatagttatgtttgatagggacgtttagtggcgtacgagtattaggaatagcgtggggagttagcgagatcgtgtggcgatattaagttcgggtgagttgggatcgtttagaggtcgagtgtggtacgacgaagtgggacgcgtttacgggtgtgcgtggagtatattcgttttgcgttgcggatgtcgtgtattagtacgcgatgttgtgttggagcggtgagatgtcgagagcgagggtgatttgtaggtatcggacgatggagtatgtcgatttggtgtcgaggtggtttacgaacggatatagtgcgtgtcgtggttatgttagttacgggtatttgtgcgcgggtagtgagtttgaggtagtgtgtcgttttcgatgatcgcggacgcgagtagtagataggcgtgcggcgtatgaggtaaggttatattaagcgtgtttgattagttgataataaattatttttttatgtagtttgtatttgtaagaatacggcggcggacgtttcgttacggtttttgatagtcgtt

SEQ ID NO: 11402 - DNA, 1222 bp, Artificial Sequence
  chemically treated genomic DNA (Homo sapiens) CpG-island No: 11402
aacgactatcaaaaaccgtaacgaaacgtccgccgccgtattcttacaaatacaaactacataaaaaaataatttattatcaactaatcaaacacgcttaatataaccttacctcatacgccgcacgcctatctactactcgcgtccgcgatcatcgaaaacgacacactacctcaaactcactacccgcgcacaaatacccgtaactaacataaccacgacacgcactatatccgttcgtaaaccacctcgacaccaaatcgacatactccatcgtccgatacctacaaatcaccctcgctctcgacatctcaccgctccaacacaacatcgcgtactaatacacgacatccgcaacgcaaaacgaatatactccacgcacacccgtaaacgcgtcccacttcgtcgtaccacactcgacctctaaacgatcccaactcacccgaacttaatatcgccacacgatctcgctaactccccacgctattcctaatactcgtacgccactaaacgtccctatcaaacataactatcgctcacgctccccgacgcctcgacatcgcaacgtccgacgtacctacacccgcccatatacaatcgcaatcgtctccgctcctcaactaataaacgaactcgcaaacctaatcgacgctacgctcgctaatactctaacgacaacgatccacgccccgatccaatctcttccgtcactacgacgtacgcaccaacgcatccacctacatcccgaccatcgaatcaactctcgaaactatacactactacccctcgaaaactccgcgccctcactaacgaccgacgactctctaatatcgcactcgcgacgaccaataacaaaacatactacgtcgcatcactacgtaaccgaatcttcccacaaaacacaacatataacgacctaaaccaaacctacacgataaactccgtcgactacgatcacaataaatcgctcccatcaacctcaaacttaccgatacatactaccccgtccgcaaacgtaccaaacaaataccctctatcacccttcgtcctcaacaacgtcaccacaacctaacactctaatataattattcccgaacaacgcaaacataatcataacaaccctatacaactaaatacgccgataaaaatcgaataactccgatacccctaataaaacgaaacaatcgaaacatcactaaacttcgcaacaacgcgactaacg

SEQ ID NO: 11403 - DNA, 1222 bp, Artificial Sequence
  chemically treated genomic DNA (Homo sapiens) CpG-island No: 11403
agcggttattaaaagtcgtggcgaaacgttcgtcgtcgtatttttatagatataaattgtatgaaagagtggtttattgttagttggttaggtacgtttggtgtgattttgttttatgcgtcgtacgtttatttgttattcgcgttcgcgattatcggagacgatatattattttagatttattgttcgcgtataagtattcgtggttgatatgattacggtacgtattatgttcgttcgtgagttatttcggtattagatcggtatgttttatcgttcgatgtttataggttattttcgttttcgatattttatcgttttaatatagtatcgcgtgttggtatacgatattcgtaacgtagagcgagtgtgttttacgtatattcgtgagcgcgttttatttcgtcgtattatattcggtttttggacgattttagtttattcgagtttgatatcgttatacggtttcgttgattttttacgttgtttttggtgttcgtgcgttattagacgtttttgttagatataattgtcgtttacgtttttcgacgtttcgatatcgtaacgttcgacgtgtttatattcgtttatgtatagtcgtagtcgttttcgttttttagttagtaggcgggttcgtaagtttgatcggcgttgcgttcgttaatattttagcgataacggtttacgtttcggtttagtttttttcgttattgcgacgtgcgtattaacgtatttatttgtatttcggttatcgggttagttttcggagttgtgtattattgtttttcgagagtttcgcgtttttattgacggtcgacgattttttaatgtcgtattcgcggcggttagtaataaggtatgttgcgtcgtattattacgtggtcgaatttttttataaagtatagtatataacggtttgggttagatttgtacgatgagtttcgtcggttacgattatagtgaatcgtttttattagttttagatttgtcgatatatgttatttcgttcgtaggcgtattaggtaggtattttttgttatttttcgtttttaatagcgttattataatttaatattttagtgtggttattttcgggtaacgtaagtatagttataatagttttgtgtagttgagtacgtcggtggaggtcgggtaatttcgatatttttggtaggacggagtagtcgggatattattaaatttcgtaatagcgcggttagcg

SEQ ID NO: 11404 - DNA, 1222 bp, Artificial Sequence
  chemically treated genomic DNA (Homo sapiens) CpG-island No: 11404
cgctaaccgcgctattacgaaatttaataatatcccgactactccgtcctaccaaaaatatcgaaattacccgacctccaccgacgtactcaactacacaaaactattataactatacttacgttacccgaaaataaccacactaaaatattaaattataataacgctattaaaaacgaaaaataacaaaaaatacctacctaatacgcctacgaacgaaataacatatatcgacaaatctaaaactaataaaaacgattcactataatcgtaaccgacgaaactcatcgtacaaatctaacccaaaccgttatatactatactttataaaaaaattcgaccacgtaataatacgacgcaacataccttattactaaccgccgcgaatacgacattaaaaaatcgtcgaccgtcaataaaaacgcgaaactctcgaaaaacaataatacacaactccgaaaactaacccgataaccgaaatacaaataaatacgttaatacgcacgtcgcaataacgaaaaaaactaaaccgaaacgtaaaccgttatcgctaaaatattaacgaacgcaacgccgatcaaacttacgaacccgcctactaactaaaaaacgaaaacgactacgactatacataaacgaatataaacacgtcgaacgttacgatatcgaaacgtcgaaaaacgtaaacgacaattatatctaacaaaaacgtctaataacgcacgaacaccaaaaacaacgtaaaaaatcaacgaaaccgtataacgatatcaaactcgaataaactaaaatcgtccaaaaaccgaatataatacgacgaaataaaacgcgctcacgaatatacgtaaaacacactcgctctacgttacgaatatcgtataccaacacgcgatactatattaaaacgataaaatatcgaaaacgaaaataacctataaacatcgaacgataaaacataccgatctaataccgaaataactcacgaacgaacataatacgtaccgtaatcatatcaaccacgaatacttatacgcgaacaataaatctaaaataatatatcgtctccgataatcgcgaacgcgaataacaaataaacgtacgacgcataaaacaaaatcacaccaaacgtacctaaccaactaacaataaaccactctttcatacaatttatatctataaaaatacgacgacgaacgtttcgccacgacttttaataaccgct

SEQ ID NO: 11405 - DNA, 752 bp, Artificial Sequence
  chemically treated genomic DNA (Homo sapiens) CpG-island No: 11405
attgttcgcgattgtgttttgcgcgggttgcgcgtgattttggttgagcgttacgatatcgtaatcggtgttatcgggcgtaattacggtttgttgtatagcggtgcgcgttatgcggtaatcgatgcggaatcggttcgcgaatgtattagtgaaaattagattttgaaacgtattgtacgttattgcgttgaattaattaacggtttgtttattattttgtcggaagatgatttttttttttaggttatttttattcgcgtttgcgaagaagtagggattagcgtagaagttatagattcgtagtaagcgcgtattatcgaatttgtcgttaattcggtattgattggcgcggtgaaagtttcggatggtatcgttgatttatttcgtttgatcgtagtaaatatgttggatgttaaagaatacggtgtcgttatttttatcgtttatgaagttacggggttgattcgtgaaggcgcgacggtgtgcggtgttcgtgtacgtaattattttatcggcgaaatttaggttttttatgtatttgtcgtggttaatgtcgttgggatttgggggtaatatattgtcgaatatgtcgatttgcgtattcgtatgttttcggcgaaaggatcgttgttgattatggattatcgtattaattagtatgtgattaatcgttgtcgtaaatttttcgacgtcgatattttggtgtttggcgatattatttcgttgattggtattatttttttacgtat

SEQ ID NO: 11406 - DNA, 752 bp, Artificial Sequence
  chemically treated genomic DNA (Homo sapiens) CpG-island No: 11406
atacgtaaaaaaataataccaatcaacgaaataatatcgccaaacaccaaaatatcgacgtcgaaaaatttacgacaacgattaatcacatactaattaatacgataatccataatcaacaacgatcctttcgccgaaaacatacgaatacgcaaatcgacatattcgacaatatattacccccaaatcccaacgacattaaccacgacaaatacataaaaaacctaaatttcgccgataaaataattacgtacacgaacaccgcacaccgtcgcgccttcacgaatcaaccccgtaacttcataaacgataaaaataacgacaccgtattctttaacatccaacatatttactacgatcaaacgaaataaatcaacgataccatccgaaactttcaccgcgccaatcaataccgaattaacgacaaattcgataatacgcgcttactacgaatctataacttctacgctaatccctacttcttcgcaaacgcgaataaaaataacctaaaaaaaaaaatcatcttccgacaaaataataaacaaaccgttaattaattcaacgcaataacgtacaatacgtttcaaaatctaattttcactaatacattcgcgaaccgattccgcatcgattaccgcataacgcgcaccgctatacaacaaaccgtaattacgcccgataacaccgattacgatatcgtaacgctcaaccaaaatcacgcgcaacccgcgcaaaacacaatcgcgaacaat

SEQ ID NO: 11407 - DNA, 752 bp, Artificial Sequence
  chemically treated genomic DNA (Homo sapiens) CpG-island No: 11407
atacgtaaagaggtggtattaattagcgaaatggtatcgttaggtattagaatatcggcgtcggaaggtttacggtagcggttgattatatgttggttaatgcggtgatttatgattagtagcgattttttcgtcgggaatatgcgaatgcgtagatcggtatattcggtaatgtgttgtttttagattttagcggtattaattacgataggtgtatgaagggtttgagtttcgtcggtgagatggttacgtatacgaatatcgtatatcgtcgcgtttttacgaattagtttcgtgattttatgagcggtaaggataacggtatcgtgttttttggtatttagtatgtttgttgcggttagacgaaatggattaacggtgttattcggaatttttatcgcgttaattagtgtcgggttaacggtaggttcgataatgcgcgtttgttgcgggtttatagtttttgcgttgatttttgttttttcgtaggcgcgaataaaagtggtttggaaggagaggttatttttcggtagggtgataaataggtcgttggttggtttaacgtagtgacgtgtaatgcgttttaggatttggtttttattaatgtattcgcgggtcgatttcgtatcggttatcgtatagcgcgtatcgttgtgtagtaggtcgtggttacgttcggtggtatcggttgcgatgtcgtggcgtttaattaaaattacgcgtagttcgcgtagggtatagtcgcgggtaat

SEQ ID NO: 11408 - DNA, 752 bp, Artificial Sequence
  chemically treated genomic DNA (Homo sapiens) CpG-island No: 11408
attacccgcgactataccctacgcgaactacgcgtaattttaattaaacgccacgacatcgcaaccgataccaccgaacgtaaccacgacctactacacaacgatacgcgctatacgataaccgatacgaaatcgacccgcgaatacattaataaaaaccaaatcctaaaacgcattacacgtcactacgttaaaccaaccaacgacctatttatcaccctaccgaaaaataacctctccttccaaaccacttttattcgcgcctacgaaaaaacaaaaatcaacgcaaaaactataaacccgcaacaaacgcgcattatcgaacctaccgttaacccgacactaattaacgcgataaaaattccgaataacaccgttaatccatttcgtctaaccgcaacaaacatactaaataccaaaaaacacgataccgttatccttaccgctcataaaatcacgaaactaattcgtaaaaacgcgacgatatacgatattcgtatacgtaaccatctcaccgacgaaactcaaacccttcatacacctatcgtaattaataccgctaaaatctaaaaacaacacattaccgaatataccgatctacgcattcgcatattcccgacgaaaaaatcgctactaatcataaatcaccgcattaaccaacatataatcaaccgctaccgtaaaccttccgacgccgatattctaatacctaacgataccatttcgctaattaataccacctctttacgtat

SEQ ID NO: 11409 - DNA, 717 bp, Artificial Sequence
  chemically treated genomic DNA (Homo sapiens) CpG-island No: 11409
gtattttgcgggtttattttgcgtgcgttcgttggttgttagcgatgacgattcgagcggacgtaacgttagtcgtggtatcgtgttgttcgattatgttgaacgcgatggtttggacggatttattattattatcggtggtaaattgatgattatcggttgatggttgaatgggttatcgacgcggtatgtcgtaaattgggtaatacgcgtttttgtacgattgtcgatttggtattgtttggtttataagaattcgttgaagttattttgcgtaaagttatttttttgtttgtttcgttgcggttttgcggtttatcgttatggcgatcgtacgtttgtttggttgagcgaaggtcgtttgtatcgtagtttggtatgtgagtgcgaagcggtaattgcgggtgaagtgtagtacgcggtagaaaatttaaacgttaatagtttgttggatttacgtcgtcgtattcgtgtggggatgggtatttgttagggcgaattttgcgtttgtcgcgttgtcggattgttgtaacgttttaacgttacgacgttcgcgtaatttatcgagtaattttttattttttttaacgaacgttggaaaggcgtgtaatttatcgtttggggagatgtattgcgcgaaagcgaatttattcgttgggtttattagggattgtgtggtttggagaaggagtagaaagatgcgttttgatattgtta

SEQ ID NO: 11410 - DNA, 717 bp, Artificial Sequence
  chemically treated genomic DNA (Homo sapiens) CpG-island No: 11410
taacaatatcaaaacgcatctttctactccttctccaaaccacacaatccctaataaacccaacgaataaattcgctttcgcgcaatacatctccccaaacgataaattacacgcctttccaacgttcgttaaaaaaaataaaaaattactcgataaattacgcgaacgtcgtaacgttaaaacgttacaacaatccgacaacgcgacaaacgcaaaattcgccctaacaaatacccatccccacacgaatacgacgacgtaaatccaacaaactattaacgtttaaattttctaccgcgtactacacttcacccgcaattaccgcttcgcactcacataccaaactacgatacaaacgaccttcgctcaaccaaacaaacgtacgatcgccataacgataaaccgcaaaaccgcaacgaaacaaacaaaaaaataactttacgcaaaataacttcaacgaattcttataaaccaaacaataccaaatcgacaatcgtacaaaaacgcgtattacccaatttacgacataccgcgtcgataacccattcaaccatcaaccgataatcatcaatttaccaccgataataataataaatccgtccaaaccatcgcgttcaacataatcgaacaacacgataccacgactaacgttacgtccgctcgaatcgtcatcgctaacaaccaacgaacgcacgcaaaataaacccgcaaaatac

SEQ ID NO: 11411 - DNA, 717 bp, Artificial Sequence
  chemically treated genomic DNA (Homo sapiens) CpG-island No: 11411
tgatagtattaaagcgtatttttttgttttttttttagattatataatttttgataaatttagcgggtaaattcgttttcgcgtagtgtatttttttaggcgatgggttgtacgtttttttagcgttcgttaaggaaggtggaaagttgttcgatagattgcgcggacgtcgtgacgttaaaacgttgtagtagttcggtagcgcggtaggcgtagagttcgttttggtaggtgtttatttttatacgggtacgacggcgtaaatttagtaggttattaacgtttaaattttttatcgcgtattgtattttattcgtagttatcgtttcgtatttatatattaggttacggtgtagacggttttcgtttagttaggtaggcgtgcgatcgttatgacgataaatcgtagaatcgtagcggggtaggtagggagatgattttacgtaaggtaattttagcgggtttttgtgaattaggtagtgttagatcggtagtcgtataggggcgcgtgttgtttagtttgcggtatatcgcgtcggtagtttatttagttattagtcgatagttattagtttgttatcggtgatggtgataaattcgtttagattatcgcgtttagtatggtcgagtagtacgatgttacggttgacgttacgttcgttcgggtcgttatcgttggtaattagcgggcgtacgtagaataggttcgtaaaatgt

SEQ ID NO: 11412 - DNA, 717 bp, Artificial Sequence
  chemically treated genomic DNA (Homo sapiens) CpG-island No: 11412
acattttacgaacctattctacgtacgcccgctaattaccaacgataacgacccgaacgaacgtaacgtcaaccgtaacatcgtactactcgaccatactaaacgcgataatctaaacgaatttatcaccatcaccgataacaaactaataactatcgactaataactaaataaactaccgacgcgatataccgcaaactaaacaacacgcgcccctatacgactaccgatctaacactacctaattcacaaaaacccgctaaaattaccttacgtaaaatcatctccctacctaccccgctacgattctacgatttatcgtcataacgatcgcacgcctacctaactaaacgaaaaccgtctacaccgtaacctaatatataaatacgaaacgataactacgaataaaatacaatacgcgataaaaaatttaaacgttaataacctactaaatttacgccgtcgtacccgtataaaaataaacacctaccaaaacgaactctacgcctaccgcgctaccgaactactacaacgttttaacgtcacgacgtccgcgcaatctatcgaacaactttccaccttccttaacgaacgctaaaaaaacgtacaacccatcgcctaaaaaaatacactacgcgaaaacgaatttacccgctaaatttatcaaaaattatataatctaaaaaaaaaacaaaaaaatacgctttaatactatca

SEQ ID NO: 11413 - DNA, 534 bp, Artificial Sequence
  chemically treated genomic DNA (Homo sapiens) CpG-island No: 11413
cgttagcggtagtttttttagtggcggattggtagcggaacgtaacggtattcgagagtcgattttcggttttgatgtgttataaatcgttacgcggggtgaatggtataagggagatttttttgcgtcgtaatcgtggtagtagttcggtgtaattattgatgagacgtacgttcgttataggtagggtaaattattgaaaatttgtttgttatcggttcggtgttgggcggatttgattttatcgtttagggatgcggcggcggtgtttgtgtcgttagtgttttatatgtcgtttaatagattgtttaacgcgtaggaggttaataatgaatgatattagtttcgaaaattgtattaagtgtatcgtttgtattatcgtttgttcggtgagtcggtgaaatttcggttatttagggttaaaataagtcgggtcggatggcgagcgtttgcgtttgaaagatggcgtattgtatgacgaggatattcgagttcgattttcgggatttttagagttaaaacggagataatgtt

SEQ ID NO: 11414 - DNA, 534 bp, Artificial Sequence
  chemically treated genomic DNA (Homo sapiens) CpG-island No: 11414
aacattatctccgttttaactctaaaaatcccgaaaatcgaactcgaatatcctcgtcatacaatacgccatctttcaaacgcaaacgctcgccatccgacccgacttattttaaccctaaataaccgaaatttcaccgactcaccgaacaaacgataatacaaacgatacacttaatacaattttcgaaactaatatcattcattattaacctcctacgcgttaaacaatctattaaacgacatataaaacactaacgacacaaacaccgccgccgcatccctaaacgataaaatcaaatccgcccaacaccgaaccgataacaaacaaattttcaataatttaccctacctataacgaacgtacgtctcatcaataattacaccgaactactaccacgattacgacgcaaaaaaatctcccttataccattcaccccgcgtaacgatttataacacatcaaaaccgaaaatcgactctcgaataccgttacgttccgctaccaatccgccactaaaaaaactaccgctaacg

SEQ ID NO: 11415 - DNA, 534 bp, Artificial Sequence
  chemically treated genomic DNA (Homo sapiens) CpG-island No: 11415
agtattattttcgttttgattttagagatttcggagatcgagttcgaatattttcgttatatagtgcgttattttttaaacgtagacgttcgttattcggttcggtttgttttggttttggataatcgggattttatcggtttatcgggtaggcggtggtgtagacggtgtatttaatgtagttttcgaagttggtgttatttattgttggttttttgcgcgttgggtaatttgttgagcggtatgtaaagtattgacggtataaatatcgtcgtcgtatttttgggcgatgggattaaattcgtttagtatcgaatcgatggtaaataggtttttaatggtttgttttgtttgtgacgggcgtacgttttattagtggttatatcgaattgttgttacggttgcggcgtaaaaaaattttttttatattatttatttcgcgtggcggtttgtagtatattaaggtcgagaatcggttttcgaatgtcgttacgtttcgttattagttcgttattaaagaaattgtcgttggcg

SEQ ID NO: 11416 - DNA, 534 bp, Artificial Sequence
  chemically treated genomic DNA (Homo sapiens) CpG-island No: 11416
cgccaacgacaatttctttaataacgaactaataacgaaacgtaacgacattcgaaaaccgattctcgaccttaatatactacaaaccgccacgcgaaataaataatataaaaaaaatttttttacgccgcaaccgtaacaacaattcgatataaccactaataaaacgtacgcccgtcacaaacaaaacaaaccattaaaaacctatttaccatcgattcgatactaaacgaatttaatcccatcgcccaaaaatacgacgacgatatttataccgtcaatactttacataccgctcaacaaattacccaacgcgcaaaaaaccaacaataaataacaccaacttcgaaaactacattaaatacaccgtctacaccaccgcctacccgataaaccgataaaatcccgattatccaaaaccaaaacaaaccgaaccgaataacgaacgtctacgtttaaaaaataacgcactatataacgaaaatattcgaactcgatctccgaaatctctaaaatcaaaacgaaaataatact

SEQ ID NO: 11417 - DNA, 608 bp, Artificial Sequence
  chemically treated genomic DNA (Homo sapiens) CpG-island No: 11417
gtttgttcgtaggttgagttattcggattacggagcgcgacggggaggcgcgattgcggtttagtaaggattaagttagtaataagatattttttattgtgtacgatatggtcgcgagtacggttattaagtacgttaataatatcgcgttcggttttaatagttgttatttgtttatttatatcgagtattattagtagtgtttcggcgtcgagaagtttttttttaaagtatcgttaggcggttcgcgtttgcgcgtttttttcgttttttttgcgtttgcgcgttttttttgtatttatttttttgcgtttgcgcgttatttattttattttttgcgttagcgtagcgttttagggttttttttttttcgttttttttcgcgttttgcgtttgcgcgttttttttttttcggtaagtttgcgcgtcgtttcggtttatttgtttttgcgtttgcgcgtcgttgtagggttttttttttttattttttttcgttttttacgtttgcgcgttattatattttttttgcgtttgcgtagtgttatttttttgtgattgttatttgtttgattcgtatgtttgttttaacggattttttgaggttgttt

SEQ ID NO: 11418 - DNA, 608 bp, Artificial Sequence
  chemically treated genomic DNA (Homo sapiens) CpG-island No: 11418
aaacaacctcaaaaaatccgttaaaacaaacatacgaatcaaacaaataacaatcacaaaaaaataacactacgcaaacgcaaaaaaaatataataacgcgcaaacgtaaaaaacgaaaaaaaataaaaaaaaaaaaccctacaacgacgcgcaaacgcaaaaacaaataaaccgaaacgacgcgcaaacttaccgaaaaaaaaaaaacgcgcaaacgcaaaacgcgaaaaaaaacgaaaaaaaaaaaaccctaaaacgctacgctaacgcaaaaaataaaataaataacgcgcaaacgcaaaaaaataaatacaaaaaaaacgcgcaaacgcaaaaaaaacgaaaaaaacgcgcaaacgcgaaccgcctaacgatactttaaaaaaaaacttctcgacgccgaaacactactaataatactcgatataaataaacaaataacaactattaaaaccgaacgcgatattattaacgtacttaataaccgtactcgcgaccatatcgtacacaataaaaaatatcttattactaacttaatccttactaaaccgcaatcgcgcctccccgtcgcgctccgtaatccgaataactcaacctacgaacaaac

SEQ ID NO: 11419 - DNA, 608 bp, Artificial Sequence
  chemically treated genomic DNA (Homo sapiens) CpG-island No: 11419
aggtagttttagggaattcgttaaaataaatatgcgagttagataagtggtagttataggagagtaatattgcgtaggcgtagaagggatgtagtggcgcgtaggcgtaggaggcggggggagatgggggaggaaggttttgtagcggcgcgtaggcgtagaagtaagtgggtcggagcggcgcgtaggtttatcgggggaagaaaggcgcgtaggcgtaggacgcggggaggggcgggggaagaaaggttttggagcgttgcgttggcgtaggaggtgaaataagtggcgcgtaggcgtaagagggtgggtgtagaagaggcgcgtaggcgtaggaggggcgggaggggcgcgtaggcgcggatcgtttggcggtattttgaagaaagatttttcgacgtcgagatattgttggtggtattcgatgtaggtgagtaggtggtagttgttggagtcgggcgcgatgttgttggcgtatttgatggtcgtgttcgcgattatgtcgtgtatagtgaggagtgttttgttgttaatttagtttttgttgagtcgtagtcgcgttttttcgtcgcgtttcgtggttcgagtagtttagtttgcggataggt

SEQ ID NO: 11420 - DNA, 608 bp, Artificial Sequence
  chemically treated genomic DNA (Homo sapiens) CpG-island No: 11420
acctatccgcaaactaaactactcgaaccacgaaacgcgacgaaaaaacgcgactacgactcaacaaaaactaaattaacaacaaaacactcctcactatacacgacataatcgcgaacacgaccatcaaatacgccaacaacatcgcgcccgactccaacaactaccacctactcacctacatcgaataccaccaacaatatctcgacgtcgaaaaatctttcttcaaaataccgccaaacgatccgcgcctacgcgcccctcccgcccctcctacgcctacgcgcctcttctacacccaccctcttacgcctacgcgccacttatttcacctcctacgccaacgcaacgctccaaaacctttcttcccccgcccctccccgcgtcctacgcctacgcgcctttcttcccccgataaacctacgcgccgctccgacccacttacttctacgcctacgcgccgctacaaaaccttcctcccccatctccccccgcctcctacgcctacgcgccactacatcccttctacgcctacgcaatattactctcctataactaccacttatctaactcgcatatttattttaacgaattccctaaaactacct

SEQ ID NO: 11421 - DNA, 776 bp, Artificial Sequence
  chemically treated genomic DNA (Homo sapiens) CpG-island No: 11421
tgcgggtcgtagcgcgtaggcgtcgcgcgttcgtttcgttttcgtttttttttacgtgcggcgtatatttcgcgttttttttcgttaggttcgtttcgcgttttttttttttttttttttcgttttttcggtttcggttttttattggttgcgggtttcgttttttcggtcgtagttcggtaggttttcgttaggtaggaagtttcgcgttataagcggtcgttcgcgtcgtcgattggtttaggtggttgttagtcgatgcggcgggttttagtcggcggcgggggttcgtgatcggtgcgcgattcgggttggcggtggttttcggtttcgcggggttggcgggcgagcgggcggtcgggatcggcggcggcggcggcggcggcggcgtttgatagataatgagggcggcggggcggcgttgagcggcggcggcggcggcggcggcggcgaggcgacgcggggttcgggggcggggcggggcgttagttatggataattaggtgaggagcggtcgcgtcgtttttgcgtagttcgttcggttttttttcgttcgtcggttcgttcggtttttttcggtttcggttttttcgtttcgcgttcgttcgttcgttttgtgcgcgttcgtcgtttttcgggtttttatgtggggcgggggcgtattttttttattcgcgatttcggttagggcgtttcggatatttttcgggattcgggtcgggttcggaggtttttgggacgtttttggtgattttttagtttggttcggagatttt

SEQ ID NO: 11422 - DNA, 776 bp, Artificial Sequence
  chemically treated genomic DNA (Homo sapiens) CpG-island No: 11422
aaaatctccgaaccaaactaaaaaatcaccaaaaacgtcccaaaaacctccgaacccgacccgaatcccgaaaaatatccgaaacgccctaaccgaaatcgcgaataaaaaaaatacgcccccgccccacataaaaacccgaaaaacgacgaacgcgcacaaaacgaacgaacgaacgcgaaacgaaaaaaccgaaaccgaaaaaaaccgaacgaaccgacgaacgaaaaaaaaccgaacgaactacgcaaaaacgacgcgaccgctcctcacctaattatccataactaacgccccgccccgcccccgaaccccgcgtcgcctcgccgccgccgccgccgccgccgccgctcaacgccgccccgccgccctcattatctatcaaacgccgccgccgccgccgccgccgccgatcccgaccgcccgctcgcccgccaaccccgcgaaaccgaaaaccaccgccaacccgaatcgcgcaccgatcacgaacccccgccgccgactaaaacccgccgcatcgactaacaaccacctaaaccaatcgacgacgcgaacgaccgcttataacgcgaaacttcctacctaacgaaaacctaccgaactacgaccgaaaaaacgaaacccgcaaccaataaaaaaccgaaaccgaaaaaacgaaaaaaaaaaaaaaaaaaaacgcgaaacgaacctaacgaaaaaaaacgcgaaatatacgccgcacgtaaaaaaaaacgaaaacgaaacgaacgcgcgacgcctacgcgctacgacccgca

SEQ ID NO: 11423 - DNA, 776 bp, Artificial Sequence
  chemically treated genomic DNA (Homo sapiens) CpG-island No: 11423
ggggttttcgagttaggttggggggttattaggggcgttttaagggttttcgggttcggttcgggtttcgaagggtgttcgaggcgttttggtcggggtcgcggatgggggaggtgcgttttcgttttatataaaggttcgaggagcggcgggcgcgtataaagcgggcgggcgggcgcgaagcggggaggtcgggatcggggagggtcgggcgggtcggcgggcgggagggggtcgggcgggttgcgtaggggcggcgcggtcgttttttatttgattgtttatggttggcgtttcgtttcgttttcgggtttcgcgtcgtttcgtcgtcgtcgtcgtcgtcgtcgtcgtttaacgtcgtttcgtcgtttttattgtttgttaagcgtcgtcgtcgtcgtcgtcgtcgtcgatttcggtcgttcgttcgttcgttagtttcgcggaatcggaaattatcgttagttcgggtcgcgtatcgattacgggttttcgtcgtcgattagggttcgtcgtatcgattgatagttatttgggttaatcgacggcgcggacggtcgtttgtggcgcgggattttttgtttggcgggggtttgtcgggttgcggtcggagggacgaagttcgtagttaatgggaggtcgggatcggaggggcgggaggagggagggagggaggcgcgaggcgagtttggcggaggggagcgcgaggtgtgcgtcgtacgtggaggggggcgggggcgggacgggcgcgcggcgtttgcgcgttgcggttcgta

SEQ ID NO: 11424 - DNA, 776 bp, Artificial Sequence
  chemically treated genomic DNA (Homo sapiens) CpG-island No: 11424
tacgaaccgcaacgcgcaaacgccgcgcgcccgtcccgcccccgcccccctccacgtacgacgcacacctcgcgctcccctccgccaaactcgcctcgcgcctccctccctccctcctcccgcccctccgatcccgacctcccattaactacgaacttcgtccctccgaccgcaacccgacaaacccccgccaaacaaaaaatcccgcgccacaaacgaccgtccgcgccgtcgattaacccaaataactatcaatcgatacgacgaaccctaatcgacgacgaaaacccgtaatcgatacgcgacccgaactaacgataatttccgattccgcgaaactaacgaacgaacgaacgaccgaaatcgacgacgacgacgacgacgacgacgcttaacaaacaataaaaacgacgaaacgacgttaaacgacgacgacgacgacgacgacgacgaaacgacgcgaaacccgaaaacgaaacgaaacgccaaccataaacaatcaaataaaaaacgaccgcgccgcccctacgcaacccgcccgaccccctcccgcccgccgacccgcccgaccctccccgatcccgacctccccgcttcgcgcccgcccgcccgctttatacgcgcccgccgctcctcgaacctttatataaaacgaaaacgcacctcccccatccgcgaccccgaccaaaacgcctcgaacacccttcgaaacccgaaccgaacccgaaaacccttaaaacgcccctaataaccccccaacctaactcgaaaacccc

SEQ ID NO: 11425 - DNA, 549 bp, Artificial Sequence
  chemically treated genomic DNA (Homo sapiens) CpG-island No: 11425
  unsure (390..391, 531, 546)
aattgcgtcgggtaaatagggcgcggatattgtttttggttcggcgtaattttcggttgtcgatgggttacggtggtttatacgcggtattttttgcggcgaaagatgaatataaacgtttaatgtcgggtcgtattatcggtgtatcgaaagatgtagttggtaatatcgcgttgttatggcgatgtagattcgcgagtaatatattcgtcgtgagaaagcgaattttaatatttgtattttttaggtattgttggtaaatatcgttagtttgtatgtcgtttattacggttcggttggtttgaaacgtatcgttaatcgtatttatcgtttgatcgatattttggcggcgggtttgtaataaaaaggtttgaaattgcgttatgcgtnntatttcgatattttgtgtgtggaagtggtcgataaagcgggcgtattgacgcgtgtcgaagcggttgaaattaatttgcgtacgatattttgaacgcggttgggattatttttgatgaaataattacgcgtgaaaacgtngcgggagtgggcgtnaat

SEQ ID NO: 11426 - DNA, 549 bp, Artificial Sequence
  chemically treated genomic DNA (Homo sapiens) CpG-island No: 11426
  unsure (4, 19, 159..)
attnacgcccactcccgcnacgttttcacgcgtaattatttcatcaaaaataatcccaaccgcgttcaaaatatcgtacgcaaattaatttcaaccgcttcgacacgcgtcaatacgcccgctttatcgaccacttccacacacaaaatatcgaaatannacgcataacgcaatttcaaacctttttattacaaacccgccgccaaaatatcgatcaaacgataaatacgattaacgatacgtttcaaaccaaccgaaccgtaataaacgacatacaaactaacgatatttaccaacaatacctaaaaaatacaaatattaaaattcgctttctcacgacgaatatattactcgcgaatctacatcgccataacaacgcgatattaccaactacatctttcgatacaccgataatacgacccgacattaaacgtttatattcatctttcgccgcaaaaaataccgcgtataaaccaccgtaacccatcgacaaccgaaaattacgccgaaccaaaaacaatatccgcgccctatttacccgacgcaatt

SEQ ID NO: 11427 - DNA, 549 bp, Artificial Sequence
  chemically treated genomic DNA (Homo sapiens) CpG-island No: 11427
  unsure (4, 19, 159..)
attngcgtttattttcgtnacgtttttacgcgtggttgttttattaagggtgattttaatcgcgtttagaatatcgtacgtaggttgattttagtcgtttcggtacgcgttagtacgttcgttttgtcggttatttttatatataaggtgtcgaaatanngcgtatggcgtagttttagatttttttgttgtaggttcgtcgttaggatatcggttagacggtgaatgcggttagcgatacgttttaggttaatcgggtcgtgataaacggtatataggttggcgatgtttgttagtagtatttgggaagtataaatgttggagttcgtttttttacggcggatatgttgttcgcgagtttgtatcgttatggtagcgcggtattgttagttgtatttttcgatatatcgataatacggttcggtattgagcgtttgtatttatttttcgtcgtaaagaatgtcgcgtgtgggttatcgtagtttatcggtagtcgaaggttgcgtcgaattaaaaataatattcgcgttttgtttattcggcgtagtt

SEQ ID NO: 11428 - DNA, 549 bp, Artificial Sequence
  chemically treated genomic DNA (Homo sapiens) CpG-island No: 11428
  unsure (390..391, 531, 546)
aactacgccgaataaacaaaacgcgaatattatttttaattcgacgcaaccttcgactaccgataaactacgataacccacacgcgacattctttacgacgaaaaataaatacaaacgctcaataccgaaccgtattatcgatatatcgaaaaatacaactaacaataccgcgctaccataacgatacaaactcgcgaacaacatatccgccgtaaaaaaacgaactccaacatttatacttcccaaatactactaacaaacatcgccaacctatataccgtttatcacgacccgattaacctaaaacgtatcgctaaccgcattcaccgtctaaccgatatcctaacgacgaacctacaacaaaaaaatctaaaactacgccatacgcnntatttcgacaccttatatataaaaataaccgacaaaacgaacgtactaacgcgtaccgaaacgactaaaatcaacctacgtacgatattctaaacgcgattaaaatcacccttaataaaacaaccacgcgtaaaaacgtnacgaaaataaacgcnaat

SEQ ID NO: 11429 - DNA, 553 bp, Artificial Sequence
  chemically treated genomic DNA (Homo sapiens) CpG-island No: 11429
  unsure (552)
tagtttacgtagatcgcgaatgtttcgtcgtaatttatcggtcggttatagcgttatagtaggttagatttattagtatgtgttattatatttagttagaaacgtttaatgtcgagttttattatcggtgtatcgaaatatatagttgtataatatcgcgttgttaatgcgtatgtagagtttagcgtaatatattcgtattgagtaagcgtattcgagtatttgtatttagtagattgaggttgcgtaaatatcgatattattaatgtacgtttattaaggttttgtttggtttgaaaacgtagtcgtttttacgtgattttagacgttttgatggcgtatatttgtacggatcgtgtttgtttacgagacgtttttgtggattcgcgaaattcgtataatgttcgtttatttatgcgtgtcggaaggtgttagttatattagtgggtgtatgtagttttgcgcgaagttggtcgatatttaatttttcgtaggattatgtttgaacgttggttcgggattacgttgtgatggaaaatcgaggtgtgaaang

SEQ ID NO: 11430 - DNA, 553 bp, Artificial Sequence
  chemically treated genomic DNA (Homo sapiens) CpG-island No: 11430
  unsure (2)
cntttcacacctcgattttccatcacaacgtaatcccgaaccaacgttcaaacataatcctacgaaaaattaaatatcgaccaacttcgcgcaaaactacatacacccactaatataactaacaccttccgacacgcataaataaacgaacattatacgaatttcgcgaatccacaaaaacgtctcgtaaacaaacacgatccgtacaaatatacgccatcaaaacgtctaaaatcacgtaaaaacgactacgttttcaaaccaaacaaaaccttaataaacgtacattaataatatcgatatttacgcaacctcaatctactaaatacaaatactcgaatacgcttactcaatacgaatatattacgctaaactctacatacgcattaacaacgcgatattatacaactatatatttcgatacaccgataataaaactcgacattaaacgtttctaactaaatataataacacatactaataaatctaacctactataacgctataaccgaccgataaattacgacgaaacattcgcgatctacgtaaacta

SEQ ID NO: 11431 - DNA, 553 bp, Artificial Sequence
  chemically treated genomic DNA (Homo sapiens) CpG-island No: 11431
  unsure (2)
tnttttatatttcggttttttattatagcgtgatttcgaattagcgtttagatataattttacggagagttgaatgtcgattagtttcgcgtaaggttgtatgtatttattgatgtggttggtatttttcgatacgtataggtggacgaatattatgcggatttcgcgagtttatagaagcgtttcgtaggtaggtacggttcgtgtaggtatacgttattaggacgtttgagattacgtgggagcgattacgtttttaggttagatagggttttgataaacgtgtattagtgatgtcgatgtttgcgtagttttagtttgttaagtataggtgttcgagtgcgtttgtttagtgcggatatgttgcgttggattttgtatacgtattgatagcgcggtattgtgtagttgtatgtttcgatatatcgatagtagggttcggtattgagcgtttttggttaggtgtggtggtatatattggtgagtttagtttattgtggcgttgtggtcggtcgataggttgcggcgaggtattcgcgatttgcgtgaattg

SEQ ID NO: 11432 - DNA, 553 bp, Artificial Sequence
  chemically treated genomic DNA (Homo sapiens) CpG-island No: 11432
  unsure (552)
caattcacgcaaatcgcgaatacctcgccgcaacctatcgaccgaccacaacgccacaataaactaaactcaccaatatataccaccacacctaaccaaaaacgctcaataccgaaccctactatcgatatatcgaaacatacaactacacaataccgcgctatcaatacgtatacaaaatccaacgcaacatatccgcactaaacaaacgcactcgaacacctatacttaacaaactaaaactacgcaaacatcgacatcactaatacacgtttatcaaaaccctatctaacctaaaaacgtaatcgctcccacgtaatctcaaacgtcctaataacgtatacctacacgaaccgtacctacctacgaaacgcttctataaactcgcgaaatccgcataatattcgtccacctatacgtatcgaaaaataccaaccacatcaataaatacatacaaccttacgcgaaactaatcgacattcaactctccgtaaaattatatctaaacgctaattcgaaatcacgctataataaaaaaccgaaatataaaana

SEQ ID NO: 11433 - DNA, 746 bp, Artificial Sequence
  chemically treated genomic DNA (Homo sapiens) CpG-island No: 11433
gtatttgaattagtcgttgcgtgagggttttgtcggtttggttaggtgtcgtttcgtcggaaggatggttatgcgcgagtattatcgtcgtcgcgttgaagtgtagagtacgttttgattatttttcggggatgtatttcggtcgagttaatcgtgtcggtgaagagcgttttatgggtaattaattgattttggttgtttagatataatattcggaatttttttcgtttaagcgcggttatatgtagtcgtagttatttacgtacggcgtgggtagaggtgaaggttacgcggggtttatgtaggtggcggtttagagttttgagcgttcgttgaatgagacgtcggttttgtggcgttatttcgtcgggtaaaaaggaaagttgtgttatttgttgttttttcggttagtcgataatacgtagaatggcgtgagtttttggatgttgtatggtatatttcgtaggcggtaatagtgtgcggttatcgcgttatattttgtacggtaggtatggtggtatacgtaattaggtagatagtaatatttgttgtttttgtatttagtttgggtatcgttatcgtttaggtagttaaatagacgttatgttttatcgttgttaggttcgggggatataaatgcgtcgttattgttgagggtgtagaacgattagatattatcgttgtagtttttattagaagcgattttagagatttcgtggtatcgagtaagatttgtaatgtgtttg

SEQ ID NO: 11434 - DNA, 746 bp, Artificial Sequence
  chemically treated genomic DNA (Homo sapiens) CpG-island No: 11434
caaacacattacaaatcttactcgataccacgaaatctctaaaatcgcttctaataaaaactacaacgataatatctaatcgttctacaccctcaacaataacgacgcatttatatcccccgaacctaacaacgataaaacataacgtctatttaactacctaaacgataacgatacccaaactaaatacaaaaacaacaaatattactatctacctaattacgtataccaccatacctaccgtacaaaatataacgcgataaccgcacactattaccgcctacgaaatataccatacaacatccaaaaactcacgccattctacgtattatcgactaaccgaaaaaacaacaaataacacaactttcctttttacccgacgaaataacgccacaaaaccgacgtctcattcaacgaacgctcaaaactctaaaccgccacctacataaaccccgcgtaaccttcacctctacccacgccgtacgtaaataactacgactacatataaccgcgcttaaacgaaaaaaattccgaatattatatctaaacaaccaaaatcaattaattacccataaaacgctcttcaccgacacgattaactcgaccgaaatacatccccgaaaaataatcaaaacgtactctacacttcaacgcgacgacgataatactcgcgcataaccatccttccgacgaaacgacacctaaccaaaccgacaaaaccctcacgcaacgactaattcaaatac

SEQ ID NO: 11435 - DNA, 746 bp, Artificial Sequence
  chemically treated genomic DNA (Homo sapiens) CpG-island No: 11435
taaatatattataaattttgttcggtattacgggatttttagagtcgtttttgatgagggttatagcggtggtatttggtcgttttatatttttagtaatggcggcgtatttatgtttttcgagtttgataacgatgagatatggcgtttgtttaattgtttgaacggtaacgatgtttaaattgagtgtagaagtagtaggtattgttgtttgtttgattgcgtatattattatgtttgtcgtatagaatgtgacgcgatgatcgtatattattatcgtttgcggagtatgttatgtaatatttagaggtttacgttattttgcgtattatcgattgatcgaaggagtaatagatgatatagtttttttttttattcggcgagatgacgttataggatcggcgttttatttagcgggcgtttagggttttggatcgttatttgtatgagtttcgcgtagtttttatttttatttacgtcgtacgtgaatggttgcgattgtatatggtcgcgtttgagcgggaagagtttcgggtgttgtatttggataattagaattagttgattgtttatgaaacgttttttatcggtacgattaattcgatcgaggtgtattttcgggaggtggttaagacgtgttttgtattttaacgcggcggcggtgatattcgcgtataattattttttcggcgagacgatatttagttaggtcgataaaatttttacgtagcgattggtttaggtgt

SEQ ID NO: 11436 - DNA, 746 bp, Artificial Sequence
  chemically treated genomic DNA (Homo sapiens) CpG-island No: 11436
acacctaaaccaatcgctacgtaaaaattttatcgacctaactaaatatcgtctcgccgaaaaaataattatacgcgaatatcaccgccgccgcgttaaaatacaaaacacgtcttaaccacctcccgaaaatacacctcgatcgaattaatcgtaccgataaaaaacgtttcataaacaatcaactaattctaattatccaaatacaacacccgaaactcttcccgctcaaacgcgaccatatacaatcgcaaccattcacgtacgacgtaaataaaaataaaaactacgcgaaactcatacaaataacgatccaaaaccctaaacgcccgctaaataaaacgccgatcctataacgtcatctcgccgaataaaaaaaaaaactatatcatctattactccttcgatcaatcgataatacgcaaaataacgtaaacctctaaatattacataacatactccgcaaacgataataatatacgatcatcgcgtcacattctatacgacaaacataataatatacgcaatcaaacaaacaacaatacctactacttctacactcaatttaaacatcgttaccgttcaaacaattaaacaaacgccatatctcatcgttatcaaactcgaaaaacataaatacgccgccattactaaaaatataaaacgaccaaataccaccgctataaccctcatcaaaaacgactctaaaaatcccgtaataccgaacaaaatttataatatattta

SEQ ID NO: 11437 - DNA, 742 bp, Artificial Sequence
  chemically treated genomic DNA (Homo sapiens) CpG-island No: 11437
cgtcgtattgcgcggtatttagttacggttgcgaagtttatttagtatagcgttacggatacgttgtattgcgtaagttgtaaatgtcgttttttgtagggcgttatagcgttcgacggtattaagtaatttaatttcgttttgtaatagggagagttggatttggtaatgacgttcgatattttgtcgcgtagtgcgttgtattattcgtcgatgttcgattatgaagtgcgtttggtgttagtatttgattatttattggcggcgaaaacgcgaattatatcggaagatttcgttagcgagacgttattaatttattcggtgtagcgtagtcgattggatgtttggcggtattttttttagtcggtaggcgttagttcgttattgaaaagcgtcgataatattttattgttgatttagatggttgtcgcgcggatgggtattgtcgcgttatcgtattgggtagtagagagttttgagcgttagggtttggtggtgattaaaattttgggcgaaggtttgtggagtcgattgtacgtcgtcgtgcgcgatggcgagtagcgttagttagttacggaagcgtttattcgtttagcgcgtaattacgtttgcgattatttgtcgtttgtgaagagtcggagcgatttatttacgatgtatttatagtgaggttaggattattagcgcgtttgtaataaacgttggttagtgcggttgttggtgttagatagttaggtttatt

SEQ ID NO: 11438 - DNA, 742 bp, Artificial Sequence
  chemically treated genomic DNA (Homo sapiens) CpG-island No: 11438
aataaacctaactatctaacaccaacaaccgcactaaccaacgtttattacaaacgcgctaataatcctaacctcactataaatacatcgtaaataaatcgctccgactcttcacaaacgacaaataatcgcaaacgtaattacgcgctaaacgaataaacgcttccgtaactaactaacgctactcgccatcgcgcacgacgacgtacaatcgactccacaaaccttcgcccaaaattttaatcaccaccaaaccctaacgctcaaaactctctactacccaatacgataacgcgacaatacccatccgcgcgacaaccatctaaatcaacaataaaatattatcgacgcttttcaataacgaactaacgcctaccgactaaaaaaaataccgccaaacatccaatcgactacgctacaccgaataaattaataacgtctcgctaacgaaatcttccgatataattcgcgttttcgccgccaataaataatcaaatactaacaccaaacgcacttcataatcgaacatcgacgaataatacaacgcactacgcgacaaaatatcgaacgtcattaccaaatccaactctccctattacaaaacgaaattaaattacttaataccgtcgaacgctataacgccctacaaaaaacgacatttacaacttacgcaatacaacgtatccgtaacgctatactaaataaacttcgcaaccgtaactaaataccgcgcaatacgacg

SEQ ID NO: 11439 - DNA, 742 bp, Artificial Sequence
  chemically treated genomic DNA (Homo sapiens) CpG-island No: 11439
ggtaaatttggttatttggtattaatagtcgtattggttaacgtttattataggcgcgttggtgattttggttttattgtgggtgtatcgtaagtgggtcgtttcggttttttataaacggtagatgatcgtaggcgtgattgcgcgttgagcgaataaacgttttcgtaattggttgacgttgttcgttatcgcgtacggcggcgtatagtcggttttataagttttcgtttagggttttggttattattagattttggcgtttaaaattttttattatttaatgcggtagcgcggtaatatttattcgcgcggtaattatttgaattaataataaggtgttatcgacgttttttagtgacgggttgacgtttgtcggttgaagaaaatgtcgttagatatttagtcgattacgttgtatcggataaattaatagcgtttcgttggcgagatttttcggtgtaattcgcgttttcgtcgttagtggatggttaggtgttaatattagacgtattttatagtcgaatatcggcgaataatgtagcgtattgcgcggtagaatatcggacgttattattagatttagttttttttgttgtaaggcgggattgggttatttaatgtcgtcgaacgttatgacgttttataaggaacggtatttataatttacgtagtgtagcgtattcgtggcgttatgttggatgaatttcgtagtcgtgattgggtgtcgcgtagtgcgacg

SEQ ID NO: 11440 - DNA, 742 bp, Artificial Sequence
  chemically treated genomic DNA (Homo sapiens) CpG-island No: 11440
cgtcgcactacgcgacacccaatcacgactacgaaattcatccaacataacgccacgaatacgctacactacgtaaattataaataccgttccttataaaacgtcataacgttcgacgacattaaataacccaatcccgccttacaacaaaaaaaactaaatctaataataacgtccgatattctaccgcgcaatacgctacattattcgccgatattcgactataaaatacgtctaatattaacacctaaccatccactaacgacgaaaacgcgaattacaccgaaaaatctcgccaacgaaacgctattaatttatccgatacaacgtaatcgactaaatatctaacgacattttcttcaaccgacaaacgtcaacccgtcactaaaaaacgtcgataacaccttattattaattcaaataattaccgcgcgaataaatattaccgcgctaccgcattaaataataaaaaattttaaacgccaaaatctaataataaccaaaaccctaaacgaaaacttataaaaccgactatacgccgccgtacgcgataacgaacaacgtcaaccaattacgaaaacgtttattcgctcaacgcgcaatcacgcctacgatcatctaccgtttataaaaaaccgaaacgacccacttacgatacacccacaataaaaccaaaatcaccaacgcgcctataataaacgttaaccaatacgactattaataccaaataaccaaatttacc

SEQ ID NO: 11441 - DNA, 576 bp, Artificial Sequence
  chemically treated genomic DNA (Homo sapiens) CpG-island No: 11441
gcgtcggtttcgtttcgtttcggttgtttagaatcgggaggcggcggcggcggcggggtcggggttcggggcggcggcggcgggacgcgaggattatggttgttttcgagcgtcgcgttttcgcgtataagattaataggtagtgtggtcgcggggtttttttttattttttttacgtggttcggtttcgtttcggggcggtgcgatttttttcgttcgggcgtttttaatttaattttttttcgtttcggttcgggtttcgttagtttttttcggtcggggttgggagcgggagaaggcggggagggtcgcgggggtttcggcgggggttttagatgggagtcgcgtcggggttgggagcgcgatggcggttgtcgttttgttttcgtgacgcgcgggggtgtgttcggagggtttttcggaggaggtggcgtggggatgcggatgacgggcgttttttgaattttttgcgtttttcgttcgtttttcggttttttattgttttcgcgttttcggagatcggggtgggtcggattttttgttttttttttagtgtttggtttggggtagggaggt

SEQ ID NO: 11442 - DNA, 576 bp, Artificial Sequence
  chemically treated genomic DNA (Homo sapiens) CpG-island No: 11442
acctccctaccccaaaccaaacactaaaaaaaaaacaaaaaatccgacccaccccgatctccgaaaacgcgaaaacaataaaaaaccgaaaaacgaacgaaaaacgcaaaaaattcaaaaaacgcccgtcatccgcatccccacgccacctcctccgaaaaaccctccgaacacacccccgcgcgtcacgaaaacaaaacgacaaccgccatcgcgctcccaaccccgacgcgactcccatctaaaacccccgccgaaacccccgcgaccctccccgccttctcccgctcccaaccccgaccgaaaaaaactaacgaaacccgaaccgaaacgaaaaaaaattaaattaaaaacgcccgaacgaaaaaaatcgcaccgccccgaaacgaaaccgaaccacgtaaaaaaaataaaaaaaaaccccgcgaccacactacctattaatcttatacgcgaaaacgcgacgctcgaaaacaaccataatcctcgcgtcccgccgccgccgccccgaaccccgaccccgccgccgccgccgcctcccgattctaaacaaccgaaacgaaacgaaaccgacgc

SEQ ID NO: 11443 - DNA, 576 bp, Artificial Sequence
  chemically treated genomic DNA (Homo sapiens) CpG-island No: 11443
gtttttttgttttaaattaggtattgaggaaggaatagaaagttcggtttatttcgattttcgagagcgcggggatagtgaggggtcgagaggcggacggggagcgtagggagtttagggggcgttcgttattcgtatttttacgttatttttttcgggaagtttttcggatatattttcgcgcgttacggaggtagaacggtagtcgttatcgcgtttttagtttcgacgcgatttttatttgggattttcgtcgggattttcgcggtttttttcgttttttttcgtttttagtttcggtcggaggaagttggcgggattcgggtcgaggcggaaaggggttgaattgggggcgttcgggcggggagggtcgtatcgtttcggggcggagtcgggttacgtgggggaggtgggagggggtttcgcggttatattatttgttgattttgtgcgcgaaggcgcggcgttcggaggtagttatggttttcgcgtttcgtcgtcgtcgtttcgggtttcggtttcgtcgtcgtcgtcgtttttcggttttgggtagtcggggcggggcggggtcggcgt

SEQ ID NO: 11444 - DNA, 576 bp, Artificial Sequence
  chemically treated genomic DNA (Homo sapiens) CpG-island No: 11444
acgccgaccccgccccgccccgactacccaaaaccgaaaaacgacgacgacgacgaaaccgaaacccgaaacgacgacgacgaaacgcgaaaaccataactacctccgaacgccgcgccttcgcgcacaaaatcaacaaataatataaccgcgaaaccccctcccacctcccccacgtaacccgactccgccccgaaacgatacgaccctccccgcccgaacgcccccaattcaacccctttccgcctcgacccgaatcccgccaacttcctccgaccgaaactaaaaacgaaaaaaaacgaaaaaaaccgcgaaaatcccgacgaaaatcccaaataaaaatcgcgtcgaaactaaaaacgcgataacgactaccgttctacctccgtaacgcgcgaaaatatatccgaaaaacttcccgaaaaaaataacgtaaaaatacgaataacgaacgccccctaaactccctacgctccccgtccgcctctcgacccctcactatccccgcgctctcgaaaatcgaaataaaccgaactttctattccttcctcaatacctaatttaaaacaaaaaaac

SEQ ID NO: 11445 - DNA, 634 bp, Artificial Sequence
  chemically treated genomic DNA (Homo sapiens) CpG-island No: 11445
ggttcgaagtcgttagaaggtggggacggttttggaggcggggggtcgggtcggattttcgggcgttttcggcgtcgttttttcgtttagatttcggcggtttttgtcgatggttaggcggggtcggtcgcggtttaggtcgtttaggagcgcgtaggtttggtagagcgcgcggttggttagcgttttatagcgggagtaggcgtcggggcgcgggggtcgcgcggtcggggttagcgttaggcgttcggtcgagtgtacgaggtttagtatcgcggacggtcgcgtcgtttttaggcgtttgagtaggtttcgggcgtggtcgcggaaggtttcgggcgcgtagacgtatttttcggagaagtagtcgaggcggcggaagtgcgcgtatagtattatttttttttgcgaggcgaattgtagcgggcggtagcgcggtagggcgtttttttcgtcgggagagtttaggttttcgtttcgggttagtcgtttcgcgtcgtttcgtaggaagtttatgagtacggttttcgttatgtcgtcggcgttgtgatttggtggggagagaagggagcgggtgaggtggggcgcggagggcgttgttggttagggagtttttcggggaattaagggttta

SEQ ID NO: 11446 - DNA, 634 bp, Artificial Sequence
  chemically treated genomic DNA (Homo sapiens) CpG-island No: 11446
taaacccttaattccccgaaaaactccctaaccaacaacgccctccgcgccccacctcacccgctcccttctctccccaccaaatcacaacgccgacgacataacgaaaaccgtactcataaacttcctacgaaacgacgcgaaacgactaacccgaaacgaaaacctaaactctcccgacgaaaaaaacgccctaccgcgctaccgcccgctacaattcgcctcgcaaaaaaaaataatactatacgcgcacttccgccgcctcgactacttctccgaaaaatacgtctacgcgcccgaaaccttccgcgaccacgcccgaaacctactcaaacgcctaaaaacgacgcgaccgtccgcgatactaaacctcgtacactcgaccgaacgcctaacgctaaccccgaccgcgcgacccccgcgccccgacgcctactcccgctataaaacgctaaccaaccgcgcgctctaccaaacctacgcgctcctaaacgacctaaaccgcgaccgaccccgcctaaccatcgacaaaaaccgccgaaatctaaacgaaaaaacgacgccgaaaacgcccgaaaatccgacccgaccccccgcctccaaaaccgtccccaccttctaacgacttcgaacc

SEQ ID NO: 11447 - DNA, 634 bp, Artificial Sequence
  chemically treated genomic DNA (Homo sapiens) CpG-island No: 11447
tggatttttggtttttcggggggttttttggttagtagcgtttttcgcgttttattttattcgtttttttttttttttattaggttataacgtcgacgatatggcggagatcgtgtttatgaattttttacggggcgacgcggggcggttggttcggggcgggggtttgggttttttcggcgaggggggcgttttgtcgcgttgtcgttcgttgtagttcgtttcgtagaaggaggtggtgttgtacgcgtattttcgtcgtttcgattattttttcgaggagtgcgtttacgcgttcgaggtttttcgcggttacgttcgggatttgtttaagcgtttggaggcggcgcggtcgttcgcggtgttggatttcgtgtattcggtcgagcgtttggcgttggtttcggtcgcgcggttttcgcgtttcggcgtttgttttcgttgtggggcgttggttagtcgcgcgttttgttaggtttgcgcgtttttggacggtttgaatcgcggtcggtttcgtttggttatcggtaagggtcgtcggggtttggacgaggaggcgacgtcggggacgttcggggattcggttcggtttttcgtttttaaggtcgtttttattttttagcgatttcgggtt

SEQ ID NO: 11448 - DNA, 634 bp, Artificial Sequence
  chemically treated genomic DNA (Homo sapiens) CpG-island No: 11448
aacccgaaatcgctaaaaaataaaaacgaccttaaaaacgaaaaaccgaaccgaatccccgaacgtccccgacgtcgcctcctcgtccaaaccccgacgacccttaccgataaccaaacgaaaccgaccgcgattcaaaccgtccaaaaacgcgcaaacctaacaaaacgcgcgactaaccaacgccccacaacgaaaacaaacgccgaaacgcgaaaaccgcgcgaccgaaaccaacgccaaacgctcgaccgaatacacgaaatccaacaccgcgaacgaccgcgccgcctccaaacgcttaaacaaatcccgaacgtaaccgcgaaaaacctcgaacgcgtaaacgcactcctcgaaaaaataatcgaaacgacgaaaatacgcgtacaacaccacctccttctacgaaacgaactacaacgaacgacaacgcgacaaaacgcccccctcgccgaaaaaacccaaacccccgccccgaaccaaccgccccgcgtcgccccgtaaaaaattcataaacacgatctccgccatatcgtcgacgttataacctaataaaaaaaaaaaaaaacgaataaaataaaacgcgaaaaacgctactaaccaaaaaaccccccgaaaaaccaaaaatcca

SEQ ID NO: 11449 - DNA, 690 bp, Artificial Sequence
  chemically treated genomic DNA (Homo sapiens) CpG-island No: 11449
tgcgtttgaatttttttttaggtttcgttttttcgtttgtgtattcgttttattgtttcggagagtgtcgttttgcggttcgtattacgtttatttgttacgatgtgcgtggtttttacgcggcgcgtttttttttttagcgttcggcgtcgtagtattttatagaaggtgtagtaggagcggttgcggtcggagtcggttgtgttgcgggttacggcgtttatcgtttagtttttaaagaggttttcgtaggttacgatcgtgagcggtagtttttagcgcgtcgtttggcgtcgtacggtcgttaacgtcgcgtttcggtagttatcgatgtttttatcgacggttacgagttgtagtgagatgtttaggcgcggcgttagcgcgcgtagtacgtgcgttagtatcgtggagtttttgtcgttcgaggcgtttacggttattatcgcgtcgggcggtagtaggcggtcggcgagtatcgtgtgtagtatttcggtttcgaaggcggcgtagaagtaggtatcgtatagcgtttggttcgagagcggacggcggagggcggcgcgtgtagtatggtaggaggcgtacggcggggcgggtattgcgggaggggtcggttttttttagatagggagagagaggaggtgggttatatatggatttcggattgtagggtttttgttatcgggg

SEQ ID NO: 11450 - DNA, 690 bp, Artificial Sequence
  chemically treated genomic DNA (Homo sapiens) CpG-island No: 11450
ccccgataacaaaaaccctacaatccgaaatccatatataacccacctcctctctctccctatctaaaaaaaaccgacccctcccgcaatacccgccccgccgtacgcctcctaccatactacacgcgccgccctccgccgtccgctctcgaaccaaacgctatacgatacctacttctacgccgccttcgaaaccgaaatactacacacgatactcgccgaccgcctactaccgcccgacgcgataataaccgtaaacgcctcgaacgacaaaaactccacgatactaacgcacgtactacgcgcgctaacgccgcgcctaaacatctcactacaactcgtaaccgtcgataaaaacatcgataactaccgaaacgcgacgttaacgaccgtacgacgccaaacgacgcgctaaaaactaccgctcacgatcgtaacctacgaaaacctctttaaaaactaaacgataaacgccgtaacccgcaacacaaccgactccgaccgcaaccgctcctactacaccttctataaaatactacgacgccgaacgctaaaaaaaaaaacgcgccgcgtaaaaaccacgcacatcgtaacaaataaacgtaatacgaaccgcaaaacgacactctccgaaacaataaaacgaatacacaaacgaaaaaacgaaacctaaaaaaaaattcaaacgca

SEQ ID NO: 11451 - DNA, 690 bp, Artificial Sequence
  chemically treated genomic DNA (Homo sapiens) CpG-island No: 11451
tttcgatggtagggattttgtaattcggaatttatatgtaatttattttttttttttttttgtttaggagaagtcgatttttttcgtaatgttcgtttcgtcgtgcgttttttgttatgttgtacgcgtcgtttttcgtcgttcgttttcgggttaagcgttgtgcggtgtttgtttttgcgtcgttttcgaggtcgaggtgttgtatacggtgttcgtcggtcgtttgttgtcgttcggcgcggtggtggtcgtgggcgtttcgggcggtaaggattttacggtgttggcgtacgtgttgcgcgcgttggcgtcgcgtttgggtattttattgtagttcgtggtcgtcgatgagggtatcggtggttatcgggacgcggcgttggcggtcgtgcggcgttaggcggcgcgttgggagttgtcgtttacggtcgtggtttacgaagatttttttgggggttggacgatggacgtcgtggttcgtagtatagtcggtttcggtcgtagtcgtttttgttgtattttttgtggagtgttgcggcgtcgggcgttggaggaaggggcgcgtcgcgtgggagttacgtatatcgtgataggtgagcgtagtacgggtcgtagagcggtatttttcgaggtagtggggcgaatgtataggcgaggaggcgggatttgaaaggggatttaggcgta

SEQ ID NO: 11452 - DNA, 690 bp, Artificial Sequence
  chemically treated genomic DNA (Homo sapiens) CpG-island No: 11452
tacgcctaaatcccctttcaaatcccgcctcctcgcctatacattcgccccactacctcgaaaaataccgctctacgacccgtactacgctcacctatcacgatatacgtaactcccacgcgacgcgccccttcctccaacgcccgacgccgcaacactccacaaaaaatacaacaaaaacgactacgaccgaaaccgactatactacgaaccacgacgtccatcgtccaacccccaaaaaaatcttcgtaaaccacgaccgtaaacgacaactcccaacgcgccgcctaacgccgcacgaccgccaacgccgcgtcccgataaccaccgataccctcatcgacgaccacgaactacaataaaatacccaaacgcgacgccaacgcgcgcaacacgtacgccaacaccgtaaaatccttaccgcccgaaacgcccacgaccaccaccgcgccgaacgacaacaaacgaccgacgaacaccgtatacaacacctcgacctcgaaaacgacgcaaaaacaaacaccgcacaacgcttaacccgaaaacgaacgacgaaaaacgacgcgtacaacataacaaaaaacgcacgacgaaacgaacattacgaaaaaaatcgacttctcctaaacaaaaaaaaaaaaaaaataaattacatataaattccgaattacaaaatccctaccatcgaaa

SEQ ID NO: 11453 - DNA, 1110 bp, Artificial Sequence
  chemically treated genomic DNA (Homo sapiens) CpG-island No: 11453
tttcgggttcgttacgtcggattcgtttttttcgcgttgcgttgggtcggacgttaggtttgcgcgtcgcggttgagcgtttattcgttttgcggaaagagtcgcggaggaatcggcgggggcggttgcgggagtcgaaggaggtggtaatcgggagtagaattagaaggagatagggaggtagaagttcgcggtttcgtggtacgtattttttcggttagggatgggtttcggcgcggtttagtttttgttcggttcgtcgggtagagattgaatcgcggatttttatcgttttgtggacgatcggatagagagaggtattgatcgatcgttagtagtttttcggtgggatcgcgttttttgtatatttcgcgtagcgtttttcgtcggagtcgtatcgggtaagtcggcgagggagcggggttgattggcggtcgtcggcggttaggggagggggcgtcgcgcggggttatggtaggttcggaggcgttttagttcgagtcggagtcgattcgagtttacgcggtcgtcgttttttcgttttcgggttttcgtcgttatcgcgtttttcgcgggagatggaatagcggaatcggttcggtgttttcggatatttgtcgtttttgttgttgtatgttttgttgtttttcgtggtcgacggtgagcgcgggaattttgttgtcgttgtggattcgggggggtttttgttggggtcgttatcgagaagaagaagaaagagaacgaatcgggaagtttcgcggtttttagtaatttcgttgtgtagtttgggttcggaggggtagggagaggcgagcggcgaagggtcgtcgtagtagtagcgtcgcgttcgagtcgtttttagtttcgtcggggtttcggttgcggaaaggatgtttgcggggagcgggagtaggcgcgttttagttaggttttggcggtgcggttaggggcgggggagaagtacgagtcgtttttgtcgtttcgttttattcggagggaagtagtaggtagtcgatggtcggtttttgtttcggttttgtagtcgttttttcgaattttgttagttttttcggtcgtgcgttagggagtagttgcggggtggggggtata

SEQ ID NO: 11454 - DNA, 1110 bp, Artificial Sequence
  chemically treated genomic DNA (Homo sapiens) CpG-island No: 11454
tataccccccaccccgcaactactccctaacgcacgaccgaaaaaactaacaaaattcgaaaaaacgactacaaaaccgaaacaaaaaccgaccatcgactacctactacttccctccgaataaaacgaaacgacaaaaacgactcgtacttctcccccgcccctaaccgcaccgccaaaacctaactaaaacgcgcctactcccgctccccgcaaacatcctttccgcaaccgaaaccccgacgaaactaaaaacgactcgaacgcgacgctactactacgacgacccttcgccgctcgcctctccctacccctccgaacccaaactacacaacgaaattactaaaaaccgcgaaacttcccgattcgttctctttcttcttcttctcgataacgaccccaacaaaaacccccccgaatccacaacgacaacaaaattcccgcgctcaccgtcgaccacgaaaaacaacaaaacatacaacaacaaaaacgacaaatatccgaaaacaccgaaccgattccgctattccatctcccgcgaaaaacgcgataacgacgaaaacccgaaaacgaaaaaacgacgaccgcgtaaactcgaatcgactccgactcgaactaaaacgcctccgaacctaccataaccccgcgcgacgccccctcccctaaccgccgacgaccgccaatcaaccccgctccctcgccgacttacccgatacgactccgacgaaaaacgctacgcgaaatatacaaaaaacgcgatcccaccgaaaaactactaacgatcgatcaatacctctctctatccgatcgtccacaaaacgataaaaatccgcgattcaatctctacccgacgaaccgaacaaaaactaaaccgcgccgaaacccatccctaaccgaaaaaatacgtaccacgaaaccgcgaacttctacctccctatctccttctaattctactcccgattaccacctccttcgactcccgcaaccgcccccgccgattcctccgcgactctttccgcaaaacgaataaacgctcaaccgcgacgcgcaaacctaacgtccgacccaacgcaacgcgaaaaaaacgaatccgacgtaacgaacccgaaa

SEQ ID NO: 11455 - DNA, 1110 bp, Artificial Sequence
  chemically treated genomic DNA (Homo sapiens) CpG-island No: 11455
tgtgttttttatttcgtagttgttttttggcgtacggtcggaggggttagtaaagttcggggaagcggttgtagggtcgaggtagggatcggttatcggttgtttattgttttttttcggatggggcggggcggtaggggcgattcgtgtttttttttcgtttttggtcgtatcgttagagtttggttggggcgcgtttattttcgtttttcgtaggtatttttttcgtagtcggggtttcggcgggattgggaacgattcgggcgcggcgttgttgttgcggcgatttttcgtcgttcgtttttttttattttttcgggtttaggttgtatagcgggattgttggagatcgcgaagtttttcggttcgtttttttttttttttttttcggtggcggttttagtaaagattttttcgagtttatagcggtagtaaagttttcgcgtttatcgtcggttacgaagagtagtagggtatgtagtagtagaggcggtaggtattcgagggtatcgagtcggtttcgttgttttatttttcgcggggggcgcggtggcggcgggggttcgggagcggagaggcggcggtcgcgtgggttcggatcggtttcggttcgggttaggacgttttcgagtttgttatggtttcgcgcggcgtttttttttttggtcgtcggcggtcgttaattagtttcgttttttcgtcggtttgttcggtgcggtttcggcggggggcgttgcgcggggtgtgtaggagacgcggttttatcgggaggttgttggcgatcggttagtgtttttttttgttcggtcgtttataggacggtggggattcgcggtttagtttttgttcggcgggtcgggtaggggttgggtcgcgtcgggatttatttttggtcgagggagtgcgtgttacggagtcgcgagtttttgtttttttgtttttttttggttttgttttcgattgttatttttttcggttttcgtagtcgttttcgtcggttttttcgcggtttttttcgtagggcgagtgggcgtttagtcgcggcgcgtagatttggcgttcgatttagcgtagcgcggggagagcgggttcggcgtggcggattcggag

SEQ ID NO: 11456 - DNA, 1110 bp, Artificial Sequence
  chemically treated genomic DNA (Homo sapiens) CpG-island No: 11456
ctccgaatccgccacgccgaacccgctctccccgcgctacgctaaatcgaacgccaaatctacgcgccgcgactaaacgcccactcgccctacgaaaaaaaccgcgaaaaaaccgacgaaaacgactacgaaaaccgaaaaaaataacaatcgaaaacaaaaccaaaaaaaaacaaaaaaacaaaaactcgcgactccgtaacacgcactccctcgaccaaaaataaatcccgacgcgacccaacccctacccgacccgccgaacaaaaactaaaccgcgaatccccaccgtcctataaacgaccgaacaaaaaaaaacactaaccgatcgccaacaacctcccgataaaaccgcgtctcctacacaccccgcgcaacgccccccgccgaaaccgcaccgaacaaaccgacgaaaaaacgaaactaattaacgaccgccgacgaccaaaaaaaaaaacgccgcgcgaaaccataacaaactcgaaaacgtcctaacccgaaccgaaaccgatccgaacccacgcgaccgccgcctctccgctcccgaacccccgccgccaccgcgccccccgcgaaaaataaaacaacgaaaccgactcgataccctcgaatacctaccgcctctactactacataccctactactcttcgtaaccgacgataaacgcgaaaactttactaccgctataaactcgaaaaaatctttactaaaaccgccaccgaaaaaaaaaaaaaaaaaaacgaaccgaaaaacttcgcgatctccaacaatcccgctatacaacctaaacccgaaaaaataaaaaaaaacgaacgacgaaaaatcgccgcaacaacaacgccgcgcccgaatcgttcccaatcccgccgaaaccccgactacgaaaaaaatacctacgaaaaacgaaaataaacgcgccccaaccaaactctaacgatacgaccaaaaacgaaaaaaaaacacgaatcgcccctaccgccccgccccatccgaaaaaaaacaataaacaaccgataaccgatccctacctcgaccctacaaccgcttccccgaactttactaacccctccgaccgtacgccaaaaaacaactacgaaataaaaaacaca

SEQ ID NO: 11457 - DNA, 590 bp, Artificial Sequence
  chemically treated genomic DNA (Homo sapiens) CpG-island No: 11457
ttcggttgtttgtcgtgcggttgtaggacgagggcgtgtacgagtgtcgcgtgtcggattatagcgacgacgatacgtaggagtataaggtttaggcgatgttgcgcgtgttttcgcgtttcgcgtcgtttaatatgtaggtcgtcgaggtcgtgttttatatttagagtagcggttcgcgtcgttacggtttagttagcgtcgttaacgttaataacgcgggcgtcgcgagtcgtattattttcgagttcggtcgcggcgataagagttcgtcgttcgggagttttttcgtcgttatcgatttcgtagttttcgaggtcgcggtagtttcggcggtttatacgtttattattatagtcgcggtagttgttgttgtttcgttagcgtcgtcgttatcgggataggcggttttgttgcgttagaggtacggttcgggtaagggatcgcggagagggggcgtacgcgcggggatggcgtagggttagggttgcgtcgggacgtttcggggggtttcggatttaggattcgttttttgggcgtatttgtatatgtatatttttttttagttaggtcgggagcgttttttttag

SEQ ID NO: 11458 - DNA, 590 bp, Artificial Sequence
  chemically treated genomic DNA (Homo sapiens) CpG-island No: 11458
ctaaaaaaaacgctcccgacctaactaaaaaaaaatatacatatacaaatacgcccaaaaaacgaatcctaaatccgaaaccccccgaaacgtcccgacgcaaccctaaccctacgccatccccgcgcgtacgccccctctccgcgatcccttacccgaaccgtacctctaacgcaacaaaaccgcctatcccgataacgacgacgctaacgaaacaacaacaactaccgcgactataataataaacgtataaaccgccgaaactaccgcgacctcgaaaactacgaaatcgataacgacgaaaaaactcccgaacgacgaactcttatcgccgcgaccgaactcgaaaataatacgactcgcgacgcccgcgttattaacgttaacgacgctaactaaaccgtaacgacgcgaaccgctactctaaatataaaacacgacctcgacgacctacatattaaacgacgcgaaacgcgaaaacacgcgcaacatcgcctaaaccttatactcctacgtatcgtcgtcgctataatccgacacgcgacactcgtacacgccctcgtcctacaaccgcacgacaaacaaccgaa

SEQ ID NO: 11459 - DNA, 590 bp, Artificial Sequence
  chemically treated genomic DNA (Homo sapiens) CpG-island No: 11459
ttggggggggcgttttcgatttaattaggaaggagtatgtatatgtaaatgcgtttagggggcgggttttgggttcggagtttttcggggcgtttcggcgtagttttagttttgcgttattttcgcgcgtgcgtttttttttcgcgattttttattcgagtcgtgtttttggcgtagtaggatcgtttgtttcgatggcggcgacgttgacgaggtagtagtagttgtcgcgattgtggtggtgggcgtgtgggtcgtcgaggttgtcgcggtttcggggattgcgggatcgatggcggcgggagggttttcgggcggcgggtttttgtcgtcgcggtcgggttcggaggtggtacggttcgcggcgttcgcgttgttggcgttggcggcgttggttgggtcgtggcgacgcgggtcgttgttttggatgtgggatacggtttcggcggtttgtatgttgggcggcgcgaagcgcgagagtacgcgtagtatcgtttgggttttgtgtttttgcgtgtcgtcgtcgttgtagttcgatacgcggtattcgtatacgttttcgttttgtagtcgtacggtagatagtcgaa

SEQ ID NO: 11460 - DNA, 590 bp, Artificial Sequence
  chemically treated genomic DNA (Homo sapiens) CpG-island No: 11460
ttcgactatctaccgtacgactacaaaacgaaaacgtatacgaataccgcgtatcgaactacaacgacgacgacacgcaaaaacacaaaacccaaacgatactacgcgtactctcgcgcttcgcgccgcccaacatacaaaccgccgaaaccgtatcccacatccaaaacaacgacccgcgtcgccacgacccaaccaacgccgccaacgccaacaacgcgaacgccgcgaaccgtaccacctccgaacccgaccgcgacgacaaaaacccgccgcccgaaaaccctcccgccgccatcgatcccgcaatccccgaaaccgcgacaacctcgacgacccacacgcccaccaccacaatcgcgacaactactactacctcgtcaacgtcgccgccatcgaaacaaacgatcctactacgccaaaaacacgactcgaataaaaaatcgcgaaaaaaaaacgcacgcgcgaaaataacgcaaaactaaaactacgccgaaacgccccgaaaaactccgaacccaaaacccgccccctaaacgcatttacatatacatactccttcctaattaaatcgaaaacgccccccccaa

SEQ ID NO: 11461 - DNA, 856 bp, Artificial Sequence
  chemically treated genomic DNA (Homo sapiens) CpG-island No: 11461
cgtttgtcgggtttatttgaaaatcgaaaatttcgttattgtcggcggtttatcggttgttatattttgattaattaggagcgacgcgttttacgtcgagttcgaagttttttcggcgacgcgtagttattggttatgtaggttttgtgggcggaacgtcgtaaggtcgcgcgtcgggtaacgcggtgtcgttatatagtagcgagtttgtaagaaaataaattagttgcgttcggggcgtggtcgggagtacgttggtttcgttttttggcggttgttttagcggcggcggcggcgtaggtttagagtagatttcgttcggcgaggaggagggagggtgagttagggggagattcggtttttaaggggcgggcgtcgggtagggtttcgcgggcggtcgagggttgggttcggtttttagtttttcgtcgtttttcggttgatagggggaggagttcgtcgggagggtcggggtttcgggttggggagtcgggacgggagagtagcgtagtcgggtgtatcgcggtcgcgtttcgggagggttgttcgggttagcgttcgtcggttgtttcgcgttgatagcgtcgggttggggcggggcggggggttttgtaggtcgttagtgtcgatatgttgttggaggaggttcgcgtcggcgatcggttgagtggggcggcggttcggggcgacgtgtaggaggtgcgtcgttttttgtatcgggagttggtgtatttcgacgtttttaatcgtttcggtaagacggcgttgtaggtgaggtcgggtcggtttaggttggggcggggcggttaagcgggatgaggatcgagattttagagtttttttttggttttttggt

SEQ ID NO: 11462 - DNA, 856 bp, Artificial Sequence
  chemically treated genomic DNA (Homo sapiens) CpG-island No: 11462
accaaaaaaccaaaaaaaaactctaaaatctcgatcctcatcccgcttaaccgccccgccccaacctaaaccgacccgacctcacctacaacgccgtcttaccgaaacgattaaaaacgtcgaaatacaccaactcccgatacaaaaaacgacgcacctcctacacgtcgccccgaaccgccgccccactcaaccgatcgccgacgcgaacctcctccaacaacatatcgacactaacgacctacaaaaccccccgccccgccccaacccgacgctatcaacgcgaaacaaccgacgaacgctaacccgaacaaccctcccgaaacgcgaccgcgatacacccgactacgctactctcccgtcccgactccccaacccgaaaccccgaccctcccgacgaactcctccccctatcaaccgaaaaacgacgaaaaactaaaaaccgaacccaaccctcgaccgcccgcgaaaccctacccgacgcccgccccttaaaaaccgaatctccccctaactcaccctccctcctcctcgccgaacgaaatctactctaaacctacgccgccgccgccgctaaaacaaccgccaaaaaacgaaaccaacgtactcccgaccacgccccgaacgcaactaatttattttcttacaaactcgctactatataacgacaccgcgttacccgacgcgcgaccttacgacgttccgcccacaaaacctacataaccaataactacgcgtcgccgaaaaaacttcgaactcgacgtaaaacgcgtcgctcctaattaatcaaaatataacaaccgataaaccgccgacaataacgaaattttcgattttcaaataaacccgacaaacg

SEQ ID NO: 11463 - DNA, 856 bp, Artificial Sequence
  chemically treated genomic DNA (Homo sapiens) CpG-island No: 11463
gttaggagattagagaggagttttggggtttcgatttttatttcgtttagtcgtttcgttttaatttggatcggttcggttttatttgtagcgtcgttttgtcgaagcggttgagggcgtcgggatgtattagttttcggtgtagaaggcggcgtattttttgtacgtcgtttcgggtcgtcgttttatttagtcggtcgtcggcgcgaattttttttagtagtatgtcgatattggcggtttgtaaagtttttcgtttcgttttagttcggcgttgttagcgcggagtagtcggcgggcgttggttcgaatagttttttcggggcgcggtcgcggtgtattcggttgcgttgttttttcgtttcggttttttagttcgagatttcggttttttcggcgggtttttttttttgttagtcggaggacggcgaggggttgggagtcgggtttaattttcggtcgttcgcggggttttgttcggcgttcgttttttgggggtcgggtttttttttaatttattttttttttttttcgtcgggcggggtttgttttgagtttgcgtcgtcgtcgtcgttgaggtagtcgttagggggcggagttaacgtgttttcggttacgtttcgaacgtaattgatttgtttttttataaattcgttattgtgtagcggtatcgcgttgttcggcgcgcgattttacggcgtttcgtttatagggtttgtataattagtggttgcgcgtcgtcggggaaatttcgggttcggcgtgaaacgcgtcgtttttgattggttagagtgtggtaatcggtggatcgtcggtaatggcggggttttcggtttttaaatgaattcggtaggcg

SEQ ID NO: 11464 - DNA, 856 bp, Artificial Sequence
  chemically treated genomic DNA (Homo sapiens) CpG-island No: 11464
cgcctaccgaattcatttaaaaaccgaaaaccccgccattaccgacgatccaccgattaccacactctaaccaatcaaaaacgacgcgtttcacgccgaacccgaaatttccccgacgacgcgcaaccactaattatacaaaccctataaacgaaacgccgtaaaatcgcgcgccgaacaacgcgataccgctacacaataacgaatttataaaaaaacaaatcaattacgttcgaaacgtaaccgaaaacacgttaactccgccccctaacgactacctcaacgacgacgacgacgcaaactcaaaacaaaccccgcccgacgaaaaaaaaaaaaaataaattaaaaaaaaacccgacccccaaaaaacgaacgccgaacaaaaccccgcgaacgaccgaaaattaaacccgactcccaacccctcgccgtcctccgactaacaaaaaaaaaaacccgccgaaaaaaccgaaatctcgaactaaaaaaccgaaacgaaaaaacaacgcaaccgaatacaccgcgaccgcgccccgaaaaaactattcgaaccaacgcccgccgactactccgcgctaacaacgccgaactaaaacgaaacgaaaaactttacaaaccgccaatatcgacatactactaaaaaaaattcgcgccgacgaccgactaaataaaacgacgacccgaaacgacgtacaaaaaatacgccgccttctacaccgaaaactaatacatcccgacgccctcaaccgcttcgacaaaacgacgctacaaataaaaccgaaccgatccaaattaaaacgaaacgactaaacgaaataaaaatcgaaaccccaaaactcctctctaatctcctaac

SEQ ID NO: 11465 - DNA, 807 bp, Artificial Sequence
  chemically treated genomic DNA (Homo sapiens) CpG-island No: 11465
gggggtcgcggatcgtggatgtggtgggtgaggggagagaatagtaatttttagggcgttagggtgagtgagttgggtggggtagcggttttcgttgtcggaacggaagggaagtaggaaatcgcgagtggagaaagggtttttagatgttagttgggtgttcggagtatagggggtggggcgggtgggcggtggtcgcggtttttttcgtaggggcgtagtcgtgggcggtgattgcggtgatgaggcgaaagggatttcggaaaagttaggggcggggttagtagcggtacgtttcgtttataagtggatgcgggcgggattgagggcggtttcgtttcgtttagggtttttttaatgcgcgtgcgtaatgggttatagaatcgttatgtcggaatcgcgcgggtcgtcgtagttgcgggtgaacgcggcgtttgtcgcgcggtataatcgttatcgggagcgcgaggaattgtagcggcgtgagtgcggggcgtatgcgcgcgggagtttgcgcgcgtcggtcggttgggaagtggggagtcgagtggtttcgtcggttgatttgggggggggtatttcgtttgtgtttcgtagtgaaggatcgttacggggatcgagatagtagtagcgattttagtttcgagtcggatttaagcgacgagcgcgtggtgcgcgttttcgtttcgttttggacgtgcggaggcgtttaagtttttttttgtatttcgatttcgatgtagacgggggggaatttttaattttagagcgttttgcgggagcgttttatttttcgttttttatttt

SEQ ID NO: 11466 - DNA, 807 bp, Artificial Sequence
  chemically treated genomic DNA (Homo sapiens) CpG-island No: 11466
aaaataaaaaacgaaaaataaaacgctcccgcaaaacgctctaaaattaaaaattcccccccgtctacatcgaaatcgaaatacaaaaaaaaacttaaacgcctccgcacgtccaaaacgaaacgaaaacgcgcaccacgcgctcgtcgcttaaatccgactcgaaactaaaatcgctactactatctcgatccccgtaacgatccttcactacgaaacacaaacgaaatacccccccccaaatcaaccgacgaaaccactcgactccccacttcccaaccgaccgacgcgcgcaaactcccgcgcgcatacgccccgcactcacgccgctacaattcctcgcgctcccgataacgattataccgcgcgacaaacgccgcgttcacccgcaactacgacgacccgcgcgattccgacataacgattctataacccattacgcacgcgcattaaaaaaaccctaaacgaaacgaaaccgccctcaatcccgcccgcatccacttataaacgaaacgtaccgctactaaccccgcccctaacttttccgaaatccctttcgcctcatcaccgcaatcaccgcccacgactacgcccctacgaaaaaaaccgcgaccaccgcccacccgccccaccccctatactccgaacacccaactaacatctaaaaaccctttctccactcgcgatttcctacttcccttccgttccgacaacgaaaaccgctaccccacccaactcactcaccctaacgccctaaaaattactattctctcccctcacccaccacatccacgatccgcgaccccc

SEQ ID NO: 11467 - DNA, 807 bp, Artificial Sequence
  chemically treated genomic DNA (Homo sapiens) CpG-island No: 11467
gggatggggagcggaggatgggacgttttcgtagggcgttttggggttgggggttttttttcgtttatatcggggtcggggtgtagaggggggtttggacgttttcgtacgtttaggacggggcggggacgcgtattacgcgttcgtcgtttgagttcgattcggagttggagtcgttgttgttgtttcggttttcgtagcgattttttattgcgggatatagacgggatgtttttttttaggttagtcggcggggttattcgattttttattttttaatcggtcggcgcgcgtaggttttcgcgcgtatgcgtttcgtatttacgtcgttgtagtttttcgcgttttcggtagcggttgtatcgcgcggtaaacgtcgcgtttattcgtagttgcgacgattcgcgcggtttcggtatggcggttttgtggtttattgcgtacgcgtattgaggaagttttggacggggcggggtcgtttttagtttcgttcgtatttatttgtaaacgaggcgtatcgttgttaatttcgtttttggttttttcgggatttttttcgttttattatcgtagttatcgtttacggttacgtttttgcggggaaggtcgcggttatcgtttattcgttttattttttgtgtttcgggtatttagttgatatttgggggttttttttttattcgcggttttttgtttttttttcgtttcgatagcgaaaatcgttgttttatttagtttatttattttggcgttttgggaattattattttttttttttatttattatatttacgattcgcgattttt

SEQ ID NO: 11468 - DNA, 807 bp, Artificial Sequence
  chemically treated genomic DNA (Homo sapiens) CpG-island No: 11468
aaaaatcgcgaatcgtaaatataataaataaaaaaaaaaaataataattcccaaaacgccaaaataaataaactaaataaaacaacgattttcgctatcgaaacgaaaaaaaaacaaaaaaccgcgaataaaaaaaaaacccccaaatatcaactaaatacccgaaacacaaaaaataaaacgaataaacgataaccgcgaccttccccgcaaaaacgtaaccgtaaacgataactacgataataaaacgaaaaaaatcccgaaaaaaccaaaaacgaaattaacaacgatacgcctcgtttacaaataaatacgaacgaaactaaaaacgaccccgccccgtccaaaacttcctcaatacgcgtacgcaataaaccacaaaaccgccataccgaaaccgcgcgaatcgtcgcaactacgaataaacgcgacgtttaccgcgcgatacaaccgctaccgaaaacgcgaaaaactacaacgacgtaaatacgaaacgcatacgcgcgaaaacctacgcgcgccgaccgattaaaaaataaaaaatcgaataaccccgccgactaacctaaaaaaaaacatcccgtctatatcccgcaataaaaaatcgctacgaaaaccgaaacaacaacaacgactccaactccgaatcgaactcaaacgacgaacgcgtaatacgcgtccccgccccgtcctaaacgtacgaaaacgtccaaacccccctctacaccccgaccccgatataaacgaaaaaaaacccccaaccccaaaacgccctacgaaaacgtcccatcctccgctccccatccc

SEQ ID NO: 11469 - DNA, 587 bp, Artificial Sequence
  chemically treated genomic DNA (Homo sapiens) CpG-island No: 11469
cgtcgcgggtacgtaagcgtcgtagttacgtcggcggcgtacggcgcgttattttcggttcgtttttcgcgttttaggtcgttattcgttcgcgatttttgtcgcgttcgtttatcggtttacgaagttttttagtatcgagtttttgtcggcgttttggtcgtttattatagcgatttgcggtaggtttaggtggtagttttggtcgatggagttgaaggcgttttgtagtttttttatttcgcggttgtttatggcgtcggcggttttcggttcgagcgttttgcgtttttcgttcgtcgtcgatttttaacgatttggtttcgcggcgtttgtagtcgttgtttttcgttcgttcgggtttcggtaagacgttcgttttcggttcggttttacggtcgtcgttttattcggtttttaggcgatattcgattcgagcgatttttcgtttcggtttcgggggttgcgtttaaagtattcgcgtcgtacgcgattggtttgttgtatcgttattcggatatattagttaataaaaattaggtacgggtttatggttgagtaaattttttttttggggatcgttttgt

SEQ ID NO: 11470 - DNA, 587 bp, Artificial Sequence
  chemically treated genomic DNA (Homo sapiens) CpG-island No: 11470
acaaaacgatccccaaaaaaaaaatttactcaaccataaacccgtacctaatttttattaactaatatatccgaataacgatacaacaaaccaatcgcgtacgacgcgaatactttaaacgcaacccccgaaaccgaaacgaaaaatcgctcgaatcgaatatcgcctaaaaaccgaataaaacgacgaccgtaaaaccgaaccgaaaacgaacgtcttaccgaaacccgaacgaacgaaaaacaacgactacaaacgccgcgaaaccaaatcgttaaaaatcgacgacgaacgaaaaacgcaaaacgctcgaaccgaaaaccgccgacgccataaacaaccgcgaaataaaaaaactacaaaacgccttcaactccatcgaccaaaactaccacctaaacctaccgcaaatcgctataataaacgaccaaaacgccgacaaaaactcgatactaaaaaacttcgtaaaccgataaacgaacgcgacaaaaatcgcgaacgaataacgacctaaaacgcgaaaaacgaaccgaaaataacgcgccgtacgccgccgacgtaactacgacgcttacgtacccgcgacg

SEQ ID NO: 11471 - DNA, 587 bp, Artificial Sequence
  chemically treated genomic DNA (Homo sapiens) CpG-island No: 11471
gtaagacggtttttagggggaaggtttatttaattataggttcgtgtttagtttttattggttagtgtattcgagtggcggtgtagtaggttagtcgcgtgcggcgcgagtgttttgggcgtagttttcggggtcggggcgggaggtcgttcgggtcgggtgtcgtttgagaatcggatgaggcggcgatcgtgaggtcgagtcgggagcgggcgttttgtcgaggttcgggcgggcggggagtaacggttatagacgtcgcggggttaggtcgttgagggtcggcggcgggcgaggagcgtagggcgttcgggtcgggggtcgtcggcgttatgggtaatcgcgggatggaaaaattgtaggacgtttttagttttatcggttagagttgttatttggatttgtcgtagatcgttgtagtgggcggttagagcgtcggtaagagttcggtgttggagaatttcgtgggtcggtgagcgggcgcggtagggatcgcgggcgggtggcggtttagggcgcggagggcggatcgggaatggcgcgtcgtgcgtcgtcggcgtaattgcggcgtttgcgtgttcgcggcg

SEQ ID NO: 11472 - DNA, 587 bp, Artificial Sequence
  chemically treated genomic DNA (Homo sapiens) CpG-island No: 11472
cgccgcgaacacgcaaacgccgcaattacgccgacgacgcacgacgcgccattcccgatccgccctccgcgccctaaaccgccacccgcccgcgatccctaccgcgcccgctcaccgacccacgaaattctccaacaccgaactcttaccgacgctctaaccgcccactacaacgatctacgacaaatccaaataacaactctaaccgataaaactaaaaacgtcctacaatttttccatcccgcgattacccataacgccgacgacccccgacccgaacgccctacgctcctcgcccgccgccgaccctcaacgacctaaccccgcgacgtctataaccgttactccccgcccgcccgaacctcgacaaaacgcccgctcccgactcgacctcacgatcgccgcctcatccgattctcaaacgacacccgacccgaacgacctcccgccccgaccccgaaaactacgcccaaaacactcgcgccgcacgcgactaacctactacaccgccactcgaatacactaaccaataaaaactaaacacgaacctataattaaataaaccttccccctaaaaaccgtcttac

SEQ ID NO: 11473 - DNA, 1339 bp, Artificial Sequence
  chemically treated genomic DNA (Homo sapiens) CpG-island No: 11473
ttttcgcgatttgtgaggataaaggaggcgatttttttcgtttcgggaatttgggatttttttggaatcgggggcgggatcgggataaagaggaggagggggtagggaaggagtgaggaaggggggtcgtttcgtcgcggaattcgggattcgagggggtgtgtgttttaagtacgtgcgcgcgtttttaggattttcgtaatagataaaagtttagtcgcggggaggcggtagtcgggggttcggtgcgcgcgtattttttcgcgcgtggcgtcgtcgtcggtcgaggggtcgcgtgcgggggggagcggttgtcgcgtatcgagttttcgtcgtcgtcgtagtcgttattttgtttttttcgtataatggaagagagttaacggttcgagcgcgggagaggtcggtaagggaggaacgggttaggcgtcgggatgagggaatcgggcggaggcggcgagcgtgggatttttttagttttgttatcgcgaatttttagtggggattttattgagggcgggcggggggaggggtagaggcgggagcgggttcggtcgtcgttatattgacgtttattttgtcggcgttttttttttcgatcgtagtcgtcgtcgtcgtttttttgttatagttcgtcggggtttgtttttaaaagttacgcggtgcgcgtcgggttgttgggtttaattgtaatggcgagaagaggaggaggaggagttcggatcgggggcgagcgggcgggcgggtaggcgcgcgtcggggaggtgcgggaatacgtgatcggttgaagtttcgttttttttgacgtcgcgttgcgtttcgacgtaggtttaatttaaatgggagggaggggcgaaaagagataaggggggggttgagggggtgggcgtgagttgtacgtggtgtaagcgggagtgtttgcgtgcgtagttacgtgatttcggtattttttttttcgttttcgataggttgttttattatgtgataatggcgaatttcgcggtttttttcgttatttgataatttttggcgttttttttttgtcgtattgggagttttttattacgtgacgagggtacgttttggttttcgttaaggcgttttttgagcggttattattacgtgatgtaaggtaagcgttagaggcggagtttttttacggttgcgatattttgcgtttgcgcggtcgttattttacgttcgtcgttttgagtacgttagcggaaatggtttcgagaggttttgacgtatgtgtatttttttagtggcggtatttcggtcggggattttcgggttttagtggaggtggttatgtttattttattttttttgagaggta

SEQ ID NO: 11474 - DNA, 1339 bp, Artificial Sequence
  chemically treated genomic DNA (Homo sapiens) CpG-island No: 11474
tacctctcaaaaaaaataaaataaacataaccacctccactaaaacccgaaaatccccgaccgaaataccgccactaaaaaaatacacatacgtcaaaacctctcgaaaccatttccgctaacgtactcaaaacgacgaacgtaaaataacgaccgcgcaaacgcaaaatatcgcaaccgtaaaaaaactccgcctctaacgcttaccttacatcacgtaataataaccgctcaaaaaacgccttaacgaaaaccaaaacgtaccctcgtcacgtaataaaaaactcccaatacgacaaaaaaaaaacgccaaaaattatcaaataacgaaaaaaaccgcgaaattcgccattatcacataataaaacaacctatcgaaaacgaaaaaaaaaataccgaaatcacgtaactacgcacgcaaacactcccgcttacaccacgtacaactcacgcccaccccctcaaccccccccttatctcttttcgcccctccctcccatttaaattaaacctacgtcgaaacgcaacgcgacgtcaaaaaaaacgaaacttcaaccgatcacgtattcccgcacctccccgacgcgcgcctacccgcccgcccgctcgcccccgatccgaactcctcctcctcctcttctcgccattacaattaaacccaacaacccgacgcgcaccgcgtaacttttaaaaacaaaccccgacgaactataacaaaaaaacgacgacgacgactacgatcgaaaaaaaaaacgccgacaaaataaacgtcaatataacgacgaccgaacccgctcccgcctctacccctccccccgcccgccctcaataaaatccccactaaaaattcgcgataacaaaactaaaaaaatcccacgctcgccgcctccgcccgattccctcatcccgacgcctaacccgttcctcccttaccgacctctcccgcgctcgaaccgttaactctcttccattatacgaaaaaaacaaaataacgactacgacgacgacgaaaactcgatacgcgacaaccgctcccccccgcacgcgacccctcgaccgacgacgacgccacgcgcgaaaaaatacgcgcgcaccgaacccccgactaccgcctccccgcgactaaacttttatctattacgaaaatcctaaaaacgcgcgcacgtacttaaaacacacaccccctcgaatcccgaattccgcgacgaaacgaccccccttcctcactccttccctaccccctcctcctctttatcccgatcccgcccccgattccaaaaaaatcccaaattcccgaaacgaaaaaaatcgcctcctttatcctcacaaatcgcgaaaa

SEQ ID NO: 11475 - DNA, 1339 bp, Artificial Sequence
  chemically treated genomic DNA (Homo sapiens) CpG-island No: 11475
tgttttttaagggagatggggtgagtatagttatttttattggagttcgaaaattttcggtcgagatatcgttattaaaaaggtatatatgcgttaaagtttttcggagttattttcgttaacgtatttagggcgacgggcgtaagatggcggtcgcgtaggcgtaaaatgtcgtagtcgtagggaggtttcgtttttgacgtttgttttgtattacgtggtaatggtcgtttaaaaaacgttttagcgaaaattagagcgtgttttcgttacgtgatggaggatttttagtacggtaaagggaaggcgttaaaagttgttagatggcgaaggaaatcgcgaaattcgttattgttatatgatggagtaatttatcgaaagcggagggaaaggtgtcgaagttacgtgattacgtacgtaaatattttcgtttgtattacgtgtaatttacgtttatttttttagttttttttttattttttttcgttttttttttttatttgggttgggtttgcgtcgaggcgtaacgcggcgttaaagggggcggggttttagtcggttacgtgttttcgtattttttcggcgcgcgtttgttcgttcgttcgttcgttttcggttcggatttttttttttttttttttcgttattgtagttggatttagtagttcggcgcgtatcgcgtggtttttgggggtagatttcggcgggttgtggtaggagggcggcggcggcggttgcggtcgaagaaggggacgtcgataaggtaagcgttaatgtggcggcggtcgggttcgttttcgtttttgttttttttttcgttcgtttttagtgagatttttattgagggttcgcggtgataaggttggagggattttacgttcgtcgttttcgttcggtttttttatttcggcgtttggttcgttttttttttgtcggtttttttcgcgttcgggtcgttaatttttttttattgtgcggaggaaataaaatggcggttgcggcggcggcgaggattcggtgcgcggtagtcgttttttttcgtacgcggtttttcggtcggcggcggcgttacgcgcgggggggtgcgcgcgtatcgggttttcggttgtcgttttttcgcggttgggtttttgtttgttgcgggggttttggggacgcgcgtacgtgtttggagtatatattttttcgggtttcgagtttcgcggcggggcgattttttttttttattttttttttattttttttttttttttgtttcggtttcgttttcgattttaggagagttttaggttttcgaggcgggaaaagtcgttttttttgtttttataggtcgcggaga

SEQ ID NO: 11476 - DNA, 1339 bp, Artificial Sequence
  chemically treated genomic DNA (Homo sapiens) CpG-island No: 11476
tctccgcgacctataaaaacaaaaaaaacgacttttcccgcctcgaaaacctaaaactctcctaaaatcgaaaacgaaaccgaaacaaaaaaaaaaaaaaaataaaaaaaaaataaaaaaaaaaaatcgccccgccgcgaaactcgaaacccgaaaaaatatatactccaaacacgtacgcgcgtccccaaaacccccgcaacaaacaaaaacccaaccgcgaaaaaacgacaaccgaaaacccgatacgcgcgcacccccccgcgcgtaacgccgccgccgaccgaaaaaccgcgtacgaaaaaaaacgactaccgcgcaccgaatcctcgccgccgccgcaaccgccattttatttcctccgcacaataaaaaaaaattaacgacccgaacgcgaaaaaaaccgacaaaaaaaaaacgaaccaaacgccgaaataaaaaaaccgaacgaaaacgacgaacgtaaaatccctccaaccttatcaccgcgaaccctcaataaaaatctcactaaaaacgaacgaaaaaaaaaacaaaaacgaaaacgaacccgaccgccgccacattaacgcttaccttatcgacgtccccttcttcgaccgcaaccgccgccgccgccctcctaccacaacccgccgaaatctacccccaaaaaccacgcgatacgcgccgaactactaaatccaactacaataacgaaaaaaaaaaaaaaaaaaatccgaaccgaaaacgaacgaacgaacgaacaaacgcgcgccgaaaaaatacgaaaacacgtaaccgactaaaaccccgccccctttaacgccgcgttacgcctcgacgcaaacccaacccaaataaaaaaaaaaaacgaaaaaaaataaaaaaaaaactaaaaaaataaacgtaaattacacgtaatacaaacgaaaatatttacgtacgtaatcacgtaacttcgacacctttccctccgctttcgataaattactccatcatataacaataacgaatttcgcgatttccttcgccatctaacaacttttaacgccttccctttaccgtactaaaaatcctccatcacgtaacgaaaacacgctctaattttcgctaaaacgttttttaaacgaccattaccacgtaatacaaaacaaacgtcaaaaacgaaacctccctacgactacgacattttacgcctacgcgaccgccatcttacgcccgtcgccctaaatacgttaacgaaaataactccgaaaaactttaacgcatatatacctttttaataacgatatctcgaccgaaaattttcgaactccaataaaaataactatactcaccccatctcccttaaaaaaca

SEQ ID NO: 11477 - DNA, 501 bp, Artificial Sequence
  chemically treated genomic DNA (Homo sapiens) CpG-island No: 11477
gacgggtttttttttcgcgcgcggttttggatttagtgggcgtttggtttttggtttcgtttgttttggtatgggtttcggcgttcgcgtttttttttttttttttgttttttgcggcgtcgttttgggtcgagtttcggttttcggtttttttttcgggagtgacgtttcggtttcggtttcggtcgttcgcgcgggttttgcgggtttcggaagcggtgggaggcgcgtcggtcggagttaggtttttgggggtcgtgcgcgtttttttggttcggggttttttggatgttttgtttttcggtttcgacgtttcgttttcggtgtttttcgattttttttcggattgttcgttcgaagtttttttcgatttttcgttggattttatgttttttcgggcggttaggagcgttaatattttttttagtttgtttttggggtatttgtatttttcgtttttttaggcgttttttttttttttttttattattttcgttatgt

SEQ ID NO: 11478 - DNA, 501 bp, Artificial Sequence
  chemically treated genomic DNA (Homo sapiens) CpG-island No: 11478
acataacgaaaataataaaaaaaaaaaaaaaaaacgcctaaaaaaacgaaaaatacaaataccccaaaaacaaactaaaaaaaatattaacgctcctaaccgcccgaaaaaacataaaatccaacgaaaaatcgaaaaaaacttcgaacgaacaatccgaaaaaaaatcgaaaaacaccgaaaacgaaacgtcgaaaccgaaaaacaaaacatccaaaaaaccccgaaccaaaaaaacgcgcacgacccccaaaaacctaactccgaccgacgcgcctcccaccgcttccgaaacccgcaaaacccgcgcgaacgaccgaaaccgaaaccgaaacgtcactcccgaaaaaaaaaccgaaaaccgaaactcgacccaaaacgacgccgcaaaaaacaaaaaaaaaaaaaaaaacgcgaacgccgaaacccataccaaaacaaacgaaaccaaaaaccaaacgcccactaaatccaaaaccgcgcgcgaaaaaaaaacccgtc

SEQ ID NO: 11479 - DNA, 501 bp, Artificial Sequence
  chemically treated genomic DNA (Homo sapiens) CpG-island No: 11479
atatggcggaggtgatgaaggaggaaaaagaaaacgtttgggaaggcgggaagtataaatattttaaaggtaaattgggggaggtattggcgtttttggtcgttcgggagaatatggggtttaacgaggggtcggaggaggtttcggacgaatagttcgaggaggagtcggaggatatcgagagcgaggcgtcggagtcggaggatagggtatttaggaagtttcgggttaagagggcgcgtacggtttttaggggtttgatttcggtcggcgcgttttttatcgttttcggggttcgtaaaattcgcgcgggcggtcgaggtcgaggtcggggcgttattttcgagaagaaagtcgggagtcggggttcggtttaggacgacgtcgtaggaagtaggaagaagaaggggagcgcgggcgtcggggtttatgttagggtaggcgaggttaagggttaggcgtttattggatttaaggtcgcgcgcgggaagaaggttcgtt

SEQ ID NO: 11480 - DNA, 501 bp, Artificial Sequence
  chemically treated genomic DNA (Homo sapiens) CpG-island No: 11480
aacgaaccttcttcccgcgcgcgaccttaaatccaataaacgcctaacccttaacctcgcctaccctaacataaaccccgacgcccgcgctccccttcttcttcctacttcctacgacgtcgtcctaaaccgaaccccgactcccgactttcttctcgaaaataacgccccgacctcgacctcgaccgcccgcgcgaattttacgaaccccgaaaacgataaaaaacgcgccgaccgaaatcaaacccctaaaaaccgtacgcgccctcttaacccgaaacttcctaaataccctatcctccgactccgacgcctcgctctcgatatcctccgactcctcctcgaactattcgtccgaaacctcctccgacccctcgttaaaccccatattctcccgaacgaccaaaaacgccaatacctcccccaatttacctttaaaatatttatacttcccgccttcccaaacgttttctttttcctccttcatcacctccgccatat

SEQ ID NO: 11481 - DNA, 518 bp, Artificial Sequence
  chemically treated genomic DNA (Homo sapiens) CpG-island No: 11481
tttcgtttttacggtgttcgttttagttttcgaagaggttacgtttagtttttttcgtttggggagggagattcggttgcgttaaggtggaaatgtattttcggaggttttcgttattttcggttttgcgtaggattacggcgtttatttcgcggttcgttttttttatttttacgcgggtttcgttagtgtttttggatatgacggataagatttgtcggagggggtttcgtttgtttttttcgtcgttttagtttagcgattcgataatagaagcgatttttaatattttttttcgggtttaggggttcgacgggtcggtataggttataatggttacgaatttaggattatttaatttttttgttttttggtttttatttttttgcgagtcgtttttcgaagtgtcgttgtttatcggtttttcgttcggggtgttttttatagttagtagggttattaagtcggggatattatttttgttttttttggtgtttaagcggatggattcggtttta

SEQ ID NO: 11482 - DNA, 518 bp, Artificial Sequence
  chemically treated genomic DNA (Homo sapiens) CpG-island No: 11482
taaaaccgaatccatccgcttaaacaccaaaaaaaacaaaaataatatccccgacttaataaccctactaactataaaaaacaccccgaacgaaaaaccgataaacaacgacacttcgaaaaacgactcgcaaaaaaataaaaaccaaaaaacaaaaaaattaaataatcctaaattcgtaaccattataacctataccgacccgtcgaacccctaaacccgaaaaaaaatattaaaaatcgcttctattatcgaatcgctaaactaaaacgacgaaaaaaacaaacgaaaccccctccgacaaatcttatccgtcatatccaaaaacactaacgaaacccgcgtaaaaataaaaaaaacgaaccgcgaaataaacgccgtaatcctacgcaaaaccgaaaataacgaaaacctccgaaaatacatttccaccttaacgcaaccgaatctccctccccaaacgaaaaaaactaaacgtaacctcttcgaaaactaaaacgaacaccgtaaaaacgaaa

SEQ ID NO: 11483 - DNA, 518 bp, Artificial Sequence
  chemically treated genomic DNA (Homo sapiens) CpG-island No: 11483
tggggtcgaatttattcgtttgaatattaaagaagataaaaatggtgttttcgatttagtggttttgttggttgtgagagatatttcggacgaggagtcggtggatagcgatatttcggagagcgattcgtaggaaagtggggattaagaaatagaggagttggataattttgagttcgtggttattgtggtttatatcgattcgtcggatttttgggttcgggaggagatgttgaaaatcgtttttgttatcgagtcgttgggttggagcgacgagaaagataagcgagatttttttcgataggttttgttcgttatgtttaaggatattaacgggattcgcgtgaaggtggaagaggcgggtcgcgaggtggacgtcgtggttttgcgtaaggtcggggatgacggggattttcgggagtgtatttttattttggcgtagtcggatttttttttttaggcgaagaaggttgggcgtggttttttcgggggttggagcgagtatcgtgaggacgaag

SEQ ID NO: 11484 - DNA, 518 bp, Artificial Sequence
  chemically treated genomic DNA (Homo sapiens) CpG-island No: 11484
cttcgtcctcacgatactcgctccaacccccgaaaaaaccacgcccaaccttcttcgcctaaaaaaaaaaatccgactacgccaaaataaaaatacactcccgaaaatccccgtcatccccgaccttacgcaaaaccacgacgtccacctcgcgacccgcctcttccaccttcacgcgaatcccgttaatatccttaaacataacgaacaaaacctatcgaaaaaaatctcgcttatctttctcgtcgctccaacccaacgactcgataacaaaaacgattttcaacatctcctcccgaacccaaaaatccgacgaatcgatataaaccacaataaccacgaactcaaaattatccaactcctctatttcttaatccccactttcctacgaatcgctctccgaaatatcgctatccaccgactcctcgtccgaaatatctctcacaaccaacaaaaccactaaatcgaaaacaccatttttatcttctttaatattcaaacgaataaattcgacccca

SEQ ID NO: 11485 - DNA, 626 bp, Artificial Sequence
  chemically treated genomic DNA (Homo sapiens) CpG-island No: 11485
ggaaattgtttttgacggcgatattattcgttatcgttatgataatttatatagtgatttattttgcgtaacggaagatgttatcggtagtcggaaaattatgacgtggagtcgttacggttagttgttgagttttatcgattgtttcggttatgtaattcgttatgattatgatcgtttcgggtagatgacggcggtgtatcgcgaggaagggttgagttagtatcgcgtatacgatagtcgtggatagttaattgtcgtgaaagatacgtagggttatgaaacgcggtatgaatataatatcgtcggtgatttgatcgtcgttattgtttcggacggtagtagaaacgggatatagtacgatgcgtggggaaaggtcgttcgtattacgtaggtcgtgttgacgcgtagtatggaatacgatgttgtcggacgggttattcgtttgattagtgaaaacggtagttatatatttttcgttacgatgtaattgatcggttgataaaggatatcggttttgacggcgtatatagggtataatacgattgatcggtaaatttttttatttaggagagggtttgttattattggtttttgagaattatacgttttaggtatcgatttga

SEQ ID NO: 11486 - DNA, 626 bp, Artificial Sequence
  chemically treated genomic DNA (Homo sapiens) CpG-island No: 11486
tcaaatcgatacctaaaacgtataattctcaaaaaccaataataacaaaccctctcctaaataaaaaaatttaccgatcaatcgtattataccctatatacgccgtcaaaaccgatatcctttatcaaccgatcaattacatcgtaacgaaaaatatataactaccgttttcactaatcaaacgaataacccgtccgacaacatcgtattccatactacgcgtcaacacgacctacgtaatacgaacgacctttccccacgcatcgtactatatcccgtttctactaccgtccgaaacaataacgacgatcaaatcaccgacgatattatattcataccgcgtttcataaccctacgtatctttcacgacaattaactatccacgactatcgtatacgcgatactaactcaacccttcctcgcgatacaccgccgtcatctacccgaaacgatcataatcataacgaattacataaccgaaacaatcgataaaactcaacaactaaccgtaacgactccacgtcataattttccgactaccgataacatcttccgttacgcaaaataaatcactatataaattatcataacgataacgaataatatcgccgtcaaaaacaatttcc

SEQ ID NO: 11487 - DNA, 626 bp, Artificial Sequence
  chemically treated genomic DNA (Homo sapiens) CpG-island No: 11487
ttaggtcggtatttaaggcgtatgatttttaaaggttagtggtgataaatttttttttaggtgggaaaatttgtcggttagtcgtgttatattttgtgtgcgtcgttaaagtcggtattttttattagtcggttaattatatcgtaacggaaggtgtgtggttgtcgtttttattggttaggcggatgattcgttcggtagtatcgtattttatattgcgcgttagtacgatttgcgtggtacggacggtttttttttacgtatcgtattgtgtttcgtttttgttgtcgttcggggtaatgacggcggttaggttatcggcgatgttgtatttatatcgcgttttatggttttgcgtgttttttacggtaattaattgtttacggttgtcgtatgcgcggtattgatttagttttttttcgcggtgtatcgtcgttatttgttcgaagcggttatggttataacgggttatataatcggaatagtcggtgaagtttagtaattgatcgtaacggttttacgttatggtttttcggttgtcggtggtatttttcgttgcgtagggtaagttattgtgtggattattataacggtagcgggtgatatcgtcgttaggggtagttttt

SEQ ID NO: 11488 - DNA, 626 bp, Artificial Sequence
  chemically treated genomic DNA (Homo sapiens) CpG-island No: 11488
aaaaactacccctaacgacgatatcacccgctaccgttataataatccacacaataacttaccctacgcaacgaaaaataccaccgacaaccgaaaaaccataacgtaaaaccgttacgatcaattactaaacttcaccgactattccgattatataacccgttataaccataaccgcttcgaacaaataacgacgatacaccgcgaaaaaaaactaaatcaataccgcgcatacgacaaccgtaaacaattaattaccgtaaaaaacacgcaaaaccataaaacgcgatataaatacaacatcgccgataacctaaccgccgtcattaccccgaacgacaacaaaaacgaaacacaatacgatacgtaaaaaaaaaccgtccgtaccacgcaaatcgtactaacgcgcaatataaaatacgatactaccgaacgaatcatccgcctaaccaataaaaacgacaaccacacaccttccgttacgatataattaaccgactaataaaaaataccgactttaacgacgcacacaaaatataacacgactaaccgacaaattttcccacctaaaaaaaaatttatcaccactaacctttaaaaatcatacgccttaaataccgacctaa

SEQ ID NO: 11489 - DNA, 674 bp, Artificial Sequence
  chemically treated genomic DNA (Homo sapiens) CpG-island No: 11489
tgtcgtcgtcgtttatagtttggagatgggggtgttgatcgaagttagtaatgaagaggaataggagcgcgttattgtattgggagtaaaggtcgttggtattaataatcgcgatttgcgtgatttgtcgattgattttaatcgtattcgcgagttgcgtcgaaattggggtataacgtgacggtaattagcgaattcggtattaatatttacgtttaggtgcgcgagttaagttatttcgttaacggttttttgattggttcggcgttgatggtttatgacgatttgtacgtcgtcgtgcgtcgggtgttgttgggtgagaataaagtatgtggtttgacgcgtgggtaagatgtaaagtagtttatgacgcgggcgcgatttacggtgggttgatttttgttgcgatattatcgcgttgcgttaacgttgaataggcgtaggaagtgatggttgcggtatcgttgtagtatgttggcgtgtttcgtaattacgattaattgtatgtttgtaggttatttagggaaaggagaggggatttcgggagcgttcgtgatgcgtcgtttcgggaatgattagttttcggtaattattgatgttttttatatgcgagttaatgttgttagttttattaaatacggcggtaataacgtttgggtataaaatgttgaatt

SEQ ID NO: 11490 - DNA, 674 bp, Artificial Sequence
  chemically treated genomic DNA (Homo sapiens) CpG-island No: 11490
aattcaacattttatacccaaacgttattaccgccgtatttaataaaactaacaacattaactcgcatataaaaaacatcaataattaccgaaaactaatcattcccgaaacgacgcatcacgaacgctcccgaaatcccctctcctttccctaaataacctacaaacatacaattaatcgtaattacgaaacacgccaacatactacaacgataccgcaaccatcacttcctacgcctattcaacgttaacgcaacgcgataatatcgcaacaaaaatcaacccaccgtaaatcgcgcccgcgtcataaactactttacatcttacccacgcgtcaaaccacatactttattctcacccaacaacacccgacgcacgacgacgtacaaatcgtcataaaccatcaacgccgaaccaatcaaaaaaccgttaacgaaataacttaactcgcgcacctaaacgtaaatattaataccgaattcgctaattaccgtcacgttataccccaatttcgacgcaactcgcgaatacgattaaaatcaatcgacaaatcacgcaaatcgcgattattaataccaacgacctttactcccaatacaataacgcgctcctattcctcttcattactaacttcgatcaacacccccatctccaaactataaacgacgacgaca

SEQ ID NO: 11491 - DNA, 674 bp, Artificial Sequence
  chemically treated genomic DNA (Homo sapiens) CpG-island No: 11491
ggtttaatattttatgtttaggcgttattgtcgtcgtgtttgatgaaattgatagtattgattcgtatgtggaagatattagtgattgtcgggggttggttattttcgaagcgacgtattacgagcgttttcggagtttttttttttttttttaagtgatttgtaggtatgtagttaatcgtgattgcggaatacgttaatatattgtaacggtgtcgtagttattattttttgcgtttgtttaacgttgacgtaacgcggtgatgtcgtaataaaaattaatttatcgtaaatcgcgttcgcgttataagttgttttatattttgtttacgcgttaggttatatattttatttttatttagtaatattcggcgtacggcggcgtgtaaatcgttatgggttattaacgtcgaattaattagaaaatcgttagcgaagtggtttaattcgcgtatttgagcgtaagtattgatgtcggattcgttgattatcgttacgttgtgttttagtttcggcgtaattcgcgggtacggttgagattaatcgataaattacgtagatcgcggttgttgatgttaacgatttttgtttttaatgtaatggcgcgtttttgtttttttttattattgatttcggttagtatttttatttttagattgtgagcgacggcggta

SEQ ID NO: 11492 - DNA, 674 bp, Artificial Sequence
  chemically treated genomic DNA (Homo sapiens) CpG-island No: 11492
taccgccgtcgctcacaatctaaaaataaaaatactaaccgaaatcaataataaaaaaaaacaaaaacgcgccattacattaaaaacaaaaatcgttaacatcaacaaccgcgatctacgtaatttatcgattaatctcaaccgtacccgcgaattacgccgaaactaaaacacaacgtaacgataatcaacgaatccgacatcaatacttacgctcaaatacgcgaattaaaccacttcgctaacgattttctaattaattcgacgttaataacccataacgatttacacgccgccgtacgccgaatattactaaataaaaataaaatatataacctaacgcgtaaacaaaatataaaacaacttataacgcgaacgcgatttacgataaattaatttttattacgacatcaccgcgttacgtcaacgttaaacaaacgcaaaaaataataactacgacaccgttacaatatattaacgtattccgcaatcacgattaactacatacctacaaatcacttaaaaaaaaaaaaaaaaactccgaaaacgctcgtaatacgtcgcttcgaaaataaccaacccccgacaatcactaatatcttccacatacgaatcaatactatcaatttcatcaaacacgacgacaataacgcctaaacataaaatattaaacc

SEQ ID NO: 11493 - DNA, 747 bp, Artificial Sequence
  chemically treated genomic DNA (Homo sapiens) CpG-island No: 11493
ggatttcgatcggggtcgtcgggtagtagtacgttaattttttgatatgggttttataaatgatggtgttgttttacggcgtgcgcggcggggtattatttttttagttatagtgattaattattattacgtatttcggcgtaatggcggcgttgtcgcgatagttaggtttattatgatcggcgtgtagtagcgggttatttttaaatttttcgttaatttgtcgcgcgtaaggattaattaataatttcgtcgggttaaagcgatgtttttcggcgggttgttaggggttatgaacgcgataattataacgtaaattcgggcgcgtattcggtagataatcgtgttaaatgtcgttattgtgttttggtaagttatagcgatgtttttggttattggcgttaaagatatatagttttattcgttcggtatgagcggagaaaagtgtgaagttgacgttttgatcgtcgtaatgcgcgtcgaggggagcgggtttgttaatggcgagttgtgttattttgtttttcgaattagttagatagtggttagcggtggtagcgttaggtttagtgaatgttgacgatcgtggttggtaattttatcgttgtgtatcgtgtcgttattgtttgtattattgtcgtgatagtgtatggaatcggtattgaggattttacgttatttgttcggttggtttatgtcgaagcgataattatgacgcggtatcggcgtaaagttattggtaacgat

SEQ ID NO: 11494 - DNA, 747 bp, Artificial Sequence
  chemically treated genomic DNA (Homo sapiens) CpG-island No: 11494
atcgttaccaataactttacgccgataccgcgtcataattatcgcttcgacataaaccaaccgaacaaataacgtaaaatcctcaataccgattccatacactatcacgacaataatacaaacaataacgacacgatacacaacgataaaattaccaaccacgatcgtcaacattcactaaacctaacgctaccaccgctaaccactatctaactaattcgaaaaacaaaataacacaactcgccattaacaaacccgctcccctcgacgcgcattacgacgatcaaaacgtcaacttcacacttttctccgctcataccgaacgaataaaactatatatctttaacgccaataaccaaaaacatcgctataacttaccaaaacacaataacgacatttaacacgattatctaccgaatacgcgcccgaatttacgttataattatcgcgttcataacccctaacaacccgccgaaaaacatcgctttaacccgacgaaattattaattaatccttacgcgcgacaaattaacgaaaaatttaaaaataacccgctactacacgccgatcataataaacctaactatcgcgacaacgccgccattacgccgaaatacgtaataataattaatcactataactaaaaaaataataccccgccgcgcacgccgtaaaacaacaccatcatttataaaacccatatcaaaaaattaacgtactactacccgacgaccccgatcgaaatcc

SEQ ID NO: 11495 - DNA, 747 bp, Artificial Sequence
  chemically treated genomic DNA (Homo sapiens) CpG-island No: 11495
atcgttgttagtaattttacgtcggtatcgcgttatgattatcgtttcggtataaattagtcgggtaaatggcgtgaaatttttaatatcgattttatgtattattacggtagtaatgtaggtaatggcggtacggtatatagcgatgagattgttagttacggtcgttagtatttattaagtttgacgttattatcgttggttattatttggttggttcgggaggtagaatgatataattcgttattggtaaattcgtttttttcggcgcgtattacgacggttagggcgttaattttatattttttttcgtttatgtcgagcgggtagaattgtgtgtttttgacgttaatggttaggaatatcgttatgatttgttagggtatagtggcgatatttggtacggttatttgtcggatgcgcgttcgggtttgcgttatggttatcgcgtttatggtttttggtaattcgtcgaggggtatcgttttaattcggcgaagttgttgattgatttttgcgcgcggtaaattgacggggagtttaaagataattcgttgttgtacgtcggttataatgaatttgattatcgcgataacgtcgttattgcgtcgaaatgcgtagtggtggttgattattatgattgggaagatgatgtttcgtcgcgtacgtcgtggggtagtattattatttatgaagtttatgttaaaggattaacgtattattattcggcggtttcggtcgagattt

SEQ ID NO: 11496 - DNA, 747 bp, Artificial Sequence
  chemically treated genomic DNA (Homo sapiens) CpG-island No: 11496
aaatctcgaccgaaaccgccgaataataatacgttaatcctttaacataaacttcataaataataatactaccccacgacgtacgcgacgaaacatcatcttcccaatcataataatcaaccaccactacgcatttcgacgcaataacgacgttatcgcgataatcaaattcattataaccgacgtacaacaacgaattatctttaaactccccgtcaatttaccgcgcgcaaaaatcaatcaacaacttcgccgaattaaaacgatacccctcgacgaattaccaaaaaccataaacgcgataaccataacgcaaacccgaacgcgcatccgacaaataaccgtaccaaatatcgccactataccctaacaaatcataacgatattcctaaccattaacgtcaaaaacacacaattctacccgctcgacataaacgaaaaaaaatataaaattaacgccctaaccgtcgtaatacgcgccgaaaaaaacgaatttaccaataacgaattatatcattctacctcccgaaccaaccaaataataaccaacgataataacgtcaaacttaataaatactaacgaccgtaactaacaatctcatcgctatataccgtaccgccattacctacattactaccgtaataatacataaaatcgatattaaaaatttcacgccatttacccgactaatttataccgaaacgataatcataacgcgataccgacgtaaaattactaacaacgat

SEQ ID NO: 11497 - DNA, 637 bp, Artificial Sequence
  chemically treated genomic DNA (Homo sapiens) CpG-island No: 11497
  unsure (636)
ggcgtgcggtaggtgtgcgtgatgagggtgggtgcgagtacgtgagagagtgcggtgatggggtgggtgattcggagtgagcgagtgagaagaggtgtgaatgggtgagtgtgagagtgtgggtgagggcgcgggcggtgtgcgtgagagcgggtgtcggagtaggtgatcgcgagagtgtgagttggcgcgcgttcggcgtcgcgtgggcgcgagcgtgcgagtgcgggcgaaggtgagcgttggtgtgggtgagagtgtgcgagtgtgagagggcgagtgtgcgtgggcgcgggagcgattggggagatggcgcgagtgcgagcgagagagcggggtcgagtgggagtgggatagcgcgttggagagtgttggcgcgatgtgcggtggcgagtgcgatgttcgagcgcgtgttgggtgtcggcgtcgtgtggacgggtgaatgatagtgagtgtgtgggcgcgcgagtgggggtgggagagagagcggggggggacgagaggaagtgtggtgcgtaatgagtgtggggcgcgagcgggtgtgtaagagaattacgagagaagagcgtgggggtgggagagaacgttcgatcgcgcgatgagtgtgaatgttgtggcgttggatggaacggaaana

SEQ ID NO: 11498 - DNA, 637 bp, Artificial Sequence
  chemically treated genomic DNA (Homo sapiens) CpG-island No: 11498
  unsure (2)
tntttccgttccatccaacgccacaacattcacactcatcgcgcgatcgaacgttctctcccacccccacgctcttctctcgtaattctcttacacacccgctcgcgccccacactcattacgcaccacacttcctctcgtccccccccgctctctctcccacccccactcgcgcgcccacacactcactatcattcacccgtccacacgacgccgacacccaacacgcgctcgaacatcgcactcgccaccgcacatcgcgccaacactctccaacgcgctatcccactcccactcgaccccgctctctcgctcgcactcgcgccatctccccaatcgctcccgcgcccacgcacactcgccctctcacactcgcacactctcacccacaccaacgctcaccttcgcccgcactcgcacgctcgcgcccacgcgacgccgaacgcgcgccaactcacactctcgcgatcacctactccgacacccgctctcacgcacaccgcccgcgccctcacccacactctcacactcacccattcacacctcttctcactcgctcactccgaatcacccaccccatcaccgcactctctcacgtactcgcacccaccctcatcacgcacacctaccgcacgcc

SEQ ID NO: 11499 - DNA, 637 bp, Artificial Sequence
  chemically treated genomic DNA (Homo sapiens) CpG-island No: 11499
  unsure (2)
tnttttcgttttatttaacgttataatatttatatttatcgcgcgatcgaacgtttttttttatttttacgtttttttttcgtaatttttttatatattcgttcgcgttttatatttattgcgtattatattttttttcgttttttttcgtttttttttttatttttattcgcgcgtttatatatttattattatttattcgtttatacggcgtcggtatttaatacgcgttcggatatcgtattcgttatcgtatatcgcgttagtattttttaacgcgttattttatttttattcgatttcgttttttcgttcgtattcgcgttatttttttaatcgttttcgcgtttacgtatattcgtttttttatattcgtatatttttatttatattaacgtttattttcgttcgtattcgtacgttcgcgtttacgcggcgtcgggcgcgcgttagtttatattttcgcgattatttgtttcggtattcgtttttacgtatatcgttcgcgtttttatttatatttttatatttatttatttatatttttttttattcgtttatttcgagttatttattttattatcgtatttttttacgtgttcgtatttatttttattacgtatatttatcgtacgtt

SEQ ID NO: 11500 - DNA, 637 bp, Artificial Sequence
  chemically treated genomic DNA (Homo sapiens) CpG-island No: 11500
  unsure (636)
aacgtacgataaatatacgtaataaaaataaatacgaacacgtaaaaaaatacgataataaaataaataactcgaaataaacgaataaaaaaaaatataaataaataaatataaaaatataaataaaaacgcgaacgatatacgtaaaaacgaataccgaaacaaataatcgcgaaaatataaactaacgcgcgcccgacgccgcgtaaacgcgaacgtacgaatacgaacgaaaataaacgttaatataaataaaaatatacgaatataaaaaaacgaatatacgtaaacgcgaaaacgattaaaaaaataacgcgaatacgaacgaaaaaacgaaatcgaataaaaataaaataacgcgttaaaaaatactaacgcgatatacgataacgaatacgatatccgaacgcgtattaaataccgacgccgtataaacgaataaataataataaatatataaacgcgcgaataaaaataaaaaaaaaaacgaaaaaaaacgaaaaaaaatataatacgcaataaatataaaacgcgaacgaatatataaaaaaattacgaaaaaaaaacgtaaaaataaaaaaaaacgttcgatcgcgcgataaatataaatattataacgttaaataaaacgaaaana

SEQ ID NO: 11501 - DNA, 728 bp, Artificial Sequence
  chemically treated genomic DNA (Homo sapiens) CpG-island No: 11501
gcgttttttcgatagtttagttcgcgtacgttaggttcgatttgttcgtcgcgttcgaaaggtttagttttcggttcgcgtacgttgcggtttgcgtttttcgtttcgtaaatttgtagcgttttttttatcgttttagtggtatggttcgtcgttatcgtttcggtttttcgaggttggttttatcgttttcgtttggttatttttatttattttttgaatgaggggttttatggtcgcggttttttcgtcgggtacgggtggtatagtttatcgttgtatcgcggggggttcgtacgcgattatcgtggggggggcgttcggggatacgcgttgtgcgtatttatttgttatcggtagtcgtttagttttttcggcggggttttattttcgtttatggttacgttgcgttggttttttttttttgtgtttttcggtagcggtaacggcgtcggtagcggtagcggcggcggcgacgtttttttcgaggtaggtttaacggttagtacggcgcggtttttttcgttttttttttttagttttcgtttatcgtttttttttattttttggacggaaatatcgttttttcgcgttataaataggaagtgacgtataaagagttagagacgaattttgagagagcgagagcgtaagagtagggtagagaaggaggcgggtttatagtagggcgtttgcgtatattagataattttgggtttgtgtgggtt

SEQ ID NO: 11502 - DNA, 728 bp, Artificial Sequence
  chemically treated genomic DNA (Homo sapiens) CpG-island No: 11502
aacccacacaaacccaaaattatctaatatacgcaaacgccctactataaacccgcctccttctctaccctactcttacgctctcgctctctcaaaattcgtctctaactctttatacgtcacttcctatttataacgcgaaaaaacgatatttccgtccaaaaaataaaaaaaaacgataaacgaaaactaaaaaaaaaaaacgaaaaaaaccgcgccgtactaaccgttaaacctacctcgaaaaaaacgtcgccgccgccgctaccgctaccgacgccgttaccgctaccgaaaaacacaaaaaaaaaaaaccaacgcaacgtaaccataaacgaaaataaaaccccgccgaaaaaactaaacgactaccgataacaaataaatacgcacaacgcgtatccccgaacgccccccccacgataatcgcgtacgaaccccccgcgatacaacgataaactataccacccgtacccgacgaaaaaaccgcgaccataaaacccctcattcaaaaaataaataaaaataaccaaacgaaaacgataaaaccaacctcgaaaaaccgaaacgataacgacgaaccataccactaaaacgataaaaaaaacgctacaaatttacgaaacgaaaaacgcaaaccgcaacgtacgcgaaccgaaaactaaacctttcgaacgcgacgaacaaatcgaacctaacgtacgcgaactaaactatcgaaaaaacgc

SEQ ID NO: 11503 - DNA, 728 bp, Artificial Sequence
  chemically treated genomic DNA (Homo sapiens) CpG-island No: 11503
aatttatataggtttaaagttgtttaatgtgcgtaggcgttttgttgtgagttcgtttttttttttgttttgtttttgcgttttcgtttttttagagttcgtttttggttttttgtacgttattttttgtttgtggcgcgagagggcggtattttcgtttagagggtgggagggggcggtaagcgggggttggggggagggggcggggggggtcgcgtcgtgttagtcgttgggtttgtttcggaggaggcgtcgtcgtcgtcgttgtcgttgtcggcgtcgttgtcgttgtcgggaaatataaggaaagggaattagcgtagcgtggttatgggcgggggtagagtttcgtcggagaggttgggcggttgtcggtgataggtgagtgcgtatagcgcgtgttttcgaacgttttttttacgatggtcgcgtacgggtttttcgcggtgtagcgatgggttgtattattcgtgttcggcggggggatcgcggttatagagttttttatttaggagatgagtgggagtggttaagcgggggcggtgggattagtttcggggggtcggggcggtggcggcgggttatattattgaggcggtggggggagcgttgtaagtttgcgggacggggagcgtaggtcgtagcgtgcgcgggtcgggggttggatttttcgggcgcggcgggtagatcgagtttggcgtgcgcgggttaagttatcgagggggcgt

SEQ ID NO: 11504 - DNA, 728 bp, Artificial Sequence
  chemically treated genomic DNA (Homo sapiens) CpG-island No: 11504
acgccccctcgataacttaacccgcgcacgccaaactcgatctacccgccgcgcccgaaaaatccaacccccgacccgcgcacgctacgacctacgctccccgtcccgcaaacttacaacgctccccccaccgcctcaataatataacccgccgccaccgccccgaccccccgaaactaatcccaccgcccccgcttaaccactcccactcatctcctaaataaaaaactctataaccgcgatccccccgccgaacacgaataatacaacccatcgctacaccgcgaaaaacccgtacgcgaccatcgtaaaaaaaacgttcgaaaacacgcgctatacgcactcacctatcaccgacaaccgcccaacctctccgacgaaactctacccccgcccataaccacgctacgctaattccctttccttatatttcccgacaacgacaacgacgccgacaacgacaacgacgacgacgacgcctcctccgaaacaaacccaacgactaacacgacgcgaccccccccgccccctccccccaacccccgcttaccgccccctcccaccctctaaacgaaaataccgccctctcgcgccacaaacaaaaaataacgtacaaaaaaccaaaaacgaactctaaaaaaacgaaaacgcaaaaacaaaacaaaaaaaaaaacgaactcacaacaaaacgcctacgcacattaaacaactttaaacctatataaatt

SEQ ID NO: 11505 - DNA, 572 bp, Artificial Sequence
  chemically treated genomic DNA (Homo sapiens) CpG-island No: 11505
cgcggggggcgatgcggtagttgtagcggcggcggtaggagttttttataatgtagcgcggcgcgttgttttcggtgttgatgtttagcgttgtttcggagttttcgtcgcgttcgtttttcgttttttttttatcgggttcgggtttaggttcgggttttcgttatggttcggttcgtttcggttttattttagagtcgtcggggagtttgggcgcggcgttcgatagtagtttgcgtgtcgtcgtggcgtttaaggtagagggttagcgttgttatcgagagaagaagtttcgggaggttatcggtaagtattatcgagcgttgttgtagttgaaggcggcgtagggggttcgttttagcggtttgttcgttttcgttttcgggtttattagtagtttcgggtcggcgcgttttagcgaggagtagcggcgtttggtggagagtacggaggtggagtgttacgatttttttacgggtacgtcgtcggggggtggggggatggggtacgaggggagggggtaatcgggagagtttggcgatttgggggttaggggttttggggttgaaggg

SEQ ID NO: 11506 - DNA, 572 bp, Artificial Sequence
  chemically treated genomic DNA (Homo sapiens) CpG-island No: 11506
cccttcaaccccaaaacccctaacccccaaatcgccaaactctcccgattaccccctcccctcgtaccccatccccccaccccccgacgacgtacccgtaaaaaaatcgtaacactccacctccgtactctccaccaaacgccgctactcctcgctaaaacgcgccgacccgaaactactaataaacccgaaaacgaaaacgaacaaaccgctaaaacgaaccccctacgccgccttcaactacaacaacgctcgataatacttaccgataacctcccgaaacttcttctctcgataacaacgctaaccctctaccttaaacgccacgacgacacgcaaactactatcgaacgccgcgcccaaactccccgacgactctaaaataaaaccgaaacgaaccgaaccataacgaaaacccgaacctaaacccgaacccgataaaaaaaaaacgaaaaacgaacgcgacgaaaactccgaaacaacgctaaacatcaacaccgaaaacaacgcgccgcgctacattataaaaaactcctaccgccgccgctacaactaccgcatcgccccccgcg

SEQ ID NO: 11507 - DNA, 572 bp, Artificial Sequence
  chemically treated genomic DNA (Homo sapiens) CpG-island No: 11507
ttttttagttttagggtttttggtttttaagtcgttaagttttttcgattgtttttttttttcgtgttttatttttttatttttcgacggcgtattcgtgagggagtcgtaatattttattttcgtgttttttattaggcgtcgttgtttttcgttgaggcgcgtcggttcggggttgttggtgggttcgggggcgggggcgggtaggtcgttagggcgggttttttgcgtcgtttttagttgtagtagcgttcggtggtatttgtcgatggtttttcggaattttttttttcgatagtagcgttggttttttgttttgaacgttacggcggtacgtaggttgttgtcgagcgtcgcgtttaggtttttcgacggttttggggtaggatcgggacgagtcgagttatggcgggagttcgagtttgggttcgagttcggtggggagagggcgggaggcgggcgcggcggaggtttcggggtagcgttgagtattagtatcggggatagcgcgtcgcgttgtattgtgggaaatttttgtcgtcgtcgttgtagttatcgtatcgtttttcgcg

SEQ ID NO: 11508 - DNA, 572 bp, Artificial Sequence
  chemically treated genomic DNA (Homo sapiens) CpG-island No: 11508
cgcgaaaaacgatacgataactacaacgacgacgacaaaaatttcccacaatacaacgcgacgcgctatccccgatactaatactcaacgctaccccgaaacctccgccgcgcccgcctcccgccctctccccaccgaactcgaacccaaactcgaactcccgccataactcgactcgtcccgatcctaccccaaaaccgtcgaaaaacctaaacgcgacgctcgacaacaacctacgtaccgccgtaacgttcaaaacaaaaaaccaacgctactatcgaaaaaaaaaattccgaaaaaccatcgacaaataccaccgaacgctactacaactaaaaacgacgcaaaaaacccgccctaacgacctacccgcccccgcccccgaacccaccaacaaccccgaaccgacgcgcctcaacgaaaaacaacgacgcctaataaaaaacacgaaaataaaatattacgactccctcacgaatacgccgtcgaaaaataaaaaaataaaacacgaaaaaaaaaaacaatcgaaaaaacttaacgacttaaaaaccaaaaaccctaaaactaaaaaa

SEQ ID NO: 11509 - DNA, 982 bp, Artificial Sequence
  chemically treated genomic DNA (Homo sapiens) CpG-island No: 11509
gggcggggcggggcggggtgggagtggggcggtaggtttattcgtgttttttaaacggtagagggttaagagggtttggtcgcgcggttttcgaatgttcgtcggggttcgtcggtgggggacgagggcgagggcggtaggtagttttcgtttttcgcgtcgtttatttcgcgtagttttatcggcggttttcggtttcgtatttcgggttacgattgtcgggtcgggcgggggtggcggggtttttggggcggtcgtttcgggtcggggtggcgcgtttttcggtttttttacgcgcggggtagtcgggcggtttttatttttggtatcggtttttcggtcggttttagtttttgtttttcgttcgtgttgttttttcgggttatcggcggggttcgagtgacgtgtgggcgtcgtcgtcgcggtgttttttgggagttgtagttttcggtcgtgcggtttcggggttcggtttttagcgttttttagtagagtttcgcggttagtttcgggtcgtaatggatatgatattttacgaagtcgaaggagttttttcggggagatgagttcggtttcggtttttttttcggacgcggcgtagcgggcgttcggggcggggggaagcgttttttatagattttgtgggggtcgcggtttaggatgggttggattgtagcggacgcgattagtaacgcgaaaaataggagttgcgtgtatgattgtgattgttcggagtcgcgaacgtagtttggattttatttttgaggtaggacggtttttcggatttttcgatcgagatgtacgttgggaattgtagttcgcgcggggatttggcgttgtagggggcggtttttaaatagcgggttgcgggcgtcggcgggtggttggagtaagttaggggtcgggtcggtggcgggattttgcggggaagatggggttgggaggatgtgtttagtgtttttggggatgttatagttacgtt

SEQ ID NO: 11510 - DNA, 982 bp, Artificial Sequence
  chemically treated genomic DNA (Homo sapiens) CpG-island No: 11510
aacgtaactataacatccccaaaaacactaaacacatcctcccaaccccatcttccccgcaaaatcccgccaccgacccgacccctaacttactccaaccacccgccgacgcccgcaacccgctatttaaaaaccgccccctacaacgccaaatccccgcgcgaactacaattcccaacgtacatctcgatcgaaaaatccgaaaaaccgtcctacctcaaaaataaaatccaaactacgttcgcgactccgaacaatcacaatcatacacgcaactcctatttttcgcgttactaatcgcgtccgctacaatccaacccatcctaaaccgcgacccccacaaaatctataaaaaacgcttccccccgccccgaacgcccgctacgccgcgtccgaaaaaaaaaccgaaaccgaactcatctccccgaaaaaactccttcgacttcgtaaaatatcatatccattacgacccgaaactaaccgcgaaactctactaaaaaacgctaaaaaccgaaccccgaaaccgcacgaccgaaaactacaactcccaaaaaacaccgcgacgacgacgcccacacgtcactcgaaccccgccgataacccgaaaaaacaacacgaacgaaaaacaaaaactaaaaccgaccgaaaaaccgataccaaaaataaaaaccgcccgactaccccgcgcgtaaaaaaaccgaaaaacgcgccaccccgacccgaaacgaccgccccaaaaaccccgccacccccgcccgacccgacaatcgtaacccgaaatacgaaaccgaaaaccgccgataaaactacgcgaaataaacgacgcgaaaaacgaaaactacctaccgccctcgccctcgtcccccaccgacgaaccccgacgaacattcgaaaaccgcgcgaccaaaccctcttaaccctctaccgtttaaaaaacacgaataaacctaccgccccactcccaccccgccccgccccgccc

SEQ ID NO: 11511 - DNA, 982 bp, Artificial Sequence
  chemically treated genomic DNA (Homo sapiens) CpG-island No: 11511
gacgtggttgtgatatttttagggatattaaatatatttttttagttttatttttttcgtagagtttcgttatcggttcgatttttaatttgttttaattattcgtcgacgttcgtagttcgttgtttgggggtcgttttttgtagcgttaggttttcgcgcggattatagtttttagcgtatatttcggtcggggggttcgaggggtcgttttgttttagggataaggtttaggttgcgttcgcggtttcgggtagttatagttatgtacgtagtttttatttttcgcgttgttaatcgcgttcgttgtagtttaatttattttgggtcgcggtttttatagggtttgtgaggagcgttttttttcgtttcgggcgttcgttacgtcgcgttcgaaggaggggtcgaggtcgggtttattttttcgggaggattttttcggtttcgtggggtgttatgtttattgcggttcgaggttggtcgcggggttttgttggagggcgttgagagtcgggtttcgaggtcgtacggtcggagattataatttttaggaggtatcgcggcggcggcgtttatacgttattcgggtttcgtcggtggttcggggaagtagtacgggcggggggtaggggttggggtcgatcgggaggtcggtgttaaggatgggggtcgttcggttgtttcgcgcgtgaggaggtcgaggggcgcgttatttcggttcggggcggtcgttttaggggtttcgttattttcgttcggttcggtagtcgtggttcgggatgcggagtcgggggtcgtcggtggagttgcgcggggtgagcggcgcggggaacggggattgtttgtcgttttcgttttcgttttttatcggcggatttcggcgggtattcgagagtcgcgcggttaggtttttttagttttttgtcgtttggggggtacgggtgaatttgtcgttttatttttatttcgtttcgtttcgttt

SEQ ID NO: 11512 - DNA, 982 bp, Artificial Sequence
  chemically treated genomic DNA (Homo sapiens) CpG-island No: 11512
aaacgaaacgaaacgaaataaaaataaaacgacaaattcacccgtaccccccaaacgacaaaaaactaaaaaaacctaaccgcgcgactctcgaatacccgccgaaatccgccgataaaaaacgaaaacgaaaacgacaaacaatccccgttccccgcgccgctcaccccgcgcaactccaccgacgacccccgactccgcatcccgaaccacgactaccgaaccgaacgaaaataacgaaacccctaaaacgaccgccccgaaccgaaataacgcgcccctcgacctcctcacgcgcgaaacaaccgaacgacccccatccttaacaccgacctcccgatcgaccccaacccctaccccccgcccgtactacttccccgaaccaccgacgaaacccgaataacgtataaacgccgccgccgcgatacctcctaaaaattataatctccgaccgtacgacctcgaaacccgactctcaacgccctccaacaaaaccccgcgaccaacctcgaaccgcaataaacataacaccccacgaaaccgaaaaaatcctcccgaaaaaataaacccgacctcgacccctccttcgaacgcgacgtaacgaacgcccgaaacgaaaaaaaacgctcctcacaaaccctataaaaaccgcgacccaaaataaattaaactacaacgaacgcgattaacaacgcgaaaaataaaaactacgtacataactataactacccgaaaccgcgaacgcaacctaaaccttatccctaaaacaaaacgacccctcgaaccccccgaccgaaatatacgctaaaaactataatccgcgcgaaaacctaacgctacaaaaaacgacccccaaacaacgaactacgaacgtcgacgaataattaaaacaaattaaaaatcgaaccgataacgaaactctacgaaaaaaataaaactaaaaaaatatatttaatatccctaaaaatatcacaaccacgtc

SEQ ID NO: 11513 - DNA, 601 bp, Artificial Sequence
  chemically treated genomic DNA (Homo sapiens) CpG-island No: 11513
tatgggcgttaattttatttgcgcggattggcggagatatagcggttgcgttatcggtgtagaagcgtatcgagtacggtttttattatttttaatgacgtttgcgtgtattcgtgttatagttacgggagatagagtcgtcgcgttagtttcgtatttttacgtaagtgcgttatatagtcggtttcgttatttatggaggttagcgcgtatgcgtatttcggattcgggaggggtttttcgtatttagcggtcggagcgcgtaggtagtagtagagttcgatacgtatgtgcgtgtatatagattttgatacgtatgtatatttagatcgcgatatgtacgtgtacgcgtatatagatttttaacgtatgcgtgtggttagattttgattcgtatgtgcgattagattcgatatatatgtgcgcgtgtatagacgttgatatatgtatatattgatacgcgtgcgcgttttttttattttttttttttttggtttttttcgaagttataggcgtattcggcggtttttttatttttatgtttggcgcgtatttttgggttttttttaggaagcgaatgttttatttaggtttaaatata

SEQ ID NO: 11514 - DNA, 601 bp, Artificial Sequence
  chemically treated genomic DNA (Homo sapiens) CpG-island No: 11514
tatatttaaacctaaataaaacattcgcttcctaaaaaaaacccaaaaatacgcgccaaacataaaaataaaaaaaccgccgaatacgcctataacttcgaaaaaaaccaaaaaaaaaaaaaataaaaaaaacgcgcacgcgtatcaatatatacatatatcaacgtctatacacgcgcacatatatatcgaatctaatcgcacatacgaatcaaaatctaaccacacgcatacgttaaaaatctatatacgcgtacacgtacatatcgcgatctaaatatacatacgtatcaaaatctatatacacgcacatacgtatcgaactctactactacctacgcgctccgaccgctaaatacgaaaaacccctcccgaatccgaaatacgcatacgcgctaacctccataaataacgaaaccgactatataacgcacttacgtaaaaatacgaaactaacgcgacgactctatctcccgtaactataacacgaatacacgcaaacgtcattaaaaataataaaaaccgtactcgatacgcttctacaccgataacgcaaccgctatatctccgccaatccgcgcaaataaaattaacgcccata

SEQ ID NO: 11515 - DNA, 601 bp, Artificial Sequence
  chemically treated genomic DNA (Homo sapiens) CpG-island No: 11515
tgtgtttgggtttgagtagggtattcgttttttaggaggaatttaggggtgcgcgttaagtatgggggtagggggatcgtcgagtgcgtttgtggtttcgggagaggttaaagaaggaaggagtgggaagggcgcgtacgcgtgttagtgtgtgtatgtgttagcgtttgtgtacgcgtatatgtgtgtcgggtttggtcgtatatgcggattaaggtttggttatacgtatgcgttgggggtttgtgtgcgcgtatacgtgtatgtcgcggtttgggtgtatatgcgtgttaggatttgtgtgtacgtatatgcgtgtcgggttttgttgttgtttgcgcgtttcggtcgttgggtgcgggaggtttttttcgagttcggggtgcgtatgcgcgttggtttttatgggtggcgggatcgattgtgtgacgtatttgcgtgggagtgcgaggttgacgcggcggttttatttttcgtaattgtgatacgggtgtacgtaagcgttattgggggtgatgggggtcgtgttcggtgcgtttttgtatcggtgacgtaatcgttgtgttttcgttagttcgcgtaggtgagattggcgtttatg

SEQ ID NO: 11516 - DNA, 601 bp, Artificial Sequence
  chemically treated genomic DNA (Homo sapiens) CpG-island No: 11516
cataaacgccaatctcacctacgcgaactaacgaaaacacaacgattacgtcaccgatacaaaaacgcaccgaacacgacccccatcacccccaataacgcttacgtacacccgtatcacaattacgaaaaataaaaccgccgcgtcaacctcgcactcccacgcaaatacgtcacacaatcgatcccgccacccataaaaaccaacgcgcatacgcaccccgaactcgaaaaaaacctcccgcacccaacgaccgaaacgcgcaaacaacaacaaaacccgacacgcatatacgtacacacaaatcctaacacgcatatacacccaaaccgcgacatacacgtatacgcgcacacaaacccccaacgcatacgtataaccaaaccttaatccgcatatacgaccaaacccgacacacatatacgcgtacacaaacgctaacacatacacacactaacacgcgtacgcgcccttcccactccttccttctttaacctctcccgaaaccacaaacgcactcgacgatccccctacccccatacttaacgcgcacccctaaattcctcctaaaaaacgaataccctactcaaacccaaacaca

SEQ ID NO: 11517 - DNA, 605 bp, Artificial Sequence
  chemically treated genomic DNA (Homo sapiens) CpG-island No: 11517
tttttcggagttacgcgtattaattttatttgcgcggattggcggagatgtagcggttgcgttattggtgtaaacgcgtatttagtacggtttttatcgtttttaatgacgttcgcgtgtattcgtgttatagttacggggatagggtcgtcgcgttagtttcgtatttttacgtaagtgcgttatatattcggtttcgttattttttggaggttagcgcgtatgcgtacgcgtatttagcggtcgtagcgcgtagatagtagtagagttcgatacgtatgtgtatatagatttttatacgtatgtgtacgtatttagatttcgatacgtatgtgagcgtatatagattttcgatatatagcgtgtttagttgttgacgtgtttgtgcgggtatatagattttgacgggcgtgtgcgtacgtatagatgtcgatacgtatgtgtagatataatagagttcgatatatacgtgcgtttgtatagatgttgatacgcggatatattgatacgtgtgcgtgtattttttttatttttttttttttttttatttttttaaagtcgtagacgtattcggtagttttttaacgttggggtttcgggagagg

SEQ ID NO: 11518 - DNA, 605 bp, Artificial Sequence
  chemically treated genomic DNA (Homo sapiens) CpG-island No: 11518
cctctcccgaaaccccaacgttaaaaaactaccgaatacgtctacgactttaaaaaaataaaaaaaaaaaaaaaaataaaaaaaatacacgcacacgtatcaatatatccgcgtatcaacatctatacaaacgcacgtatatatcgaactctattatatctacacatacgtatcgacatctatacgtacgcacacgcccgtcaaaatctatatacccgcacaaacacgtcaacaactaaacacgctatatatcgaaaatctatatacgctcacatacgtatcgaaatctaaatacgtacacatacgtataaaaatctatatacacatacgtatcgaactctactactatctacgcgctacgaccgctaaatacgcgtacgcatacgcgctaacctccaaaaaataacgaaaccgaatatataacgcacttacgtaaaaatacgaaactaacgcgacgaccctatccccgtaactataacacgaatacacgcgaacgtcattaaaaacgataaaaaccgtactaaatacgcgtttacaccaataacgcaaccgctacatctccgccaatccgcgcaaataaaattaatacgcgtaactccgaaaaa

SEQ ID NO: 11519 - DNA, 605 bp, Artificial Sequence
  chemically treated genomic DNA (Homo sapiens) CpG-island No: 11519
tttttttcgaggttttagcgttgggggattatcgggtgcgtttgcggttttgggagagtgggaggagggaaagggatgggaggggtgtacgtatacgtgttagtgtgttcgcgtgttagtatttgtgtaggcgtacgtgtgtgtcgggttttgttgtgtttgtatatgcgtgtcggtatttgtgcgtgcgtatacgttcgttagggtttgtgtgttcgtataggtacgttaatagttgagtacgttatgtatcgggggtttgtgtacgtttatatacgtgtcggggtttgggtacgtgtatatacgtgtaggggtttgtgtgtatatgcgtgtcgggttttgttgttgtttgcgcgttgcggtcgttgggtgcgcgtgcgtatgcgcgttggtttttagggggtggcgggatcgagtgtgtgacgtatttgcgtgggagtacgaggttgacgcggcggttttgttttcgtaattgtgatacgggtgtacgcgagcgttattgggggcgatgggggtcgtgttgggtgcgcgtttgtattagtgacgtagtcgttgtattttcgttagttcgcgtaggtgagattggtgcgcgtggtttcgagggg

SEQ ID NO: 11520 - DNA, 605 bp, Artificial Sequence
  chemically treated genomic DNA (Homo sapiens) CpG-island No: 11520
cccctcgaaaccacgcgcaccaatctcacctacgcgaactaacgaaaatacaacgactacgtcactaatacaaacgcgcacccaacacgacccccatcgcccccaataacgctcgcgtacacccgtatcacaattacgaaaacaaaaccgccgcgtcaacctcgtactcccacgcaaatacgtcacacactcgatcccgccaccccctaaaaaccaacgcgcatacgcacgcgcacccaacgaccgcaacgcgcaaacaacaacaaaacccgacacgcatatacacacaaacccctacacgtatatacacgtacccaaaccccgacacgtatataaacgtacacaaacccccgatacataacgtactcaactattaacgtacctatacgaacacacaaaccctaacgaacgtatacgcacgcacaaataccgacacgcatatacaaacacaacaaaacccgacacacacgtacgcctacacaaatactaacacgcgaacacactaacacgtatacgtacacccctcccatccctttccctcctcccactctcccaaaaccgcaaacgcacccgataatcccccaacgctaaaacctcgaaaaaaa

SEQ ID NO: 11521 - DNA, 566 bp, Artificial Sequence
  chemically treated genomic DNA (Homo sapiens) CpG-island No: 11521
ttttaatgcgttggcgatagttagcgatatgaatcgtaacgtattgtgtatttcgaatttttacgagtcgtagttgtacgcggaattttacgagtgggcgaataagatttttgagtatttgttgtttcgtattcgcgcgtatgcggagatttggttcgattaggaaaaagtcgttattattgatgaagaatcgattttcggttagatttatttgtcgcgtaaattcgaaattacggaagtgatttcgttatagaacgatatcgatttgtacgttaacgatatgaatttcgtggcgatcgtcgaaaacggtaaattggtgggttttaatttgttggtgggcggtgggttttttatcgagtacggtaataagaaaatttacgttcgcgtcgtgaatgattttgttatttgtcgcggggatatacgttggcggtggttgaagtcgtttgatatttatcgtggcggggaatcgaatcgatgtaaaattttaatttaataatttggatttggggggggtgatttaggaaaaacgtaaatgttgaattgttagagattcgttaggcggtatt

SEQ ID NO: 11522 - DNA, 566 bp, Artificial Sequence
  chemically treated genomic DNA (Homo sapiens) CpG-island No: 11522
aataccgcctaacgaatctctaacaattcaacatttacgtttttcctaaatcaccccccccaaatccaaattattaaattaaaattttacatcgattcgattccccgccacgataaatatcaaacgacttcaaccaccgccaacgtatatccccgcgacaaataacaaaatcattcacgacgcgaacgtaaattttcttattaccgtactcgataaaaaacccaccgcccaccaacaaattaaaacccaccaatttaccgttttcgacgatcgccacgaaattcatatcgttaacgtacaaatcgatatcgttctataacgaaatcacttccgtaatttcgaatttacgcgacaaataaatctaaccgaaaatcgattcttcatcaataataacgactttttcctaatcgaaccaaatctccgcatacgcgcgaatacgaaacaacaaatactcaaaaatcttattcgcccactcgtaaaattccgcgtacaactacgactcgtaaaaattcgaaatacacaatacgttacgattcatatcgctaactatcgccaacgcattaaaa

SEQ ID NO: 11523 - DNA, 566 bp, Artificial Sequence
  chemically treated genomic DNA (Homo sapiens) CpG-island No: 11523
aatgtcgtttggcggatttttggtaatttaatatttgcgttttttttggattattttttttagatttaggttattgggttgggattttatatcggttcggtttttcgttacggtgagtgttaaacggttttagttatcgttagcgtatgttttcgcggtagatagtaaaattatttacggcgcgggcgtaggtttttttgttgtcgtgttcgatggaaagtttatcgtttattaataggttaaagtttattagtttgtcgttttcggcgatcgttacgaagtttatgtcgttggcgtgtagatcgatatcgttttgtggcgggattattttcgtggtttcgaatttacgcggtaggtaggtttggtcgaggatcggttttttattagtagtggcgatttttttttggtcgagttagattttcgtatacgcgcgggtacgaggtaatagatgtttagaaattttattcgtttattcgtaagatttcgcgtgtagttgcgattcgtaagggttcgaggtgtatagtacgttacggtttatgtcgttagttgtcgttagcgtattaaga

SEQ ID NO: 11524 - DNA, 566 bp, Artificial Sequence
  chemically treated genomic DNA (Homo sapiens) CpG-island No: 11524
tcttaatacgctaacgacaactaacgacataaaccgtaacgtactatacacctcgaacccttacgaatcgcaactacacgcgaaatcttacgaataaacgaataaaatttctaaacatctattacctcgtacccgcgcgtatacgaaaatctaactcgaccaaaaaaaaatcgccactactaataaaaaaccgatcctcgaccaaacctacctaccgcgtaaattcgaaaccacgaaaataatcccgccacaaaacgatatcgatctacacgccaacgacataaacttcgtaacgatcgccgaaaacgacaaactaataaactttaacctattaataaacgataaactttccatcgaacacgacaacaaaaaaacctacgcccgcgccgtaaataattttactatctaccgcgaaaacatacgctaacgataactaaaaccgtttaacactcaccgtaacgaaaaaccgaaccgatataaaatcccaacccaataacctaaatctaaaaaaaataatccaaaaaaaacgcaaatattaaattaccaaaaatccgccaaacgacatt

SEQ ID NO: 11525 - DNA, 922 bp, Artificial Sequence
  chemically treated genomic DNA (Homo sapiens) CpG-island No: 11525
gtgacgttatgcggataatgttatttttggtgaaggagttggcgaaggcgttttgatgggtttgaaaatgggagttgggagttttatcgtagaggcgggggaattttaagtgatatttattatcgtatttagtgcgttcggtttattttcgttgatgcggggaatattagcgttaggcgtgaaattttatcgtcgttgtcggtttatttttgttggcgcggggaattttcggtttaggcgttgtaaatttggttatcgggcggtttattttcgttaacgcggggaattcgtagtttattattttatttatgtttgaattttcggtttattttcgttggcgcggggaattttcgggggataatgtttacggttatgcgtttttcggtttattttcgttggcgcggggaattttgggcggtttgttttgtagttagttttagtagcggtttattttcgttggcgcggggaatttaagttggttggtaatttttttcggggtgagttcggtttattttcgttggcgcggggaattttagttttcgtattttcggatttataaagttgacggtttattttcgttggcgcggggaattcgtaggcggcgacgcgtagggtatgcgcgaattcgtcggttttagttggcgcggggaattcgcgatcgtttagaaattttagattcgattttaaacggttatttcgttggcgcggggaatttttaatattattaattataatcgatagggagttacggttttttagcggcgcggggaatttagcgtgttcggtattatttttggtttcggttgtaggtttatgttggcgcggggaattttgcgtgagcgtatcgtcgcgcgtttgcgaaagcgcgtttatgttggcgcggggaattttttaaaagtatatatttgtttttaaagtattt

SEQ ID NO: 11526 - DNA, 922 bp, Artificial Sequence
  chemically treated genomic DNA (Homo sapiens) CpG-island No: 11526
aaatactttaaaaacaaatatatacttttaaaaaattccccgcgccaacataaacgcgctttcgcaaacgcgcgacgatacgctcacgcaaaattccccgcgccaacataaacctacaaccgaaaccaaaaataataccgaacacgctaaattccccgcgccgctaaaaaaccgtaactccctatcgattataattaataatattaaaaattccccgcgccaacgaaataaccgtttaaaatcgaatctaaaatttctaaacgatcgcgaattccccgcgccaactaaaaccgacgaattcgcgcataccctacgcgtcgccgcctacgaattccccgcgccaacgaaaataaaccgtcaactttataaatccgaaaatacgaaaactaaaattccccgcgccaacgaaaataaaccgaactcaccccgaaaaaaattaccaaccaacttaaattccccgcgccaacgaaaataaaccgctactaaaactaactacaaaacaaaccgcccaaaattccccgcgccaacgaaaataaaccgaaaaacgcataaccgtaaacattatcccccgaaaattccccgcgccaacgaaaataaaccgaaaattcaaacataaataaaataataaactacgaattccccgcgttaacgaaaataaaccgcccgataaccaaatttacaacgcctaaaccgaaaattccccgcgccaacaaaaataaaccgacaacgacgataaaatttcacgcctaacgctaatattccccgcatcaacgaaaataaaccgaacgcactaaatacgataataaatatcacttaaaattcccccgcctctacgataaaactcccaactcccattttcaaacccatcaaaacgccttcgccaactccttcaccaaaaataacattatccgcataacgtcac

SEQ ID NO: 11527 - DNA, 922 bp, Artificial Sequence
  chemically treated genomic DNA (Homo sapiens) CpG-island No: 11527
aaatgttttaagaataaatgtatatttttagagagtttttcgcgttagtataaacgcgttttcgtagacgcgcggcgatacgtttacgtagagtttttcgcgttagtataaatttgtagtcgaagttaaaggtgatgtcgaatacgttgagtttttcgcgtcgttagagagtcgtggttttttgtcggttgtaattgataatgttgagagtttttcgcgttagcgggataatcgtttggaatcgggtttggaatttttgagcggtcgcgagtttttcgcgttagttaaaatcggcgaattcgcgtatattttgcgcgtcgtcgtttgcgagtttttcgcgttagcgaggataaatcgttagttttataaattcggagatacggaaattagagtttttcgcgttagcgaggataaatcggatttatttcgaaagagattgttagttagtttgagtttttcgcgttagcggggataaatcgttgttggagttggttgtaaggtaagtcgtttagagtttttcgcgttagcggggataaatcggggggcgtatgatcgtaaatattatttttcgggagtttttcgcgttagcggggataaatcgggagtttagatataggtggaatgatggattacgagtttttcgcgttagcggggataaatcgttcggtagttaggtttgtaacgtttgaatcgagagtttttcgcgttagtagggataaatcggtaacgacggtgagattttacgtttgacgttggtgtttttcgtattagcggggataaatcgggcgtattggatgcgatgatggatattatttggagttttttcgtttttgcggtagaatttttagtttttatttttaaatttattaagacgttttcgttaatttttttattagaggtagtattattcgtataacgttat

SEQ ID NO: 11528 - DNA, 922 bp, Artificial Sequence
  chemically treated genomic DNA (Homo sapiens) CpG-island No: 11528
ataacgttatacgaataatactacctctaataaaaaaattaacgaaaacgtcttaataaatttaaaaataaaaactaaaaattctaccgcaaaaacgaaaaaactccaaataatatccatcatcgcatccaatacgcccgatttatccccgctaatacgaaaaacaccaacgtcaaacgtaaaatctcaccgtcgttaccgatttatccctactaacgcgaaaaactctcgattcaaacgttacaaacctaactaccgaacgatttatccccgctaacgcgaaaaactcgtaatccatcattccacctatatctaaactcccgatttatccccgctaacgcgaaaaactcccgaaaaataatatttacgatcatacgccccccgatttatccccgctaacgcgaaaaactctaaacgacttaccttacaaccaactccaacaacgatttatccccgctaacgcgaaaaactcaaactaactaacaatctctttcgaaataaatccgatttatcctcgctaacgcgaaaaactctaatttccgtatctccgaatttataaaactaacgatttatcctcgctaacgcgaaaaactcgcaaacgacgacgcgcaaaatatacgcgaattcgccgattttaactaacgcgaaaaactcgcgaccgctcaaaaattccaaacccgattccaaacgattatcccgctaacgcgaaaaactctcaacattatcaattacaaccgacaaaaaaccacgactctctaacgacgcgaaaaactcaacgtattcgacatcacctttaacttcgactacaaatttatactaacgcgaaaaactctacgtaaacgtatcgccgcgcgtctacgaaaacgcgtttatactaacgcgaaaaactctctaaaaatatacatttattcttaaaacattt

SEQ ID NO: 11529 - DNA, 577 bp, Artificial Sequence
  chemically treated genomic DNA (Homo sapiens) CpG-island No: 11529
tagggcgcgtacgaggttttgtacgaagcgtatttcggaggttatttgtttggttagcgtttcgtagcggttttttaggcggttgaagcggcgtttgaggtcgttggtttttagtagcgcgtttttggtttttttttgcgtttgtcgtttgagcgtttcggttttgagtagtttttgtcgtagttttcgtaggttttggtttaggttgtcgtttttttcgcggtattaggttttttttttttcgtagatggcggttagcgtttttacgttttcgtggtagagtcgtcggttgcgttgtagttcgcgtaggtttttttcggcggtcgtcgttttttttagtattttggagaagcgttcgaagtcggcgtagttgttgttgggcggtaagttggagtgcgatttgatggtgtatttttttagacgcgtggtttttaggcgtcgtcgttcgggtttgcggtcgttgtttttattacgtacgtttcgtcgtcggatcgtttaggaaggagggaagtttgagcggggttttcgcgatgttatttagtttcgttagtttttatttgttagtgtgaattgaggt

SEQ ID NO: 11530 - DNA, 577 bp, Artificial Sequence
  chemically treated genomic DNA (Homo sapiens) CpG-island No: 11530
acctcaattcacactaacaaataaaaactaacgaaactaaataacatcgcgaaaaccccgctcaaacttccctccttcctaaacgatccgacgacgaaacgtacgtaataaaaacaacgaccgcaaacccgaacgacgacgcctaaaaaccacgcgtctaaaaaaatacaccatcaaatcgcactccaacttaccgcccaacaacaactacgccgacttcgaacgcttctccaaaatactaaaaaaaacgacgaccgccgaaaaaaacctacgcgaactacaacgcaaccgacgactctaccacgaaaacgtaaaaacgctaaccgccatctacgaaaaaaaaaaaacctaataccgcgaaaaaaacgacaacctaaaccaaaacctacgaaaactacgacaaaaactactcaaaaccgaaacgctcaaacgacaaacgcaaaaaaaaaccaaaaacgcgctactaaaaaccaacgacctcaaacgccgcttcaaccgcctaaaaaaccgctacgaaacgctaaccaaacaaataacctccgaaatacgcttcgtacaaaacctcgtacgcgcccta

SEQ ID NO: 11531 - DNA, 577 bp, Artificial Sequence
  chemically treated genomic DNA (Homo sapiens) CpG-island No: 11531
attttagtttatattggtaggtgggggttggcggggttgggtggtatcgcggggatttcgtttaggttttttttttttttaggcgattcggcggcggaacgtgcgtggtgaggatagcggtcgtaagttcgagcggcggcgtttgaagattacgcgtttgaaggagtatattattaagtcgtattttagtttgtcgtttaataatagttacgtcgatttcgagcgtttttttaaggtgttggaggaggcggcggtcgtcgaggagggtttgcgcgagttgtagcgtagtcggcggttttgttacgaggacgtggaggcgttggtcgttatttacgaggagaaggaggtttggtatcgcgaggagagcgatagtttgggttaggatttgcggaggttacggtaggagttgtttaagatcgaggcgtttaagcggtaggcgtaggaggaggttaagggcgcgttgttggggattagcggttttaagcgtcgttttagtcgtttggagaatcgttacgaggcgttggttaagtaagtagttttcgagatgcgtttcgtgtaggatttcgtgcgcgttttg

SEQ ID NO: 11532 - DNA, 577 bp, Artificial Sequence
  chemically treated genomic DNA (Homo sapiens) CpG-island No: 11532
caaaacgcgcacgaaatcctacacgaaacgcatctcgaaaactacttacttaaccaacgcctcgtaacgattctccaaacgactaaaacgacgcttaaaaccgctaatccccaacaacgcgcccttaacctcctcctacgcctaccgcttaaacgcctcgatcttaaacaactcctaccgtaacctccgcaaatcctaacccaaactatcgctctcctcgcgataccaaacctccttctcctcgtaaataacgaccaacgcctccacgtcctcgtaacaaaaccgccgactacgctacaactcgcgcaaaccctcctcgacgaccgccgcctcctccaacaccttaaaaaaacgctcgaaatcgacgtaactattattaaacgacaaactaaaatacgacttaataatatactccttcaaacgcgtaatcttcaaacgccgccgctcgaacttacgaccgctatcctcaccacgcacgttccgccgccgaatcgcctaaaaaaaaaaaaaacctaaacgaaatccccgcgataccacccaaccccgccaacccccacctaccaatataaactaaaat

SEQ ID NO: 11533 - DNA, 566 bp, Artificial Sequence
  chemically treated genomic DNA (Homo sapiens) CpG-island No: 11533
cgttcggtcgagtttttttttcggttcggttatttagatgggtttttaaatttattagttttttagattttttttttttttcgtttttcgcgggttttcgaagcgtcgttttggttttatttagttttttagtttcggttcgagttcgttttttatttttcgtagttcggagaatacggtcggcgtcgtcgcgttggttatcgtcgtcgtttttagaagtttcgcgtttttgtcgtcgcgacgcgtttgcgtcgacgttatcgtattcgttagtgtttattttcgggaaacgaatttcgtcgtttattggtcggtgcgttcgtcgttcgtgtcgtatttcgacgtttcgtttttagttgttttttcggtatttatattcggatgtagttttattattggttgaatattcgttatttttgattttattggttgtagtcgacgttggttaagcggacggaaaaaaggtcgattttcggtttttttatcgtttcgttcgttttttttttgatttaggtgttgaagttgcgagaagtgaggttgaagttttgtatttcgttttttgtttt

SEQ ID NO: 11534 - DNA, 566 bp, Artificial Sequence
  chemically treated genomic DNA (Homo sapiens) CpG-island No: 11534
aaaacaaaaaacgaaatacaaaacttcaacctcacttctcgcaacttcaacacctaaatcaaaaaaaaaacgaacgaaacgataaaaaaaccgaaaatcgaccttttttccgtccgcttaaccaacgtcgactacaaccaataaaatcaaaaataacgaatattcaaccaataataaaactacatccgaatataaataccgaaaaaacaactaaaaacgaaacgtcgaaatacgacacgaacgacgaacgcaccgaccaataaacgacgaaattcgtttcccgaaaataaacactaacgaatacgataacgtcgacgcaaacgcgtcgcgacgacaaaaacgcgaaacttctaaaaacgacgacgataaccaacgcgacgacgccgaccgtattctccgaactacgaaaaataaaaaacgaactcgaaccgaaactaaaaaactaaataaaaccaaaacgacgcttcgaaaacccgcgaaaaacgaaaaaaaaaaaaaatctaaaaaactaataaatttaaaaacccatctaaataaccgaaccgaaaaaaaaactcgaccgaacg

SEQ ID NO: 11535 - DNA, 566 bp, Artificial Sequence
  chemically treated genomic DNA (Homo sapiens) CpG-island No: 11535
aaggtaggaagcgggatgtagggttttagttttatttttcgtagttttagtatttgggttagaggagaggcgggcggggcgatgaagggatcggaagtcggtttttttttcgttcgtttgattagcgtcgattgtagttaatgaaattagggatggcgagtgtttagttagtggtgaggttgtattcgggtgtgggtgtcgaaaaggtagttgggggcgggacgtcgaggtgcggtacgagcggcgggcgtatcggttaataggcggcggggttcgtttttcgggggtgggtattggcgggtgcggtgacgtcggcgtaggcgcgtcgcggcggtaggggcgcggggtttttggaggcggcggcggtggttagcgcggcggcgtcggtcgtatttttcgggttgcggagggtaaagagcgggttcgggtcgaggttggagggttgggtggggttagagcggcgtttcgggggttcgcggaggacgagggagggagagaatttgaggagttggtaggtttggggatttatttgggtgatcgggtcggggaaagggttcggtcgggcg

SEQ ID NO: 11536 - DNA, 566 bp, Artificial Sequence
  chemically treated genomic DNA (Homo sapiens) CpG-island No: 11536
cgcccgaccgaaccctttccccgacccgatcacccaaataaatccccaaacctaccaactcctcaaattctctccctccctcgtcctccgcgaacccccgaaacgccgctctaaccccacccaaccctccaacctcgacccgaacccgctctttaccctccgcaacccgaaaaatacgaccgacgccgccgcgctaaccaccgccgccgcctccaaaaaccccgcgcccctaccgccgcgacgcgcctacgccgacgtcaccgcacccgccaatacccacccccgaaaaacgaaccccgccgcctattaaccgatacgcccgccgctcgtaccgcacctcgacgtcccgcccccaactaccttttcgacacccacacccgaatacaacctcaccactaactaaacactcgccatccctaatttcattaactacaatcgacgctaatcaaacgaacgaaaaaaaaaccgacttccgatcccttcatcgccccgcccgcctctcctctaacccaaatactaaaactacgaaaaataaaactaaaaccctacatcccgcttcctacctt

SEQ ID NO: 11537 - DNA, 513 bp, Artificial Sequence
  chemically treated genomic DNA (Homo sapiens) CpG-island No: 11537
gtggtcgcggggcggtgtttttttagtttaagagaaggaagcgagaaggtgagggtttcgcgtagggggcggagtttggggcgcgtggttaggcgcgagcggtacgcggttcgggggcggggcgggtgacgtcgcgggttcgttaggttcggggaagacgttaagatggcgacgagttagtatttcgatttcgcgtagggcggcggttcgtagtataggtaattgtttcgtcgcgttagttttcgttagtttcggtttttgtagtttggtcgggatttcgtttattttttttttcgtcgcgtgcgttcggttcggttttagttttagttttaatttggaatttcggtttgagggaagtcgcggcgtcgggagaagtaggcggggcggttttaggttaggtatcgggcgggatgcgggtttcggggtttcggttgagacgtttttgtagttaacggtgtttgtcggcgggagcgggagggggtttttgaagtgggagggggtttgggtttgggt

SEQ ID NO: 11538 - DNA, 513 bp, Artificial Sequence
  chemically treated genomic DNA (Homo sapiens) CpG-island No: 11538
acccaaacccaaaccccctcccacttcaaaaaccccctcccgctcccgccgacaaacaccgttaactacaaaaacgtctcaaccgaaaccccgaaacccgcatcccgcccgatacctaacctaaaaccgccccgcctacttctcccgacgccgcgacttccctcaaaccgaaattccaaattaaaactaaaactaaaaccgaaccgaacgcacgcgacgaaaaaaaaaataaacgaaatcccgaccaaactacaaaaaccgaaactaacgaaaactaacgcgacgaaacaattacctatactacgaaccgccgccctacgcgaaatcgaaatactaactcgtcgccatcttaacgtcttccccgaacctaacgaacccgcgacgtcacccgccccgcccccgaaccgcgtaccgctcgcgcctaaccacgcgccccaaactccgccccctacgcgaaaccctcaccttctcgcttccttctcttaaactaaaaaaacaccgccccgcgaccac

SEQ ID NO: 11539 - DNA, 513 bp, Artificial Sequence
  chemically treated genomic DNA (Homo sapiens) CpG-island No: 11539
gtttaaatttaggtttttttttattttaggagttttttttcgttttcgtcgatagatatcgttggttgtagagacgttttagtcggagtttcggagttcgtatttcgttcggtgtttaatttgaggtcgtttcgtttgtttttttcggcgtcgcggttttttttaggtcggggttttaggttggggttgggattggggtcgggtcgggcgtacgcggcgggagaaggggtaggcggggtttcggttaggttgtaggggtcgggattggcgggggttggcgcggcggggtagttatttgtattgcgggtcgtcgttttgcgcgaagtcgaaatattgattcgtcgttattttggcgtttttttcgagtttggcggattcgcgacgttattcgtttcgttttcgagtcgcgtgtcgttcgcgtttggttacgcgttttaagtttcgttttttgcgcgaagtttttattttttcgttttttttttttaggttagggagatatcgtttcgcgattat

SEQ ID NO: 11540 - DNA, 513 bp, Artificial Sequence
  chemically treated genomic DNA (Homo sapiens) CpG-island No: 11540
ataatcgcgaaacgatatctccctaacctaaaaaaaaaaaacgaaaaaataaaaacttcgcgcaaaaaacgaaacttaaaacgcgtaaccaaacgcgaacgacacgcgactcgaaaacgaaacgaataacgtcgcgaatccgccaaactcgaaaaaaacgccaaaataacgacgaatcaatatttcgacttcgcgcaaaacgacgacccgcaatacaaataactaccccgccgcgccaacccccgccaatcccgacccctacaacctaaccgaaaccccgcctaccccttctcccgccgcgtacgcccgacccgaccccaatcccaaccccaacctaaaaccccgacctaaaaaaaaccgcgacgccgaaaaaaacaaacgaaacgacctcaaattaaacaccgaacgaaatacgaactccgaaactccgactaaaacgtctctacaaccaacgatatctatcgacgaaaacgaaaaaaaactcctaaaataaaaaaaaacctaaatttaaac

SEQ ID NO: 11541 - DNA, 610 bp, Artificial Sequence
  chemically treated genomic DNA (Homo sapiens) CpG-island No: 11541
agcggcgggttcgttagtttcgagcgaaagtgtgattgcgaacgggtaggcgcgcgcggggttcggcggaggcgcgtttgggttttcggcggcgacgattacgattattaggagagcggacggaggcggcgtttgaagcggcggcggagtttatgtttcgggacggcgggcggattcggagagataaattcggggttcggggtatgttttcggggttttcgtgaggaggcggcggcggttatggagatcgcgtcgtaggaggcgtcgttcgtgtcgggcgcggacggcgatattgaagaggttttagttgaggtcgggttttttagtttcgcgtcgtttttcgtcgatgggcgttttaaggttgtagttaagcgcgttatattttcgttcgacgaggatatcgtgtttggagtagtggagtttaaagatttttggagatatggtagttatcgcgggtgaagcgggggcgggttcgagagggattcgggagtcgggagggatcggtgtagggttcggttcgaggtggcgtttaatagattgtatttaatggtgaataaggggatagtcgttagtttagaatcgtagtttgttagaaagggggtggttatgg

SEQ ID NO: 11542 - DNA, 610 bp, Artificial Sequence
  chemically treated genomic DNA (Homo sapiens) CpG-island No: 11542
ccataaccaccccctttctaacaaactacgattctaaactaacgactatccccttattcaccattaaatacaatctattaaacgccacctcgaaccgaaccctacaccgatccctcccgactcccgaatccctctcgaacccgcccccgcttcacccgcgataactaccatatctccaaaaatctttaaactccactactccaaacacgatatcctcgtcgaacgaaaatataacgcgcttaactacaaccttaaaacgcccatcgacgaaaaacgacgcgaaactaaaaaacccgacctcaactaaaacctcttcaatatcgccgtccgcgcccgacacgaacgacgcctcctacgacgcgatctccataaccgccgccgcctcctcacgaaaaccccgaaaacataccccgaaccccgaatttatctctccgaatccgcccgccgtcccgaaacataaactccgccgccgcttcaaacgccgcctccgtccgctctcctaataatcgtaatcgtcgccgccgaaaacccaaacgcgcctccgccgaaccccgcgcgcgcctacccgttcgcaatcacactttcgctcgaaactaacgaacccgccgct

SEQ ID NO: 11543 - DNA, 610 bp, Artificial Sequence
  chemically treated genomic DNA (Homo sapiens) CpG-island No: 11543
ttatagttattttttttttaatagattacggttttaaattgacgattgtttttttatttattattaggtgtaatttattgaacgttatttcgagtcgggttttgtatcgatttttttcgattttcgggtttttttcgagttcgttttcgttttattcgcggtagttattatgtttttaggggtttttgggttttattgttttagatacgatattttcgtcggacgggaatgtgacgcgtttggttgtagttttgaggcgtttatcggcggggggcgacgcggggttgggagattcggttttagttggggtttttttaatgtcgtcgttcgcgttcggtacgggcggcgttttttgcggcgcgatttttatagtcgtcgtcgtttttttacgggggtttcggggatatgtttcgggtttcggatttgttttttcgggttcgttcgtcgtttcggggtatgggtttcgtcgtcgttttaggcgtcgttttcgttcgtttttttagtggtcgtagtcgtcgtcgtcgggagtttaagcgcgttttcgtcgagtttcgcgcgcgtttgttcgttcgtagttatattttcgttcgaggttggcgagttcgtcgtt

SEQ ID NO: 11544 - DNA, 610 bp, Artificial Sequence
  chemically treated genomic DNA (Homo sapiens) CpG-island No: 11544
aacgacgaactcgccaacctcgaacgaaaatataactacgaacgaacaaacgcgcgcgaaactcgacgaaaacgcgcttaaactcccgacgacgacgactacgaccactaaaaaaacgaacgaaaacgacgcctaaaacgacgacgaaacccataccccgaaacgacgaacgaacccgaaaaaacaaatccgaaacccgaaacatatccccgaaacccccgtaaaaaaacgacgacgactataaaaatcgcgccgcaaaaaacgccgcccgtaccgaacgcgaacgacgacattaaaaaaaccccaactaaaaccgaatctcccaaccccgcgtcgccccccgccgataaacgcctcaaaactacaaccaaacgcgtcacattcccgtccgacgaaaatatcgtatctaaaacaataaaacccaaaaacccctaaaaacataataactaccgcgaataaaacgaaaacgaactcgaaaaaaacccgaaaatcgaaaaaaatcgatacaaaacccgactcgaaataacgttcaataaattacacctaataataaataaaaaaacaatcgtcaatttaaaaccgtaatctattaaaaaaaaaataactataa

SEQ ID NO: 11545 - DNA, 668 bp, Artificial Sequence
  chemically treated genomic DNA (Homo sapiens) CpG-island No: 11545
acgtacggatttttagtacggtttgatttataattttttgaggggttatcggcggggtatgggcgtgatcgcgttcgagtattagcgatataatatgatgcgtggaggtgttttcgagtattatatcgttcgttatttgattatcgcgtataacggtggtataggaggtaatgcggcgaattttttttattcggtggttgatataaattatcgttacgtttagtgtcgatattttttttatcgcgttgattattagtttaattttcgtattcgtaagcgaattggtaggtttattaagaatgattacgcgcggttcgttttttattattcgcgtaatttttattagttgtttttgcgtcgggtttagcgttgaaataagttgtttaggattaacgttaacgtttagcgtttgtaagtaacgttgggtattttgcgttatttgtaggtaattaattatgtcgttgcggcggggttattgatcgaggtagaggtttttcgttattgttagtttttttattagatttaatttttgataaatcgcgcgtatttttagtttagcggtacgcgagttagcgtaattcgttatttttagtcgcgttcgtaattagatattacgttatcgggcgtttttgcggtagtatttaatgagattcgattgtcgcgtcgtt

SEQ ID NO: 11546 - DNA, 668 bp, Artificial Sequence
  chemically treated genomic DNA (Homo sapiens) CpG-island No: 11546
aacgacgcgacaatcgaatctcattaaatactaccgcaaaaacgcccgataacgtaatatctaattacgaacgcgactaaaaataacgaattacgctaactcgcgtaccgctaaactaaaaatacgcgcgatttatcaaaaattaaatctaataaaaaaactaacaataacgaaaaacctctacctcgatcaataaccccgccgcaacgacataattaattacctacaaataacgcaaaatacccaacgttacttacaaacgctaaacgttaacgttaatcctaaacaacttatttcaacgctaaacccgacgcaaaaacaactaataaaaattacgcgaataataaaaaacgaaccgcgcgtaatcattcttaataaacctaccaattcgcttacgaatacgaaaattaaactaataatcaacgcgataaaaaaaatatcgacactaaacgtaacgataatttatatcaaccaccgaataaaaaaaattcgccgcattacctcctataccaccgttatacgcgataatcaaataacgaacgatataatactcgaaaacacctccacgcatcatattatatcgctaatactcgaacgcgatcacgcccataccccgccgataacccctcaaaaaattataaatcaaaccgtactaaaaatccgtacgt

SEQ ID NO: 11547 - DNA, 668 bp, Artificial Sequence
  chemically treated genomic DNA (Homo sapiens) CpG-island No: 11547
aacggcgcggtaatcgaattttattgaatgttatcgtaggaacgttcgatagcgtgatatttgattgcgaacgcgattgaaagtgacgaattacgttgattcgcgtgtcgttaaattgggggtgcgcgcggtttattaggagttaagtttggtggaagggttgatagtggcggaaaatttttgtttcggttagtggtttcgtcgtaacggtatgattgattatttgtaaatggcgtaggatgtttaacgttgtttataggcgttgggcgttgacgttagttttgaataatttgttttaacgttaagttcggcgtaaaagtagttggtggaaattgcgcgggtgatgaagggcgagtcgcgcgtggttatttttgatgaatttattagttcgtttgcgagtgcggaagttgaattggtgattagcgcggtgaaaaagatgtcggtattgggcgtggcggtgatttatgttagttatcggatggaagaaattcgtcgtattgttttttgtgttatcgttatgcgcgatggttaggtggcgggcgatgtgatgttcgaaaatatttttacgtattatattgtgtcgttgatgttcgggcgcgattacgtttatatttcgtcggtagttttttaggaaattgtggattaggtcgtgttggaagttcgtgcgt

SEQ ID NO: 11548 - DNA, 668 bp, Artificial Sequence
  chemically treated genomic DNA (Homo sapiens) CpG-island No: 11548
acgcacgaacttccaacacgacctaatccacaatttcctaaaaaactaccgacgaaatataaacgtaatcgcgcccgaacatcaacgacacaatataatacgtaaaaatattttcgaacatcacatcgcccgccacctaaccatcgcgcataacgataacacaaaaaacaatacgacgaatttcttccatccgataactaacataaatcaccgccacgcccaataccgacatctttttcaccgcgctaatcaccaattcaacttccgcactcgcaaacgaactaataaattcatcaaaaataaccacgcgcgactcgcccttcatcacccgcgcaatttccaccaactacttttacgccgaacttaacgttaaaacaaattattcaaaactaacgtcaacgcccaacgcctataaacaacgttaaacatcctacgccatttacaaataatcaatcataccgttacgacgaaaccactaaccgaaacaaaaattttccgccactatcaacccttccaccaaacttaactcctaataaaccgcgcgcacccccaatttaacgacacgcgaatcaacgtaattcgtcactttcaatcgcgttcgcaatcaaatatcacgctatcgaacgttcctacgataacattcaataaaattcgattaccgcgccgtt

SEQ ID NO: 11549 - DNA, 626 bp, Artificial Sequence
  chemically treated genomic DNA (Homo sapiens) CpG-island No: 11549
atacgcggtatggttttttttacgtttgtaggttttttcggtacgaaggcggcgttaaattgtaattcgttatttattattagttttggtgcgcgtttacggacgatttttgtcgtttgttggacgttagtaatataggggtgacgggcgttattattgttggaaaacgatagtatcgttacgtcggttttttttcggtgatggcgcgttaggtttcggtattggtaagcgcgatattcgttagttgcgtcgtcgtcggttgtggtattacgttgtaatcggtaaagttaacgtcgggtcgttgtattgtggtaatattaggaaaatggaagagagcgttttatagtttggttgtaagcgattaatgcgtaattcggtacgtagtatatttgtcgtggaagagaggttgttcgcgatatagatattcgttttatcggcgttgattattgttgcggcgaatattatagggtcggtaagtttttttagcgtattcggcggcgttttttcgtttcgcgcggttagttatcgatgagtaaatttttttcgtattgcgaggtttgttattcgatttaattatttgtagttcgtttaatcgtacgtcgttaattaattttaaatttattaat

SEQ ID NO: 11550 - DNA, 626 bp, Artificial Sequence
  chemically treated genomic DNA (Homo sapiens) CpG-island No: 11550
attaataaatttaaaattaattaacgacgtacgattaaacgaactacaaataattaaatcgaataacaaacctcgcaatacgaaaaaaatttactcatcgataactaaccgcgcgaaacgaaaaaacgccgccgaatacgctaaaaaaacttaccgaccctataatattcgccgcaacaataatcaacgccgataaaacgaatatctatatcgcgaacaacctctcttccacgacaaatatactacgtaccgaattacgcattaatcgcttacaaccaaactataaaacgctctcttccattttcctaatattaccacaatacaacgacccgacgttaactttaccgattacaacgtaataccacaaccgacgacgacgcaactaacgaatatcgcgcttaccaataccgaaacctaacgcgccatcaccgaaaaaaaaccgacgtaacgatactatcgttttccaacaataataacgcccgtcacccctatattactaacgtccaacaaacgacaaaaatcgtccgtaaacgcgcaccaaaactaataataaataacgaattacaatttaacgccgccttcgtaccgaaaaaacctacaaacgtaaaaaaaaccataccgcgtat

SEQ ID NO: 11551 - DNA, 626 bp, Artificial Sequence
  chemically treated genomic DNA (Homo sapiens) CpG-island No: 11551
attggtaagtttggggttagttaacggcgtgcgattggacgggttataggtgattgaatcggatggtagatttcgtaatgcgggaagaatttgtttatcgatggttggtcgcgcggggcgaaaaaacgtcgtcggatgcgttggaaaaatttatcgattttgtgatgttcgtcgtagtaatggttagcgtcggtaaagcggatgtttgtatcgcgggtaattttttttttacggtaaatgtgttgcgtgtcggattacgtattagtcgtttgtagttaggttgtaaaacgtttttttttatttttttgatgttgttatagtatagcggttcggcgttggttttgtcgattgtagcgtggtgttatagtcgacggcggcgtagttggcggatatcgcgtttgttagtgtcgaaatttggcgcgttattatcggagaagagtcggcgtggcgatgttgtcgttttttagtaatggtagcgttcgttatttttgtgttgttaacgtttagtaggcgatagaaatcgttcgtgagcgcgtattaaagttggtggtggatggcgagttatagtttgacgtcgttttcgtgtcggaaggatttgtaggcgtgaaggaggttatgtcgcgtgt

SEQ ID NO: 11552 - DNA, 626 bp, Artificial Sequence
  chemically treated genomic DNA (Homo sapiens) CpG-island No: 11552
acacgcgacataacctccttcacgcctacaaatccttccgacacgaaaacgacgtcaaactataactcgccatccaccaccaactttaatacgcgctcacgaacgatttctatcgcctactaaacgttaacaacacaaaaataacgaacgctaccattactaaaaaacgacaacatcgccacgccgactcttctccgataataacgcgccaaatttcgacactaacaaacgcgatatccgccaactacgccgccgtcgactataacaccacgctacaatcgacaaaaccaacgccgaaccgctatactataacaacatcaaaaaaataaaaaaaaacgttttacaacctaactacaaacgactaatacgtaatccgacacgcaacacatttaccgtaaaaaaaaaattacccgcgatacaaacatccgctttaccgacgctaaccattactacgacgaacatcacaaaatcgataaatttttccaacgcatccgacgacgttttttcgccccgcgcgaccaaccatcgataaacaaattcttcccgcattacgaaatctaccatccgattcaatcacctataacccgtccaatcgcacgccgttaactaaccccaaacttaccaat

SEQ ID NO: 11553 - DNA, 607 bp, Artificial Sequence
  chemically treated genomic DNA (Homo sapiens) CpG-island No: 11553
ttttcgattagcggtcgtattggtaagtcgaacgtgacggaaggcgtattggtatagaacggttaggcgattgcgttggtaatcgtgtagtaatttgattcgatttacgttgatgtgatttagtttagtaacgattttttgcgtttgaaataggaattggcgaatggtacgttgaaataagagaacggtaaagttaaagtgttattgattattagtgacggtattaagttttcgtaggacggtacgttggaattttttgacgttatcgttgattagattattgggtttattattttacgcgttattttttcgaattcggattatattttgttgtcgggtatgttcgtgcgcgtacgtttggaagaagggtttaatttaaacgttattttagtttcgtaatagggcgtaattcgtacgtcgcgtggcgatgttatcgtattggtagttggcgcggatgataaagtggaaattcgttcgatcgttgtaagttaggttattggcgataagtggttggtgatagaaggtttgaaagtaggcgatcgcgtagtaataagtgggttgtagaaagtgcgttttggtgtttaggtaaaagtataagaagttacgt

SEQ ID NO: 11554 - DNA, 607 bp, Artificial Sequence
  chemically treated genomic DNA (Homo sapiens) CpG-island No: 11554
acgtaacttcttatacttttacctaaacaccaaaacgcactttctacaacccacttattactacgcgatcgcctactttcaaaccttctatcaccaaccacttatcgccaataacctaacttacaacgatcgaacgaatttccactttatcatccgcgccaactaccaatacgataacatcgccacgcgacgtacgaattacgccctattacgaaactaaaataacgtttaaattaaacccttcttccaaacgtacgcgcacgaacatacccgacaacaaaatataatccgaattcgaaaaaataacgcgtaaaataataaacccaataatctaatcaacgataacgtcaaaaaattccaacgtaccgtcctacgaaaacttaataccgtcactaataatcaataacactttaactttaccgttctcttatttcaacgtaccattcgccaattcctatttcaaacgcaaaaaatcgttactaaactaaatcacatcaacgtaaatcgaatcaaattactacacgattaccaacgcaatcgcctaaccgttctataccaatacgccttccgtcacgttcgacttaccaatacgaccgctaatcgaaaa

SEQ ID NO: 11555 - DNA, 607 bp, Artificial Sequence
  chemically treated genomic DNA (Homo sapiens) CpG-island No: 11555
gcgtaattttttgtgtttttatttggatattaggacgtattttttgtagtttatttattattacgcgatcgtttgtttttagattttttgttattagttatttatcgttaatagtttggtttgtaacgatcggacgggtttttattttgttattcgcgttaattattagtacggtggtatcgttacgcggcgtacgggttacgttttgttgcgggattaaaatagcgtttggattaagttttttttttagacgtgcgcgtacgaatatattcggtagtagagtgtgattcgggttcgggaagatagcgcgtagggtgatagatttagtggtttgattaacggtaacgttagagaattttagcgtatcgttttgcgggaatttaatgtcgttattggtgattagtgatattttggttttgtcgtttttttgttttagcgtgttattcgttagtttttgttttaggcgtaggaagtcgttgttggattgggttatattaacgtagatcggattaagttgttgtacggttgttagcgtagtcgtttgatcgttttgtattaatgcgtttttcgttacgttcgatttattaatgcgatcgttaatcggaga

SEQ ID NO: 11556 - DNA, 607 bp, Artificial Sequence
  chemically treated genomic DNA (Homo sapiens) CpG-island No: 11556
tctccgattaacgatcgcattaataaatcgaacgtaacgaaaaacgcattaatacaaaacgatcaaacgactacgctaacaaccgtacaacaacttaatccgatctacgttaatataacccaatccaacaacgacttcctacgcctaaaacaaaaactaacgaataacacgctaaaacaaaaaaacgacaaaaccaaaatatcactaatcaccaataacgacattaaattcccgcaaaacgatacgctaaaattctctaacgttaccgttaatcaaaccactaaatctatcaccctacgcgctatcttcccgaacccgaatcacactctactaccgaatatattcgtacgcgcacgtctaaaaaaaaaacttaatccaaacgctattttaatcccgcaacaaaacgtaacccgtacgccgcgtaacgataccaccgtactaataattaacgcgaataacaaaataaaaacccgtccgatcgttacaaaccaaactattaacgataaataactaataacaaaaaatctaaaaacaaacgatcgcgtaataataaataaactacaaaaaatacgtcctaatatccaaataaaaacacaaaaaattacgc

SEQ ID NO: 11557 - DNA, 653 bp, Artificial Sequence
  chemically treated genomic DNA (Homo sapiens) CpG-island No: 11557
  unsure (375, 379, 424, 458)
ttcggttattattcgttagatcgttaatatttattgtatatggttgcgtggcgaattaacgtttgtttcgttatttacgtttttcgttgatgtagtggaagagtattagtaatatcgcgaaagcgaagtttggtagcgtgatgcggtattttgggtagaatagcgtcgttaattgtcgtcgttcgcgttatttttttcggtatttttatcggggcgtagcggttcggtagatattttgcgtttgaaattggaatttatcgacgggaatattgtagttggttacgtaatttttaggtgtgtagcgtatcgatttaattttttcgttggtagtttgtggttggggcgattgtgtaatcgtatggattacgtcgtcgnattnatttttatgcgtcgattgggttcggcggcgttgaacgttaacggnatcgtgtttaacgttgtgtcgttgggtattttantgcggcgtagaacgttgcgggattgtaatcgattgttgtcgtttgtttgtaggtggttaaattgttcgacgcgcgtcgatttgatgaacgggtcgtttgtacgaatttgtgtcgttatttttttgagtatcgagtttaggtttatattttcgatatttattattacgcgtttagggttatttaacgcgaattgtt

SEQ ID NO: 11558 - DNA, 653 bp, Artificial Sequence
  chemically treated genomic DNA (Homo sapiens) CpG-island No: 11558
  unsure (196, 230, 275, 279)
aacaattcgcgttaaataaccctaaacgcgtaataataaatatcgaaaatataaacctaaactcgatactcaaaaaaataacgacacaaattcgtacaaacgacccgttcatcaaatcgacgcgcgtcgaacaatttaaccacctacaaacaaacgacaacaatcgattacaatcccgcaacgttctacgccgcantaaaatacccaacgacacaacgttaaacacgatnccgttaacgttcaacgccgccgaacccaatcgacgcataaaaatnaatncgacgacgtaatccatacgattacacaatcgccccaaccacaaactaccaacgaaaaaattaaatcgatacgctacacacctaaaaattacgtaaccaactacaatattcccgtcgataaattccaatttcaaacgcaaaatatctaccgaaccgctacgccccgataaaaataccgaaaaaaataacgcgaacgacgacaattaacgacgctattctacccaaaataccgcatcacgctaccaaacttcgctttcgcgatattactaatactcttccactacatcaacgaaaaacgtaaataacgaaacaaacgttaattcgccacgcaaccatatacaataaatattaacgatctaacgaataataaccgaa

SEQ ID NO: 11559 - DNA, 653 bp, Artificial Sequence
  chemically treated genomic DNA (Homo sapiens) CpG-island No: 11559
  unsure (196, 230, 275, 279)
agtagttcgcgttgagtaattttgaacgcgtggtggtggatatcgaagatgtaaatttgaattcggtatttaaggggatggcggtataaattcgtgtagacgattcgtttattaagtcggcgcgcgtcgggtaatttgattatttgtaggtagacggtagtagtcggttgtagtttcgtagcgttttgcgtcgtantgggatatttaacggtataacgttgagtacggtntcgttagcgtttagcgtcgtcgagtttagtcgacgtataagaatnaatncggcggcgtagtttatacgattgtataatcgttttagttataagttgttagcgaaagggttaagtcggtacgttgtatatttgaaagttgcgtagttagttgtagtattttcgtcggtaaattttagttttaggcgtagaatatttgtcgagtcgttgcgtttcggtaaaggtgtcggagaaagtgacgcgggcggcggtagttgacgacgttgttttgtttagaatgtcgtattacgttgttaggtttcgttttcgcggtattgttggtatttttttattatattagcgaaaggcgtaaatggcgaagtaggcgttggttcgttacgtagttatgtgtagtaaatattggcgatttggcgggtaatggtcggg

SEQ ID NO: 11560 - DNA, 653 bp, Artificial Sequence
  chemically treated genomic DNA (Homo sapiens) CpG-island No: 11560
  unsure (375, 379, 424, 458)
cccgaccattacccgccaaatcgccaatatttactacacataactacgtaacgaaccaacgcctacttcgccatttacgcctttcgctaatataataaaaaaataccaacaataccgcgaaaacgaaacctaacaacgtaatacgacattctaaacaaaacaacgtcgtcaactaccgccgcccgcgtcactttctccgacacctttaccgaaacgcaacgactcgacaaatattctacgcctaaaactaaaatttaccgacgaaaatactacaactaactacgcaactttcaaatatacaacgtaccgacttaaccctttcgctaacaacttataactaaaacgattatacaatcgtataaactacgccgccgnattnattcttatacgtcgactaaactcgacgacgctaaacgctaacganaccgtactcaacgttataccgttaaatatcccantacgacgcaaaacgctacgaaactacaaccgactactaccgtctacctacaaataatcaaattacccgacgcgcgccgacttaataaacgaatcgtctacacgaatttataccgccatccccttaaataccgaattcaaatttacatcttcgatatccaccaccacgcgttcaaaattactcaacgcgaactact

SEQ ID NO: 11561 - DNA, 596 bp, Artificial Sequence
  chemically treated genomic DNA (Homo sapiens) CpG-island No: 11561
  unsure (588)
tgcgttagtttgttggtatgatgcgcgttattcgtattttgttttatcgtcgtagtgagttgttttatgttggcggtagttttttttataatcgcgtttttttttttgtgtagcgtatatgtttgtaggtttaatgtaggtaatggcggtacggtatatagcgatgagattgttagttacggtcgttagtatttattaagtttgacgttattatcgttggttattatttggttggttcgggaggtagaatgatataattcgttattggtaaattcgtttttttcggcgcgtattacgacggttagggcgttaattttatattttttttcgtttatgtcgagcgggtagaattgtgtgtttttgacgttaatggttaggaatatcgttatgatttgttagggtatagtggcgatatttggtacggttatttgtcggatgcgcgttcgggtttgcgttatggttatcgcgtttatggtttttggtaattcgtcgaggggtatcgttttaattcggcgaagttgttgattgatttttgcgcgcggtaaattgacggggagtttaaagataattcgttgttgtacgtcggtnataatgaa

SEQ ID NO: 11562 - DNA, 596 bp, Artificial Sequence
  chemically treated genomic DNA (Homo sapiens) CpG-island No: 11562
  unsure (9)
ttcattatnaccgacgtacaacaacgaattatctttaaactccccgtcaatttaccgcgcgcaaaaatcaatcaacaacttcgccgaattaaaacgatacccctcgacgaattaccaaaaaccataaacgcgataaccataacgcaaacccgaacgcgcatccgacaaataaccgtaccaaatatcgccactataccctaacaaatcataacgatattcctaaccattaacgtcaaaaacacacaattctacccgctcgacataaacgaaaaaaaatataaaattaacgccctaaccgtcgtaatacgcgccgaaaaaaacgaatttaccaataacgaattatatcattctacctcccgaaccaaccaaataataaccaacgataataacgtcaaacttaataaatactaacgaccgtaactaacaatctcatcgctatataccgtaccgccattacctacattaaacctacaaacatatacgctacacaaaaaaaaaaacgcgattataaaaaaaactaccgccaacataaaacaactcactacgacgataaaacaaaatacgaataacgcgcatcataccaacaaactaacgca

SEQ ID NO: 11563 - DNA, 596 bp, Artificial Sequence
  chemically treated genomic DNA (Homo sapiens) CpG-island No: 11563
  unsure (9)
tttattatnatcggcgtgtagtagcgggttatttttaaatttttcgttaatttgtcgcgcgtaaggattaattaataatttcgtcgggttaaagcgatgtttttcggcgggttgttaggggttatgaacgcgataattataacgtaaattcgggcgcgtattcggtagataatcgtgttaaatgtcgttattgtgttttggtaagttatagcgatgtttttggttattggcgttaaagatatatagttttattcgttcggtatgagcggagaaaagtgtgaagttgacgttttgatcgtcgtaatgcgcgtcgaggggagcgggtttgttaatggcgagttgtgttattttgtttttcgaattagttagatagtggttagcggtggtagcgttaggtttagtgaatgttgacgatcgtggttggtaattttatcgttgtgtatcgtgtcgttattgtttgtattagatttgtaggtatgtacgttgtatagaagaaaaagcgcggttatgaaaaaaattgtcgttagtatggagtaatttattgcgacggtgaaatagaatgcggataacgcgtattatgttagtaaattggcgta

SEQ ID NO: 11564 - DNA, 596 bp, Artificial Sequence
  chemically treated genomic DNA (Homo sapiens) CpG-island No: 11564
  unsure (588)
tacgccaatttactaacataatacgcgttatccgcattctatttcaccgtcgcaataaattactccatactaacgacaatttttttcataaccgcgctttttcttctatacaacgtacatacctacaaatctaatacaaacaataacgacacgatacacaacgataaaattaccaaccacgatcgtcaacattcactaaacctaacgctaccaccgctaaccactatctaactaattcgaaaaacaaaataacacaactcgccattaacaaacccgctcccctcgacgcgcattacgacgatcaaaacgtcaacttcacacttttctccgctcataccgaacgaataaaactatatatctttaacgccaataaccaaaaacatcgctataacttaccaaaacacaataacgacatttaacacgattatctaccgaatacgcgcccgaatttacgttataattatcgcgttcataacccctaacaacccgccgaaaaacatcgctttaacccgacgaaattattaattaatccttacgcgcgacaaattaacgaaaaatttaaaaataacccgctactacacgccgatnataataaa

SEQ ID NO: 11565 - DNA, 530 bp, Artificial Sequence
  chemically treated genomic DNA (Homo sapiens) CpG-island No: 11565
  unsure (295, 340, 430, 438, 453)
gcgtcgtcgtcgcgttttttgcgtcgttcgtttcgtatggtgtggaggaagatgttttttattcggtacgcgcgaaatagggaatggtagcgtttgtggacgttattgttatttaggtgggggtggatatttttaaggagggcgggaatgtcgttgatgtcgtcgtggcggtgggttacgcgttggcggtaacgtattcgtaggtagggaatttgggcggtggtggttttatgttaattcgttcgaaaaatggtaatattacggttatcgattttcgcgaaatggtattcgttanagcgatcgcgatatgttttcgatgattagggtaatcggatagtanaaattatttatttcgtatttggttttcggtatatcgggtacggtagtaggttttcgttggcgttgggataatacggtttatgtcgttgantaaagttngtgtagtcgcgtttnaattggtacgtatggtttatcgttataattcgtggttgagattttaaatttacggtgcgaagtgtgtcgaattagaa

SEQ ID NO: 11566 - DNA, 530 bp, Artificial Sequence
  chemically treated genomic DNA (Homo sapiens) CpG-island No: 11566
  unsure (78, 93, 101, 191, 236)
ttctaattcgacacacttcgcaccgtaaatttaaaatctcaaccacgaattataacgataaaccatacgtaccaattnaaacgcgactacacnaactttantcaacgacataaaccgtattatcccaacgccaacgaaaacctactaccgtacccgatataccgaaaaccaaatacgaaataaataatttntactatccgattaccctaatcatcgaaaacatatcgcgatcgctntaacgaataccatttcgcgaaaatcgataaccgtaatattaccatttttcgaacgaattaacataaaaccaccaccgcccaaattccctacctacgaatacgttaccgccaacgcgtaacccaccgccacgacgacatcaacgacattcccgccctccttaaaaatatccacccccacctaaataacaataacgtccacaaacgctaccattccctatttcgcgcgtaccgaataaaaaacatcttcctccacaccatacgaaacgaacgacgcaaaaaacgcgacgacgacgc

SEQ ID NO: 11567 - DNA, 530 bp, Artificial Sequence
  chemically treated genomic DNA (Homo sapiens) CpG-island No: 11567
  unsure (78, 93, 101, 191, 236)
ttttgattcggtatatttcgtatcgtaggtttgagattttagttacgggttgtaacgataaattatgcgtgttagttnaaacgcggttgtatngattttgnttagcggtatgggtcgtattattttagcgttagcgagaatttgttatcgtattcggtgtgtcggaagttagatgcgaagtgagtgatttntgttgttcggttgttttgattatcgaggatatatcgcggtcgttntggcgggtgttatttcgcggaaatcgatagtcgtggtattgttatttttcgagcggattaatataaaattattatcgtttagattttttgtttgcggatgcgttatcgttagcgcgtagtttatcgttacggcggtattaacggtattttcgttttttttgagaatatttatttttatttgagtggtagtggcgtttatagacgttattattttttgtttcgcgcgtatcgggtggaagatatttttttttatattatacgagacgggcggcgtaggaggcgcggcggcggcgt

SEQ ID NO: 11568 - DNA, 530 bp, Artificial Sequence
  chemically treated genomic DNA (Homo sapiens) CpG-island No: 11568
  unsure (295, 340, 430, 438, 453)
acgccgccgccgcgcctcctacgccgcccgtctcgtataatataaaaaaaaatatcttccacccgatacgcgcgaaacaaaaaataataacgtctataaacgccactaccactcaaataaaaataaatattctcaaaaaaaacgaaaataccgttaataccgccgtaacgataaactacgcgctaacgataacgcatccgcaaacaaaaaatctaaacgataataattttatattaatccgctcgaaaaataacaataccacgactatcgatttccgcgaaataacacccgccanaacgaccgcgatatatcctcgataatcaaaacaaccgaacaacanaaatcactcacttcgcatctaacttccgacacaccgaatacgataacaaattctcgctaacgctaaaataatacgacccataccgctaancaaaatcnatacaaccgcgtttnaactaacacgcataatttatcgttacaacccgtaactaaaatctcaaacctacgatacgaaatataccgaatcaaaa

SEQ ID NO: 11569 - DNA, 1398 bp, Artificial Sequence
  chemically treated genomic DNA (Homo sapiens) CpG-island No: 11569
  unsure (1016, 1075)
cggtcgtacgttcgacgttaattttcggtttattataataaaagttcgaaattttagtttgcgggaagcgatcgttgattattagaacgttattttgcgttagtcgttgaattttgcgtagattcgttatttttcgtagcgagaagtagtatataattatcgtcgtttatagcgtcggattttttttatgtttgtaggtcgtagtgaagtttagggttggtacgttattcgcgatatcgacggttatgacgcggtatttattaaacgcgtagtagaagaagcgcgcgtagtgattgataaattttttttgttgatgtgtaaaattattatcggtttcggtttttcgaataaagtcggtatttacgatttttacggtgcgtcgttgggcgacgttgaaattgttttgattcgcgaataattgggttggaaatatgcgtcgttcgaaatttcgtttgaaatttatgtttagtgggatgcgaaagaagtaggttaggcgaaagaattcgtatggaacgagaaattcgttgtttacgcgaaagtttattcgtaggaagtcgttgaatttattcgtcgtatgaaaggcgaaatgtcgtttgatttcgacgttaaagcgaaagagtttatcgttaaattgtaggttaattcggcgaaaatcgttagtcgtaaagcgttttagaatgttatcgaagcgttcggttcgttgttgtcggaatttttcggcggttttgttgatttggcgtcgtttaatttgattttgtggtttggttttaaagtaattaacgaagatgttgcgggtaattatatttattacggtgttcgcgagttcggtatgatcgcgattgttaacggtatttttttgtacggtggttttttgtcgtatattttatttttttgatgttcgtggaatacgtacgtaacgtcgtacgtatggttgcgttgatgaaatagcgttaggtgatggtttaatttacgattttatcggtttgggcgaagacggtcgatttatagtcggtgantaggtcgttttttgcgcgtaattcgaaatgtttaatggcgttcgtgtgatagttgaatncgcggcgcgtggaattttcggagcgtcgaagagagtgttattgttgaattgattgagcgtatttatggtttgcgttgtatgattattgacgatttagttgtcggaacgtcgtttgtggtgtcgttcggacgaacggtatttttaatcgtaaatagttaaattaagtggtttgttattatggtattttgttttttggatgttatcgtatagcgtaatagtacgttattataagttattatttcgtcgattaacgcggaaaggattataataatcgttttattcggatcgtttttttttattggtaatgacgggtttaattgata

SEQ ID NO: 11570 - DNA, 1398 bp, Artificial Sequence
  chemically treated genomic DNA (Homo sapiens) CpG-island No: 11570
  unsure (324, 383)
tatcaattaaacccgtcattaccaataaaaaaaaacgatccgaataaaacgattattataatcctttccgcgttaatcgacgaaataataacttataataacgtactattacgctatacgataacatccaaaaaacaaaataccataataacaaaccacttaatttaactatttacgattaaaaataccgttcgtccgaacgacaccacaaacgacgttccgacaactaaatcgtcaataatcatacaacgcaaaccataaatacgctcaatcaattcaacaataacactctcttcgacgctccgaaaattccacgcgccgcgnattcaactatcacacgaacgccattaaacatttcgaattacgcgcaaaaaacgacctantcaccgactataaatcgaccgtcttcgcccaaaccgataaaatcgtaaattaaaccatcacctaacgctatttcatcaacgcaaccatacgtacgacgttacgtacgtattccacgaacatcaaaaaaataaaatatacgacaaaaaaccaccgtacaaaaaaataccgttaacaatcgcgatcataccgaactcgcgaacaccgtaataaatataattacccgcaacatcttcgttaattactttaaaaccaaaccacaaaatcaaattaaacgacgccaaatcaacaaaaccgccgaaaaattccgacaacaacgaaccgaacgcttcgataacattctaaaacgctttacgactaacgattttcgccgaattaacctacaatttaacgataaactctttcgctttaacgtcgaaatcaaacgacatttcgcctttcatacgacgaataaattcaacgacttcctacgaataaactttcgcgtaaacaacgaatttctcgttccatacgaattctttcgcctaacctacttctttcgcatcccactaaacataaatttcaaacgaaatttcgaacgacgcatatttccaacccaattattcgcgaatcaaaacaatttcaacgtcgcccaacgacgcaccgtaaaaatcgtaaataccgactttattcgaaaaaccgaaaccgataataattttacacatcaacaaaaaaaatttatcaatcactacgcgcgcttcttctactacgcgtttaataaataccgcgtcataaccgtcgatatcgcgaataacgtaccaaccctaaacttcactacgacctacaaacataaaaaaaatccgacgctataaacgacgataattatatactacttctcgctacgaaaaataacgaatctacgcaaaattcaacgactaacgcaaaataacgttctaataatcaacgatcgcttcccgcaaactaaaatttcgaacttttattataataaaccgaaaattaacgtcgaacgtacgaccg

SEQ ID NO: 11571 - DNA, 1398 bp, Artificial Sequence
  chemically treated genomic DNA (Homo sapiens) CpG-island No: 11571
  unsure (324, 383)
tattagttaagttcgttattgttagtgaaaaaagacggttcgggtaaggcgattattgtgatttttttcgcgttgatcggcgggatggtggtttgtggtggcgtgttgttgcgttatgcgatggtatttagaaaataggatgttatgatggtagattatttagtttaattatttgcggttgaaggtgtcgttcgttcgagcggtattataagcggcgtttcggtaattggatcgttaatgattatgtagcgtagattataaatgcgtttaattagtttagtagtgatatttttttcggcgtttcggagattttacgcgtcgcgnatttaattgttatacggacgttattagatatttcgagttacgcgtaagaagcgatttgnttatcggttgtgagtcggtcgttttcgtttagatcgatggagtcgtgggttaaattattatttgacgttgttttattagcgtagttatacgtacggcgttacgtgcgtattttacgaatattaggaaggtggagtgtacggtaggaagttatcgtgtagggagatatcgttagtaatcgcggttatatcgaattcgcgaatatcgtagtggatgtagttattcgtagtattttcgttgattgttttagaattagattatagggttaggttagacggcgttaggttagtagaatcgtcgaggaatttcggtaatagcggatcgaacgtttcgatagtattttgagacgttttacggttggcgattttcgtcggattagtttgtagtttagcgatgaattttttcgttttagcgtcgaagttagacggtatttcgttttttatacggcgggtaaatttagcggttttttgcggataagttttcgcgtaagtagcgaatttttcgttttatgcggattttttcgtttggtttgtttttttcgtattttattgagtatagattttagacgggatttcgaacggcgtatatttttagtttagttgttcgcgggttagggtaattttagcgtcgtttagcggcgtatcgtgggagtcgtgggtatcggttttgttcggggaatcgaaatcgatgatggttttgtatattagtagggaaggtttgttagttattgcgcgcgttttttttattgcgcgtttgatagatgtcgcgttatgatcgtcgatgtcgcgaataacgtgttagttttaagttttattacgatttgtaggtatgaaggaaattcggcgttatgggcggcggtgattatgtattgtttttcgttgcgaagaatggcgaatttacgtaaggtttagcgattggcgtaaagtggcgttttggtggttagcgatcgtttttcgtaggttgaaatttcgggtttttattatgatggatcggggattggcgtcgaacgtgcgatcg

SEQ ID NO: 11572 - DNA, 1398 bp, Artificial Sequence
  chemically treated genomic DNA (Homo sapiens) CpG-island No: 11572
  unsure (1016, 1075)
cgatcgcacgttcgacgccaatccccgatccatcataataaaaacccgaaatttcaacctacgaaaaacgatcgctaaccaccaaaacgccactttacgccaatcgctaaaccttacgtaaattcgccattcttcgcaacgaaaaacaatacataatcaccgccgcccataacgccgaatttccttcatacctacaaatcgtaataaaacttaaaactaacacgttattcgcgacatcgacgatcataacgcgacatctatcaaacgcgcaataaaaaaaacgcgcgcaataactaacaaaccttccctactaatatacaaaaccatcatcgatttcgattccccgaacaaaaccgatacccacgactcccacgatacgccgctaaacgacgctaaaattaccctaacccgcgaacaactaaactaaaaatatacgccgttcgaaatcccgtctaaaatctatactcaataaaatacgaaaaaaacaaaccaaacgaaaaaatccgcataaaacgaaaaattcgctacttacgcgaaaacttatccgcaaaaaaccgctaaatttacccgccgtataaaaaacgaaataccgtctaacttcgacgctaaaacgaaaaaattcatcgctaaactacaaactaatccgacgaaaatcgccaaccgtaaaacgtctcaaaatactatcgaaacgttcgatccgctattaccgaaattcctcgacgattctactaacctaacgccgtctaacctaaccctataatctaattctaaaacaatcaacgaaaatactacgaataactacatccactacgatattcgcgaattcgatataaccgcgattactaacgatatctccctacacgataacttcctaccgtacactccaccttcctaatattcgtaaaatacgcacgtaacgccgtacgtataactacgctaataaaacaacgtcaaataataatttaacccacgactccatcgatctaaacgaaaacgaccgactcacaaccgataancaaatcgcttcttacgcgtaactcgaaatatctaataacgtccgtataacaattaaatncgcgacgcgtaaaatctccgaaacgccgaaaaaaatatcactactaaactaattaaacgcatttataatctacgctacataatcattaacgatccaattaccgaaacgccgcttataataccgctcgaacgaacgacaccttcaaccgcaaataattaaactaaataatctaccatcataacatcctattttctaaataccatcgcataacgcaacaacacgccaccacaaaccaccatcccgccgatcaacgcgaaaaaaatcacaataatcgccttacccgaaccgtcttttttcactaacaataacgaacttaactaata

SEQ ID NO: 11573 - DNA, 729 bp, Artificial Sequence
  chemically treated genomic DNA (Homo sapiens) CpG-island No: 11573
acgtaacgggttttttgtatggcgtaacggtatatttttaattggcgttcgttattggttggtagatatttttatttcggaagcgtgtttcgcgtgtttgagttaggtttggtatttggtatgttcggggaaacgtttttggtttatggtaatacgtcgattagattggttttatacgtcgttagtacgtaggaatgttacgattgcgattgatttacggtttgagtagtattggtataattagttttagttcggcgatattaagttagaattattacgtttagaaatcgttatttaatgtcgttattagcgtacgaattttatcgttatcgtttagcgttagatcgataaaaaacgttattagtaggaagattttattttatattatagggatttttatacggtgtataaattgcgttttcgtggaatgcgggttattgcgttggcgtatcgtaatgggcgattagcgttatcgtcgtatcggacgagatgtcggagaagaggaatagtatcggtagagtcgggttattgaggaacggatacgattttagcgtcgatagtagaaagtcggtataagtttttaataatatcgttagtattagtattaatgtttttagttcgcgatgaacgggcgttataggtttagaattttttgtacgatttttagtttcggtaattagcgttgttgtagggtaggtaaattatgtttaaagattttcgttagttata

SEQ ID NO: 11574 - DNA, 729 bp, Artificial Sequence
  chemically treated genomic DNA (Homo sapiens) CpG-island No: 11574
tataactaacgaaaatctttaaacataatttacctaccctacaacaacgctaattaccgaaactaaaaatcgtacaaaaaattctaaacctataacgcccgttcatcgcgaactaaaaacattaatactaatactaacgatattattaaaaacttataccgactttctactatcgacgctaaaatcgtatccgttcctcaataacccgactctaccgatactattcctcttctccgacatctcgtccgatacgacgataacgctaatcgcccattacgatacgccaacgcaataacccgcattccacgaaaacgcaatttatacaccgtataaaaatccctataatataaaataaaatcttcctactaataacgttttttatcgatctaacgctaaacgataacgataaaattcgtacgctaataacgacattaaataacgatttctaaacgtaataattctaacttaatatcgccgaactaaaactaattataccaatactactcaaaccgtaaatcaatcgcaatcgtaacattcctacgtactaacgacgtataaaaccaatctaatcgacgtattaccataaaccaaaaacgtttccccgaacataccaaataccaaacctaactcaaacacgcgaaacacgcttccgaaataaaaatatctaccaaccaataacgaacgccaattaaaaatataccgttacgccatacaaaaaacccgttacgt

SEQ ID NO: 11575 - DNA, 729 bp, Artificial Sequence
  chemically treated genomic DNA (Homo sapiens) CpG-island No: 11575
tgtggttggcgaaaatttttgaatatgatttgtttgttttgtaataacgttggttgtcgaagttggggatcgtgtaaaaggttttgagtttgtgacgttcgtttatcgcggattggaaatattgatgttggtgttggcggtgttgttgggggtttatatcggttttttgttgtcggcgttgaaatcgtattcgttttttaataattcgattttgtcggtgttgtttttttttttcggtatttcgttcggtgcggcggtggcgttgatcgtttattgcgatacgttaacgtagtaattcgtattttacggaagcgtagtttgtatatcgtatggaaatttttgtggtatggggtgaaatttttttgttggtggcgttttttgtcggtttggcgttgggcgatgacggtaaagttcgtgcgttggtggcggtattaggtggcggtttttggacgtggtggttttggtttggtgtcgtcgggttggggttgattgtgttaatgttgtttaaatcgtgggttaatcgtagtcgtggtatttttgcgtgttggcggcgtgtggggttagtttggtcggcgtgttgttatagattaaaagcgttttttcgagtatattaggtgttaaatttggtttaagtacgcgaaatacgttttcggagtgaaaatatttattaattagtggcgagcgttaattaagaatgtgtcgttacgttatgtagaaagttcgttgcgt

SEQ ID NO: 11576 - DNA, 729 bp, Artificial Sequence
  chemically treated genomic DNA (Homo sapiens) CpG-island No: 11576
acgcaacgaactttctacataacgtaacgacacattcttaattaacgctcgccactaattaataaatattttcactccgaaaacgtatttcgcgtacttaaaccaaatttaacacctaatatactcgaaaaaacgcttttaatctataacaacacgccgaccaaactaaccccacacgccgccaacacgcaaaaataccacgactacgattaacccacgatttaaacaacattaacacaatcaaccccaacccgacgacaccaaaccaaaaccaccacgtccaaaaaccgccacctaataccgccaccaacgcacgaactttaccgtcatcgcccaacgccaaaccgacaaaaaacgccaccaacaaaaaaatttcaccccataccacaaaaatttccatacgatatacaaactacgcttccgtaaaatacgaattactacgttaacgtatcgcaataaacgatcaacgccaccgccgcaccgaacgaaataccgaaaaaaaaaaacaacaccgacaaaatcgaattattaaaaaacgaatacgatttcaacgccgacaacaaaaaaccgatataaacccccaacaacaccgccaacaccaacatcaatatttccaatccgcgataaacgaacgtcacaaactcaaaaccttttacacgatccccaacttcgacaaccaacgttattacaaaacaaacaaatcatattcaaaaattttcgccaaccaca

SEQ ID NO: 11577 - DNA, 685 bp, Artificial Sequence
  chemically treated genomic DNA (Homo sapiens) CpG-island No: 11577
agtttacgtatcgatgtcgtatgttatatcgtagttacggtcgtaatcgatggagtcgtagttatcgaattttaggttagcgaaggtaagacgggttttatttttggaggaattttgagattcgtcggatttgtgttgtatgtggttcggcgaagtttgtatgtttgtaggtcggaaagataagtcgtttgtcggatgtcgttatcgtttgtgttggcggcggttcgaatgttatcggtatgtttgttgattttattaatgaaattaacgtcggtttgattggtgtggagttaggtggttacggtatcgaaattggcgagtacggcgtatcgttaaaatatggtcgcgtgggtatttatttcggtatgaaagcgtcgatgatgtaaatcgaagacgggtagattgaagaattttattttattttcgtcggattggatttttcgtttgtcggtttataatacgcgtattttaatagtattggacgcgttgattacgtgtttattatcgatgatgaagtttttgaagtttttaaaacgttgtgtttgtacgaagggattatttcggcgttggaatttttttacgttttggtttatgcgttgaaaatgatgcgcgaaaattcggataaagagtagttattggtggttaattttttcggtcgcggcgataaagatatttttatcgttta

SEQ ID NO: 11578 - DNA, 685 bp, Artificial Sequence
  chemically treated genomic DNA (Homo sapiens) CpG-island No: 11578
taaacgataaaaatatctttatcgccgcgaccgaaaaaattaaccaccaataactactctttatccgaattttcgcgcatcattttcaacgcataaaccaaaacgtaaaaaaattccaacgccgaaataatcccttcgtacaaacacaacgttttaaaaacttcaaaaacttcatcatcgataataaacacgtaatcaacgcgtccaatactattaaaatacgcgtattataaaccgacaaacgaaaaatccaatccgacgaaaataaaataaaattcttcaatctacccgtcttcgatttacatcatcgacgctttcataccgaaataaatacccacgcgaccatattttaacgatacgccgtactcgccaatttcgataccgtaaccacctaactccacaccaatcaaaccgacgttaatttcattaataaaatcaacaaacataccgataacattcgaaccgccgccaacacaaacgataacgacatccgacaaacgacttatctttccgacctacaaacatacaaacttcgccgaaccacatacaacacaaatccgacgaatctcaaaattcctccaaaaataaaacccgtcttaccttcgctaacctaaaattcgataactacgactccatcgattacgaccgtaactacgatataacatacgacatcgatacgtaaact

SEQ ID NO: 11579 - DNA, 685 bp, Artificial Sequence
  chemically treated genomic DNA (Homo sapiens) CpG-island No: 11579
tgaacggtgaagatgtttttatcgtcgcgatcggaaaggttaattattagtagttgttttttattcgggttttcgcgtattatttttaacgtatgggttagggcgtgggaggattttagcgtcgggatgattttttcgtgtaggtatagcgttttgaaggttttaagggttttattatcggtaatagatacgtaattagcgcgtttagtgttgttaagatacgcgtgttgtgggtcgatagacgggaaatttagttcggcggagatggagtaagattttttaatttgttcgttttcggtttgtattatcggcgtttttatatcgaaatagatatttacgcgattatgttttagcggtgcgtcgtgttcgttagtttcgatatcgtgattatttggttttatattaattaggtcgacgttggttttattgatgaaattagtaaatatgtcgatggtattcgaatcgtcgttaatataggcgataacggtattcggtaggcgatttattttttcgatttgtaggtatgtaaatttcgtcgagttatatgtagtataggttcgacgaattttaaggtttttttaaagataaaattcgttttgttttcgttggtttgaaattcggtgattacggttttatcgattacggtcgtaattacggtgtagtatacgatatcggtgcgtggatt

SEQ ID NO: 11580 - DNA, 685 bp, Artificial Sequence
  chemically treated genomic DNA (Homo sapiens) CpG-island No: 11580
aatccacgcaccgatatcgtatactacaccgtaattacgaccgtaatcgataaaaccgtaatcaccgaatttcaaaccaacgaaaacaaaacgaattttatctttaaaaaaaccttaaaattcgtcgaacctatactacatataactcgacgaaatttacatacctacaaatcgaaaaaataaatcgcctaccgaataccgttatcgcctatattaacgacgattcgaataccatcgacatatttactaatttcatcaataaaaccaacgtcgacctaattaatataaaaccaaataatcacgatatcgaaactaacgaacacgacgcaccgctaaaacataatcgcgtaaatatctatttcgatataaaaacgccgataatacaaaccgaaaacgaacaaattaaaaaatcttactccatctccgccgaactaaatttcccgtctatcgacccacaacacgcgtatcttaacaacactaaacgcgctaattacgtatctattaccgataataaaacccttaaaaccttcaaaacgctatacctacacgaaaaaatcatcccgacgctaaaatcctcccacgccctaacccatacgttaaaaataatacgcgaaaacccgaataaaaaacaactactaataattaacctttccgatcgcgacgataaaaacatcttcaccgttca

SEQ ID NO: 11581 - DNA, 528 bp, Artificial Sequence
  chemically treated genomic DNA (Homo sapiens) CpG-island No: 11581
tgtcgtcgttgttttagcgttggtttggtgtgatttgatcgtttttcgtaagatggtcgtaacgttgggtatagtgttgatgattgtttcggtatgatcggtttgtttataattcgtatgtcgttattatgtcgtttttatcggtggttttttttataggtattgtttggttttttgaatatcgtttttttaatttggttgcgggtatttatcgtcgcgaagtatttttagagggcgggttattgttatggtatttgtatcggcgaagggttggaaattgtcggatagggtgattgtgttattgtgtagtgggatgcgaatagtaacggtatttgggatcgcgaatcggtaaaagagttcgattagattggatttcgtttgaaggagtatgtgttggaaacgttacgcggtgcgatattttgtgaaggtaagggttgggataaagttattaattcggatgttattattatcgatattttttaggtcgtacgttaggatgttagcggtttttcgtcggtgttgacggtt

SEQ ID NO: 11582 - DNA, 528 bp, Artificial Sequence
  chemically treated genomic DNA (Homo sapiens) CpG-island No: 11582
aaccgtcaacaccgacgaaaaaccgctaacatcctaacgtacgacctaaaaaatatcgataataataacatccgaattaataactttatcccaacccttaccttcacaaaatatcgcaccgcgtaacgtttccaacacatactccttcaaacgaaatccaatctaatcgaactcttttaccgattcgcgatcccaaataccgttactattcgcatcccactacacaataacacaatcaccctatccgacaatttccaacccttcgccgatacaaataccataacaataacccgccctctaaaaatacttcgcgacgataaatacccgcaaccaaattaaaaaaacgatattcaaaaaaccaaacaatacctataaaaaaaaccaccgataaaaacgacataataacgacatacgaattataaacaaaccgatcataccgaaacaatcatcaacactatacccaacgttacgaccatcttacgaaaaacgatcaaatcacaccaaaccaacgctaaaacaacgacgaca

SEQ ID NO: 11583 - DNA, 528 bp, Artificial Sequence
  chemically treated genomic DNA (Homo sapiens) CpG-island No: 11583
aatcgttaatatcggcgagaagtcgttgatattttgacgtacgatttgaaaagtgtcgataatgatggtattcggattagtgattttattttagtttttatttttataggatgtcgtatcgcgtagcgtttttagtatatgtttttttagacgaaatttaatttggtcggatttttttatcggttcgcgattttagatatcgttattgttcgtattttattgtataatgatatagttattttgttcgataatttttagtttttcgtcggtatagatgttatgataataattcgttttttggagatgtttcgcgacggtaaatattcgtagttagattgggaagacggtatttagggagttagatagtgtttgtgggaaaaattatcgataaaggcggtataatggcgatatacgggttgtgaataggtcgattatatcggggtaattattagtattgtatttagcgttacgattattttacgggaaacgattaggttatattaaattaacgttggaatagcggcggta

SEQ ID NO: 11584 - DNA, 528 bp, Artificial Sequence
  chemically treated genomic DNA (Homo sapiens) CpG-island No: 11584
taccgccgctattccaacgttaatttaatataacctaatcgtttcccgtaaaataatcgtaacgctaaatacaatactaataattaccccgatataatcgacctattcacaacccgtatatcgccattataccgcctttatcgataatttttcccacaaacactatctaactccctaaataccgtcttcccaatctaactacgaatatttaccgtcgcgaaacatctccaaaaaacgaattattatcataacatctataccgacgaaaaactaaaaattatcgaacaaaataactatatcattatacaataaaatacgaacaataacgatatctaaaatcgcgaaccgataaaaaaatccgaccaaattaaatttcgtctaaaaaaacatatactaaaaacgctacgcgatacgacatcctataaaaataaaaactaaaataaaatcactaatccgaataccatcattatcgacacttttcaaatcgtacgtcaaaatatcaacgacttctcgccgatattaacgatt

SEQ ID NO: 11585 - DNA, 693 bp, Artificial Sequence
  chemically treated genomic DNA (Homo sapiens) CpG-island No: 11585
gcgcggcggatagtgggttggttgcgaatgtttagacgtttgcgtaaatcgggtaagttacggtttttatttttaagtttattgtatatggatgtttacgtcggaaatttagtgtatagcgcgttagggttaaaatttatcgattgggagtatgtcggagatggggatatcgcgttggaatttggcggcggtgtgggtggaaaatattgaatagtatcggtagttggttaatgattatgttattcgcgcgaagatttagtcggcgtaattatggcgttaggttaggcgatggttgttttggttgttgatgtttaaagtagggtggtttgagtatcgttggcgataaatcggcgatcgataatttattaggttggtcgatgatagttggcggtagttataataggagtaataaggagagtagtgtgggtttagtaatgttggatgtcgaaggttacgaattggacgcggaagcgcgtgaaatattggcgtattcgttggtgggagggttgagtttttttacgcgtaattattatgattttgttttaggtacgtgaattggtcgttagatttcgcgtattcgcgtaatcgtttggtggtggcggttgattaggaaggtggacgcgtgtagtgttttcgtgaaggtttatagggtttgtagcggtgtaattattcgttgatttttacgtttgtagg

SEQ ID NO: 11586 - DNA, 693 bp, Artificial Sequence
  chemically treated genomic DNA (Homo sapiens) CpG-island No: 11586
cctacaaacgtaaaaatcaacgaataattacaccgctacaaaccctataaaccttcacgaaaacactacacgcgtccaccttcctaatcaaccgccaccaccaaacgattacgcgaatacgcgaaatctaacgaccaattcacgtacctaaaacaaaatcataataattacgcgtaaaaaaactcaaccctcccaccaacgaatacgccaatatttcacgcgcttccgcgtccaattcgtaaccttcgacatccaacattactaaacccacactactctccttattactcctattataactaccgccaactatcatcgaccaacctaataaattatcgatcgccgatttatcgccaacgatactcaaaccaccctactttaaacatcaacaaccaaaacaaccatcgcctaacctaacgccataattacgccgactaaatcttcgcgcgaataacataatcattaaccaactaccgatactattcaatattttccacccacaccgccgccaaattccaacgcgatatccccatctccgacatactcccaatcgataaattttaaccctaacgcgctatacactaaatttccgacgtaaacatccatatacaataaacttaaaaataaaaaccgtaacttacccgatttacgcaaacgtctaaacattcgcaaccaacccactatccgccgcgc

SEQ ID NO: 11587 - DNA, 693 bp, Artificial Sequence
  chemically treated genomic DNA (Homo sapiens) CpG-island No: 11587
tttgtaaacgtgaaaattagcgaatgattgtatcgttgtaagttttataaatttttacgaaaatattgtacgcgtttatttttttgattaatcgttattattagacgattgcgcgaatacgcggagtttggcgattagtttacgtatttggggtaggattatgatggttacgcgtaaagagatttagtttttttattagcggatgcgttagtattttacgcgttttcgcgtttagttcgtaattttcgatatttaatattattggatttatattgttttttttattgtttttattgtagttgtcgttagttgttatcggttagtttgataaattgtcgatcgtcggtttgtcgttagcggtatttaaattattttgttttgagtattagtagttagggtaattatcgtttgatttgacgttataattgcgtcggttgaattttcgcgcgagtggtatagttattgattaattgtcggtgttgtttagtattttttatttatatcgtcgttagattttagcgcgatatttttattttcggtatatttttagtcgatgagttttagttttgacgcgttatgtattaaattttcggcgtggatatttatatgtaatggatttaagggtaaaggtcgtggtttgttcgatttgcgtagacgtttaaatattcgtagttaatttattgttcgtcgcgt

SEQ ID NO: 11588 - DNA, 693 bp, Artificial Sequence
  chemically treated genomic DNA (Homo sapiens) CpG-island No: 11588
acgcgacgaacaataaattaactacgaatatttaaacgtctacgcaaatcgaacaaaccacgacctttacccttaaatccattacatataaatatccacgccgaaaatttaatacataacgcgtcaaaactaaaactcatcgactaaaaatataccgaaaataaaaatatcgcgctaaaatctaacgacgatataaataaaaaatactaaacaacaccgacaattaatcaataactataccactcgcgcgaaaattcaaccgacgcaattataacgtcaaatcaaacgataattaccctaactactaatactcaaaacaaaataatttaaataccgctaacgacaaaccgacgatcgacaatttatcaaactaaccgataacaactaacgacaactacaataaaaacaataaaaaaaacaatataaatccaataatattaaatatcgaaaattacgaactaaacgcgaaaacgcgtaaaatactaacgcatccgctaataaaaaaactaaatctctttacgcgtaaccatcataatcctaccccaaatacgtaaactaatcgccaaactccgcgtattcgcgcaatcgtctaataataacgattaatcaaaaaaataaacgcgtacaatattttcgtaaaaatttataaaacttacaacgatacaatcattcgctaattttcacgtttacaaa

SEQ ID NO: 11589 - DNA, 824 bp, Artificial Sequence
  chemically treated genomic DNA (Homo sapiens) CpG-island No: 11589
agttttcgttgcgttattggcgattggtatgacgttggtgatcgttatcggtgggattgattttttcgtagggcggtgatggttatcgtcggagttataacggttgcgatgacggtcgcgggatttagtttgtcgattgttttgttaagcgttttgggtatcggtattttggcgggattgtggaacggtatattggtagcgatttttaaaatttagtcgtttgtcgttattttgattttgatggtcgtcgggcgcggttgagcgtagattgattatcgtcgggtagatcgttacgtttaattcgtcggattttttatggttcggtagtggatcgttgttgtttttgttaacgtcggttattatcgcggtgttgacgtttattttgttttggttgttgattcgtaaaacggcgttggggatgtttatcgaagtcgttggtattaatattcgggcggtaaaaaatgtcggggtaaatacgcgaattatcgttatgtttatttatgtgttgagcgggttgtgtgcggcgattgcgggtattatcgtggcggcggatattcgcggtgtcgatgttaataacgttgggttatggttggagttggacgttattttcgcggtggtgattggcggcggatcgttgatgggcgggcgttttaatttgttattttcggtggtgggggcgttgattatttaggggatgaatatcggaattttgttttcgggtttttcgttagagatgaattaggtggtgaaagcggtggtggtgttttgcgtgttgattgtttagtcgtaacgttttattagtttgattaaaggagtacgtagtt

SEQ ID NO: 11590 - DNA, 824 bp, Artificial Sequence
  chemically treated genomic DNA (Homo sapiens) CpG-island No: 11590
aactacgtactcctttaatcaaactaataaaacgttacgactaaacaatcaacacgcaaaacaccaccaccgctttcaccacctaattcatctctaacgaaaaacccgaaaacaaaattccgatattcatcccctaaataatcaacgcccccaccaccgaaaataacaaattaaaacgcccgcccatcaacgatccgccgccaatcaccaccgcgaaaataacgtccaactccaaccataacccaacgttattaacatcgacaccgcgaatatccgccgccacgataatacccgcaatcgccgcacacaacccgctcaacacataaataaacataacgataattcgcgtatttaccccgacattttttaccgcccgaatattaataccaacgacttcgataaacatccccaacgccgttttacgaatcaacaaccaaaacaaaataaacgtcaacaccgcgataataaccgacgttaacaaaaacaacaacgatccactaccgaaccataaaaaatccgacgaattaaacgtaacgatctacccgacgataatcaatctacgctcaaccgcgcccgacgaccatcaaaatcaaaataacgacaaacgactaaattttaaaaatcgctaccaatataccgttccacaatcccgccaaaataccgatacccaaaacgcttaacaaaacaatcgacaaactaaatcccgcgaccgtcatcgcaaccgttataactccgacgataaccatcaccgccctacgaaaaaatcaatcccaccgataacgatcaccaacgtcataccaatcgccaataacgcaacgaaaact

SEQ ID NO: 11591 - DNA, 824 bp, Artificial Sequence
  chemically treated genomic DNA (Homo sapiens) CpG-island No: 11591
ggttacgtatttttttaattagattgataaagcgttgcgattgaataattagtacgtaaagtattattatcgtttttattatttggtttatttttggcggaaagttcgaaagtaaaatttcggtgtttattttttgaataattagcgtttttattatcgaaagtagtaggttaaagcgttcgtttattagcgattcgtcgttaattattatcgcgagaatggcgtttagttttagttataatttagcgttgttggtatcggtatcgcgaatattcgtcgttacgataatgttcgtaatcgtcgtatatagttcgtttaatatataagtgagtatgacgatgattcgcgtgtttatttcggtattttttgtcgttcgaatgttgatattaacggtttcgataaatatttttagcgtcgttttgcgggttaatagttagaataggataagcgttagtatcgcgataatgatcggcgttggtaggaataatagcgatttattgtcgaattatgagagattcggcgagttaaacgtgacgatttgttcggcggtgattagtttgcgtttagtcgcgttcggcgattattaggattagagtggcgataaacggttgaattttgaggatcgttattagtatgtcgttttataatttcgttaggatgtcggtgtttagggcgtttaataaaataatcggtaggttgaatttcgcgatcgttatcgtagtcgttgtggtttcggcgatagttattatcgttttacggagagattaattttatcggtggcgattattagcgttatgttaatcgttagtaacgtaacgggagtt

SEQ ID NO: 11592 - DNA, 824 bp, Artificial Sequence
  chemically treated genomic DNA (Homo sapiens) CpG-island No: 11592
aactcccgttacgttactaacgattaacataacgctaataatcgccaccgataaaattaatctctccgtaaaacgataataactatcgccgaaaccacaacgactacgataacgatcgcgaaattcaacctaccgattattttattaaacgccctaaacaccgacatcctaacgaaattataaaacgacatactaataacgatcctcaaaattcaaccgtttatcgccactctaatcctaataatcgccgaacgcgactaaacgcaaactaatcaccgccgaacaaatcgtcacgtttaactcgccgaatctctcataattcgacaataaatcgctattattcctaccaacgccgatcattatcgcgatactaacgcttatcctattctaactattaacccgcaaaacgacgctaaaaatatttatcgaaaccgttaatatcaacattcgaacgacaaaaaataccgaaataaacacgcgaatcatcgtcatactcacttatatattaaacgaactatatacgacgattacgaacattatcgtaacgacgaatattcgcgataccgataccaacaacgctaaattataactaaaactaaacgccattctcgcgataataattaacgacgaatcgctaataaacgaacgctttaacctactactttcgataataaaaacgctaattattcaaaaaataaacaccgaaattttactttcgaactttccgccaaaaataaaccaaataataaaaacgataataatactttacgtactaattattcaatcgcaacgctttatcaatctaattaaaaaaatacgtaacc

SEQ ID NO: 11593 - DNA, 509 bp, Artificial Sequence
  chemically treated genomic DNA (Homo sapiens) CpG-island No: 11593
tgtttcgttgtttaaggagtagttatgatttggtttcgtcgttagttttttatcggcgtcggcgtgttggtagtcgttagcggtatcgtaggcgcgtggtggcgaaaacgttgaatattaatggggtgcgttacggtatggtgtatgacgagtcgttatgtatcggttgtatcgtttgtatggatgtttgtcgggaagtgaataaggtgtcggaagcgtttcgcgttgacgattattcgtagcgagtcgtaggcgaattttttgatgtgaaatatcgtttttttcgtaagttttgttagtattgcgattatgcgtcgtgcgttgacgtttgttcgatcggtgcgttttttcgcgatgttgttagtgggattgtcgatgttaattcggatttttgcgtcggttgttagtattgtatcgtcgtttgttcgtatcgcgtgttacgtcggtttgtttgtaggtttattagttagaaggtgattttatgtgattattattattttaataatcga

SEQ ID NO: 11594 - DNA, 509 bp, Artificial Sequence
  chemically treated genomic DNA (Homo sapiens) CpG-island No: 11594
tcgattattaaaataataataatcacataaaatcaccttctaactaataaacctacaaacaaaccgacgtaacacgcgatacgaacaaacgacgatacaatactaacaaccgacgcaaaaatccgaattaacatcgacaatcccactaacaacatcgcgaaaaaacgcaccgatcgaacaaacgtcaacgcacgacgcataatcgcaatactaacaaaacttacgaaaaaaacgatatttcacatcaaaaaattcgcctacgactcgctacgaataatcgtcaacgcgaaacgcttccgacaccttattcacttcccgacaaacatccatacaaacgatacaaccgatacataacgactcgtcatacaccataccgtaacgcaccccattaatattcaacgttttcgccaccacgcgcctacgataccgctaacgactaccaacacgccgacgccgataaaaaactaacgacgaaaccaaatcataactactccttaaacaacgaaaca

SEQ ID NO: 11595 - DNA, 509 bp, Artificial Sequence
  chemically treated genomic DNA (Homo sapiens) CpG-island No: 11595
tcgattattaaagtgatggtagttatataaagttattttttagttaatagatttgtaggtaagtcgacgtggtacgcggtacggataggcggcgatgtagtattgataatcgacgtagagattcggattaatatcgataattttattggtagtatcgcgaaaagacgtatcggtcgggtagacgttaacgtacggcgtatgatcgtagtgttggtaagatttacggaagaagcgatattttatattaggaaattcgtttgcggttcgttacgaataatcgttagcgcgagacgttttcggtattttgtttatttttcgataagtatttatataggcggtatagtcgatgtataacgattcgttatgtattatgtcgtaacgtattttattgatatttaacgttttcgttattacgcgtttgcggtgtcgttgacggttgttagtacgtcgacgtcggtgagaaattggcgacgagattaggttatggttgttttttaagtaacggaata

SEQ ID NO: 11596 - DNA, 509 bp, Artificial Sequence
  chemically treated genomic DNA (Homo sapiens) CpG-island No: 11596
tattccgttacttaaaaaacaaccataacctaatctcgtcgccaatttctcaccgacgtcgacgtactaacaaccgtcaacgacaccgcaaacgcgtaataacgaaaacgttaaatatcaataaaatacgttacgacataatacataacgaatcgttatacatcgactataccgcctatataaatacttatcgaaaaataaacaaaataccgaaaacgtctcgcgctaacgattattcgtaacgaaccgcaaacgaatttcctaatataaaatatcgcttcttccgtaaatcttaccaacactacgatcatacgccgtacgttaacgtctacccgaccgatacgtcttttcgcgatactaccaataaaattatcgatattaatccgaatctctacgtcgattatcaatactacatcgccgcctatccgtaccgcgtaccacgtcgacttacctacaaatctattaactaaaaaataactttatataactaccatcactttaataatcga

SEQ ID NO: 11597 - DNA, 512 bp, Artificial Sequence
  chemically treated genomic DNA (Homo sapiens) CpG-island No: 11597
ggaaagaggaagcggtgagtgaggggtcgtcgaggtcgtcgtcggaattttcgaatttcgttaaatttatatttattagggtcgttatgggtaatggttagtggtttcgatttggttcgattcgggtttttttcgttttttttggcgtgcgcgtttttcgatttcggggaagtcgtcgttcggtgtcgggtttttgtgtttgagcgaggattttaattttaggcgtttttggcgttgggaaaaggtaatcggaagaggcgtttaagttattcggtttacgtttttgcggtcgtttaattcggaagcgaaattttcgagtagtcgcgtcgcgatggtaatttttttagcgattgtggttattttagtgcgtagttatttatgtttttcggcggttatggttattttaaaaggtttatcgcggtttttttttagatttagtaaatttaggtcgagtttgagataaattaacgggtttttgtcgttggcgtttttgtatataacgcggttaattt

SEQ ID NO: 11598 - DNA, 512 bp, Artificial Sequence
  chemically treated genomic DNA (Homo sapiens) CpG-island No: 11598
aaattaaccgcgttatatacaaaaacgccaacgacaaaaacccgttaatttatctcaaactcgacctaaatttactaaatctaaaaaaaaaccgcgataaaccttttaaaataaccataaccgccgaaaaacataaataactacgcactaaaataaccacaatcgctaaaaaaattaccatcgcgacgcgactactcgaaaatttcgcttccgaattaaacgaccgcaaaaacgtaaaccgaataacttaaacgcctcttccgattaccttttcccaacgccaaaaacgcctaaaattaaaatcctcgctcaaacacaaaaacccgacaccgaacgacgacttccccgaaatcgaaaaacgcgcacgccaaaaaaaacgaaaaaaacccgaatcgaaccaaatcgaaaccactaaccattacccataacgaccctaataaatataaatttaacgaaattcgaaaattccgacgacgacctcgacgacccctcactcaccgcttcctctttcc

SEQ ID NO: 11599 - DNA, 512 bp, Artificial Sequence
  chemically treated genomic DNA (Homo sapiens) CpG-island No: 11599
aagttaatcgcgttatatataagagcgttagcgatagaggttcgttagtttattttagattcggtttaggtttgttgagtttaaaaagggatcgcggtggattttttgaggtgattatagtcgtcgaggagtataagtgattgcgtattgaggtggttatagtcgttaagaaggttgttatcgcgacgcggttgttcgagggtttcgttttcgggttaggcggtcgtagaagcgtagatcgagtagtttgagcgtttttttcggttatttttttttagcgttagaggcgtttagggttggggttttcgtttaggtatagagattcgatatcgagcggcggttttttcgggatcgagggacgcgtacgttagaggagacgaaaggaattcgggtcggattagatcggaattattgattattgtttatggcggttttagtgagtgtggatttggcggggttcgggggtttcgacggcgatttcggcgattttttatttatcgtttttttttttt

SEQ ID NO: 11600 - DNA, 512 bp, Artificial Sequence
  chemically treated genomic DNA (Homo sapiens) CpG-island No: 11600
aaaaaaaaaaaacgataaataaaaaatcgccgaaatcgccgtcgaaacccccgaaccccgccaaatccacactcactaaaaccgccataaacaataatcaataattccgatctaatccgacccgaattcctttcgtctcctctaacgtacgcgtccctcgatcccgaaaaaaccgccgctcgatatcgaatctctatacctaaacgaaaaccccaaccctaaacgcctctaacgctaaaaaaaaataaccgaaaaaaacgctcaaactactcgatctacgcttctacgaccgcctaacccgaaaacgaaaccctcgaacaaccgcgtcgcgataacaaccttcttaacgactataaccacctcaatacgcaatcacttatactcctcgacgactataatcacctcaaaaaatccaccgcgatccctttttaaactcaacaaacctaaaccgaatctaaaataaactaacgaacctctatcgctaacgctcttatatataacgcgattaactt

SEQ ID NO: 11601 - DNA, 835 bp, Artificial Sequence
  chemically treated genomic DNA (Homo sapiens) CpG-island No: 11601
cgggttttttcgtgttgagtcgtttgtaggacgcggtcgtggtgcggtttggttttttgagtacggtagaggaggagacgttgagtcgagaattggagttcgagttgcgtcgtcgtcgttacgaatacgattattgggacgcggtgagatcggtagcgtcgggggcgagggacgggggttcgtcgggggcgcggtttggggacgtggagtattagatggggcggggatacgttgggggcggtatttagagcggggatttggagcggggatagaggagacgagcgtcgggatcgggtagggttatattgggggcggttatagtatcgtttagcgtgggggcggggttacggtgttggggttgtggggttaggggggtcgggcgtagggatggggcggggttacgttggggcggggataaaggagatagcgtagggatggggcgggggtattttgggggcgggataggaggcgagcgtagggacggggcgtggttacgttgggggcggggatagtggggattagtgttgggatggggcgtggttacgtttgggggcggttatagcgtagtcgagcgtgggggtggggttagggagtcgggtgtagggttggggtgcgattacgttgttagtagttatagtgtagaagaacgtggcggttgggattggggcgtggttaggtcgtcgagcgtatggatggggcggggttaagtttggggcggggttcgtggagttaagcgtcgggatgggttggggttatgttgtgggggggacggggaagtcgaggtttagagagggtagaattacgttgggggcggagataggggagatatatgttg

SEQ ID NO: 11602 - DNA, 835 bp, Artificial Sequence
  chemically treated genomic DNA (Homo sapiens) CpG-island No: 11602
caacatatatctcccctatctccgcccccaacgtaattctaccctctctaaacctcgacttccccgtcccccccacaacataaccccaacccatcccgacgcttaactccacgaaccccgccccaaacttaaccccgccccatccatacgctcgacgacctaaccacgccccaatcccaaccgccacgttcttctacactataactactaacaacgtaatcgcaccccaaccctacacccgactccctaaccccacccccacgctcgactacgctataaccgcccccaaacgtaaccacgccccatcccaacactaatccccactatccccgcccccaacgtaaccacgccccgtccctacgctcgcctcctatcccgcccccaaaatacccccgccccatccctacgctatctcctttatccccgccccaacgtaaccccgccccatccctacgcccgacccccctaaccccacaaccccaacaccgtaaccccgcccccacgctaaacgatactataaccgcccccaatataaccctacccgatcccgacgctcgtctcctctatccccgctccaaatccccgctctaaataccgcccccaacgtatccccgccccatctaatactccacgtccccaaaccgcgcccccgacgaacccccgtccctcgcccccgacgctaccgatctcaccgcgtcccaataatcgtattcgtaacgacgacgacgcaactcgaactccaattctcgactcaacgtctcctcctctaccgtactcaaaaaaccaaaccgcaccacgaccgcgtcctacaaacgactcaacacgaaaaaacccg

SEQ ID NO: 11603 - DNA, 835 bp, Artificial Sequence
  chemically treated genomic DNA (Homo sapiens) CpG-island No: 11603
tagtatgtgttttttttattttcgtttttagcgtggttttgttttttttaaatttcgattttttcgttttttttatagtatggttttaatttatttcggcgtttgattttacggatttcgttttaagtttggtttcgttttatttatgcgttcgacgatttgattacgttttaattttagtcgttacgtttttttgtattgtaattgttagtagcgtaatcgtattttaattttatattcgattttttggttttatttttacgttcgattgcgttgtaatcgtttttaagcgtggttacgttttattttagtattggtttttattgttttcgtttttagcgtggttacgtttcgtttttacgttcgttttttgtttcgtttttagagtgttttcgttttatttttgcgttgttttttttgttttcgttttagcgtggtttcgttttatttttgcgttcgatttttttggttttataattttagtatcgtagtttcgtttttacgttaaacggtattgtaatcgtttttagtgtggttttgttcggtttcggcgttcgttttttttgttttcgttttaaattttcgttttaggtatcgtttttagcgtgttttcgttttatttgatgttttacgtttttaggtcgcgttttcgacgagttttcgtttttcgttttcggcgttgtcggttttatcgcgttttagtgatcgtattcgtagcggcggcggcgtagttcgggttttagttttcggtttagcgtttttttttttgtcgtgtttaggaagttaggtcgtattacggtcgcgttttgtaggcggtttagtacggaagggttcg

SEQ ID NO: 11604 - DNA, 835 bp, Artificial Sequence
  chemically treated genomic DNA (Homo sapiens) CpG-island No: 11604
cgaacccttccgtactaaaccgcctacaaaacgcgaccgtaatacgacctaacttcctaaacacgacaaaaaaaaaaacgctaaaccgaaaactaaaacccgaactacgccgccgccgctacgaatacgatcactaaaacgcgataaaaccgacaacgccgaaaacgaaaaacgaaaactcgtcgaaaacgcgacctaaaaacgtaaaacatcaaataaaacgaaaacacgctaaaaacgatacctaaaacgaaaatttaaaacgaaaacaaaaaaaacgaacgccgaaaccgaacaaaaccacactaaaaacgattacaataccgtttaacgtaaaaacgaaactacgatactaaaattataaaaccaaaaaaatcgaacgcaaaaataaaacgaaaccacgctaaaacgaaaacaaaaaaaacaacgcaaaaataaaacgaaaacactctaaaaacgaaacaaaaaacgaacgtaaaaacgaaacgtaaccacgctaaaaacgaaaacaataaaaaccaatactaaaataaaacgtaaccacgcttaaaaacgattacaacgcaatcgaacgtaaaaataaaaccaaaaaatcgaatataaaattaaaatacgattacgctactaacaattacaatacaaaaaaacgtaacgactaaaattaaaacgtaatcaaatcgtcgaacgcataaataaaacgaaaccaaacttaaaacgaaatccgtaaaatcaaacgccgaaataaattaaaaccatactataaaaaaaacgaaaaaatcgaaatttaaaaaaaacaaaaccacgctaaaaacgaaaataaaaaaaacacatacta

SEQ ID NO: 11605 - DNA, 565 bp, Artificial Sequence
  chemically treated genomic DNA (Homo sapiens) CpG-island No: 11605
taggtcgttggaaattatttttttatttttcgttagattagagcgtaatgcggtgatttttcgatgtttggaaaatagtaacggtgttcggtatacggatattgtttattttttagtttttcgtgtaagaattttataggtttgtttcgacgaggcgggcgataatttggttgcgtttcgttatgtagttgagtagtaatagttgtcgtaagtggtttggttggcggaatatttggcggtataattggaagttatcgcgcgtgaagttttcgtttggttattgcgcgagtgggatagtgtattatcgaaaattgttcgttggtagcgtaaacgtatttagtattaggattttgagcggcggttacgtgagatggttgtcgaacgtagagttcgtttggcgcgggtgatcgatttcgtggaatagtaaacgttgtatcgtgaagtggaagtttatgaagcgcgtttggtacgttgtcgttatgcgttggaaaaaatcgaaaataggttagcgcgtttaattcgttagtaatggagagaatatgttattggaaaatgtttttgacga

SEQ ID NO: 11606 - DNA, 565 bp, Artificial Sequence
  chemically treated genomic DNA (Homo sapiens) CpG-island No: 11606
tcgtcaaaaacattttccaataacatattctctccattactaacgaattaaacgcgctaacctattttcgattttttccaacgcataacgacaacgtaccaaacgcgcttcataaacttccacttcacgatacaacgtttactattccacgaaatcgatcacccgcgccaaacgaactctacgttcgacaaccatctcacgtaaccgccgctcaaaatcctaatactaaatacgtttacgctaccaacgaacaattttcgataatacactatcccactcgcgcaataaccaaacgaaaacttcacgcgcgataacttccaattataccgccaaatattccgccaaccaaaccacttacgacaactattactactcaactacataacgaaacgcaaccaaattatcgcccgcctcgtcgaaacaaacctataaaattcttacacgaaaaactaaaaaataaacaatatccgtataccgaacaccgttactattttccaaacatcgaaaaatcaccgcattacgctctaatctaacgaaaaataaaaaaataatttccaacgaccta

SEQ ID NO: 11607 - DNA, 565 bp, Artificial Sequence
  chemically treated genomic DNA (Homo sapiens) CpG-island No: 11607
tcgttaggggtattttttagtgatatattttttttattgttagcgggttaaacgcgttaatttgttttcgattttttttagcgtatggcggtagcgtgttaggcgcgttttataggtttttattttacgatgtagcgtttgttgttttacgagatcggttattcgcgttagacgggttttgcgttcggtaattattttacgtagtcgtcgtttaaaattttgatgttgaatacgtttacgttgttagcgggtaattttcggtggtgtattgttttattcgcgtaatgattaggcggaggttttacgcgcgatggtttttagttgtgtcgttagatgtttcgttagttaggttatttgcggtagttgttgttgtttaattgtatgacgaagcgtagttagattatcgttcgtttcgtcgagataagtttgtagggtttttgtacgaggagttaaaaaataggtagtattcgtgtatcgaatatcgttgttgttttttaggtatcgaagggttatcgtattacgttttggtttggcggaaggtgaaaaggtggtttttagcggtttg

SEQ ID NO: 11608 - DNA, 565 bp, Artificial Sequence
  chemically treated genomic DNA (Homo sapiens) CpG-island No: 11608
caaaccgctaaaaaccaccttttcaccttccgccaaaccaaaacgtaatacgataacccttcgatacctaaaaaacaacaacgatattcgatacacgaatactacctattttttaactcctcgtacaaaaaccctacaaacttatctcgacgaaacgaacgataatctaactacgcttcgtcatacaattaaacaacaacaactaccgcaaataacctaactaacgaaacatctaacgacacaactaaaaaccatcgcgcgtaaaacctccgcctaatcattacgcgaataaaacaatacaccaccgaaaattacccgctaacaacgtaaacgtattcaacatcaaaattttaaacgacgactacgtaaaataattaccgaacgcaaaacccgtctaacgcgaataaccgatctcgtaaaacaacaaacgctacatcgtaaaataaaaacctataaaacgcgcctaacacgctaccgccatacgctaaaaaaaatcgaaaacaaattaacgcgtttaacccgctaacaataaaaaaaatatatcactaaaaaatacccctaacga

SEQ ID NO: 11609 - DNA, 582 bp, Artificial Sequence
  chemically treated genomic DNA (Homo sapiens) CpG-island No: 11609
tggtcgtaatatggcgggtgttcgtgcgttgtggcgcgttatcggaatgatcgacgtcgatttcggtaagtcgattatcgcggttgtgaattcgtttatttaatttgtatcgggttacgtttatttgcgcgatttcggtaaattggtcgtcgaataaattgaagcggttggcggcgttgttaaagagtttaatattattgcggtggatgatgggattgttatgggttacggggggatgttttatttattgttatttcgcgaattgatcgttgatttcgttgagtatatggttaacgtttattgcgtcgacgttatggtttgtatttttaattgcgataaaattatttcggggatgttgatggtttttttgcgtttgaatatttcggtgatttttgttttcggcggttcgatggatgtcgggaaaattaaatttttcgattagattattaagttcgatttggttgatgcgatgatttagggcgtagattcgaaagtatttgatttttagagcgattaggttgaacgtttcgcgtgttcgatttgcgttttagaaacgattaattaaattggaaagcgtaaagt

SEQ ID NO: 11610 - DNA, 582 bp, Artificial Sequence
  chemically treated genomic DNA (Homo sapiens) CpG-island No: 11610
actttacgctttccaatttaattaatcgtttctaaaacgcaaatcgaacacgcgaaacgttcaacctaatcgctctaaaaatcaaatactttcgaatctacgccctaaatcatcgcatcaaccaaatcgaacttaataatctaatcgaaaaatttaattttcccgacatccatcgaaccgccgaaaacaaaaatcaccgaaatattcaaacgcaaaaaaaccatcaacatccccgaaataattttatcgcaattaaaaatacaaaccataacgtcgacgcaataaacgttaaccatatactcaacgaaatcaacgatcaattcgcgaaataacaataaataaaacatccccccgtaacccataacaatcccatcatccaccgcaataatattaaactctttaacaacgccgccaaccgcttcaatttattcgacgaccaatttaccgaaatcgcgcaaataaacgtaacccgatacaaattaaataaacgaattcacaaccgcgataatcgacttaccgaaatcgacgtcgatcattccgataacgcgccacaacgcacgaacacccgccatattacgacca

SEQ ID NO: 11611 - DNA, 582 bp, Artificial Sequence
  chemically treated genomic DNA (Homo sapiens) CpG-island No: 11611
gttttgcgttttttaatttaattggtcgtttttaaagcgtaggtcggatacgcggaacgtttaatttgatcgttttgggagttagatattttcgggtttgcgttttggattatcgtattaattagatcgagtttgatgatttgatcggaaagtttggttttttcggtatttatcgggtcgtcggaaataaagattatcggaatatttaggcgtagggaagttattagtattttcggggtgattttgtcgtagttagagatgtagattatggcgtcggcgtagtgggcgttgattatatatttaacggaattagcgattagttcgcgagatggtagtgaataaagtattttttcgtggtttatggtaattttattatttatcgtaatggtgttgaattttttggtaacgtcgttagtcgttttaatttgttcggcgattagtttatcgagatcgcgtagatggacgtgattcggtataaattgggtgaacgagtttataatcgcgataatcggtttatcgaaatcggcgtcggttatttcggtggcgcgttatagcgtacgagtattcgttatattacgatta

SEQ ID NO: 11612 - DNA, 582 bp, Artificial Sequence
  chemically treated genomic DNA (Homo sapiens) CpG-island No: 11612
taatcgtaatataacgaatactcgtacgctataacgcgccaccgaaataaccgacgccgatttcgataaaccgattatcgcgattataaactcgttcacccaatttataccgaatcacgtccatctacgcgatctcgataaactaatcgccgaacaaattaaaacgactaacgacgttaccaaaaaattcaacaccattacgataaataataaaattaccataaaccacgaaaaaatactttattcactaccatctcgcgaactaatcgctaattccgttaaatatataatcaacgcccactacgccgacgccataatctacatctctaactacgacaaaatcaccccgaaaatactaataacttccctacgcctaaatattccgataatctttatttccgacgacccgataaataccgaaaaaaccaaactttccgatcaaatcatcaaactcgatctaattaatacgataatccaaaacgcaaacccgaaaatatctaactcccaaaacgatcaaattaaacgttccgcgtatccgacctacgctttaaaaacgaccaattaaattaaaaaacgcaaaac

SEQ ID NO: 11613 - DNA, 628 bp, Artificial Sequence
  chemically treated genomic DNA (Homo sapiens) CpG-island No: 11613
cgttgtcgcgaatgtcgtcggaataatggcgaagtatttcgtatatcgttggtaatgttgaaggtggttagcgagttacgggttattagtatttgtttgttaatgtgtattatttcgattaatttggtcgggttagagtcgagatcgattatattgttcgtttttttcgtcgtttgggtgtcggagtttatcgttatcgtattgatggattacggtgaagtagtgtagtagggtaattcgttgacgatgttgattcgttcggcgaatgattttgttcgttagttttttggacgtagtgaattgggtgtgcgtttgttttcgttacgtagtgtggcggattacgtgcgtcgcgaagaacgagtagatggtgaggtattggtagaagagatgacgttacggtatgcgcgtttttttgttttgttgcgcggggatgcgaggtgttgtcggtggtgaatatgtagggttagttttgtagtacgttgtatttttaggatttgttggtggaggcgtaacgtatgaagatgttgcgcgattcgttgttttggtttattgttttgtttgtggcgttgattttttggttgttttatagttagtcgttgtttgttgttttgtttttataattgttacg

SEQ ID NO: 11614 - DNA, 628 bp, Artificial Sequence
  chemically treated genomic DNA (Homo sapiens) CpG-island No: 11614
cgtaacaattataaaaacaaaacaacaaacaacgactaactataaaacaaccaaaaaatcaacgccacaaacaaaacaataaaccaaaacaacgaatcgcgcaacatcttcatacgttacgcctccaccaacaaatcctaaaaatacaacgtactacaaaactaaccctacatattcaccaccgacaacacctcgcatccccgcgcaacaaaacaaaaaaacgcgcataccgtaacgtcatctcttctaccaatacctcaccatctactcgttcttcgcgacgcacgtaatccgccacactacgtaacgaaaacaaacgcacacccaattcactacgtccaaaaaactaacgaacaaaatcattcgccgaacgaatcaacatcgtcaacgaattaccctactacactacttcaccgtaatccatcaatacgataacgataaactccgacacccaaacgacgaaaaaaacgaacaatataatcgatctcgactctaacccgaccaaattaatcgaaataatacacattaacaaacaaatactaataacccgtaactcgctaaccaccttcaacattaccaacgatatacgaaatacttcgccattattccgacgacattcgcgacaacg

SEQ ID NO: 11615 - DNA, 628 bp, Artificial Sequence
  chemically treated genomic DNA (Homo sapiens) CpG-island No: 11615
cgtggtagttgtgggaataaggtagtaaatagcggttggttgtaaggtagttagaaaattagcgttataaatagagtaatgagttagaatagcggatcgcgtaatatttttatacgttacgtttttattagtagattttgaaaatgtagcgtgttgtaaggttggttttgtatgtttattatcggtagtatttcgtattttcgcgtaataagatagagagacgcgtatgtcgtagcgttattttttttgttagtgttttattatttgttcgtttttcgcgacgtacgtaattcgttatattacgtaacgaaagtaggcgtatatttagtttattacgtttaaaaaattggcggataaaattattcgtcggacgagttagtatcgttagcggattgttttgttgtattattttatcgtgatttattaatacggtggcgatgaatttcggtatttaggcggcgaaagaggcgggtaatatggtcgatttcgattttaattcgattaagttgatcgaggtggtgtatattggtaaatagatgttgatgattcgtggttcgttgattatttttagtattgttaacgatgtgcgaaatatttcgttattatttcggcggtattcgcggtaacg

SEQ ID NO: 11616 - DNA, 628 bp, Artificial Sequence
  chemically treated genomic DNA (Homo sapiens) CpG-island No: 11616
cgttaccgcgaataccgccgaaataataacgaaatatttcgcacatcgttaacaatactaaaaataatcaacgaaccacgaatcatcaacatctatttaccaatatacaccacctcgatcaacttaatcgaattaaaatcgaaatcgaccatattacccgcctctttcgccgcctaaataccgaaattcatcgccaccgtattaataaatcacgataaaataatacaacaaaacaatccgctaacgatactaactcgtccgacgaataattttatccgccaattttttaaacgtaataaactaaatatacgcctactttcgttacgtaatataacgaattacgtacgtcgcgaaaaacgaacaaataataaaacactaacaaaaaaaataacgctacgacatacgcgtctctctatcttattacgcgaaaatacgaaatactaccgataataaacatacaaaaccaaccttacaacacgctacattttcaaaatctactaataaaaacgtaacgtataaaaatattacgcgatccgctattctaactcattactctatttataacgctaattttctaactaccttacaaccaaccgctatttactaccttattcccacaactaccacg

SEQ ID NO: 11617 - DNA, 551 bp, Artificial Sequence
  chemically treated genomic DNA (Homo sapiens) CpG-island No: 11617
gatcggatgatcgtagattacgtcggtgttatggttgatattattcgttagtacggcgtagacgtttggtgttgttgttaaatattcgtcgcggtaaattattggcggtaaaattgggttatcgttttaaagcggcggtgtttaacgatgttagtatcgttagcgtataggacggtaaagcgatagtgaaatatatggtttacggtggtttggcgattggcgaagaacgtattgttacgtcgtatgcggtattgattattagtagcggtacgttcgatgcggtttagtagacgcgttacgtattggcgaaacgtatatcgtggagtggtaggtttcggttgtggcgattattcgtacggtaatttaggcgcgtagagtaatagcgtcgatttcgataaagttcgtttggtggttagcgtcggtcgcgttattggtagtaagagaatattgcgttggtagaatagtttttgtagcgataggtgcgagttggtttgttttcgttcgttgtcgaaaacgaatatggatgaatacgaagttatgtcgtattttaa

SEQ ID NO: 11618 - DNA, 551 bp, Artificial Sequence
  chemically treated genomic DNA (Homo sapiens) CpG-island No: 11618
ttaaaatacgacataacttcgtattcatccatattcgttttcgacaacgaacgaaaacaaaccaactcgcacctatcgctacaaaaactattctaccaacgcaatattctcttactaccaataacgcgaccgacgctaaccaccaaacgaactttatcgaaatcgacgctattactctacgcgcctaaattaccgtacgaataatcgccacaaccgaaacctaccactccacgatatacgtttcgccaatacgtaacgcgtctactaaaccgcatcgaacgtaccgctactaataatcaataccgcatacgacgtaacaatacgttcttcgccaatcgccaaaccaccgtaaaccatatatttcactatcgctttaccgtcctatacgctaacgatactaacatcgttaaacaccgccgctttaaaacgataacccaattttaccgccaataatttaccgcgacgaatatttaacaacaacaccaaacgtctacgccgtactaacgaataatatcaaccataacaccgacgtaatctacgatcatccgatc

SEQ ID NO: 11619 - DNA, 551 bp, Artificial Sequence
  chemically treated genomic DNA (Homo sapiens) CpG-island No: 11619
ttgagatacgatatagtttcgtgtttatttatgttcgttttcggtaacggacgagaataggttaattcgtatttatcgttgtaaaagttgttttgttagcgtaatgtttttttgttgttaataacgcgatcgacgttgattattagacgggttttgtcgagatcgacgttgttgttttgcgcgtttgggttgtcgtgcgggtaatcgttatagtcggagtttgttattttacggtgtgcgtttcgttagtgcgtgacgcgtttgttgagtcgtatcgaacgtgtcgttgttgatggttagtatcgtatacggcgtggtaatgcgtttttcgttaatcgttagattatcgtaaattatgtgttttattgtcgttttatcgttttgtacgttgacggtgttggtatcgttagatatcgtcgttttaaggcgataatttagttttgtcgttagtaatttgtcgcgacgggtgtttggtagtagtattaggcgtttgcgtcgtgttggcgaatagtgttagttatgatatcggcgtaatttacgattattcgatt

SEQ ID NO: 11620 - DNA, 551 bp, Artificial Sequence
  chemically treated genomic DNA (Homo sapiens) CpG-island No: 11620
aatcgaataatcgtaaattacgccgatatcataactaacactattcgccaacacgacgcaaacgcctaatactactaccaaacacccgtcgcgacaaattactaacgacaaaactaaattatcgccttaaaacgacgatatctaacgataccaacaccgtcaacgtacaaaacgataaaacgacaataaaacacataatttacgataatctaacgattaacgaaaaacgcattaccacgccgtatacgatactaaccatcaacaacgacacgttcgatacgactcaacaaacgcgtcacgcactaacgaaacgcacaccgtaaaataacaaactccgactataacgattacccgcacgacaacccaaacgcgcaaaacaacaacgtcgatctcgacaaaacccgtctaataatcaacgtcgatcgcgttattaacaacaaaaaaacattacgctaacaaaacaacttttacaacgataaatacgaattaacctattctcgtccgttaccgaaaacgaacataaataaacacgaaactatatcgtatctcaa

SEQ ID NO: 11621 - DNA, 547 bp, Artificial Sequence
  chemically treated genomic DNA (Homo sapiens) CpG-island No: 11621
gaggtggttggcgtgtcgtttagcgagtttagcgttattattatcgcgtcgttgtttgcgtttagtttcgttttgtacggcggtatataattattaaataggcgttgcggatttatatcgacggtgttgtattttttatcgttttttatcgcgtcgtatgcggtaaagtgtttgacgttggttattatcgagtagcgatttgtcgggtttttattttgtatcgtttttattatggttttatttattgttgaggtgagatacgtattttcgttaaaattttcggaagtacgtttttagcgcggatcgcgcgagatatcgattatcggtgtttaggttatatttaggttattatttgtcgttttataagtagagatacgttcgatcgtttttattgtatcgaggttaaaagacgaggttagatcgaggttaatcgggaatatcgtgcgttgatcgtgtagtacgtcgtaagtaaagaaaagaggaatttttaggcggtttaattttattatttgattttgtatggcgcggataatttgacgggttacgg

SEQ ID NO: 11622 - DNA, 547 bp, Artificial Sequence
  chemically treated genomic DNA (Homo sapiens) CpG-island No: 11622
ccgtaacccgtcaaattatccgcgccatacaaaatcaaataataaaattaaaccgcctaaaaattcctcttttctttacttacgacgtactacacgatcaacgcacgatattcccgattaacctcgatctaacctcgtcttttaacctcgatacaataaaaacgatcgaacgtatctctacttataaaacgacaaataataacctaaatataacctaaacaccgataatcgatatctcgcgcgatccgcgctaaaaacgtacttccgaaaattttaacgaaaatacgtatctcacctcaacaataaataaaaccataataaaaacgatacaaaataaaaacccgacaaatcgctactcgataataaccaacgtcaaacactttaccgcatacgacgcgataaaaaacgataaaaaatacaacaccgtcgatataaatccgcaacgcctatttaataattatataccgccgtacaaaacgaaactaaacgcaaacaacgacgcgataataataacgctaaactcgctaaacgacacgccaaccacctc

SEQ ID NO: 11623 - DNA, 547 bp, Artificial Sequence
  chemically treated genomic DNA (Homo sapiens) CpG-island No: 11623
tcgtaattcgttagattattcgcgttatgtaggattaggtgatggaattaagtcgtttgaaaattttttttttttttgtttacgacgtgttgtacggttagcgtacggtgttttcgattagtttcggtttggtttcgttttttaatttcgatgtagtgaaaacggtcggacgtgtttttgtttatgaagcggtagatgatggtttgaatatgatttgggtatcgatggtcgatgtttcgcgcgattcgcgttggggacgtgttttcgaaggttttggcgaagatacgtattttattttaataatgggtaaaattatggtggaagcgatgtagggtaaaagttcggtagatcgttattcggtgatgattagcgttaaatattttgtcgtatacggcgcggtagaaggcggtaaagagtataatatcgtcgatatgagttcgtagcgtttgtttaatgattatatgtcgtcgtataaagcggggttggacgtaggtagcggcgcggtgatggtggcgttgaattcgttgaacggtacgttagttatttt

SEQ ID NO: 11624 - DNA, 547 bp, Artificial Sequence
  chemically treated genomic DNA (Homo sapiens) CpG-island No: 11624
aaaataactaacgtaccgttcaacgaattcaacgccaccatcaccgcgccgctacctacgtccaaccccgctttatacgacgacatataatcattaaacaaacgctacgaactcatatcgacgatattatactctttaccgccttctaccgcgccgtatacgacaaaatatttaacgctaatcatcaccgaataacgatctaccgaacttttaccctacatcgcttccaccataattttacccattattaaaataaaatacgtatcttcgccaaaaccttcgaaaacacgtccccaacgcgaatcgcgcgaaacatcgaccatcgatacccaaatcatattcaaaccatcatctaccgcttcataaacaaaaacacgtccgaccgttttcactacatcgaaattaaaaaacgaaaccaaaccgaaactaatcgaaaacaccgtacgctaaccgtacaacacgtcgtaaacaaaaaaaaaaaaaattttcaaacgacttaattccatcacctaatcctacataacgcgaataatctaacgaattacga

SEQ ID NO: 11625 - DNA, 641 bp, Artificial Sequence
  chemically treated genomic DNA (Homo sapiens) CpG-island No: 11625
gaagcgaaggggttttttcgagtagcggcgggggtattcggcgtgcgcgtcgagttgtggttggatggcgcgttgttggtacgtacggcgtttcgggtcggtttaggttagtttttttgggtcgagcgtttttatttcgaggcgttgttatcggtacgtcgtttgtcgttgcggttgcgcggtttgggttcgggaagcgcggtgttgggtcgcgtggttttggcgttggaggagttggacgttttacgcgcgtttgtcgtcggtttggagcgttggttttcgttgttcggggcgtcggcgggcgtagcgttgcgggcgcggattcgggcgcgtcgtttgcgcgtgttgtcgttcgagcgttataaggagttggcggagttttttattttttattatgcgcgtttttgcggggttttggagttcgcgttgtttgcgtaggttaaggaggagttggcggtagttatggtgcgcgtgttgcgggttatcggtcgggcgtaggtgcggtatcgcgatagcgcggatcggggttattaggggtagatcgataacgcgtttcgggtaggagttggggcgtaggatttgagttgtatttgtaatgggggagatattttgaaggggtgtgaggggcgtggtttaagtgt

SEQ ID NO: 11626 - DNA, 641 bp, Artificial Sequence
  chemically treated genomic DNA (Homo sapiens) CpG-island No: 11626
acacttaaaccacgcccctcacaccccttcaaaatatctcccccattacaaatacaactcaaatcctacgccccaactcctacccgaaacgcgttatcgatctacccctaataaccccgatccgcgctatcgcgataccgcacctacgcccgaccgataacccgcaacacgcgcaccataactaccgccaactcctccttaacctacgcaaacaacgcgaactccaaaaccccgcaaaaacgcgcataataaaaaataaaaaactccgccaactccttataacgctcgaacgacaacacgcgcaaacgacgcgcccgaatccgcgcccgcaacgctacgcccgccgacgccccgaacaacgaaaaccaacgctccaaaccgacgacaaacgcgcgtaaaacgtccaactcctccaacgccaaaaccacgcgacccaacaccgcgcttcccgaacccaaaccgcgcaaccgcaacgacaaacgacgtaccgataacaacgcctcgaaataaaaacgctcgacccaaaaaaactaacctaaaccgacccgaaacgccgtacgtaccaacaacgcgccatccaaccacaactcgacgcgcacgccgaatacccccgccgctactcgaaaaaaccccttcgcttc

SEQ ID NO: 11627 - DNA, 641 bp, Artificial Sequence
  chemically treated genomic DNA (Homo sapiens) CpG-island No: 11627
atatttggattacgttttttatatttttttaaggtgttttttttattataggtgtaatttaggttttgcgttttaatttttgttcgaagcgcgttatcggtttatttttggtagtttcggttcgcgttgtcgcggtgtcgtatttgcgttcggtcggtggttcgtagtacgcgtattatggttgtcgttagtttttttttggtttgcgtaggtagcgcgggttttagggtttcgtagaggcgcgtatagtggaaggtgaggaatttcgttagttttttgtagcgttcggacggtagtacgcgtaggcgacgcgttcgaattcgcgttcgtagcgttgcgttcgtcggcgtttcgagtagcgggaattagcgttttagatcggcggtaggcgcgcgtggggcgtttagtttttttagcgttagggttacgcggtttagtatcgcgtttttcgggtttaagtcgcgtagtcgtagcgataggcgacgtgtcggtggtagcgtttcgaagtggaagcgttcggtttagaagagttggtttgggtcggttcgaggcgtcgtgcgtgttagtagcgcgttatttagttatagttcggcgcgtacgtcgggtgttttcgtcgttgttcggggaagttttttcgtttt

SEQ ID NO: 11628 - DNA, 641 bp, Artificial Sequence
  chemically treated genomic DNA (Homo sapiens) CpG-island No: 11628
aaaacgaaaaaacttccccgaacaacgacgaaaacacccgacgtacgcgccgaactataactaaataacgcgctactaacacgcacgacgcctcgaaccgacccaaaccaactcttctaaaccgaacgcttccacttcgaaacgctaccaccgacacgtcgcctatcgctacgactacgcgacttaaacccgaaaaacgcgatactaaaccgcgtaaccctaacgctaaaaaaactaaacgccccacgcgcgcctaccgccgatctaaaacgctaattcccgctactcgaaacgccgacgaacgcaacgctacgaacgcgaattcgaacgcgtcgcctacgcgtactaccgtccgaacgctacaaaaaactaacgaaattcctcaccttccactatacgcgcctctacgaaaccctaaaacccgcgctacctacgcaaaccaaaaaaaaactaacgacaaccataatacgcgtactacgaaccaccgaccgaacgcaaatacgacaccgcgacaacgcgaaccgaaactaccaaaaataaaccgataacgcgcttcgaacaaaaattaaaacgcaaaacctaaattacacctataataaaaaaaacaccttaaaaaaatataaaaaacgtaatccaaatat

SEQ ID NO: 11629 - DNA, 563 bp, Artificial Sequence
  chemically treated genomic DNA (Homo sapiens) CpG-island No: 11629
cgttatcggtgggcgtggaggtcgaggcgggtttcgtagtggtcgggatttttagggggcggattcggggtttttttcgtggtcggggtggtttattacgtttcgttttcgtgggtttgcggttacggcgtcgggggttatcgggttttgggttgggtgggtagaagtcgatgttttttagtggcgagagggtcggacgggagcggtagttggagattaggttaggtaagcgtcgggggttgaggcggatgtcggcgggaatatcggttttgttttcgttcgtttcgaattcgtatttttgggcgtatagttttttgggggtttggaagggtgggtcgcggcgtcgtagtaggtggaaggaggatgttttgagtagtttttttggtttggtagagtagaagatgggcgaggtgaggttatttttgggttcggaggtcggcgcgggaggcggcggtggcggaggcgggggtggtggcgtcgtttggtgggggttattttggattaggtttagcggttcggcgttgatcgtggagggtagtttaggcggtttgttggggtttagg

SEQ ID NO: 11630 - DNA, 563 bp, Artificial Sequence
  chemically treated genomic DNA (Homo sapiens) CpG-island No: 11630
cctaaaccccaacaaaccgcctaaactaccctccacgatcaacgccgaaccgctaaacctaatccaaaataacccccaccaaacgacgccaccacccccgcctccgccaccgccgcctcccgcgccgacctccgaacccaaaaataacctcacctcgcccatcttctactctaccaaaccaaaaaaactactcaaaacatcctccttccacctactacgacgccgcgacccacccttccaaacccccaaaaaactatacgcccaaaaatacgaattcgaaacgaacgaaaacaaaaccgatattcccgccgacatccgcctcaacccccgacgcttacctaacctaatctccaactaccgctcccgtccgaccctctcgccactaaaaaacatcgacttctacccacccaacccaaaacccgataacccccgacgccgtaaccgcaaacccacgaaaacgaaacgtaataaaccaccccgaccacgaaaaaaaccccgaatccgccccctaaaaatcccgaccactacgaaacccgcctcgacctccacgcccaccgataacg

SEQ ID NO: 11631 - DNA, 563 bp, Artificial Sequence
  chemically treated genomic DNA (Homo sapiens) CpG-island No: 11631
tttggattttaataaatcgtttgaattgttttttacggttaacgtcgagtcgttgggtttgatttagagtggtttttattaggcggcgttattattttcgttttcgttatcgtcgtttttcgcgtcggttttcgaatttaagggtggttttatttcgtttattttttgttttattaagttaaagaagttgtttaagatattttttttttatttgttgcggcgtcgcgatttatttttttagatttttaagaagttgtacgtttaggagtacgagttcgaggcggacgaggataaggtcgatgttttcgtcgatattcgttttaattttcggcgtttgtttgatttggtttttagttgtcgttttcgttcggttttttcgttattgggggatatcgatttttgtttatttaatttaggattcgatggttttcggcgtcgtggtcgtaagtttacgaaggcgaaacgtgatgggttatttcggttacgggggaggtttcggattcgttttttggaggtttcgattattgcggggttcgtttcggtttttacgtttatcgatggcg

SEQ ID NO: 11632 - DNA, 563 bp, Artificial Sequence
  chemically treated genomic DNA (Homo sapiens) CpG-island No: 11632
cgccatcgataaacgtaaaaaccgaaacgaaccccgcaataatcgaaacctccaaaaaacgaatccgaaacctcccccgtaaccgaaataacccatcacgtttcgccttcgtaaacttacgaccacgacgccgaaaaccatcgaatcctaaattaaataaacaaaaatcgatatcccccaataacgaaaaaaccgaacgaaaacgacaactaaaaaccaaatcaaacaaacgccgaaaattaaaacgaatatcgacgaaaacatcgaccttatcctcgtccgcctcgaactcgtactcctaaacgtacaacttcttaaaaatctaaaaaaataaatcgcgacgccgcaacaaataaaaaaaaaatatcttaaacaacttctttaacttaataaaacaaaaaataaacgaaataaaaccacccttaaattcgaaaaccgacgcgaaaaacgacgataacgaaaacgaaaataataacgccgcctaataaaaaccactctaaatcaaacccaacgactcgacgttaaccgtaaaaaacaattcaaacgatttattaaaatccaaa

SEQ ID NO: 11633 - DNA, 661 bp, Artificial Sequence
  chemically treated genomic DNA (Homo sapiens) CpG-island No: 11633
cgttttttacgttattttttgtttcgttatttttttcgcgcgcgcgtagggtattgtggggcgttatcgcgggttatcgcggtttcgtttattttattttttattttattagttgttttcgcgcgatagaggcggtgcgcggattacgtttttcggcgtgtatcgcgcggatttcgttttatgtgttttattggtttttgggaaatcgagtgcggttgttttttcgtcggtttttacgtcgtcgtgttcggtatttgaaatttcggtaagttcggcggcgttttagtttcgtttttttttttttttgtttacgaatttcgttttagttcgtttcgtttcgcgtcggggtcggagtcgtagttcgagcggcggggtaagatggcggcggtagttcgggtcgcggggttcgggtttattggggtgggcggggcggagttgggtcgttagttgtttcggggttttttttataagttacgggttttagagggtttttcggggcggtttcgggttcggtagttgcggcgaaatttggcgtcgagaggggggtttttttagggtttcgggacgtattcgtgggtttttgggggcgtttatggggcgttttcgagaggatttggggcgtttttgggtttagatcgagtttaaggtttgttttttatta

SEQ ID NO: 11634 - DNA, 661 bp, Artificial Sequence
  chemically treated genomic DNA (Homo sapiens) CpG-island No: 11634
taataaaaaacaaaccttaaactcgatctaaacccaaaaacgccccaaatcctctcgaaaacgccccataaacgcccccaaaaacccacgaatacgtcccgaaaccctaaaaaaacccccctctcgacgccaaatttcgccgcaactaccgaacccgaaaccgccccgaaaaaccctctaaaacccgtaacttataaaaaaaaccccgaaacaactaacgacccaactccgccccgcccaccccaataaacccgaaccccgcgacccgaactaccgccgccatcttaccccgccgctcgaactacgactccgaccccgacgcgaaacgaaacgaactaaaacgaaattcgtaaacaaaaaaaaaaaaaaacgaaactaaaacgccgccgaacttaccgaaatttcaaataccgaacacgacgacgtaaaaaccgacgaaaaaacaaccgcactcgatttcccaaaaaccaataaaacacataaaacgaaatccgcgcgatacacgccgaaaaacgtaatccgcgcaccgcctctatcgcgcgaaaacaactaataaaataaaaaataaaataaacgaaaccgcgataacccgcgataacgccccacaataccctacgcgcgcgcgaaaaaaataacgaaacaaaaaataacgtaaaaaacg

SEQ ID NO: 11635 - DNA, 661 bp, Artificial Sequence
  chemically treated genomic DNA (Homo sapiens) CpG-island No: 11635
tgatggagggtaggttttaggttcggtttaggtttagagacgttttaagttttttcggagacgttttatagacgtttttaggaatttacggatgcgtttcggggttttgagaaggtttttttttcggcgttaggtttcgtcgtagttgtcgggttcgagatcgtttcgagaagttttttaggattcgtggtttgtggggaggatttcgggataattagcgatttaatttcgtttcgtttattttaataggttcgagtttcgcggttcggattgtcgtcgttattttatttcgtcgttcgggttgcggtttcggtttcggcgcggggcggggcgggttggggcggggttcgtgagtaaaggaggagagaggcggagttaaagcgtcgtcgagtttgtcgggattttaagtatcgagtacggcgacgtgaaggtcggcgggaaggtaatcgtattcggttttttagaagttaatgggatatatggggcggggttcgcgcgatgtacgtcgggaggcgtagttcgcgtatcgtttttgtcgcgcggggatagttaatggggtgagaggtgaagtgggcggggtcgcggtagttcgcgatgacgttttatagtgttttgcgcgcgcgcggaaagggtggcggaataggaggtgacgtaagaggcg

SEQ ID NO: 11636 - DNA, 661 bp, Artificial Sequence
  chemically treated genomic DNA (Homo sapiens) CpG-island No: 11636
cgcctcttacgtcacctcctattccgccaccctttccgcgcgcgcgcaaaacactataaaacgtcatcgcgaactaccgcgaccccgcccacttcacctctcaccccattaactatccccgcgcgacaaaaacgatacgcgaactacgcctcccgacgtacatcgcgcgaaccccgccccatatatcccattaacttctaaaaaaccgaatacgattaccttcccgccgaccttcacgtcgccgtactcgatacttaaaatcccgacaaactcgacgacgctttaactccgcctctctcctcctttactcacgaaccccgccccaacccgccccgccccgcgccgaaaccgaaaccgcaacccgaacgacgaaataaaataacgacgacaatccgaaccgcgaaactcgaacctattaaaataaacgaaacgaaattaaatcgctaattatcccgaaatcctccccacaaaccacgaatcctaaaaaacttctcgaaacgatctcgaacccgacaactacgacgaaacctaacgccgaaaaaaaaaccttctcaaaaccccgaaacgcatccgtaaattcctaaaaacgtctataaaacgtctccgaaaaaacttaaaacgtctctaaacctaaaccgaacctaaaacctaccctccatca

SEQ ID NO: 11637 - DNA, 1449 bp, Artificial Sequence
  chemically treated genomic DNA (Homo sapiens) CpG-island No: 11637
agcgtttttcgacgagattttttttttcgggaagaggaggaggaggaggcggttttcgagcggcgtcgatttttttggttgtttttgtcgtttcgtttttcgtcgtttagtttttcggagtcgtataggatttttcgtttaggtgaggaggtcggagtaggagagggttttcgggggtcggatttgttaagtcggtttatcgtgatggttcgtttgatggcgaagaggtcgtggttcgtgaggttttggatggagggtggtacggtttttcggcggcggttgtcgcggttattatacgaggtggagttagagggcggcggggcgggcgtcggggttttttcgttgttatttttagatcgttttttatttcgggatcgcgatcgtttttttttttttttgttgtcgttatcgtttcggtgtttttcgcggtgtcgttcgcgtttcgaggacgacgatgaggaagtggtcgggggcggggaggcggagcgtcgtcgtcgtcgtcgtttttttcgggatcgcgatttgcggttgttttcgcggcggcggtcggtgttgcgcgagcggcggcgggtggagcgggagcgggagcgggagcgggagcggcggcgggcggacgacgaggcgtgggagtcgggtttgcggtttcgcgagcggtgttttttggagttttagggcgaggtcggggcgggcggcgttggttgggtgttcgacgaggacgaggcggtttttttggtttcgtcgttgcgtttgcgttttcgtttggattttttgcgcgtgggcggattagtagcggcggtcggggcgggcgcgggcgtcggggagggcgagcgttggcggtagcgttttcgtcgttgggttaggattttgcggcgtaggtttaggtcgttttagcgcgagtcggcggcgggcggcgcgggagtcggtttttttaggtttatttgtagggcgttttcgtcgttcgatttcgtatgtagggataagaagtcgtttttttcgggggttcgcggagcgggaggttgaggaaggggttgggtcgtgggggtggtcgaggcggtcggtgtaggtcgggcggttcggtcgtcggggcggaagagggatagcgttagtttgggtttttttttcggttggacgattttttttttttcgattttcgagtcgtcgggcggtagtaggggcggcgggagggcggttttattagcggttattatttttatcgagattttgttttttcgataagtttttgtttcggtttttattacgaagattcgtcggcgtatggttttattagttcgggtggagtttatttggggcggcgttttaggggcgggagtcggttgtgtgggttgcgcgttcgggcgggggttttcgttatttgggaagttttggtttaggttgttgttatcgtagatgttcgttagggttttcgagatgcggttgatgttttgggat

SEQ ID NO: 11638 - DNA, 1449 bp, Artificial Sequence
  chemically treated genomic DNA (Homo sapiens) CpG-island No: 11638
atcccaaaacatcaaccgcatctcgaaaaccctaacgaacatctacgataacaacaacctaaaccaaaacttcccaaataacgaaaacccccgcccgaacgcgcaacccacacaaccgactcccgcccctaaaacgccgccccaaataaactccacccgaactaataaaaccatacgccgacgaatcttcgtaataaaaaccgaaacaaaaacttatcgaaaaaacaaaatctcgataaaaataataaccgctaataaaaccgccctcccgccgcccctactaccgcccgacgactcgaaaatcgaaaaaaaaaaaatcgtccaaccgaaaaaaaaacccaaactaacgctatccctcttccgccccgacgaccgaaccgcccgacctacaccgaccgcctcgaccacccccacgacccaaccccttcctcaacctcccgctccgcgaacccccgaaaaaaacgacttcttatccctacatacgaaatcgaacgacgaaaacgccctacaaataaacctaaaaaaaccgactcccgcgccgcccgccgccgactcgcgctaaaacgacctaaacctacgccgcaaaatcctaacccaacgacgaaaacgctaccgccaacgctcgccctccccgacgcccgcgcccgccccgaccgccgctactaatccgcccacgcgcaaaaaatccaaacgaaaacgcaaacgcaacgacgaaaccaaaaaaaccgcctcgtcctcgtcgaacacccaaccaacgccgcccgccccgacctcgccctaaaactccaaaaaacaccgctcgcgaaaccgcaaacccgactcccacgcctcgtcgtccgcccgccgccgctcccgctcccgctcccgctcccgctccacccgccgccgctcgcgcaacaccgaccgccgccgcgaaaacaaccgcaaatcgcgatcccgaaaaaaacgacgacgacgacgacgctccgcctccccgcccccgaccacttcctcatcgtcgtcctcgaaacgcgaacgacaccgcgaaaaacaccgaaacgataacgacaacaaaaaaaaaaaaaaacgatcgcgatcccgaaataaaaaacgatctaaaaataacaacgaaaaaaccccgacgcccgccccgccgccctctaactccacctcgtataataaccgcgacaaccgccgccgaaaaaccgtaccaccctccatccaaaacctcacgaaccacgacctcttcgccatcaaacgaaccatcacgataaaccgacttaacaaatccgacccccgaaaaccctctcctactccgacctcctcacctaaacgaaaaatcctatacgactccgaaaaactaaacgacgaaaaacgaaacgacaaaaacaaccaaaaaaatcgacgccgctcgaaaaccgcctcctcctcctcctcttcccgaaaaaaaaaatctcgtcgaaaaacgct

SEQ ID NO: 11639 - DNA, 1449 bp, Artificial Sequence
  chemically treated genomic DNA (Homo sapiens) CpG-island No: 11639
gttttagagtattagtcgtatttcggagattttggcgggtatttacgatgataatagtttgagttaggattttttaggtgacgagagttttcgttcggacgcgtagtttatatagtcgattttcgtttttggaacgtcgttttaggtggattttattcgggttgatggagttatgcgtcggcgggttttcgtggtggggatcgaggtagaggtttgtcgggaaggtaaggtttcggtggaggtggtgatcgttggtggagtcgttttttcgtcgtttttgttgtcgttcggcgattcggagatcgaggaaggggagatcgtttagtcggaggaggagtttaggttggcgttgtttttttttcgtttcggcggtcgggtcgttcggtttatatcggtcgtttcggttatttttacggtttagttttttttttagtttttcgtttcgcgggttttcgagggggacgattttttgtttttgtatgcggagtcggacggcgagggcgttttgtaggtggatttaggggagtcggttttcgcgtcgttcgtcgtcgattcgcgttggggcggtttggatttgcgtcgtaagattttgatttaacggcgggagcgttatcgttagcgttcgtttttttcggcgttcgcgttcgtttcggtcgtcgttgttggttcgtttacgcgtaagaagtttaggcgggaacgtaagcgtagcggcgaggttaaggaggtcgtttcgttttcgtcgggtatttagttagcgtcgttcgtttcggtttcgttttgggattttaagaagtatcgttcgcgggatcgtaagttcggtttttacgtttcgtcgttcgttcgtcgtcgttttcgttttcgttttcgttttcgttttattcgtcgtcgttcgcgtagtatcgatcgtcgtcgcgggggtagtcgtaggtcgcggtttcgggagaagcggcgacggcggcggcgtttcgttttttcgttttcggttatttttttatcgtcgttttcgaggcgcgagcggtatcgcgggaaatatcgggacggtggcggtagtaagaagaagaagaagcggtcgcggtttcggggtgagaagcggtttggggatggtagcgagaaggtttcggcgttcgtttcgtcgttttttggttttatttcgtgtggtgatcgcgatagtcgtcgtcggggggtcgtgttattttttatttaggattttacggattacgattttttcgttattaagcggattattacggtgggtcggtttgataagttcgattttcgaggatttttttttgtttcggtttttttatttaagcgggaggttttgtacgatttcgagggattgagcggcgaggagcggggcggtaagagtagttagaaggatcggcgtcgttcgggggtcgttttttttttttttttttttcgggagaaggggtttcgtcggaaggcgtt

SEQ ID NO: 11640 - DNA, 1449 bp, Artificial Sequence
  chemically treated genomic DNA (Homo sapiens) CpG-island No: 11640
aacgccttccgacgaaaccccttctcccgaaaaaaaaaaaaaaaaaaaacgacccccgaacgacgccgatccttctaactactcttaccgccccgctcctcgccgctcaatccctcgaaatcgtacaaaacctcccgcttaaataaaaaaaccgaaacaaaaaaaaatcctcgaaaatcgaacttatcaaaccgacccaccgtaataatccgcttaataacgaaaaaatcgtaatccgtaaaatcctaaataaaaaataacacgaccccccgacgacgactatcgcgatcaccacacgaaataaaaccaaaaaacgacgaaacgaacgccgaaaccttctcgctaccatccccaaaccgcttctcaccccgaaaccgcgaccgcttcttcttcttcttactaccgccaccgtcccgatatttcccgcgataccgctcgcgcctcgaaaacgacgataaaaaaataaccgaaaacgaaaaaacgaaacgccgccgccgtcgccgcttctcccgaaaccgcgacctacgactacccccgcgacgacgatcgatactacgcgaacgacgacgaataaaacgaaaacgaaaacgaaaacgaaaacgacgacgaacgaacgacgaaacgtaaaaaccgaacttacgatcccgcgaacgatacttcttaaaatcccaaaacgaaaccgaaacgaacgacgctaactaaatacccgacgaaaacgaaacgacctccttaacctcgccgctacgcttacgttcccgcctaaacttcttacgcgtaaacgaaccaacaacgacgaccgaaacgaacgcgaacgccgaaaaaaacgaacgctaacgataacgctcccgccgttaaatcaaaatcttacgacgcaaatccaaaccgccccaacgcgaatcgacgacgaacgacgcgaaaaccgactcccctaaatccacctacaaaacgccctcgccgtccgactccgcatacaaaaacaaaaaatcgtccccctcgaaaacccgcgaaacgaaaaactaaaaaaaaaactaaaccgtaaaaataaccgaaacgaccgatataaaccgaacgacccgaccgccgaaacgaaaaaaaaacaacgccaacctaaactcctcctccgactaaacgatctccccttcctcgatctccgaatcgccgaacgacaacaaaaacgacgaaaaaacgactccaccaacgatcaccacctccaccgaaaccttaccttcccgacaaacctctacctcgatccccaccacgaaaacccgccgacgcataactccatcaacccgaataaaatccacctaaaacgacgttccaaaaacgaaaatcgactatataaactacgcgtccgaacgaaaactctcgtcacctaaaaaatcctaactcaaactattatcatcgtaaatacccgccaaaatctccgaaatacgactaatactctaaaac

SEQ ID NO: 11641 - DNA, 941 bp, Artificial Sequence
  chemically treated genomic DNA (Homo sapiens) CpG-island No: 11641
cgtagtaaatatcgtacgtttttttgtttcgtttaattttttttttgtagtagggaattgtaggcgtcgttttatttattttagtcgagcggagtgatatttttttttttttttttttttattgattttcgtttttcgttcgttttatagtcgtttaatggagggttgaagtaggatagatttcgttaattcgcgacgtttgcggggtaggtttattcgtttattggttttagttaatttaagtttcgttttttaggatcgtttttcgtttttttttacgtttttttttttttttttggagagtcgttagatttaattagtgtttgatttggtcgcgcggagggggcgggtttatgatacgtaatcgaatttcgttcgtttttcgggtaacgtttttttttttttttttttagtttttaaacggaaatagcggaatattgggttaatcgtagcgtcgtgtttttgtttggcggttaatgagagaggaagtgggggagaaattcgtttgtgagcggtaggagtttaagttagtgggcggtttagagtttcggatcgcgggcggaggggaggggtagggggcggtgttacggtttgttagttcgttcgttcgttcgttagttagtttttttcgcggtcggttcggttttttggcgttgtttggggtttttttcgttcggttttcgtttgttagttttcgttgttttgtgttttgttcggttaggtttggagtcgatattatcgttattatgtcggtcgtgtttaagggcgatgggatgcgggggttcgcggtgtttattttcgatattcggaattgtgagcgcgcggtcgggggatattggagacgcgggggaggggggagcgtgaaattgaggggtttggggattatagagggattcgggggattaaaagtttttgcggtcgtatagggatagtatagatgg

SEQ ID NO: 11642 - DNA, 941 bp, Artificial Sequence
  chemically treated genomic DNA (Homo sapiens) CpG-island No: 11642
ccatctatactatccctatacgaccgcaaaaacttttaatcccccgaatccctctataatccccaaacccctcaatttcacgctcccccctcccccgcgtctccaatatcccccgaccgcgcgctcacaattccgaatatcgaaaataaacaccgcgaacccccgcatcccatcgcccttaaacacgaccgacataataacgataatatcgactccaaacctaaccgaacaaaacacaaaacaacgaaaactaacaaacgaaaaccgaacgaaaaaaaccccaaacaacgccaaaaaaccgaaccgaccgcgaaaaaaactaactaacgaacgaacgaacgaactaacaaaccgtaacaccgccccctacccctcccctccgcccgcgatccgaaactctaaaccgcccactaacttaaactcctaccgctcacaaacgaatttctcccccacttcctctctcattaaccgccaaacaaaaacacgacgctacgattaacccaatattccgctatttccgtttaaaaactaaaaaaaaaaaaaaaaaaacgttacccgaaaaacgaacgaaattcgattacgtatcataaacccgccccctccgcgcgaccaaatcaaacactaattaaatctaacgactctccaaaaaaaaaaaaaaaaacgtaaaaaaaaacgaaaaacgatcctaaaaaacgaaacttaaattaactaaaaccaataaacgaataaacctaccccgcaaacgtcgcgaattaacgaaatctatcctacttcaaccctccattaaacgactataaaacgaacgaaaaacgaaaatcaataaaaaaaaaaaaaaaaaaaaatatcactccgctcgactaaaataaataaaacgacgcctacaattccctactacaaaaaaaaaattaaacgaaacaaaaaaacgtacgatatttactacg

SEQ ID NO: 11643 - DNA, 941 bp, Artificial Sequence
  chemically treated genomic DNA (Homo sapiens) CpG-island No: 11643
ttatttatgttgtttttatacggtcgtagaggtttttgatttttcgggtttttttgtgatttttaaattttttaattttacgtttttttttttttcgcgtttttagtgtttttcggtcgcgcgtttatagtttcggatgtcggagatgaatatcgcgagttttcgtattttatcgtttttggatacggtcggtatgatggcggtggtgtcggttttaggtttggtcggatagggtatagagtagcgggggttggtaagcggggatcgggcggaaaggattttaggtagcgttaaggagtcgagtcggtcgcggggagggttggttggcgggcgggcgggcgggttggtaggtcgtggtatcgttttttgtttttttttttcgttcgcggttcggagttttgagtcgtttattggtttgagtttttgtcgtttataggcgggttttttttttatttttttttttattggtcgttaagtaaaggtacgacgttacgattggtttagtgtttcgttattttcgtttgggagttggggaggggggggaggaggcgttgttcgagagacgggcggggttcgattgcgtattatgggttcgtttttttcgcgcggttaggttaaatattgattggatttagcggttttttaaggaggaagggagggacgtgaaggaaggcggggaacggttttaggaggcgggatttaggttgattgggattaatgaacgggtagatttgtttcgtaggcgtcgcggattggcgagatttgttttattttagttttttattgggcggttgtggggcgggcggaaggcgaagattagtagagaaggaaagaggggagggtgttatttcgttcggttgggataggtggagcgacgtttgtaattttttgttgtagagaaggggttgggcgaggtaagagagcgtgcggtgtttattgcg

SEQ ID NO: 11644 - DNA, 941 bp, Artificial Sequence
  chemically treated genomic DNA (Homo sapiens) CpG-island No: 11644
cgcaataaacaccgcacgctctcttacctcgcccaaccccttctctacaacaaaaaattacaaacgtcgctccacctatcccaaccgaacgaaataacaccctcccctctttccttctctactaatcttcgccttccgcccgccccacaaccgcccaataaaaaactaaaataaaacaaatctcgccaatccgcgacgcctacgaaacaaatctacccgttcattaatcccaatcaacctaaatcccgcctcctaaaaccgttccccgccttccttcacgtccctcccttcctccttaaaaaaccgctaaatccaatcaatatttaacctaaccgcgcgaaaaaaacgaacccataatacgcaatcgaaccccgcccgtctctcgaacaacgcctcctcccccccctccccaactcccaaacgaaaataacgaaacactaaaccaatcgtaacgtcgtacctttacttaacgaccaataaaaaaaaaaataaaaaaaaaacccgcctataaacgacaaaaactcaaaccaataaacgactcaaaactccgaaccgcgaacgaaaaaaaaaaacaaaaaacgataccacgacctaccaacccgcccgcccgcccgccaaccaaccctccccgcgaccgactcgactccttaacgctacctaaaatcctttccgcccgatccccgcttaccaacccccgctactctataccctatccgaccaaacctaaaaccgacaccaccgccatcataccgaccgtatccaaaaacgataaaatacgaaaactcgcgatattcatctccgacatccgaaactataaacgcgcgaccgaaaaacactaaaaacgcgaaaaaaaaaaaaacgtaaaattaaaaaatttaaaaatcacaaaaaaacccgaaaaatcaaaaacctctacgaccgtataaaaacaacataaataa

SEQ ID NO: 11645 - DNA, 977 bp, Artificial Sequence
  chemically treated genomic DNA (Homo sapiens) CpG-island No: 11645
taattattcgtcgacgttcgtagttcgttgtttgggggtcgttttttgtagcgttaggttttcgcgcggattatagtttttagcgtatatttcggtcggggggttcgaggggtcgttttgttttagggataaggtttaggttgcgttcgcggtttcgggtagttatagttatgtacgtagtttttatttttcgcgttgttaatcgcgttcgttgtagtttaatttattttgggtcgcggtttttatagggtttgtgaggagcgttttttttcgtttcgggcgttcgttacgtcgcgttcgaaggaggggtcgaggtcgggtttattttttcgggaggattttttcggtttcgtggggtgttatgtttattgcggttcgaggttggtcgcggggttttgttggagggcgttgagagtcgggtttcgaggtcgtacggtcggagattataatttttaggaggtatcgcggcggcggcgtttatacgttattcgggtttcgtcggtggttcggggaagtagtacgggcggggggtaggggttggggtcgatcgggaggtcggtgttaaggatgggggtcgttcggttgtttcgcgcgtgaggaggtcgaggggcgcgttatttcggttcggggcggtcgttttaggggtttcgttattttcgttcggttcggtagtcgtggttcgggatgcggagtcgggggtcgtcggtggagttgcgcggggtgagcggcgcggggaacggggattgtttgtcgttttcgttttcgttttttatcggcggatttcggcgggtattcgagagtcgcgcggttaggtttttttagttttttgtcgtttggggggtacgggtgaatttgtcgttttatttttatttcgtttcgtttcgttcgtatagttaaatcggaagggacgagtttgttttttgaaagggtttttttttttgtttttgcggagggcgttttagttatggtttttagga

SEQ ID NO: 11646 - DNA, 977 bp, Artificial Sequence
  chemically treated genomic DNA (Homo sapiens) CpG-island No: 11646
tcctaaaaaccataactaaaacgccctccgcaaaaacaaaaaaaaaaaccctttcaaaaaacaaactcgtcccttccgatttaactatacgaacgaaacgaaacgaaataaaaataaaacgacaaattcacccgtaccccccaaacgacaaaaaactaaaaaaacctaaccgcgcgactctcgaatacccgccgaaatccgccgataaaaaacgaaaacgaaaacgacaaacaatccccgttccccgcgccgctcaccccgcgcaactccaccgacgacccccgactccgcatcccgaaccacgactaccgaaccgaacgaaaataacgaaacccctaaaacgaccgccccgaaccgaaataacgcgcccctcgacctcctcacgcgcgaaacaaccgaacgacccccatccttaacaccgacctcccgatcgaccccaacccctaccccccgcccgtactacttccccgaaccaccgacgaaacccgaataacgtataaacgccgccgccgcgatacctcctaaaaattataatctccgaccgtacgacctcgaaacccgactctcaacgccctccaacaaaaccccgcgaccaacctcgaaccgcaataaacataacaccccacgaaaccgaaaaaatcctcccgaaaaaataaacccgacctcgacccctccttcgaacgcgacgtaacgaacgcccgaaacgaaaaaaaacgctcctcacaaaccctataaaaaccgcgacccaaaataaattaaactacaacgaacgcgattaacaacgcgaaaaataaaaactacgtacataactataactacccgaaaccgcgaacgcaacctaaaccttatccctaaaacaaaacgacccctcgaaccccccgaccgaaatatacgctaaaaactataatccgcgcgaaaacctaacgctacaaaaaacgacccccaaacaacgaactacgaacgtcgacgaataatta

SEQ ID NO: 11647 - DNA, 977 bp, Artificial Sequence
  chemically treated genomic DNA (Homo sapiens) CpG-island No: 11647
ttttgagggttatggttggggcgtttttcgtaggagtaagaaaaaaaatttttttaaagggtaggttcgtttttttcgatttggttgtacgggcggggcggggcggggtgggagtggggcggtaggtttattcgtgttttttaaacggtagagggttaagagggtttggtcgcgcggttttcgaatgttcgtcggggttcgtcggtgggggacgagggcgagggcggtaggtagttttcgtttttcgcgtcgtttatttcgcgtagttttatcggcggttttcggtttcgtatttcgggttacgattgtcgggtcgggcgggggtggcggggtttttggggcggtcgtttcgggtcggggtggcgcgtttttcggtttttttacgcgcggggtagtcgggcggtttttatttttggtatcggtttttcggtcggttttagtttttgtttttcgttcgtgttgttttttcgggttatcggcggggttcgagtgacgtgtgggcgtcgtcgtcgcggtgttttttgggagttgtagttttcggtcgtgcggtttcggggttcggtttttagcgttttttagtagagtttcgcggttagtttcgggtcgtaatggatatgatattttacgaagtcgaaggagttttttcggggagatgagttcggtttcggtttttttttcggacgcggcgtagcgggcgttcggggcggggggaagcgttttttatagattttgtgggggtcgcggtttaggatgggttggattgtaacggacgcgattagtaacgcgaaaaataggagttgcgtgtatgattgtgattgttcggagtcgcgaacgtagtttggattttatttttgaggtaggacggtttttcggatttttcgatcgagatgtacgttgggaattgtagttcgcgcggggatttggcgttgtagggggcggtttttaaatagcgggttgcgggcgtcggcgggtggttg

SEQ ID NO: 11648 - DNA, 977 bp, Artificial Sequence
  chemically treated genomic DNA (Homo sapiens) CpG-island No: 11648
caaccacccgccgacgcccgcaacccgctatttaaaaaccgccccctacaacgccaaatccccgcgcgaactacaattcccaacgtacatctcgatcgaaaaatccgaaaaaccgtcctacctcaaaaataaaatccaaactacgttcgcgactccgaacaatcacaatcatacacgcaactcctatttttcgcgttactaatcgcgtccgttacaatccaacccatcctaaaccgcgacccccacaaaatctataaaaaacgcttccccccgccccgaacgcccgctacgccgcgtccgaaaaaaaaaccgaaaccgaactcatctccccgaaaaaactccttcgacttcgtaaaatatcatatccattacgacccgaaactaaccgcgaaactctactaaaaaacgctaaaaaccgaaccccgaaaccgcacgaccgaaaactacaactcccaaaaaacaccgcgacgacgacgcccacacgtcactcgaaccccgccgataacccgaaaaaacaacacgaacgaaaaacaaaaactaaaaccgaccgaaaaaccgataccaaaaataaaaaccgcccgactaccccgcgcgtaaaaaaaccgaaaaacgcgccaccccgacccgaaacgaccgccccaaaaaccccgccacccccgcccgacccgacaatcgtaacccgaaatacgaaaccgaaaaccgccgataaaactacgcgaaataaacgacgcgaaaaacgaaaactacctaccgccctcgccctcgtcccccaccgacgaaccccgacgaacattcgaaaaccgcgcgaccaaaccctcttaaccctctaccgtttaaaaaacacgaataaacctaccgccccactcccaccccgccccgccccgcccgtacaaccaaatcgaaaaaaacgaacctaccctttaaaaaaattttttttcttactcctacgaaaaacgccccaaccataaccctcaaaa

SEQ ID NO: 11649 - DNA, 529 bp, Artificial Sequence
  chemically treated genomic DNA (Homo sapiens) CpG-island No: 11649
tttggggcgatttttttgttttcgattcgtaaaaattgtttgacgggtagcgcgaattattgtaattaagaatgtcgtagatttgtcgtcggtattggttgaatcgtacgtaggttgggtaaatgcgttggaataagaatggttatatcgttacggtacgtattaatttttttgttgtgggcgatggtggcggtgatttatgtatcgttgatttcggtagtttttacgttgatatcgtttgttttgtcgttgatatattggtaggcgttatttgtcgatttatagttatcgtagtattattggtaacgttggtgtcgataattatcgcggcggtcggggtattgttgattgttttgttggtgattgtggcgttgtggtttgggcgaaatggtagcgtatgtgcgttcgtttgtcgtggttgttcgttattttttatgtggtttttgtattagcgtttagtattttttcggtatcgttaatttatttatagttatataggaaatagcgacggatatgttttacgtttagt

SEQ ID NO: 11650 - DNA, 529 bp, Artificial Sequence
  chemically treated genomic DNA (Homo sapiens) CpG-island No: 11650
actaaacgtaaaacatatccgtcgctatttcctatataactataaataaattaacgataccgaaaaaatactaaacgctaatacaaaaaccacataaaaaataacgaacaaccacgacaaacgaacgcacatacgctaccatttcgcccaaaccacaacgccacaatcaccaacaaaacaatcaacaataccccgaccgccgcgataattatcgacaccaacgttaccaataatactacgataactataaatcgacaaataacgcctaccaatatatcaacgacaaaacaaacgatatcaacgtaaaaactaccgaaatcaacgatacataaatcaccgccaccatcgcccacaacaaaaaaattaatacgtaccgtaacgatataaccattcttattccaacgcatttacccaacctacgtacgattcaaccaataccgacgacaaatctacgacattcttaattacaataattcgcgctacccgtcaaacaatttttacgaatcgaaaacaaaaaaatcgccccaaa

SEQ ID NO: 11651 - DNA, 529 bp, Artificial Sequence
  chemically treated genomic DNA (Homo sapiens) CpG-island No: 11651
gttaggcgtaaggtatgttcgtcgttgttttttatatgattatagatagattagcggtatcgagaagatgttgggcgttggtgtaaaagttatatggggaatggcgagtagttacggtagacgggcgtatatacgttgttatttcgtttaggttatagcgttataattattagtagggtaattaataatgtttcgatcgtcgcgatggttgtcgatattagcgttgttagtaatgttgcggtaattgtggatcggtaaataacgtttgttagtgtgttaacgataaagtaggcgatattagcgtgagagttgtcgggattagcggtgtataaattatcgttattatcgtttatagtaaaaagattaatgcgtatcgtaacggtgtagttatttttgttttagcgtatttatttaatttgcgtgcggtttagttagtatcggcggtagatttgcggtatttttgattgtaatgattcgcgttgttcgttaggtagtttttgcggatcgagaatagaaggatcgttttaga

SEQ ID NO: 11652 - DNA, 529 bp, Artificial Sequence
  chemically treated genomic DNA (Homo sapiens) CpG-island No: 11652
tctaaaacgatccttctattctcgatccgcaaaaactacctaacgaacaacgcgaatcattacaatcaaaaataccgcaaatctaccgccgatactaactaaaccgcacgcaaattaaataaatacgctaaaacaaaaataactacaccgttacgatacgcattaatctttttactataaacgataataacgataatttatacaccgctaatcccgacaactctcacgctaatatcgcctactttatcgttaacacactaacaaacgttatttaccgatccacaattaccgcaacattactaacaacgctaatatcgacaaccatcgcgacgatcgaaacattattaattaccctactaataattataacgctataacctaaacgaaataacaacgtatatacgcccgtctaccgtaactactcgccattccccatataacttttacaccaacgcccaacatcttctcgataccgctaatctatctataatcatataaaaaacaacgacgaacataccttacgcctaac

SEQ ID NO: 11653 - DNA, 598 bp, Artificial Sequence
  chemically treated genomic DNA (Homo sapiens) CpG-island No: 11653
gtcggaaatcgttttgttacggtatttgttaaaggtgaaggtcgttattaacgacggacgttcggtgatatcggttatttgttttgtcgtttagtcggaggtgtttataatatcgataagtaacgggtcggtgatattatagttatataacgcgcggtgatgatgtaggttcggcggcgtttgtatattgagttcgcgtgttttaaggtttaattggggtcggtattcggggattcgtagagtgttgtatttatcggatggtggacggtggcgacgttgtaattgattagttcgttatttttgtcgtcgtcgtaataggtattggaaaaattatttattattgtcggatcgtaagcgtttatggacgttacgttgtggtagtatttggtagttagtttgacgcgtattatgttggcgttatttgtagcggtgttgttcggtatttcggtcgggatcgcgatgggatttagttttacggtacgcggtattttggattcgataatcgagttttagcgttcggtgtcgtcgttgtttaagttgtcgttgatggtgatttggaatggtattggtgaaatttcgaggattttattgattataa

SEQ ID NO: 11654 - DNA, 598 bp, Artificial Sequence
  chemically treated genomic DNA (Homo sapiens) CpG-island No: 11654
ttataatcaataaaatcctcgaaatttcaccaataccattccaaatcaccatcaacgacaacttaaacaacgacgacaccgaacgctaaaactcgattatcgaatccaaaataccgcgtaccgtaaaactaaatcccatcgcgatcccgaccgaaataccgaacaacaccgctacaaataacgccaacataatacgcgtcaaactaactaccaaatactaccacaacgtaacgtccataaacgcttacgatccgacaataataaataatttttccaatacctattacgacgacgacaaaaataacgaactaatcaattacaacgtcgccaccgtccaccatccgataaatacaacactctacgaatccccgaataccgaccccaattaaaccttaaaacacgcgaactcaatatacaaacgccgccgaacctacatcatcaccgcgcgttatataactataatatcaccgacccgttacttatcgatattataaacacctccgactaaacgacaaaacaaataaccgatatcaccgaacgtccgtcgttaataacgaccttcacctttaacaaataccgtaacaaaacgatttccgac

SEQ ID NO: 11655 - DNA, 598 bp, Artificial Sequence
  chemically treated genomic DNA (Homo sapiens) CpG-island No: 11655
ttatgattagtaagattttcgaggttttattaatattattttagattattattagcggtaatttaagtagcggcggtatcggacgttaaagttcgattatcggatttagaatgtcgcgtatcgtagggttaagttttatcgcgatttcgatcggaatatcgaataatatcgttgtaaatagcgttagtataatgcgcgttagattggttgttagatgttgttatagcgtggcgtttataaacgtttgcggttcggtaatggtgagtagtttttttagtatttgttgcggcggcggtaaaaatagcgggttaattagttgtagcgtcgttatcgtttattattcggtgagtataatattttgcggattttcgggtatcggttttaattaggttttaaaatacgcgggtttaatgtatagacgtcgtcgggtttgtattattatcgcgcgttgtatgattgtaatattatcgattcgttgtttatcgatattatgaatattttcggttggacggtagaatagatggtcgatattatcggacgttcgtcgttgatgacgatttttatttttggtaaatatcgtggtaaagcggttttcgat

SEQ ID NO: 11656 - DNA, 598 bp, Artificial Sequence
  chemically treated genomic DNA (Homo sapiens) CpG-island No: 11656
atcgaaaaccgctttaccacgatatttaccaaaaataaaaatcgtcatcaacgacgaacgtccgataatatcgaccatctattctaccgtccaaccgaaaatattcataatatcgataaacaacgaatcgataatattacaatcatacaacgcgcgataataatacaaacccgacgacgtctatacattaaacccgcgtattttaaaacctaattaaaaccgatacccgaaaatccgcaaaatattatactcaccgaataataaacgataacgacgctacaactaattaacccgctatttttaccgccgccgcaacaaatactaaaaaaactactcaccattaccgaaccgcaaacgtttataaacgccacgctataacaacatctaacaaccaatctaacgcgcattatactaacgctatttacaacgatattattcgatattccgatcgaaatcgcgataaaacttaaccctacgatacgcgacattctaaatccgataatcgaactttaacgtccgataccgccgctacttaaattaccgctaataataatctaaaataatattaataaaacctcgaaaatcttactaatcataa

SEQ ID NO: 11657 - DNA, 709 bp, Artificial Sequence
  chemically treated genomic DNA (Homo sapiens) CpG-island No: 11657
tatttcgtttgtattcgtatttttcgttttttttgtttattaaattttttttcgttttattcgatttcggtttgtttgttttttattttttttttacgttttttttcgttgtttcgtaggcgtgcgcgttggattttatgttggacgattcggttatgttcgcgcggcgattgcgtaatttgggttagtcggtgacgttgcgcgtggtggaggatttgtcgtacggttttttgattttagcggcgttgtgtcgcgagacgcgttaggtcgtagagttgtgcgtggagcgtattcgtttcgtttttatttttttcgtcggagtcgggtcgagcggggagacgggggttgcgggggtagacgggggttgcggggggcgatattaaaagtttgttgtttttatttgcgtcggttttcgttatgaatgtttttcgggtcgggcggaaggggacgcgggttgtgttttatttaagtcgggggtggtaagggggcggggcgggggttcgaaagttgagattttcgttacggggagggggacgcgtatatatatcggttatcgagacggttggatttgtacgttatcgttgttttttgttgttgttgttgttgcggcgatcgtcgtagggacggggattggtttttttttgtaggtcggtttggtttgttgtaaataaaagtatttaattagtttggttttttttaaatacggtgg

SEQ ID NO: 11658 - DNA, 709 bp, Artificial Sequence
  chemically treated genomic DNA (Homo sapiens) CpG-island No: 11658
ccaccgtatttaaaaaaaaccaaactaattaaatacttttatttacaacaaaccaaaccgacctacaaaaaaaaaccaatccccgtccctacgacgatcgccgcaacaacaacaacaacaaaaaacaacgataacgtacaaatccaaccgtctcgataaccgatatatatacgcgtccccctccccgtaacgaaaatctcaactttcgaacccccgccccgcccccttaccacccccgacttaaataaaacacaacccgcgtccccttccgcccgacccgaaaaacattcataacgaaaaccgacgcaaataaaaacaacaaacttttaatatcgccccccgcaacccccgtctacccccgcaacccccgtctccccgctcgacccgactccgacgaaaaaaataaaaacgaaacgaatacgctccacgcacaactctacgacctaacgcgtctcgcgacacaacgccgctaaaatcaaaaaaccgtacgacaaatcctccaccacgcgcaacgtcaccgactaacccaaattacgcaatcgccgcgcgaacataaccgaatcgtccaacataaaatccaacgcgcacgcctacgaaacaacgaaaaaaaacgtaaaaaaaaaataaaaaacaaacaaaccgaaatcgaataaaacgaaaaaaaatttaataaacaaaaaaaacgaaaaatacgaatacaaacgaaata

SEQ ID NO: 11659 - DNA, 709 bp, Artificial Sequence
  chemically treated genomic DNA (Homo sapiens) CpG-island No: 11659
ttatcgtatttgagagaggttaaattaattaaatatttttatttataataaattaaatcgatttgtaagggagggttagttttcgtttttgcggcggtcgtcgtagtagtagtagtagtaaaaggtagcggtggcgtgtaggtttagtcgtttcggtgatcggtgtgtgtgcgcgttttttttttcgtggcgagggttttagttttcgggttttcgtttcgtttttttgttattttcgatttaagtaaggtatagttcgcgttttttttcgttcggttcggaaggtatttatgacggaggtcggcgtagatgggaataataggtttttagtgtcgtttttcgtagttttcgtttattttcgtagttttcgttttttcgttcggttcggtttcggcgggaggagtgaggacgaggcggatgcgttttacgtatagttttgcggtttggcgcgtttcgcggtatagcgtcgttagggttaggaagtcgtgcggtaggttttttattacgcgtagcgttatcggttggtttaggttgcgtagtcgtcgcgcgagtatgatcgagtcgtttagtatggggtttagcgcgtacgtttacgggatagcggggagggacgtggagagagggtgggggatagatagatcggggtcgggtagagcgaggaggggtttgatgaataaagggagcgggaaatacggatatagacggagtg

SEQ ID NO: 11660 - DNA, 709 bp, Artificial Sequence
  chemically treated genomic DNA (Homo sapiens) CpG-island No: 11660
cactccgtctatatccgtatttcccgctccctttattcatcaaacccctcctcgctctacccgaccccgatctatctatcccccaccctctctccacgtccctccccgctatcccgtaaacgtacgcgctaaaccccatactaaacgactcgatcatactcgcgcgacgactacgcaacctaaaccaaccgataacgctacgcgtaataaaaaacctaccgcacgacttcctaaccctaacgacgctataccgcgaaacgcgccaaaccgcaaaactatacgtaaaacgcatccgcctcgtcctcactcctcccgccgaaaccgaaccgaacgaaaaaacgaaaactacgaaaataaacgaaaactacgaaaaacgacactaaaaacctattattcccatctacgccgacctccgtcataaataccttccgaaccgaacgaaaaaaaacgcgaactataccttacttaaatcgaaaataacaaaaaaacgaaacgaaaacccgaaaactaaaaccctcgccacgaaaaaaaaaacgcgcacacacaccgatcaccgaaacgactaaacctacacgccaccgctaccttttactactactactactacgacgaccgccgcaaaaacgaaaactaaccctcccttacaaatcgatttaatttattataaataaaaatatttaattaatttaacctctctcaaatacgataa

SEQ ID NO: 11661 - DNA, 548 bp, Artificial Sequence
  chemically treated genomic DNA (Homo sapiens) CpG-island No: 11661
tcggaggtcgagggtttttcggggaagcggatgcgtttggagcggggtttttttagtcgtcgtacgttggtttgtagggattgcgttttttcggattcgtagaaatgtcggcgttcgggttttttttttcgcgtgtcggttattttgagtttttttaggcggaggtcgcggtcgtgcgtattttcgtgtggtatcgaatcgtggggtagcgtacgatgggtcggatgggtttcgacgcggggtaggggcgaagcggcgcgttttggtttgttcggtttggcgtttgcggattttttgggtcggttggttgaatcgtttggttacgcgtcgttgtagtttttggggaagcggggtttcgagatcgtgtcgtttcggttgggcgtcgtggttgtttacggttttgcggttgtagattagaggggagttatcgaggggaaggtttttgcgcgcgcgtattttattttcggttttcgtttttaattttttagtttgggtcggaggtcgtttttagagttcgggtttcggtttaatgttgtttgcgaagaagg

SEQ ID NO: 11662 - DNA, 548 bp, Artificial Sequence
  chemically treated genomic DNA (Homo sapiens) CpG-island No: 11662
ccttcttcgcaaacaacattaaaccgaaacccgaactctaaaaacgacctccgacccaaactaaaaaattaaaaacgaaaaccgaaaataaaatacgcgcgcgcaaaaaccttcccctcgataactcccctctaatctacaaccgcaaaaccgtaaacaaccacgacgcccaaccgaaacgacacgatctcgaaaccccgcttccccaaaaactacaacgacgcgtaaccaaacgattcaaccaaccgacccaaaaaatccgcaaacgccaaaccgaacaaaccaaaacgcgccgcttcgcccctaccccgcgtcgaaacccatccgacccatcgtacgctaccccacgattcgataccacacgaaaatacgcacgaccgcgacctccgcctaaaaaaactcaaaataaccgacacgcgaaaaaaaaaacccgaacgccgacatttctacgaatccgaaaaaacgcaatccctacaaaccaacgtacgacgactaaaaaaaccccgctccaaacgcatccgcttccccgaaaaaccctcgacctccga

SEQ ID NO: 11663 - DNA, 548 bp, Artificial Sequence
  chemically treated genomic DNA (Homo sapiens) CpG-island No: 11663
tttttttcgtagatagtattggatcggggttcgggttttaggggcggttttcggtttaggttgggaggttagaggcggaggtcggggatggggtgcgcgcgcgtagggatttttttttcggtggtttttttttggtttgtagtcgtagggtcgtaggtagttacggcgtttagtcggaacggtacgatttcgaagtttcgtttttttaaggattgtagcggcgcgtggttaagcggtttaattagtcggtttagaagattcgtaggcgttaggtcgggtaagttaaggcgcgtcgtttcgtttttgtttcgcgtcggggtttattcggtttatcgtgcgttgttttacggttcggtattatacgaaggtgcgtacggtcgcggttttcgtttggaggagtttagggtggtcggtacgcgaagaagggggttcggacgtcggtatttttgcggattcgaggaggcgtagtttttgtaggttaacgtgcggcggttgaaggagtttcgttttaaacgtattcgttttttcgggaagttttcggttttcga

SEQ ID NO: 11664 - DNA, 548 bp, Artificial Sequence
  chemically treated genomic DNA (Homo sapiens) CpG-island No: 11664
tcgaaaaccgaaaacttcccgaaaaaacgaatacgtttaaaacgaaactccttcaaccgccgcacgttaacctacaaaaactacgcctcctcgaatccgcaaaaataccgacgtccgaacccccttcttcgcgtaccgaccaccctaaactcctccaaacgaaaaccgcgaccgtacgcaccttcgtataataccgaaccgtaaaacaacgcacgataaaccgaataaaccccgacgcgaaacaaaaacgaaacgacgcgccttaacttacccgacctaacgcctacgaatcttctaaaccgactaattaaaccgcttaaccacgcgccgctacaatccttaaaaaaacgaaacttcgaaatcgtaccgttccgactaaacgccgtaactacctacgaccctacgactacaaaccaaaaaaaaaccaccgaaaaaaaaatccctacgcgcgcgcaccccatccccgacctccgcctctaacctcccaacctaaaccgaaaaccgcccctaaaacccgaaccccgatccaatactatctacgaaaaaaa

SEQ ID NO: 11665 - DNA, 779 bp, Artificial Sequence
  chemically treated genomic DNA (Homo sapiens) CpG-island No: 11665
tttcgcgtcgatttgatcgtttggtagtattcgatgtagtggtatagtattttttcgttttttaaattttggatcgataaagtttttttttacggttgggtttacggttatggcggtacggcgttgtatggtaaatatttgttgtgggcggtgacgatcggcggcggggaaagttattttgaaattggtgcgtattcgggttttgatgtgttgtcgtagtcgttataggcgacggtaatttattgcgggttgaattggttgttatcgtttgttatgtattgtatttttatttgtgacgacgaaattttcgaagggtaggcgcgttattataagtaacgtttgttggaatggtaggaggtttattatggatagttatacgttgatttaggcgttgatttatttcggttcggtagcgttgattgtatttattgcggtacgttttggtttgggatcggtatttggttatttgatcgtcggttgtattattggtcgtgggggttgcgattggtgatcgatgtcgaatttattttgtattttgtcgagattggggtggtgttgatgttgattttagagatttagcgttatttagttcgatcgcgtttcgtcgatgattttagagatgatgaatttggtgaaaaatttcgttatcgtttcgattatcggtttggtggatatggcggcgtaggcgggtaaattgttcgattatttagtttatgtttgggagtcgtttatcgttattacgttggcgtatgtgttgattaacgtttttattatgttgg

SEQ ID NO: 11666 - DNA, 779 bp, Artificial Sequence
  chemically treated genomic DNA (Homo sapiens) CpG-island No: 11666
ccaacataataaaaacgttaatcaacacatacgccaacgtaataacgataaacgactcccaaacataaactaaataatcgaacaatttacccgcctacgccgccatatccaccaaaccgataatcgaaacgataacgaaatttttcaccaaattcatcatctctaaaatcatcgacgaaacgcgatcgaactaaataacgctaaatctctaaaatcaacatcaacaccaccccaatctcgacaaaatacaaaataaattcgacatcgatcaccaatcgcaacccccacgaccaataatacaaccgacgatcaaataaccaaataccgatcccaaaccaaaacgtaccgcaataaatacaatcaacgctaccgaaccgaaataaatcaacgcctaaatcaacgtataactatccataataaacctcctaccattccaacaaacgttacttataataacgcgcctacccttcgaaaatttcgtcgtcacaaataaaaatacaatacataacaaacgataacaaccaattcaacccgcaataaattaccgtcgcctataacgactacgacaacacatcaaaacccgaatacgcaccaatttcaaaataactttccccgccgccgatcgtcaccgcccacaacaaatatttaccatacaacgccgtaccgccataaccgtaaacccaaccgtaaaaaaaaactttatcgatccaaaatttaaaaaacgaaaaaatactataccactacatcgaatactaccaaacgatcaaatcgacgcgaaa

SEQ ID NO: 11667 - DNA, 779 bp, Artificial Sequence
  chemically treated genomic DNA (Homo sapiens) CpG-island No: 11667
ttagtatgataaaagcgttaattaatatatacgttagcgtaatggcggtaaacgatttttaggtatgggttgagtaatcgagtaatttattcgtttgcgtcgttatatttattagatcgatagtcgaggcgatggcggagttttttattaggtttattatttttgaggttatcggcgggacgcgatcgaattgagtagcgttgagtttttagagttagtattagtattattttaatttcggtaaagtgtagaatagattcggtatcggttattagtcgtagtttttacggttaataatgtagtcggcgattaggtagttaagtatcgattttagattaagacgtatcgtaatgggtataattagcgttgtcgaatcgagataaattagcgtttgaattagcgtatggttatttatgatgggttttttgttattttagtagacgttgtttatagtgacgcgtttgtttttcgagggtttcgtcgttataaataaaggtgtagtgtatggtaaacggtggtagttagtttagttcgtagtagattgtcgtcgtttgtagcggttgcgatagtatattaaagttcggatgcgtattaattttaaaatggtttttttcgtcgtcggtcgttatcgtttatagtaaatgtttgttatgtagcgtcgtgtcgttatgatcgtaagtttagtcgtgggagaaaattttatcgatttaaagtttgaggagcggaggaatgttgtattattgtatcggatgttgttagacgattagatcggcgcgaga

SEQ ID NO: 11668 - DNA, 779 bp, Artificial Sequence
  chemically treated genomic DNA (Homo sapiens) CpG-island No: 11668
tctcgcgccgatctaatcgtctaacaacatccgatacaataatacaacattcctccgctcctcaaactttaaatcgataaaattttctcccacgactaaacttacgatcataacgacacgacgctacataacaaacatttactataaacgataacgaccgacgacgaaaaaaaccattttaaaattaatacgcatccgaactttaatatactatcgcaaccgctacaaacgacgacaatctactacgaactaaactaactaccaccgtttaccatacactacacctttatttataacgacgaaaccctcgaaaaacaaacgcgtcactataaacaacgtctactaaaataacaaaaaacccatcataaataaccatacgctaattcaaacgctaatttatctcgattcgacaacgctaattatacccattacgatacgtcttaatctaaaatcgatacttaactacctaatcgccgactacattattaaccgtaaaaactacgactaataaccgataccgaatctattctacactttaccgaaattaaaataatactaatactaactctaaaaactcaacgctactcaattcgatcgcgtcccgccgataacctcaaaaataataaacctaataaaaaactccgccatcgcctcgactatcgatctaataaatataacgacgcaaacgaataaattactcgattactcaacccatacctaaaaatcgtttaccgccattacgctaacgtatatattaattaacgcttttatcatactaa

SEQ ID NO: 11669 - DNA, 581 bp, Artificial Sequence
  chemically treated genomic DNA (Homo sapiens) CpG-island No: 11669
ttattattcgtacggtagggtatatttttggttttattacgtatataatattgtatatattttttatattatgtttgttattattacggacggtttattatacgcggttagggagacgtttgatttcgttttgttttatttttttttttaagtttttatatttagttatattgtcgtttttttcggttgttcgtattcgttttattgttttttttatttttattcgtattgtcgattggggtatgagttcgtaacgttttttgcgtttcgttttgtttcgatgttttttttcgaaattatacgcggaatttaagaattattgggatgcgtaaagcggattaggagcgtacgtttattcggtttagtgatttgtgggaattgtagtttcgggtcggaaacgtaggagacgttagaaatttaagtttgggacggcgcgttttaagggtttttggaagttgtaatttgtgtttcgagtgcgtaggcgtaggaatttttcgggggaatttttttagtagggagcgtatattgaagagtgcgtgcggaggtgagagtaataaattgataacggaaatagatggtat

SEQ ID NO: 11670 - DNA, 581 bp, Artificial Sequence
  chemically treated genomic DNA (Homo sapiens) CpG-island No: 11670
ataccatctatttccgttatcaatttattactctcacctccgcacgcactcttcaatatacgctccctactaaaaaaattcccccgaaaaattcctacgcctacgcactcgaaacacaaattacaacttccaaaaacccttaaaacgcgccgtcccaaacttaaatttctaacgtctcctacgtttccgacccgaaactacaattcccacaaatcactaaaccgaataaacgtacgctcctaatccgctttacgcatcccaataattcttaaattccgcgtataatttcgaaaaaaaacatcgaaacaaaacgaaacgcaaaaaacgttacgaactcataccccaatcgacaatacgaataaaaataaaaaaaacaataaaacgaatacgaacaaccgaaaaaaacgacaatataactaaatataaaaacttaaaaaaaaaaataaaacaaaacgaaatcaaacgtctccctaaccgcgtataataaaccgtccgtaataataacaaacataatataaaaaatatatacaatattatatacgtaataaaaccaaaaatataccctaccgtacgaataataa

SEQ ID NO: 11671 - DNA, 581 bp, Artificial Sequence
  chemically treated genomic DNA (Homo sapiens) CpG-island No: 11671
atgttatttgttttcgttattagtttattgtttttattttcgtacgtattttttaatatacgttttttgttaaagggattttttcgaagggtttttgcgtttacgtattcggagtataggttataatttttagaaatttttgggacgcgtcgttttaaatttgggtttttggcgttttttgcgttttcggttcgggattataatttttataggttattgggtcgaatgagcgtgcgtttttgattcgttttgcgtattttagtgatttttgggtttcgcgtgtagtttcggaaggagatatcgaagtagggcgaggcgtagagggcgttgcggatttatgttttagtcggtagtgcgggtaagggtgggagaagtaatgaggcgaatgcgagtagtcgaagaaggcgatagtgtggttgggtatgaagatttgagggagggggtggggtaaaacgaggttaggcgtttttttggtcgcgtgtgatggatcgttcgtggtggtgatagatatggtgtagggggtgtgtgtaatattatgtgcgtgatagagttaaggatgtgttttatcgtgcgaatggtga

SEQ ID NO: 11672 - DNA, 581 bp, Artificial Sequence
  chemically treated genomic DNA (Homo sapiens) CpG-island No: 11672
tcaccattcgcacgataaaacacatccttaactctatcacgcacataatattacacacaccccctacaccatatctatcaccaccacgaacgatccatcacacgcgaccaaaaaaacgcctaacctcgttttaccccaccccctccctcaaatcttcatacccaaccacactatcgccttcttcgactactcgcattcgcctcattacttctcccacccttacccgcactaccgactaaaacataaatccgcaacgccctctacgcctcgccctacttcgatatctccttccgaaactacacgcgaaacccaaaaatcactaaaatacgcaaaacgaatcaaaaacgcacgctcattcgacccaataacctataaaaattataatcccgaaccgaaaacgcaaaaaacgccaaaaacccaaatttaaaacgacgcgtcccaaaaatttctaaaaattataacctatactccgaatacgtaaacgcaaaaacccttcgaaaaaatccctttaacaaaaaacgtatattaaaaaatacgtacgaaaataaaaacaataaactaataacgaaaacaaataacat

SEQ ID NO: 11673 - DNA, 703 bp, Artificial Sequence
  chemically treated genomic DNA (Homo sapiens) CpG-island No: 11673
atacggtttttttggggcgcggggtcggcgcgcggcgcgtatacgtatttttttcgtttatatttagatatttatataaatagggcgttaagtattcgcgcgtatacgtatcggggatacgtaggtatcgtcgcgtcgtttttttataaaggttggcgcgcgcgcgggtatacgtagttacgcgcgggtatattcgcggtttttttttttcgttaggtattttgcggtagttcgttcgtattttcgcgtttcgggcgtttcgtgggggtcgttttttttaggtttttcgttagtgggggtgaggtgcgggttgttttcgacgtttttttcgtttaggtgcggtgtttcgcgcggttttcgtgtttttttttttttcgcggttaggataggtttcggttttttatttttttcgtttttttttttttacgcgtttcgtatatttggtttaggtgcggtttcgtttttcgttttgggttcgtagatatttatttgtttagcgtttttttggggtcggtttagcgtgttttttttgcggttcggcgaattcgggtttttcgttcggtatatttttcggagtcggggttggggggaagcgggtaggaggtggcgggacgagggcggttttcgtgtttttttttttttttggtttagtatcgtcgtcgattaaaaattaggaaaaaaaaaaaaaaagaaaagaaaagaa

SEQ ID NO: 11674 - DNA, 703 bp, Artificial Sequence
  chemically treated genomic DNA (Homo sapiens) CpG-island No: 11674
ttcttttcttttctttttttttttttttcctaatttttaatcgacgacgatactaaaccaaaaaaaaaaaaaaacacgaaaaccgccctcgtcccgccacctcctacccgcttccccccaaccccgactccgaaaaatataccgaacgaaaaacccgaattcgccgaaccgcaaaaaaaacacgctaaaccgaccccaaaaaaacgctaaacaaataaatatctacgaacccaaaacgaaaaacgaaaccgcacctaaaccaaatatacgaaacgcgtaaaaaaaaaaaaacgaaaaaaataaaaaaccgaaacctatcctaaccgcgaaaaaaaaaaaaacacgaaaaccgcgcgaaacaccgcacctaaacgaaaaaaacgtcgaaaacaacccgcacctcacccccactaacgaaaaacctaaaaaaaacgacccccacgaaacgcccgaaacgcgaaaatacgaacgaactaccgcaaaatacctaacgaaaaaaaaaaaccgcgaatatacccgcgcgtaactacgtatacccgcgcgcgcgccaacctttataaaaaaacgacgcgacgatacctacgtatccccgatacgtatacgcgcgaatacttaacgccctatttatataaatatctaaatataaacgaaaaaaatacgtatacgcgccgcgcgccgaccccgcgccccaaaaaaaccgtat

SEQ ID NO: 11675 - DNA, 703 bp, Artificial Sequence
  chemically treated genomic DNA (Homo sapiens) CpG-island No: 11675
tttttttttttttttttttttttttttttttaatttttggtcggcggcggtgttgggttaggggaaggaagggatacggaggtcgttttcgtttcgttattttttattcgtttttttttagtttcggtttcgggagatgtgtcgggcggggggttcgggttcgtcgagtcgtaggagagatacgttgggtcgattttagagaggcgttggataggtgagtgtttgcgggtttagggcgaggggcgaagtcgtatttgggttaggtgtgcggggcgcgtggaagaggggaggcgggaaggatgggaggtcggggtttgttttggtcgcgaggggggaggggatacgggagtcgcgcggggtatcgtatttgagcgggaggggcgtcgggggtagttcgtattttatttttattggcgaggggtttgggaggggcggtttttacggagcgttcggggcgcgggggtgcggacgggttatcgtagggtgtttggcggggggaggggatcgcgagtgtgttcgcgcgtggttgcgtgtgttcgcgcgcgcgttagtttttgtggggaagcggcgcggcggtgtttgcgtgttttcggtgcgtgtgcgcgcgggtgtttggcgttttgtttgtgtaggtgtttgggtgtgagcggagggggtgcgtgtgcgcgtcgcgcgtcggtttcgcgttttagaggagtcgtgt

SEQ ID NO: 11676 - DNA, 703 bp, Artificial Sequence
  chemically treated genomic DNA (Homo sapiens) CpG-island No: 11676
acacgactcctctaaaacgcgaaaccgacgcgcgacgcgcacacgcaccccctccgctcacacccaaacacctacacaaacaaaacgccaaacacccgcgcgcacacgcaccgaaaacacgcaaacaccgccgcgccgcttccccacaaaaactaacgcgcgcgcgaacacacgcaaccacgcgcgaacacactcgcgatcccctccccccgccaaacaccctacgataacccgtccgcacccccgcgccccgaacgctccgtaaaaaccgcccctcccaaacccctcgccaataaaaataaaatacgaactacccccgacgcccctcccgctcaaatacgataccccgcgcgactcccgtatcccctcccccctcgcgaccaaaacaaaccccgacctcccatccttcccgcctcccctcttccacgcgccccgcacacctaacccaaatacgacttcgcccctcgccctaaacccgcaaacactcacctatccaacgcctctctaaaatcgacccaacgtatctctcctacgactcgacgaacccgaaccccccgcccgacacatctcccgaaaccgaaactaaaaaaaaacgaataaaaaataacgaaacgaaaacgacctccgtatcccttccttcccctaacccaacaccgccgccgaccaaaaattaaaaaaaaaaaaaaaaaaaaaaaaaaaaaaa

SEQ ID NO: 11677 - DNA, 705 bp, Artificial Sequence
  chemically treated genomic DNA (Homo sapiens) CpG-island No: 11677
ggcggtttgtaattaggtggtggatgtattatttgaggttgtatcgcgtcgttcgttgggattattagcggaaaaaatttgttcggtgtatcgcgaaagcgatatcgtatcgggagagtagatcgttattagtatattgaaataaggcggtattaaagagcgtttcgtttagttgcgtaaaatgggtattaaaacggtgatgattatcggcgataatcgtttgattgtcgtcgcgattgttgcggaagcgggtgtcgatgattttttcgtcgaagcgatatcggaggttaagttggtattgattcgttagtattaggcggaaggtcgtttggtagcgatgatcggcgacggtattaacgatgtttcggcgttggcgtaggtagatgtcgcggtggcgatgaatttcggtatttaggcggcgaaagaggcgggtaatatgggcgatttcgattttaattcgattaagttgatcgaggtggtgtatattggtaaatagatgttgatgattcgtggttcgttgattatttttagtattgttaacgatgtgggcgaaatatttcgttattattttcggcggtattcgcgggaggaagaggtttttgtcgatgggcgaattattcgcgttttgtaggttaatttgttcgcggttttgcgtgatatttttttcgtttacgggtaaatttataatatcgttcgtttttttaa

SEQ ID NO: 11678 - DNA, 705 bp, Artificial Sequence
  chemically treated genomic DNA (Homo sapiens) CpG-island No: 11678
ttaaaaaaacgaacgatattataaatttacccgtaaacgaaaaaaatatcacgcaaaaccgcgaacaaattaacctacaaaacgcgaataattcgcccatcgacaaaaacctcttcctcccgcgaataccgccgaaaataataacgaaatatttcgcccacatcgttaacaatactaaaaataatcaacgaaccacgaatcatcaacatctatttaccaatatacaccacctcgatcaacttaatcgaattaaaatcgaaatcgcccatattacccgcctctttcgccgcctaaataccgaaattcatcgccaccgcgacatctacctacgccaacgccgaaacatcgttaataccgtcgccgatcatcgctaccaaacgaccttccgcctaatactaacgaatcaataccaacttaacctccgatatcgcttcgacgaaaaaatcatcgacacccgcttccgcaacaatcgcgacgacaatcaaacgattatcgccgataatcatcaccgttttaatacccattttacgcaactaaacgaaacgctctttaataccgccttatttcaatatactaataacgatctactctcccgatacgatatcgctttcgcgatacaccgaacaaattttttccgctaataatcccaacgaacgacgcgatacaacctcaaataatacatccaccacctaattacaaaccgcc

SEQ ID NO: 11679 - DNA, 705 bp, Artificial Sequence
  chemically treated genomic DNA (Homo sapiens) CpG-island No: 11679
ttgggaaaacgaacggtgttatggatttgttcgtaaacgaagagaatgttacgtaggatcgcgaataagttggtttgtaaagcgcgaataattcgtttatcgataaaagtttttttttttcgcgaatgtcgtcgggaataatggcgaagtatttcgtttatatcgttggtaatgttgaaggtggttagcgagttacgggttattagtatttgtttgttaatgtgtattatttcgattaatttggtcgggttagagtcgagatcgtttatattgttcgtttttttcgtcgtttgggtgtcggagtttatcgttatcgcgatatttgtttgcgttagcgtcggagtatcgttggtgtcgtcgtcggttatcgttattaaacgatttttcgtttgatattgacggattaatgttagtttggttttcggtgtcgtttcggcgagaaaattatcgatattcgttttcgtagtaatcgcggcggtagttagacggttatcgtcggtaattattatcgttttaatgtttattttgcgtagttgggcgaagcgttttttaatatcgttttgttttaatatgttggtggcggtttgttttttcggtacgatgtcgttttcgcggtatatcgagtagatttttttcgttggtaattttagcgaacgacgcgatatagttttaggtagtgtatttattatttgattgtagatcgtt

SEQ ID NO: 11680 - DNA, 705 bp, Artificial Sequence
  chemically treated genomic DNA (Homo sapiens) CpG-island No: 11680
aacgatctacaatcaaataataaatacactacctaaaactatatcgcgtcgttcgctaaaattaccaacgaaaaaaatctactcgatataccgcgaaaacgacatcgtaccgaaaaaacaaaccgccaccaacatattaaaacaaaacgatattaaaaaacgcttcgcccaactacgcaaaataaacattaaaacgataataattaccgacgataaccgtctaactaccgccgcgattactacgaaaacgaatatcgataattttctcgccgaaacgacaccgaaaaccaaactaacattaatccgtcaatatcaaacgaaaaatcgtttaataacgataaccgacgacgacaccaacgatactccgacgctaacgcaaacaaatatcgcgataacgataaactccgacacccaaacgacgaaaaaaacgaacaatataaacgatctcgactctaacccgaccaaattaatcgaaataatacacattaacaaacaaatactaataacccgtaactcgctaaccaccttcaacattaccaacgatataaacgaaatacttcgccattattcccgacgacattcgcgaaaaaaaaaaacttttatcgataaacgaattattcgcgctttacaaaccaacttattcgcgatcctacgtaacattctcttcgtttacgaacaaatccataacaccgttcgttttcccaa

SEQ ID NO: 11681 - DNA, 538 bp, Artificial Sequence
  chemically treated genomic DNA (Homo sapiens) CpG-island No: 11681
aagaagtgtattggatagagttcgtaatgtcggcgttattgtgggtttgtcgggttatagagttcggttcgttgattgtttttattgatatttacggtaataatttgatagtcgataataaaaagttgttcgtcgaacgtcgcgatttttcggcgaattttttatgtttgtaggtttgtttgtataacgaatttgtcgcgtttgggttttaatgtttagtattttttgcgtaagttgtacgcgttcgattattagcggtatttgttattgttggtagacgttttcgtaatgcgtaatttaggtatcggtattggtatttaaatcgtgatgtatatgaatagcgcgtagagcgatattcggatttttcgttcgttattgtattaattgatgtagtagaacggtggagttaagttcgtcgttaaaggttattagaatttggcgtgaggtgagaagttgtttattgagcgtgagtgttatgatggtgcgattttatagtagtaatgttcggtacgttatcgggtaaatgcggcgataaaga

SEQ ID NO: 11682 - DNA, 538 bp, Artificial Sequence
  chemically treated genomic DNA (Homo sapiens) CpG-island No: 11682
tctttatcgccgcatttacccgataacgtaccgaacattactactataaaatcgcaccatcataacactcacgctcaataaacaacttctcacctcacgccaaattctaataacctttaacgacgaacttaactccaccgttctactacatcaattaatacaataacgaacgaaaaatccgaatatcgctctacgcgctattcatatacatcacgatttaaataccaataccgatacctaaattacgcattacgaaaacgtctaccaacaataacaaataccgctaataatcgaacgcgtacaacttacgcaaaaaatactaaacattaaaacccaaacgcgacaaattcgttatacaaacaaacctacaaacataaaaaattcgccgaaaaatcgcgacgttcgacgaacaactttttattatcgactatcaaattattaccgtaaatatcaataaaaacaatcaacgaaccgaactctataacccgacaaacccacaataacgccgacattacgaactctatccaatacacttctt

SEQ ID NO: 11683 - DNA, 538 bp, Artificial Sequence
  chemically treated genomic DNA (Homo sapiens) CpG-island No: 11683
tttttatcgtcgtatttgttcggtaacgtgtcgggtattgttattgtaaaatcgtattattatgatatttacgtttaatagataattttttattttacgttagattttggtggtttttagcggcgggtttgattttatcgttttgttgtattagttggtgtagtggcggacggaaaattcgggtgtcgttttgcgcgttatttatgtgtattacggtttaagtgttaatgtcgatgtttgggttacgtattgcgaaaacgtttgttaatagtggtaggtgtcgttggtggtcgaacgcgtataatttgcgtaagaagtattgggtattgaggtttaggcgcggtaggttcgttatataggtagatttgtaggtatgaaagattcgtcgagggatcgcggcgttcggcgaatagttttttgttgtcggttattaggttgttgtcgtgggtattaatagagataattagcgggtcgaattttgtgattcggtagatttatagtgacgtcggtattgcgagttttgtttagtgtatttttt

SEQ ID NO: 11684 - DNA, 538 bp, Artificial Sequence
  chemically treated genomic DNA (Homo sapiens) CpG-island No: 11684
aaaaaatacactaaacaaaactcgcaataccgacgtcactataaatctaccgaatcacaaaattcgacccgctaattatctctattaatacccacgacaacaacctaataaccgacaacaaaaaactattcgccgaacgccgcgatccctcgacgaatctttcatacctacaaatctacctatataacgaacctaccgcgcctaaacctcaatacccaatacttcttacgcaaattatacgcgttcgaccaccaacgacacctaccactattaacaaacgttttcgcaatacgtaacccaaacatcgacattaacacttaaaccgtaatacacataaataacgcgcaaaacgacacccgaattttccgtccgccactacaccaactaatacaacaaaacgataaaatcaaacccgccgctaaaaaccaccaaaatctaacgtaaaataaaaaattatctattaaacgtaaatatcataataatacgattttacaataacaatacccgacacgttaccgaacaaatacgacgataaaaa

SEQ ID NO: 11685 - DNA, 677 bp, Artificial Sequence
  chemically treated genomic DNA (Homo sapiens) CpG-island No: 11685
tttggtcgtacgttagttgtcggaggaagatcgagatggtgatttttcgcgttttgtatttggcgcgtcgtattattacgtcgttggtttttggcgttgtggtgatgattatcggtttgtcgttaatttaggttgggttaacgtttattggcggcggttacgtagttatgagcgataatattttcggcgtatcgaaaaatttgttgttggtaggcgtggttttagttgtaggtcgaaaagtagcggcggtttgtcgagttatttataaatttttggcgattggttgtgcgaaacggtagcgaaagataataagttgatggcgattatttcggcgatgcgtgaaggtttcggtatggtcgagtttttacgtaaattttcggatcgttatttcgacgtggtaattgtcgagtaatacgcggtgatttttgatgcgggtttggcgattggtgggtataaatttattgtcgcgatttattttatttttttgtaacgcgtttatgattaggtgttgtatgacgtggcgatttaaaagttttcggttttgttcgttatcgatcgcgcgggtattgttggtgttgacggttaaatttattagggtgtttttgattttttttatttgcgttgtatatcggaaatggttattatgatttcgagcgatgaaaacgaatgtcgttaga

SEQ ID NO: 11686 - DNA, 677 bp, Artificial Sequence
  chemically treated genomic DNA (Homo sapiens) CpG-island No: 11686
tctaacgacattcgttttcatcgctcgaaatcataataaccatttccgatatacaacgcaaataaaaaaaatcaaaaacaccctaataaatttaaccgtcaacaccaacaatacccgcgcgatcgataacgaacaaaaccgaaaacttttaaatcgccacgtcatacaacacctaatcataaacgcgttacaaaaaaataaaataaatcgcgacaataaatttatacccaccaatcgccaaacccgcatcaaaaatcaccgcgtattactcgacaattaccacgtcgaaataacgatccgaaaatttacgtaaaaactcgaccataccgaaaccttcacgcatcgccgaaataatcgccatcaacttattatctttcgctaccgtttcgcacaaccaatcgccaaaaatttataaataactcgacaaaccgccgctacttttcgacctacaactaaaaccacgcctaccaacaacaaatttttcgatacgccgaaaatattatcgctcataactacgtaaccgccgccaataaacgttaacccaacctaaattaacgacaaaccgataatcatcaccacaacgccaaaaaccaacgacgtaataatacgacgcgccaaatacaaaacgcgaaaaatcaccatctcgatcttcctccgacaactaacgtacgaccaaa

SEQ ID NO: 11687 - DNA, 677 bp, Artificial Sequence
  chemically treated genomic DNA (Homo sapiens) CpG-island No: 11687
tttggcgatattcgtttttatcgttcggggttataatgattattttcggtatgtagcgtaggtaagagagattaaaagtattttgatgggtttgatcgttagtattaataatgttcgcgcggtcgatggcgaataggatcggaagtttttgaatcgttacgttatgtagtatttgattataggcgcgttgtaggaaagtggagtaaatcgcgataatgggtttgtatttattaatcgttagattcgtattaaaggttatcgcgtgttgttcggtaattgttacgtcgaagtagcgattcgggaatttacgtgaaaattcgattatgtcggaatttttacgtatcgtcggagtaatcgttattagtttgttgtttttcgttgtcgtttcgtataattagtcgttaaagatttgtgaatagttcggtaaatcgtcgttatttttcgatttgtagttaagattacgtttgttagtagtagatttttcggtgcgtcgaaggtgttatcgtttatggttgcgtaatcgtcgttaatggacgttaatttaatttgaattagcgataggtcgataattattattataacgttagaaattagcggcgtaataatgcggcgcgttagatgtagaacgcgggagattattatttcggttttttttcggtagttggcgtgcggttagg

SEQ ID NO: 11688 - DNA, 677 bp, Artificial Sequence
  chemically treated genomic DNA (Homo sapiens) CpG-island No: 11688
cctaaccgcacgccaactaccgaaaaaaaaccgaaataataatctcccgcgttctacatctaacgcgccgcattattacgccgctaatttctaacgttataataataattatcgacctatcgctaattcaaattaaattaacgtccattaacgacgattacgcaaccataaacgataacaccttcgacgcaccgaaaaatctactactaacaaacgtaatcttaactacaaatcgaaaaataacgacgatttaccgaactattcacaaatctttaacgactaattatacgaaacgacaacgaaaaacaacaaactaataacgattactccgacgatacgtaaaaattccgacataatcgaattttcacgtaaattcccgaatcgctacttcgacgtaacaattaccgaacaacacgcgataacctttaatacgaatctaacgattaataaatacaaacccattatcgcgatttactccactttcctacaacgcgcctataatcaaatactacataacgtaacgattcaaaaacttccgatcctattcgccatcgaccgcgcgaacattattaatactaacgatcaaacccatcaaaatacttttaatctctcttacctacgctacataccgaaaataatcattataaccccgaacgataaaaacgaatatcgccaaa

SEQ ID NO: 11689 - DNA, 706 bp, Artificial Sequence
  chemically treated genomic DNA (Homo sapiens) CpG-island No: 11689
agcgttcggatttagtttttttttcggcgttaattttttgtcgttgagaaaggcggggagtatagtttgcgggttcgcggtcgaggtagtgggggtcgttcggatttttggagagggcgtattgtgattattcgtttcgtgtagtaggaatttaggcggcgcgtgcgcgttttagtttttcgattggggttttttagttcggatttcgagattttaggggattaggttcgttttttttgtttttttgtcgttacgcgcgtttatttggttaggtcggttcggttttcggttttggtcggaggggttttggcgtttgcgtttttagggcggtcgcggttggggttggggttgttagtcgggttcggttaagtttcggggttgggacgagggatagaggggggggcggagagtcgtcgtttttgtttttcgttcgtttcgttttttttttttttttttttcggcggcggttgtaatgaattttagatgtgatcggtcggttggtcggggcgtacgcgggggtcgataggagttgtacggagggttttttgttcgttttttttattcgattttttattttgttttttttagtttttattcgtgagaatcggtcggcgcgaaacgttacgtagtttggtgacgttatagtatttttggttaggtggttttaatttgaaataattgtttttaattttaggttatttttggg

SEQ ID NO: 11690 - DNA, 706 bp, Artificial Sequence
  chemically treated genomic DNA (Homo sapiens) CpG-island No: 11690
cccaaaaataacctaaaattaaaaacaattatttcaaattaaaaccacctaaccaaaaatactataacgtcaccaaactacgtaacgtttcgcgccgaccgattctcacgaataaaaactaaaaaaaacaaaataaaaaatcgaataaaaaaaacgaacaaaaaaccctccgtacaactcctatcgacccccgcgtacgccccgaccaaccgaccgatcacatctaaaattcattacaaccgccgccgaaaaaaaaaaaaaaaaaaaacgaaacgaacgaaaaacaaaaacgacgactctccgcccccccctctatccctcgtcccaaccccgaaacttaaccgaacccgactaacaaccccaaccccaaccgcgaccgccctaaaaacgcaaacgccaaaacccctccgaccaaaaccgaaaaccgaaccgacctaaccaaataaacgcgcgtaacgacaaaaaaacaaaaaaaacgaacctaatcccctaaaatctcgaaatccgaactaaaaaaccccaatcgaaaaactaaaacgcgcacgcgccgcctaaattcctactacacgaaacgaataatcacaatacgccctctccaaaaatccgaacgacccccactacctcgaccgcgaacccgcaaactatactccccgcctttctcaacgacaaaaaattaacgccgaaaaaaaaactaaatccgaacgct

SEQ ID NO: 11691 - DNA, 706 bp, Artificial Sequence
  chemically treated genomic DNA (Homo sapiens) CpG-island No: 11691
tttagaggtaatttggggttgaagatagttgttttaggttgaggttatttggttaggagtattgtgacgttattaggttgcgtgacgtttcgcgtcggtcggtttttacgggtgggggttgggaggggtagagtgagagatcgggtggggggggcggataaagggtttttcgtgtagtttttgtcggttttcgcgtgcgtttcggttagtcggtcggttatatttggaatttattgtagtcgtcgtcggaaaggggaggagaggagggcggggcgagcggggggtagaggcggcggtttttcgtttttttttttgtttttcgttttagtttcgggatttagtcgagttcggttggtaattttagttttagtcgcggtcgttttggggacgtagacgttaaggttttttcggttagggtcgggagtcgggtcggtttagttaggtgagcgcgcgtggcgataaggaggtagaaaaggcgggtttggttttttgaggtttcgggattcgagttgaggggttttaatcggggggttggggcgcgtacgcgtcgtttgggtttttgttgtacggagcgggtggttatagtgcgttttttttaagaattcgggcggtttttattgtttcggtcgcgaattcgtagattgtgtttttcgttttttttagcggtaggaagttggcgtcggggagaaggttgaattcgagcgtt

SEQ ID NO: 11692 - DNA, 706 bp, Artificial Sequence
  chemically treated genomic DNA (Homo sapiens) CpG-island No: 11692
aacgctcgaattcaaccttctccccgacgccaacttcctaccgctaaaaaaaacgaaaaacacaatctacgaattcgcgaccgaaacaataaaaaccgcccgaattcttaaaaaaaacgcactataaccacccgctccgtacaacaaaaacccaaacgacgcgtacgcgccccaaccccccgattaaaacccctcaactcgaatcccgaaacctcaaaaaaccaaacccgccttttctacctccttatcgccacgcgcgctcacctaactaaaccgacccgactcccgaccctaaccgaaaaaaccttaacgtctacgtccccaaaacgaccgcgactaaaactaaaattaccaaccgaactcgactaaatcccgaaactaaaacgaaaaacaaaaaaaaaaacgaaaaaccgccgcctctaccccccgctcgccccgccctcctctcctcccctttccgacgacgactacaataaattccaaatataaccgaccgactaaccgaaacgcacgcgaaaaccgacaaaaactacacgaaaaaccctttatccgccccccccacccgatctctcactctacccctcccaacccccacccgtaaaaaccgaccgacgcgaaacgtcacgcaacctaataacgtcacaatactcctaaccaaataacctcaacctaaaacaactatcttcaaccccaaattacctctaaa

SEQ ID NO: 11693 - DNA, 617 bp, Artificial Sequence
  chemically treated genomic DNA (Homo sapiens) CpG-island No: 11693
tgtggtcgtttttagtaacgtttttttttatttcgtagtcggtttttttttttattatcgtttttttacgtttcgtttttggtttttttcgatttcgcgtggattcggtgtttgggcgttttcgttaacgattttcgcgtattttagcgttggtgtcgttcggtttttttcgcgtacgcgtatcgtggtatttttcgttacgtttttatatcgttttttttaatatttggttggttacgtttttcgggaggtttcggattagtattttgcggcggttacggaattggcgttcggtgtgttttaggcgttttcggattttttttggatttagaggcggtagtttttttttcggcgttcggcgtttcgcggtatcgtcggtttcgatttcggttttagatttagggtttagcgggggtcggtgagtaacggatacgttcgtcgttattttgggaaattcggcgttttttgggattagcgagtcggggcggagcggtatagagcggtaacgagggcgcgttcgtcgattggttgggagaaattttatttttttttcgttttttttgtttcgttggttaagttttagtttattttttaagagtttaagttgcgtttgcgcg

SEQ ID NO: 11694 - DNA, 617 bp, Artificial Sequence
  chemically treated genomic DNA (Homo sapiens) CpG-island No: 11694
cgcgcaaacgcaacttaaactcttaaaaaataaactaaaacttaaccaacgaaacaaaaaaaacgaaaaaaaaataaaatttctcccaaccaatcgacgaacgcgccctcgttaccgctctataccgctccgccccgactcgctaatcccaaaaaacgccgaatttcccaaaataacgacgaacgtatccgttactcaccgacccccgctaaaccctaaatctaaaaccgaaatcgaaaccgacgataccgcgaaacgccgaacgccgaaaaaaaaactaccgcctctaaatccaaaaaaaatccgaaaacgcctaaaacacaccgaacgccaattccgtaaccgccgcaaaatactaatccgaaacctcccgaaaaacgtaaccaaccaaatattaaaaaaaacgatataaaaacgtaacgaaaaataccacgatacgcgtacgcgaaaaaaaccgaacgacaccaacgctaaaatacgcgaaaatcgttaacgaaaacgcccaaacaccgaatccacgcgaaatcgaaaaaaaccaaaaacgaaacgtaaaaaaacgataataaaaaaaaaaaccgactacgaaataaaaaaaaacgttactaaaaacgaccaca

SEQ ID NO: 11695 - DNA, 617 bp, Artificial Sequence
  chemically treated genomic DNA (Homo sapiens) CpG-island No: 11695
cgcgtagacgtagtttgaatttttgagaggtgggttggggtttagttaacggggtaaggggggcgggaaggaggtggggttttttttagttaatcgacgggcgcgttttcgttgtcgttttatgtcgtttcgtttcggttcgttggttttagaaggcgtcgggttttttaagatggcggcggacgtgttcgttatttatcggttttcgttgagttttaagtttggggtcgaagtcgaagtcggcgatgtcgcggagcgtcgggcgtcggaagaagagttgtcgtttttagatttagaagagattcggaaacgtttggaatatatcgagcgttagtttcgtaatcgtcgtaagatattgattcggggtttttcgggggacgtgattaattaggtattggggggggcggtgtaggagcgtggcgggaaatattacggtgcgcgtgcgcggggggaatcgggcgatattaacgttgaggtgcgcgggggtcgttggcgggggcgtttaagtatcggatttacgcgggatcgggagagattaagagcgggacgtgggggggcgatgatgaaaggggaaatcgattgcgaagtgagggagggcgttgttaggggcgattata

SEQ ID NO: 11696 - DNA, 617 bp, Artificial Sequence
  chemically treated genomic DNA (Homo sapiens) CpG-island No: 11696
tataatcgcccctaacaacgccctccctcacttcgcaatcgatttcccctttcatcatcgcccccccacgtcccgctcttaatctctcccgatcccgcgtaaatccgatacttaaacgcccccgccaacgacccccgcgcacctcaacgttaatatcgcccgattccccccgcgcacgcgcaccgtaatatttcccgccacgctcctacaccgccccccccaatacctaattaatcacgtcccccgaaaaaccccgaatcaatatcttacgacgattacgaaactaacgctcgatatattccaaacgtttccgaatctcttctaaatctaaaaacgacaactcttcttccgacgcccgacgctccgcgacatcgccgacttcgacttcgaccccaaacttaaaactcaacgaaaaccgataaataacgaacacgtccgccgccatcttaaaaaacccgacgccttctaaaaccaacgaaccgaaacgaaacgacataaaacgacaacgaaaacgcgcccgtcgattaactaaaaaaaaccccacctccttcccgccccccttaccccgttaactaaaccccaacccacctctcaaaaattcaaactacgtctacgcg

SEQ ID NO: 11697 - DNA, 587 bp, Artificial Sequence
  chemically treated genomic DNA (Homo sapiens) CpG-island No: 11697
tcgtttagcgattaatggttttatcggtataggtggaaaacgaatcggtatcgggcgtggtaatcgttattttcgttaatattcgtataattataattattagtagttcggcgaatagataggttagtaatatcgtcgggttcgtttcggcgatggcgacgttggaatcgataaatagatttgcgtcgataatatcggtaatagataatatggtgacgtggcgtgattttagttcgtcgtttaatttatgtggttgcgatgattgttttattttgaattttttcgaaagtgtgttattgttataagtacgcgtgtttgtaggtcgatttgtattggtttgtatatatttttcgtttaagtagaaacgcggtggagtttagtttgatgattacgttttcgttcggattaattagttgcgaggtcgttttaggattacgtatttttttatcgtgattttgcgtttgatgtagatttatcggcgtttagcgcgggtttgtgtgggtaatagtttttgcgttattgcgattttttttagtttgtcgttttcgttaagtttattgatatcgcgtcggtagtggtaggcgaaa

SEQ ID NO: 11698 - DNA, 587 bp, Artificial Sequence
  chemically treated genomic DNA (Homo sapiens) CpG-island No: 11698
tttcgcctaccactaccgacgcgatatcaataaacttaacgaaaacgacaaactaaaaaaaatcgcaataacgcaaaaactattacccacacaaacccgcgctaaacgccgataaatctacatcaaacgcaaaatcacgataaaaaaatacgtaatcctaaaacgacctcgcaactaattaatccgaacgaaaacgtaatcatcaaactaaactccaccgcgtttctacttaaacgaaaaatatatacaaaccaatacaaatcgacctacaaacacgcgtacttataacaataacacactttcgaaaaaattcaaaataaaacaatcatcgcaaccacataaattaaacgacgaactaaaatcacgccacgtcaccatattatctattaccgatattatcgacgcaaatctatttatcgattccaacgtcgccatcgccgaaacgaacccgacgatattactaacctatctattcgccgaactactaataattataattatacgaatattaacgaaaataacgattaccacgcccgataccgattcgttttccacctataccgataaaaccattaatcgctaaacga

SEQ ID NO: 11699 - DNA, 587 bp, Artificial Sequence
  chemically treated genomic DNA (Homo sapiens) CpG-island No: 11699
tttcgtttgttattgtcgacgcgatattaataaatttgacgaaagcggtaaattgaaaaaagtcgtaatggcgtagaagttattatttatataggttcgcgttggacgtcgatgaatttgtattaggcgtagaattacgatgaaaaagtacgtagttttaaagcggtttcgtagttggttaattcgggcgaaagcgtagttattaagttgggttttatcgcgtttttgtttgggcgggaaatgtgtgtaagttagtgtaaatcgatttgtaggtacgcgtatttatggtagtgatatattttcgagaggatttaggatggggtaattatcgtaattatatgagttaggcggcgggttgaagttacgttacgttattatgttgtttattgtcggtgttatcggcgtaagtttgtttgtcggttttagcgtcgttatcgtcgaagcgggttcggcggtattattggtttatttgttcgtcgggttattggtggttatgattatgcggatgttggcggaaatggcggttgttacgttcgatatcggttcgttttttatttatgtcgataaagttattggtcgttgggcgg

SEQ ID NO: 11700 - DNA, 587 bp, Artificial Sequence
  chemically treated genomic DNA (Homo sapiens) CpG-island No: 11700
ccgcccaacgaccaataactttatcgacataaataaaaaacgaaccgatatcgaacgtaacaaccgccatttccgccaacatccgcataatcataaccaccaataacccgacgaacaaataaaccaataataccgccgaacccgcttcgacgataacgacgctaaaaccgacaaacaaacttacgccgataacaccgacaataaacaacataataacgtaacgtaacttcaacccgccgcctaactcatataattacgataattaccccatcctaaatcctctcgaaaatatatcactaccataaatacgcgtacctacaaatcgatttacactaacttacacacatttcccgcccaaacaaaaacgcgataaaacccaacttaataactacgctttcgcccgaattaaccaactacgaaaccgctttaaaactacgtactttttcatcgtaattctacgcctaatacaaattcatcgacgtccaacgcgaacctatataaataataacttctacgccattacgacttttttcaatttaccgctttcgtcaaatttattaatatcgcgtcgacaataacaaacgaaa

SEQ ID NO: 11701 - DNA, 510 bp, Artificial Sequence
  chemically treated genomic DNA (Homo sapiens) CpG-island No: 11701
aaatttagcggtgtgtcggtaattatcgacgtatcgttggagatggagcgtagttatcgttagtattgcgtgttggacgatttaattttggcgaaggtttattaaagttagcgtaagcgttatagcgaaatgttcgattttttattgttaaatgtcgggtcgttcgtttgcggagcgtcgtttatttcggtaattagcgtatcgttggcgattggcgtaggcggaatgatattggcgggttataatggcgcgatatattttgaagcgttttgtttgcgcgattatttcgtggaagttaaatgttttatttagtacgttcggataaggtaggaaggcgttcgttataattcgtagttcgtcgtcgttattaagatgacgtatcgtatcgcgaattagcgtttgcgtcgtatttaggttggtttgtattttatcgtggaacggcgggttggagatgattatattaaaacgattttttatttcggaaaagacgttgttggtaaagattttatt

SEQ ID NO: 11702 - DNA, 510 bp, Artificial Sequence
  chemically treated genomic DNA (Homo sapiens) CpG-island No: 11702
aataaaatctttaccaacaacgtcttttccgaaataaaaaatcgttttaatataatcatctccaacccgccgttccacgataaaatacaaaccaacctaaatacgacgcaaacgctaattcgcgatacgatacgtcatcttaataacgacgacgaactacgaattataacgaacgccttcctaccttatccgaacgtactaaataaaacatttaacttccacgaaataatcgcgcaaacaaaacgcttcaaaatatatcgcgccattataacccgccaatatcattccgcctacgccaatcgccaacgatacgctaattaccgaaataaacgacgctccgcaaacgaacgacccgacatttaacaataaaaaatcgaacatttcgctataacgcttacgctaactttaataaaccttcgccaaaattaaatcgtccaacacgcaatactaacgataactacgctccatctccaacgatacgtcgataattaccgacacaccgctaaattt

SEQ ID NO: 11703 - DNA, 510 bp, Artificial Sequence
  chemically treated genomic DNA (Homo sapiens) CpG-island No: 11703
ggtgaagtttttgttagtaacgtttttttcgaggtgaaaggtcgttttgatatgattatttttaattcgtcgttttacgatgggatgtaaattagtttggatgcggcgtaaacgttgattcgcggtgcggtgcgttattttaatagcggcggcgagttgcgaattgtagcgaacgtttttttgttttattcggacgtgttggatgagatatttggtttttacgaagtgatcgcgtaaatagggcgttttaaggtgtatcgcgttattatgattcgttagtgttatttcgtttgcgttagtcgttaacgatacgttggttgtcgaagtgagcgacgtttcgtaggcgaacgattcgatatttaataatgaggaatcgagtatttcgttgtaacgtttgcgttggttttgataaattttcgttagggttgggtcgtttagtacgtaatattgacggtaattacgttttatttttagcggtacgtcgatgattgtcggtatatcgttggattt

SEQ ID NO: 11704 - DNA, 510 bp, Artificial Sequence
  chemically treated genomic DNA (Homo sapiens) CpG-island No: 11704
aaatccaacgatataccgacaatcatcgacgtaccgctaaaaataaaacgtaattaccgtcaatattacgtactaaacgacccaaccctaacgaaaatttatcaaaaccaacgcaaacgttacaacgaaatactcgattcctcattattaaatatcgaatcgttcgcctacgaaacgtcgctcacttcgacaaccaacgtatcgttaacgactaacgcaaacgaaataacactaacgaatcataataacgcgatacaccttaaaacgccctatttacgcgatcacttcgtaaaaaccaaatatctcatccaacacgtccgaataaaacaaaaaaacgttcgctacaattcgcaactcgccgccgctattaaaataacgcaccgcaccgcgaatcaacgtttacgccgcatccaaactaatttacatcccatcgtaaaacgacgaattaaaaataatcatatcaaaacgacctttcacctcgaaaaaaacgttactaacaaaaacttcacc

SEQ ID NO: 11705 - DNA, 597 bp, Artificial Sequence
  chemically treated genomic DNA (Homo sapiens) CpG-island No: 11705
acggcgcggtcgattattttcgcgattttggtatgaatatacggtacgtagttatatattgcggggacgatttttatattacgtaggatgttaatgtgtatttattttgttggatttgagacgtatttgttagtcgtgttataagtgatcgcgtttgaatatttgcgggtatagattagtttatgtaggtgcgtcgttgtgtattaaagtaacgttgatttgttatacgtatttcgtgtaggttgaacgtattgattttattacggcgtgcgtagcgtcgacgttttgtatatcgaattaggaagacggtaagtcggaggttcgagtttgattgacgtacgagatagttcggaagaagtagcggacgttaaggttacgtcgtaattacgtatttttgtttttagatcgcgatttggtcgcgagttttatttttattgttcgtttggatattaataagggttttcgtcgtatatggagtacgcggtttacgtgtagcgttatcgtaagttatatgtgtagttcgttaaagatatcggttttggatttgattgtcgtgtgttgtatttgcgtgcgtagtgtgttattaatatcgaatta

SEQ ID NO: 11706 - DNA, 597 bp, Artificial Sequence
  chemically treated genomic DNA (Homo sapiens) CpG-island No: 11706
taattcgatattaataacacactacgcacgcaaatacaacacacgacaatcaaatccaaaaccgatatctttaacgaactacacatataacttacgataacgctacacgtaaaccgcgtactccatatacgacgaaaacccttattaatatccaaacgaacaataaaaataaaactcgcgaccaaatcgcgatctaaaaacaaaaatacgtaattacgacgtaaccttaacgtccgctacttcttccgaactatctcgtacgtcaatcaaactcgaacctccgacttaccgtcttcctaattcgatatacaaaacgtcgacgctacgcacgccgtaataaaatcaatacgttcaacctacacgaaatacgtataacaaatcaacgttactttaatacacaacgacgcacctacataaactaatctatacccgcaaatattcaaacgcgatcacttataacacgactaacaaatacgtctcaaatccaacaaaataaatacacattaacatcctacgtaatataaaaatcgtccccgcaatatataactacgtaccgtatattcataccaaaatcgcgaaaataatcgaccgcgccgt

SEQ ID NO: 11707 - DNA, 597 bp, Artificial Sequence
  chemically treated genomic DNA (Homo sapiens) CpG-island No: 11707
tgattcgatgttgatggtatattgcgtacgtagatatagtatacggtagttaaatttaagatcgatgtttttgacgaattgtatatgtaatttgcggtggcgttgtacgtgggtcgcgtgttttatgtgcggcgagaatttttgttgatgtttagacgggtagtgagagtgagattcgcggttagatcgcggtttgggggtagaagtgcgtgattgcggcgtgattttgacgttcgttgtttttttcggattgtttcgtacgttagttaagttcgaattttcggtttgtcgtttttttggttcggtgtataggacgtcgacgttgcgtacgtcgtggtagagttaatgcgtttaatttgtacgaagtgcgtgtgataaattaacgttgttttagtgtatagcgacgtatttgtatgggttggtttatattcgtaagtgtttagacgcgattatttgtggtacggttaatagatacgttttaggtttagtagagtggatgtatattgatattttgcgtgatatggagatcgttttcgtagtgtgtggttgcgtgtcgtgtgtttatgttagagtcgcgggagtgatcggtcgcgtcgt

SEQ ID NO: 11708 - DNA, 597 bp, Artificial Sequence
  chemically treated genomic DNA (Homo sapiens) CpG-island No: 11708
acgacgcgaccgatcactcccgcgactctaacataaacacacgacacgcaaccacacactacgaaaacgatctccatatcacgcaaaatatcaatatacatccactctactaaacctaaaacgtatctattaaccgtaccacaaataatcgcgtctaaacacttacgaatataaaccaacccatacaaatacgtcgctatacactaaaacaacgttaatttatcacacgcacttcgtacaaattaaacgcattaactctaccacgacgtacgcaacgtcgacgtcctatacaccgaaccaaaaaaacgacaaaccgaaaattcgaacttaactaacgtacgaaacaatccgaaaaaaacaacgaacgtcaaaatcacgccgcaatcacgcacttctacccccaaaccgcgatctaaccgcgaatctcactctcactacccgtctaaacatcaacaaaaattctcgccgcacataaaacacgcgacccacgtacaacgccaccgcaaattacatatacaattcgtcaaaaacatcgatcttaaatttaactaccgtatactatatctacgtacgcaatataccatcaacatcgaatca

SEQ ID NO: 11709 - DNA, 515 bp, Artificial Sequence
  chemically treated genomic DNA (Homo sapiens) CpG-island No: 11709
cgggattttcggtgcggtgatcgtcggtattatcgtttggatgttgtatgagcgtttttataatattcgtttgtcggatgcgttggtatttttcggcggtacggtttcgtattaattattttttcgttggtgatgggttttgtcggtttggtgattttattagtttggtcgattttcgttatgggtattagcggtttgggttatatgataaatagcgcgggtgatttcggatcgatgttgtttggtatcggtgaacgtttgttgttgtcgtttggtttgtattatattttggtggtattaattcgttttatcgacgtagggtagcgagggaaagtttgcggttaaatcgttagcggcgtattgattattttttaggggtaattgagttgttcgattatttacggtttttttgaaagcgggacggttttttttggtaaggtaaaatgggtgcgttttttgggggtttgtaggtgtagcgttagtatgtagtaatgcgcgagttcggaaaatcggta

SEQ ID NO: 11710 - DNA, 515 bp, Artificial Sequence
  chemically treated genomic DNA (Homo sapiens) CpG-island No: 11710
taccgattttccgaactcgcgcattactacatactaacgctacacctacaaacccccaaaaaacgcacccattttaccttaccaaaaaaaaccgtcccgctttcaaaaaaaccgtaaataatcgaacaactcaattacccctaaaaaataatcaatacgccgctaacgatttaaccgcaaactttccctcgctaccctacgtcgataaaacgaattaataccaccaaaatataatacaaaccaaacgacaacaacaaacgttcaccgataccaaacaacatcgatccgaaatcacccgcgctatttatcatataacccaaaccgctaatacccataacgaaaatcgaccaaactaataaaatcaccaaaccgacaaaacccatcaccaacgaaaaaataattaatacgaaaccgtaccgccgaaaaataccaacgcatccgacaaacgaatattataaaaacgctcatacaacatccaaacgataataccgacgatcaccgcaccgaaaatcccg

SEQ ID NO: 11711 - DNA, 515 bp, Artificial Sequence
  chemically treated genomic DNA (Homo sapiens) CpG-island No: 11711
tgtcgatttttcggattcgcgtattattatatattaacgttgtatttgtagatttttaagaaacgtatttattttattttgttaaaggaaatcgtttcgtttttagaaaaatcgtgagtggtcgggtaatttaattgtttttggaagatggttagtgcgtcgttgacggtttgatcgtagattttttttcgttgttttgcgtcggtaaagcgaattaatgttattagaatgtgatgtagattaaacggtaatagtagacgtttatcggtattaaatagtatcggttcgaaattattcgcgttgtttattatatggtttaagtcgttaatatttatggcgaaaatcggttagattaatggaattattaggtcgataaggtttattattagcgaggagataattggtacgaagtcgtatcgtcgaagaatgttagcgtattcggtaggcggatattatggaaacgtttatgtagtatttagacgataatatcggcgattatcgtatcgaggatttcg

SEQ ID NO: 11712 - DNA, 515 bp, Artificial Sequence
  chemically treated genomic DNA (Homo sapiens) CpG-island No: 11712
cgaaatcctcgatacgataatcgccgatattatcgtctaaatactacataaacgtttccataatatccgcctaccgaatacgctaacattcttcgacgatacgacttcgtaccaattatctcctcgctaataataaaccttatcgacctaataattccattaatctaaccgattttcgccataaatattaacgacttaaaccatataataaacaacgcgaataatttcgaaccgatactatttaataccgataaacgtctactattaccgtttaatctacatcacattctaataacattaattcgctttaccgacgcaaaacaacgaaaaaaaatctacgatcaaaccgtcaacgacgcactaaccatcttccaaaaacaattaaattacccgaccactcacgatttttctaaaaacgaaacgatttcctttaacaaaataaaataaatacgtttcttaaaaatctacaaatacaacgttaatatataataatacgcgaatccgaaaaatcgaca

SEQ ID NO: 11713 - DNA, 985 bp, Artificial Sequence
  chemically treated genomic DNA (Homo sapiens) CpG-island No: 11713
ttggtggaggagatgattggtttacgttttcgtaataaacgcgttagtgttttcggtttttacggttggagcggcggtgcggtggatcgtttttttacgcgtttgtaggatgcgggtttcgaaatgtcgtttagtttgaaagcgaaatggcgattagattaggacgttttgaagttatgtcgtgaatacggtcgcgaaatcgttcgttagtgggcgttcgtcggttgtcgtagagtacggtgaatacggtagttaaagaagaaatttttgttattacgacggttgatttcggtttacggatgtagtgtagcgtttgttagtggatttacgattcggtaaaaggcgagttaatgtaggacgttgcgttaggaacgtcgtggagtgaagtttcggataattttttttgttcggaatgttttttcggtaaagacgttttggaagaattggtatcggaggtaaatgagtaacggtattgtgattatcgttcgggtttttataatgtatgtttgttagtttatatattatcgtcgtatttagttaatttattcgtcgcgaatcggttttttttttattttcgggtaataatacgttatatatgttacgattcggaatggtgtcgtcgttggtaatcgttaataattgagcgttaggtcgggcggttaatatttcggtttttttgttttagattagtttggggcgaaaagtagaaaaatcgttagagggatagcgttcggaaagtatatttagcgtggcgttaaaaatacgttttggtagatttttttacggtgcggtacggcgtacgcgggagtattattcgtttatttgtaatgtatttatcgtcgcggcggtaacggtttgttgcgtaaggacgtcgagaggattatgcggtggtgttaggttttttagtttgtttgcgaatatatattttataatgattgcggaatcgattaaattatatttggcggttttttttggtaatcgttaa

SEQ ID NO: 11714 - DNA, 985 bp, Artificial Sequence
  chemically treated genomic DNA (Homo sapiens) CpG-island No: 11714
ttaacgattaccaaaaaaaaccgccaaatataatttaatcgattccgcaatcattataaaatatatattcgcaaacaaactaaaaaacctaacaccaccgcataatcctctcgacgtccttacgcaacaaaccgttaccgccgcgacgataaatacattacaaataaacgaataatactcccgcgtacgccgtaccgcaccgtaaaaaaatctaccaaaacgtatttttaacgccacgctaaatatactttccgaacgctatccctctaacgatttttctacttttcgccccaaactaatctaaaacaaaaaaaccgaaatattaaccgcccgacctaacgctcaattattaacgattaccaacgacgacaccattccgaatcgtaacatatataacgtattattacccgaaaataaaaaaaaaaccgattcgcgacgaataaattaactaaatacgacgataatatataaactaacaaacatacattataaaaacccgaacgataatcacaataccgttactcatttacctccgataccaattcttccaaaacgtctttaccgaaaaaacattccgaacaaaaaaaattatccgaaacttcactccacgacgttcctaacgcaacgtcctacattaactcgccttttaccgaatcgtaaatccactaacaaacgctacactacatccgtaaaccgaaatcaaccgtcgtaataacaaaaatttcttctttaactaccgtattcaccgtactctacgacaaccgacgaacgcccactaacgaacgatttcgcgaccgtattcacgacataacttcaaaacgtcctaatctaatcgccatttcgctttcaaactaaacgacatttcgaaacccgcatcctacaaacgcgtaaaaaaacgatccaccgcaccgccgctccaaccgtaaaaaccgaaaacactaacgcgtttattacgaaaacgtaaaccaatcatctcctccaccaa

SEQ ID NO: 11715 - DNA, 985 bp, Artificial Sequence
  chemically treated genomic DNA (Homo sapiens) CpG-island No: 11715
ttaacggttgttagaaagagtcgttagatgtgatttagtcgatttcgtagttattgtagagtgtatgttcgtaggtaggttggaaaatttgatattatcgtataattttttcgacgtttttgcgtagtaaatcgttgtcgtcgcggcgatggatgtattataggtagacgaatggtattttcgcgtacgtcgtgtcgtatcgtggaaagatttgttaagacgtgtttttgacgttacgttggatatgtttttcgggcgttatttttttggcgatttttttgtttttcgttttaaattggtttggaatagggagatcgggatattgatcgttcgatttggcgtttaattgttggcggttattagcggcggtattatttcggatcgtggtatgtatagcgtgttattattcgaaggtgaagaaaaggtcggttcgcggcgggtgggttaattggatgcggcgatggtatatgggttggtaggtatgtattgtggaagttcgaacgatgattataatgtcgttatttatttgttttcgatgttagtttttttaagacgtttttgtcgagggagtatttcgggtagaggaagttattcgggattttattttacggcgtttttggcgtaacgttttgtattggttcgttttttgtcggatcgtaaatttattggtagacgttgtattgtattcgtgggtcgaggttagtcgtcgtggtggtagaggttttttttttaattatcgtatttatcgtgttttgcggtagtcggcgagcgtttattgacgggcgatttcgcgatcgtgtttacggtataattttagagcgttttggtttggtcgttatttcgtttttaggttaagcgatatttcgaaattcgtattttgtaggcgcgtggaaagacgatttatcgtatcgtcgttttagtcgtgagagtcgaaagtattggcgcgtttgttacggaagcgtaaattagttattttttttattag

SEQ ID NO: 11716 - DNA, 985 bp, Artificial Sequence
  chemically treated genomic DNA (Homo sapiens) CpG-island No: 11716
ctaataaaaaaaataactaatttacgcttccgtaacaaacgcgccaatactttcgactctcacgactaaaacgacgatacgataaatcgtctttccacgcgcctacaaaatacgaatttcgaaatatcgcttaacctaaaaacgaaataacgaccaaaccaaaacgctctaaaattataccgtaaacacgatcgcgaaatcgcccgtcaataaacgctcgccgactaccgcaaaacacgataaatacgataattaaaaaaaaaacctctaccaccacgacgactaacctcgacccacgaatacaatacaacgtctaccaataaatttacgatccgacaaaaaacgaaccaatacaaaacgttacgccaaaaacgccgtaaaataaaatcccgaataacttcctctacccgaaatactccctcgacaaaaacgtcttaaaaaaactaacatcgaaaacaaataaataacgacattataatcatcgttcgaacttccacaatacatacctaccaacccatataccatcgccgcatccaattaacccacccgccgcgaaccgaccttttcttcaccttcgaataataacacgctatacataccacgatccgaaataataccgccgctaataaccgccaacaattaaacgccaaatcgaacgatcaatatcccgatctccctattccaaaccaatttaaaacgaaaaacaaaaaaatcgccaaaaaaataacgcccgaaaaacatatccaacgtaacgtcaaaaacacgtcttaacaaatctttccacgatacgacacgacgtacgcgaaaataccattcgtctacctataatacatccatcgccgcgacgacaacgatttactacgcaaaaacgtcgaaaaaattatacgataatatcaaattttccaacctacctacgaacatacactctacaataactacgaaatcgactaaatcacatctaacgactctttctaacaaccgttaa

SEQ ID NO: 11717 - DNA, 517 bp, Artificial Sequence
  chemically treated genomic DNA (Homo sapiens) CpG-island No: 11717
gcgatttattgtaacggtgtttagttatttggcgtattttattgttgtttattttttatcgacgtggtgtttaggtcgtcgggttggagtagatgtgttttcgtcgtcgtcgttattttgttggcgcgatttttcgttgtcgtattgacgtatagcgggaatagggcggtcgcggttaattgattgcgtatttaatgttttttttattcgatttttattgattataaaggcgcgattggtttagtatcgttaacgtcgcgcgttattattttttggcgttcggtattaatttgttagcgtaaattttgacgttgggtttcgtttgttagatgtagcggtaatttcggcgttttgatttttattagtatcgtcgggagttttagcggcgtgttattgtcgagaagattttttgttagtattatcgcgttaagttgaatcggttggaggaacggtaatatttgatcgttaattttcgcgtaatcgtttagcgcgtaaatatcggtattattggtttgta

SEQ ID NO: 11718 - DNA, 517 bp, Artificial Sequence
  chemically treated genomic DNA (Homo sapiens) CpG-island No: 11718
tacaaaccaataataccgatatttacgcgctaaacgattacgcgaaaattaacgatcaaatattaccgttcctccaaccgattcaacttaacgcgataatactaacaaaaaatcttctcgacaataacacgccgctaaaactcccgacgatactaataaaaatcaaaacgccgaaattaccgctacatctaacaaacgaaacccaacgtcaaaatttacgctaacaaattaataccgaacgccaaaaaataataacgcgcgacgttaacgatactaaaccaatcgcgcctttataatcaataaaaatcgaataaaaaaaacattaaatacgcaatcaattaaccgcgaccgccctattcccgctatacgtcaatacgacaacgaaaaatcgcgccaacaaaataacgacgacgacgaaaacacatctactccaacccgacgacctaaacaccacgtcgataaaaaataaacaacaataaaatacgccaaataactaaacaccgttacaataaatcgc

SEQ ID NO: 11719 - DNA, 517 bp, Artificial Sequence
  chemically treated genomic DNA (Homo sapiens) CpG-island No: 11719
tgtaaattagtaatatcgatatttacgcgttgggcgattgcgcggaaattaacggttaggtattgtcgtttttttagtcgatttaatttagcgcgatggtgttggtaaaaaattttttcggtaataatacgtcgttgaaattttcggcgatgttggtgaaaattaaaacgtcggaattatcgttgtatttggtaggcgaaatttagcgttaggatttacgttggtaaattaatatcgaacgttagggaatggtggcgcgcggcgttgacgatgttgaattagtcgcgtttttgtggttagtgaggatcggatgaaagaggtattaagtgcgtaattagttaatcgcggtcgttttgttttcgttgtacgttaatgcggtagcgaaagatcgcgttaataaaatggcgacggcgacgaaaatatatttgttttaattcggcggtttgaatattacgtcggtgaaaagtgggtaataatgggatgcgttaaatggttgggtatcgttatagtgggtcgt

SEQ ID NO: 11720 - DNA, 517 bp, Artificial Sequence
  chemically treated genomic DNA (Homo sapiens) CpG-island No: 11720
acgacccactataacgatacccaaccatttaacgcatcccattattacccacttttcaccgacgtaatattcaaaccgccgaattaaaacaaatatattttcgtcgccgtcgccattttattaacgcgatctttcgctaccgcattaacgtacaacgaaaacaaaacgaccgcgattaactaattacgcacttaatacctctttcatccgatcctcactaaccacaaaaacgcgactaattcaacatcgtcaacgccgcgcgccaccattccctaacgttcgatattaatttaccaacgtaaatcctaacgctaaatttcgcctaccaaatacaacgataattccgacgttttaattttcaccaacatcgccgaaaatttcaacgacgtattattaccgaaaaaattttttaccaacaccatcgcgctaaattaaatcgactaaaaaaacgacaatacctaaccgttaatttccgcgcaatcgcccaacgcgtaaatatcgatattactaatttaca

SEQ ID NO: 11721 - DNA, 503 bp, Artificial Sequence
  chemically treated genomic DNA (Homo sapiens) CpG-island No: 11721
atcgcgcgtacgtatcgaagcgtaaatgtacggcggcggttacgagcgcggtatgcgtttcggtattttgtttgtttattagatcgttcggaatggggttaggtttatcgtattttaaaaaaagagatggcgatcgagatggaacgtttgcgcggtttgcgtaatcgtttgtggaacggtattaaagatatcgaagaagtttatttgatcgtggtcgcgtttgtttttttttattcgagtcgtttttttcgttaggataattataaaagcgtatcgtgtcgttttgtttatattgttttagttattttttgacggttattgtagcggtaaaggcggcggtttttagtaaattgtgttcgtaatcgtgattatttttatcgggcgttacggatgtaggttgcgcgtaatttgtttgttgatttaaatttgttagggcgttatatttttttagtagggcgataatcggtttgttttgattaaacgaagtaataaaggtatttggg

SEQ ID NO: 11722 - DNA, 503 bp, Artificial Sequence
  chemically treated genomic DNA (Homo sapiens) CpG-island No: 11722
cccaaatacctttattacttcgtttaatcaaaacaaaccgattatcgccctactaaaaaaatataacgccctaacaaatttaaatcaacaaacaaattacgcgcaacctacatccgtaacgcccgataaaaataatcacgattacgaacacaatttactaaaaaccgccgcctttaccgctacaataaccgtcaaaaaataactaaaacaatataaacaaaacgacacgatacgcttttataattatcctaacgaaaaaaacgactcgaataaaaaaaaacaaacgcgaccacgatcaaataaacttcttcgatatctttaataccgttccacaaacgattacgcaaaccgcgcaaacgttccatctcgatcgccatctctttttttaaaatacgataaacctaaccccattccgaacgatctaataaacaaacaaaataccgaaacgcataccgcgctcgtaaccgccgccgtacatttacgcttcgatacgtacgcgcgat

SEQ ID NO: 11723 - DNA, 503 bp, Artificial Sequence
  chemically treated genomic DNA (Homo sapiens) CpG-island No: 11723
tttaaatgtttttattgtttcgtttggttaaggtaaatcggttatcgttttgttgggagaatatgacgttttggtaggtttaagttagtaagtaggttgcgcgtaatttatattcgtgacgttcggtgaaaatggttacggttgcggatataatttgttgggaatcgtcgtttttgtcgttgtaatagtcgttaagaaatggttggaataatatgggtaaggcggtacggtgcgtttttatggttgttttggcgaagaaggcggttcgggtaaagaggagtaggcgcgattacgattaggtaaattttttcgatatttttgatgtcgttttatagacggttacgtaggtcgcgtagacgttttatttcggtcgttatttttttttttgggatgcgataggtttggttttatttcgaacgatttggtgaataggtagagtgtcggaacgtatatcgcgttcgtgatcgtcgtcgtgtatttgcgtttcgatgcgtacgcgcggt

SEQ ID NO: 11724 - DNA, 503 bp, Artificial Sequence
  chemically treated genomic DNA (Homo sapiens) CpG-island No: 11724
accgcgcgtacgcatcgaaacgcaaatacacgacgacgatcacgaacgcgatatacgttccgacactctacctattcaccaaatcgttcgaaataaaaccaaacctatcgcatcccaaaaaaaaaaataacgaccgaaataaaacgtctacgcgacctacgtaaccgtctataaaacgacatcaaaaatatcgaaaaaatttacctaatcgtaatcgcgcctactcctctttacccgaaccgccttcttcgccaaaacaaccataaaaacgcaccgtaccgccttacccatattattccaaccatttcttaacgactattacaacgacaaaaacgacgattcccaacaaattatatccgcaaccgtaaccattttcaccgaacgtcacgaatataaattacgcgcaacctacttactaacttaaacctaccaaaacgtcatattctcccaacaaaacgataaccgatttaccttaaccaaacgaaacaataaaaacatttaaa

SEQ ID NO: 11725 - DNA, 504 bp, Artificial Sequence
  chemically treated genomic DNA (Homo sapiens) CpG-island No: 11725
cgttttacggatgaaacgcgtttttagtcggcgggtaggttcgacgtttgttggttttatagttttcgttttaggaattcgttcgtttggtgttcggtttttttttttgatcgagtgttggtaggttagttttttatgtttgtaggtttagtcgggtgttcgaaagtaggtgcgagtaaagatcgaaaatagtcgtcgtttttttttgtgtatcggcggtaaagcgtttgttgtagcggcgaaattcgtttgtcgttttttttagcgtttcggttagtcgttcgcgttttagagtcggatttagcgttgatgtttgatatatttgttttattaaaggtaacgtggtattttgttagttttcggtaatcgttatattaggtgttgtcggtaatgcgcggattcgcgtttggcgatattgtttaaataaggtagttaattgcgattgagaaagaatagttgttatttgggtggtaagcgttattaggaaggattttttattttcgt

SEQ ID NO: 11726 - DNA, 504 bp, Artificial Sequence
  chemically treated genomic DNA (Homo sapiens) CpG-island No: 11726
acgaaaataaaaaatccttcctaataacgcttaccacccaaataacaactattctttctcaatcgcaattaactaccttatttaaacaatatcgccaaacgcgaatccgcgcattaccgacaacacctaatataacgattaccgaaaactaacaaaataccacgttacctttaataaaacaaatatatcaaacatcaacgctaaatccgactctaaaacgcgaacgactaaccgaaacgctaaaaaaaacgacaaacgaatttcgccgctacaacaaacgctttaccgccgatacacaaaaaaaaacgacgactattttcgatctttactcgcacctactttcgaacacccgactaaacctacaaacataaaaaactaacctaccaacactcgatcaaaaaaaaaaaccgaacaccaaacgaacgaattcctaaaacgaaaactataaaaccaacaaacgtcgaacctacccgccgactaaaaacgcgtttcatccgtaaaacg

SEQ ID NO: 11727 - DNA, 504 bp, Artificial Sequence
  chemically treated genomic DNA (Homo sapiens) CpG-island No: 11727
acgaaagtgaagaattttttttggtgacgtttgttatttagatggtagttatttttttttagtcgtagttgattgttttgtttgggtaatatcgttagacgcgaattcgcgtattatcggtagtatttggtgtggcgattgtcgaaggttggtaggatgttacgttatttttaatggaataggtgtattaggtattaacgttggattcggttttggaacgcgaacgattgatcggggcgttggaagaagcggtaaacgagtttcgtcgttatagtaaacgttttgtcgtcggtgtataaaaagaaacggcggttattttcgatttttattcgtatttgttttcggatattcggttggatttgtaggtatgaaagattaatttattagtattcggttagagagaagggtcgggtattaagcggacggatttttgaaacgggggttataaagttaataaacgtcggatttattcgtcgattgaagacgcgttttattcgtagagcg

SEQ ID NO: 11728 - DNA, 504 bp, Artificial Sequence
  chemically treated genomic DNA (Homo sapiens) CpG-island No: 11728
cgctctacgaataaaacgcgtcttcaatcgacgaataaatccgacgtttattaactttataacccccgtttcaaaaatccgtccgcttaatacccgacccttctctctaaccgaatactaataaattaatctttcatacctacaaatccaaccgaatatccgaaaacaaatacgaataaaaatcgaaaataaccgccgtttctttttatacaccgacgacaaaacgtttactataacgacgaaactcgtttaccgcttcttccaacgccccgatcaatcgttcgcgttccaaaaccgaatccaacgttaatacctaatacacctattccattaaaaataacgtaacatcctaccaaccttcgacaatcgccacaccaaatactaccgataatacgcgaattcgcgtctaacgatattacccaaacaaaacaatcaactacgactaaaaaaaaataactaccatctaaataacaaacgtcaccaaaaaaaattcttcactttcgt

SEQ ID NO: 11729 - DNA, 631 bp, Artificial Sequence
  chemically treated genomic DNA (Homo sapiens) CpG-island No: 11729
ggtcgtcgttttataaatagcgaaatagtcgttattatgattacggtttttttggtcgtcgttttataattaggaaatatttttttttatgttttcggtttttttgttcgtttttttataatcgggaaattttttgttttttttttcgggtttttttggttcgttttttaagaaacggaatttttcgttttttttttttcggtttttttgtttcgtttttttttaatttggaaaatttttttttttttttttcggtttttttgttcggttttttttcggcggggaatttttttttttttttttcggtttttttcgttcggttttttttaatcgggaaatttttttttttttgtttttcgtttttttttttttttttttttcgagggggaatttttttttttcgttttttcggtttttcgtttcgtttttttttttcggggggaattttttttttcgttttttcggttttttcgttcgtttttttttacgaggaaaattttttttttttttttttcgttttttttttttttttttttttcggggaaaaatttttttttcgttttttttttttttttttttttttttttttaggggaaatttttttttcgttttttttttttttggttttttt

SEQ ID NO: 11730 - DNA, 631 bp, Artificial Sequence
  chemically treated genomic DNA (Homo sapiens) CpG-island No: 11730
aaaaaaaccaaaaaaaaaaaaaacgaaaaaaaaatttcccctaaaaaaaaaaaaaaaaaaaaaaaaaaaaaacgaaaaaaaaatttttccccgaaaaaaaaaaaaaaaaaaaaaacgaaaaaaaaaaaaaaaaaattttcctcgtaaaaaaaaacgaacgaaaaaaccgaaaaaacgaaaaaaaaaattccccccgaaaaaaaaaaacgaaacgaaaaaccgaaaaaacgaaaaaaaaaaattccccctcgaaaaaaaaaaaaaaaaaaaaacgaaaaacaaaaaaaaaaaaatttcccgattaaaaaaaaccgaacgaaaaaaaccgaaaaaaaaaaaaaaaaattccccgccgaaaaaaaaccgaacaaaaaaaccgaaaaaaaaaaaaaaaaattttccaaattaaaaaaaaacgaaacaaaaaaaccgaaaaaaaaaaaacgaaaaattccgtttcttaaaaaacgaaccaaaaaaacccgaaaaaaaaaacaaaaaatttcccgattataaaaaaacgaacaaaaaaaccgaaaacataaaaaaaaatatttcctaattataaaacgacgaccaaaaaaaccgtaatcataataacgactatttcgctatttataaaacgacgacc

SEQ ID NO: 11731 - DNA, 631 bp, Artificial Sequence
  chemically treated genomic DNA (Homo sapiens) CpG-island No: 11731
aaaagggttaaaaaaagggaaaacggggggggggttttttttgaaaaaaaaggggggaaaaaaagggaaaaacggggggggggttttttttcggaaaaaaaagggggggaaaaaacgggaaaaggggggggggggtttttttcgtgaaaaaaaacgggcggaaaaatcggaaaaacgggggggggggtttttttcgggaaaaaaaagcggggcggaaaatcgggaaaacggggggggggggttttttttcggaaaaaaaggggggggaaaaacgggaaataggggggggggggtttttcgattggaaaaagtcgggcgagaaaaatcgaaaaaagggggggggggtttttcgtcgggaaaaagtcgggtagaaaaatcggaaaaaaggggggggggttttttagattggaaaaaaacggggtagagaaatcggaaaaagggggacggggggtttcgttttttaaaaaacgggttagagaaattcgaaaaagggggtagggggtttttcgattgtaaaaaaacgggtagggaaatcggaaatatggggaggggtgttttttgattgtaaaacggcggttagggaaatcgtaattatggtgacggttgtttcgttgtttgtaaaacgacggtt

SEQ ID NO: 11732 - DNA, 631 bp, Artificial Sequence
  chemically treated genomic DNA (Homo sapiens) CpG-island No: 11732
aaccgtcgttttacaaacaacgaaacaaccgtcaccataattacgatttccctaaccgccgttttacaatcaaaaaacacccctccccatatttccgatttccctacccgtttttttacaatcgaaaaaccccctaccccctttttcgaatttctctaacccgttttttaaaaaacgaaaccccccgtccccctttttccgatttctctaccccgtttttttccaatctaaaaaaccccccccccttttttccgatttttctacccgactttttcccgacgaaaaacccccccccccttttttcgatttttctcgcccgactttttccaatcgaaaaacccccccccccctatttcccgtttttcccccccctttttttccgaaaaaaaaccccccccccccgttttcccgattttccgccccgcttttttttcccgaaaaaaacccccccccccgtttttccgatttttccgcccgttttttttcacgaaaaaaaccccccccccccttttcccgttttttcccccccttttttttccgaaaaaaaaccccccccccgtttttccctttttttccccccttttttttcaaaaaaaaccccccccccgttttccctttttttaaccctttt

SEQ ID NO: 11733 - DNA, 1161 bp, Artificial Sequence
  chemically treated genomic DNA (Homo sapiens) CpG-island No: 11733
cgttacgtgatgcgatcgggtttcgtttcggcggtaatacgttgtatagacgcgtcgggtgtttcgtgcgtatgcgcggtaggtttttcgggacgagttggaggtagagcgtgagtataaagtgatcggtttcggtcgtacgtagtagtttttttatttttcggttaagttagggttttttttttttcgcggagtcgtaattacgggtagttcgtgtaggtaacggtaggtttaggttttcgtatgagcggagggtttttcgcgcgattttgaatggttcgggcgcgcgcggtcgtgtgggagttgtagtttttcgttttcgttcgcgcggatttcgtttttcgtggtgtttcgggcggttcgttttcggcgtagttagttacgagtcggcgtacgcggtttcggttcggttgattttgcggagttatggagggcggtttcggtttcgatttcgggggtttcggtagcgggaagttggatttagggtttataatggagtaggtgaaagtgtagatcgtcgtggttaacgcgtaggagttgttgtaggtgcggggttggtcggggacgggcgttgggggcgatagggttatttttgggggtcgacgtcgcggttaaagtttcgcgtgtttttatagaggatgacggataagtgttttcggaagtgtatagggaaatttgggggttttttggataatttcgagtaggtgagattcgcggaggttcggggtaagggtcgcgagggtttagattcgaggggggaggtgtttgcgcgtgcgtagattaacggggaggtgcgacggagtggttattgtacgtgcgtagtttgtagttcgggcgttttggagtcggggttagggcggttttcggggtcgcgaagtttcgagttgagtcgtgcgttttttcgttttcgtagaagtgtatcgttatgtgtatggatcgttatatggacgtttggaatatcgtgtttcgcgtttataattcgcggttgtagcgggaacgagttaatatgtgatcggcgagcgcgggttattttattttgtttatttttataaacgtgttttgagaggcggggttcgtatgtacgtattgtttgttcggggtttaggagggtggtatcggtgttgggatatacgggattgtgttttcgttatttttcgtttt

SEQ ID NO: 11734 - DNA, 1161 bp, Artificial Sequence
  chemically treated genomic DNA (Homo sapiens) CpG-island No: 11734
aaaacgaaaaataacgaaaacacaatcccgtatatcccaacaccgataccaccctcctaaaccccgaacaaacaatacgtacatacgaaccccgcctctcaaaacacgtttataaaaataaacaaaataaaataacccgcgctcgccgatcacatattaactcgttcccgctacaaccgcgaattataaacgcgaaacacgatattccaaacgtccatataacgatccatacacataacgatacacttctacgaaaacgaaaaaacgcacgactcaactcgaaacttcgcgaccccgaaaaccgccctaaccccgactccaaaacgcccgaactacaaactacgcacgtacaataaccactccgtcgcacctccccgttaatctacgcacgcgcaaacacctcccccctcgaatctaaaccctcgcgacccttaccccgaacctccgcgaatctcacctactcgaaattatccaaaaaacccccaaatttccctatacacttccgaaaacacttatccgtcatcctctataaaaacacgcgaaactttaaccgcgacgtcgacccccaaaaataaccctatcgcccccaacgcccgtccccgaccaaccccgcacctacaacaactcctacgcgttaaccacgacgatctacactttcacctactccattataaaccctaaatccaacttcccgctaccgaaacccccgaaatcgaaaccgaaaccgccctccataactccgcaaaatcaaccgaaccgaaaccgcgtacgccgactcgtaactaactacgccgaaaacgaaccgcccgaaacaccacgaaaaacgaaatccgcgcgaacgaaaacgaaaaactacaactcccacacgaccgcgcgcgcccgaaccattcaaaatcgcgcgaaaaaccctccgctcatacgaaaacctaaacctaccgttacctacacgaactacccgtaattacgactccgcgaaaaaaaaaaaaccctaacttaaccgaaaaataaaaaaactactacgtacgaccgaaaccgatcactttatactcacgctctacctccaactcgtcccgaaaaacctaccgcgcatacgcacgaaacacccgacgcgtctatacaacgtattaccgccgaaacgaaacccgatcgcatcacgtaacg

SEQ ID NO: 11735 - DNA, 1161 bp, Artificial Sequence
  chemically treated genomic DNA (Homo sapiens) CpG-island No: 11735
agggcggggggtggcgaggatatagtttcgtgtgttttagtatcggtgttatttttttaagtttcgggtaggtagtacgtatatgcggatttcgttttttaaagtacgtttatggaaatgaatagggtggggtggttcgcgttcgtcggttatatgttggttcgttttcgttgtagtcgcgagttgtaggcgcgagatacggtgttttaggcgtttatgtagcggtttatgtatatggcgatgtatttttgcgggagcggaggggcgtacggtttagttcgggatttcgcggtttcggggatcgttttgatttcggttttaggacgttcgggttgtagattacgtacgtgtagtgattatttcgtcgtattttttcgttagtttgcgtacgcgtagatattttttttttcgaatttaggttttcgcgatttttgtttcgaattttcgcgggttttatttgttcggagttgtttagggagtttttaggtttttttatatattttcggaaatatttgttcgttattttttgtggagatacgcgaggttttagtcgcgacgtcggtttttaggggtggttttgtcgtttttagcgttcgttttcggttagtttcgtatttgtagtagtttttgcgcgttggttacggcgatttgtatttttatttgttttattatgagttttgggtttagtttttcgttgtcggagttttcgaaatcggagtcgaagtcgttttttatggtttcgtaaagttaatcggatcgaggtcgcgtgcgtcgattcgtaattaattgcgtcggaagcgggtcgttcggggtattacgggaaacggagttcgcgcggacggggacggaggattataatttttatacgatcgcgcgcgttcgggttatttaaggtcgcgcggggggtttttcgtttatgcggaggtttggatttgtcgttatttatacgagttattcgtggttgcgatttcgcgggaagagggaggttttgatttggtcggggagtaggggggttattacgtgcggtcgaggtcgattattttgtatttacgttttgtttttagttcgtttcgaagggtttgtcgcgtatgcgtacgaggtattcggcgcgtttatatagcgtgttgtcgtcggggcggagttcggtcgtattacgtgacg

SEQ ID NO: 11736 - DNA, 1161 bp, Artificial Sequence
  chemically treated genomic DNA (Homo sapiens) CpG-island No: 11736
cgtcacgtaatacgaccgaactccgccccgacgacaacacgctatataaacgcgccgaatacctcgtacgcatacgcgacaaacccttcgaaacgaactaaaaacaaaacgtaaatacaaaataatcgacctcgaccgcacgtaataacccccctactccccgaccaaatcaaaacctccctcttcccgcgaaatcgcaaccacgaataactcgtataaataacgacaaatccaaacctccgcataaacgaaaaaccccccgcgcgaccttaaataacccgaacgcgcgcgatcgtataaaaattataatcctccgtccccgtccgcgcgaactccgtttcccgtaataccccgaacgacccgcttccgacgcaattaattacgaatcgacgcacgcgacctcgatccgattaactttacgaaaccataaaaaacgacttcgactccgatttcgaaaactccgacaacgaaaaactaaacccaaaactcataataaaacaaataaaaatacaaatcgccgtaaccaacgcgcaaaaactactacaaatacgaaactaaccgaaaacgaacgctaaaaacgacaaaaccacccctaaaaaccgacgtcgcgactaaaacctcgcgtatctccacaaaaaataacgaacaaatatttccgaaaatatataaaaaaacctaaaaactccctaaacaactccgaacaaataaaacccgcgaaaattcgaaacaaaaatcgcgaaaacctaaattcgaaaaaaaaaatatctacgcgtacgcaaactaacgaaaaaatacgacgaaataatcactacacgtacgtaatctacaacccgaacgtcctaaaaccgaaatcaaaacgatccccgaaaccgcgaaatcccgaactaaaccgtacgcccctccgctcccgcaaaaatacatcgccatatacataaaccgctacataaacgcctaaaacaccgtatctcgcgcctacaactcgcgactacaacgaaaacgaaccaacatataaccgacgaacgcgaaccaccccaccctattcatttccataaacgtactttaaaaaacgaaatccgcatatacgtactacctacccgaaacttaaaaaaataacaccgatactaaaacacacgaaactatatcctcgccaccccccgccct

SEQ ID NO: 11737 - DNA, 531 bp, Artificial Sequence
  chemically treated genomic DNA (Homo sapiens) CpG-island No: 11737
gaagcggcggtaggtttgttcgttgaggaggcgtacggtcgttttttgtagttgtcgcgttatggagtttgcgggcgggcgagcgagacggggcgggtggggatcgcgttcggtcgtttttcgagtttcgtattatcgcggtttcgggcgcgtttatttttttcgcgtatcgagttttagtcggtgatgacgtagcgcgtgtcgttcgggggtcgcggcgcgggttcgggtaggtagatgggacgtattaggcggttgcgacgtatcggtttcgttagttttagtagcgttacgtcgtagtcgagcgtgtagagattgtagaacgggtgtttgtagatgcgcgttacgcgttttagttgttttttcgcgtcgtttaggaacggcgtgtttaggaaggtcgtttattgtttggggttttcgtagttgcggggcgcgcgaggataggcgtcggttcgagtttttacgttttcggttttcgtttttgtggtgttttttagcggtcggttggtattttgggtagggttattggtt

SEQ ID NO: 11738 - DNA, 531 bp, Artificial Sequence
  chemically treated genomic DNA (Homo sapiens) CpG-island No: 11738
aaccaataaccctacccaaaataccaaccgaccgctaaaaaacaccacaaaaacgaaaaccgaaaacgtaaaaactcgaaccgacgcctatcctcgcgcgccccgcaactacgaaaaccccaaacaataaacgaccttcctaaacacgccgttcctaaacgacgcgaaaaaacaactaaaacgcgtaacgcgcatctacaaacacccgttctacaatctctacacgctcgactacgacgtaacgctactaaaactaacgaaaccgatacgtcgcaaccgcctaatacgtcccatctacctacccgaacccgcgccgcgacccccgaacgacacgcgctacgtcatcaccgactaaaactcgatacgcgaaaaaaataaacgcgcccgaaaccgcgataatacgaaactcgaaaaacgaccgaacgcgatccccacccgccccgtctcgctcgcccgcccgcaaactccataacgcgacaactacaaaaaacgaccgtacgcctcctcaacgaacaaacctaccgccgcttc

SEQ ID NO: 11739 - DNA, 531 bp, Artificial Sequence
  chemically treated genomic DNA (Homo sapiens) CpG-island No: 11739
ggttaataattttgtttagggtgttagtcggtcgttgggggatattataggggcgggggtcgggggcgtgggggttcgggtcgacgtttgttttcgcgcgtttcgtagttacggggattttaagtagtgggcggtttttttaggtacgtcgtttttgagcggcgcggaggggtagttggagcgcgtggcgcgtatttataagtattcgttttataatttttatacgttcgattacgacgtggcgttgttggagttggcggggtcggtgcgtcgtagtcgtttggtgcgttttatttgtttgttcgagttcgcgtcgcgattttcggacggtacgcgttgcgttattatcggttggggttcggtgcgcgaaggaggtaggcgcgttcggggtcgcggtggtgcggggttcggggggcggtcggacgcggtttttattcgtttcgtttcgttcgttcgttcgtaggttttatggcgcggtagttgtagaaggcggtcgtgcgtttttttagcgagtagatttgtcgtcgtttt

SEQ ID NO: 11740 - DNA, 531 bp, Artificial Sequence
  chemically treated genomic DNA (Homo sapiens) CpG-island No: 11740
aaaacgacgacaaatctactcgctaaaaaaacgcacgaccgccttctacaactaccgcgccataaaacctacgaacgaacgaacgaaacgaaacgaataaaaaccgcgtccgaccgccccccgaaccccgcaccaccgcgaccccgaacgcgcctacctccttcgcgcaccgaaccccaaccgataataacgcaacgcgtaccgtccgaaaatcgcgacgcgaactcgaacaaacaaataaaacgcaccaaacgactacgacgcaccgaccccgccaactccaacaacgccacgtcgtaatcgaacgtataaaaattataaaacgaatacttataaatacgcgccacgcgctccaactacccctccgcgccgctcaaaaacgacgtacctaaaaaaaccgcccactacttaaaatccccgtaactacgaaacgcgcgaaaacaaacgtcgacccgaacccccacgcccccgacccccgcccctataatatcccccaacgaccgactaacaccctaaacaaaattattaacc

SEQ ID NO: 11741 - DNA, 793 bp, Artificial Sequence
  chemically treated genomic DNA (Homo sapiens) CpG-island No: 11741
cgtttcggtcgcgcgtattttgggcgtgatacgagcgcggcgtcgcgtgaatcggttacgatgggtagcgaggtttgcgtcgataggaagtcgaggatgggcgcgacgggggcggtcgtaagtcgttttcgaagatttacgtcgtgtaggcgtaattttcgatagtaggttcgtagagttagtagtacgaggttgcgcgggttcgagtcgttgagtacgtagcgttacgggtcgtacgtttgaggtatcgggtgcgtattagtcgtcgttacggttagggtttaggcgtgtcgttttacgggcgtacgcgggtttcgagaatacgagcgttacgttgagcggtcgcgtttcgtcgaggtcgttagtcgggtttatcggtttcgttcggtttcggcgtttttttcgggaacgggttggcgtaggttagcgttagtagtagtagtattttagcggggtttcgagggtcgcgggggttatcggcgtcgcgtatcgtttgcgggtttcgtcgggcggtttttgagcgttcgggtcgggagagacggggaggagagggaggtatagacgggagacgtagggatagggagacgagataaagagacgtatagaggaggagatgtagcgagggataggcgtcgagatggggaggatagggagcggtcggggtgatggaatagagggagagataggaacggaggacgagagagatggaagggagagagatagagggagagagaaatggaggagagatagagggagagacgggtagaggtagagagagatggaggggagagag

SEQ ID NO: 11742 - DNA, 793 bp, Artificial Sequence
  chemically treated genomic DNA (Homo sapiens) CpG-island No: 11742
ctctctcccctccatctctctctacctctacccgtctctccctctatctctcctccatttctctctccctctatctctctcccttccatctctctcgtcctccgttcctatctctccctctattccatcaccccgaccgctccctatcctccccatctcgacgcctatccctcgctacatctcctcctctatacgtctctttatctcgtctccctatccctacgtctcccgtctatacctccctctcctccccgtctctcccgacccgaacgctcaaaaaccgcccgacgaaacccgcaaacgatacgcgacgccgataacccccgcgaccctcgaaaccccgctaaaatactactactactaacgctaacctacgccaacccgttcccgaaaaaaacgccgaaaccgaacgaaaccgataaacccgactaacgacctcgacgaaacgcgaccgctcaacgtaacgctcgtattctcgaaacccgcgtacgcccgtaaaacgacacgcctaaaccctaaccgtaacgacgactaatacgcacccgatacctcaaacgtacgacccgtaacgctacgtactcaacgactcgaacccgcgcaacctcgtactactaactctacgaacctactatcgaaaattacgcctacacgacgtaaatcttcgaaaacgacttacgaccgcccccgtcgcgcccatcctcgacttcctatcgacgcaaacctcgctacccatcgtaaccgattcacgcgacgccgcgctcgtatcacgcccaaaatacgcgcgaccgaaacg

SEQ ID NO: 11743 - DNA, 793 bp, Artificial Sequence
  chemically treated genomic DNA (Homo sapiens) CpG-island No: 11743
tttttttttttttatttttttttatttttgttcgtttttttttttgttttttttttatttttttttttttttgttttttttttttttatttttttcgtttttcgtttttgtttttttttttgttttattatttcgatcgttttttgttttttttatttcggcgtttgtttttcgttgtatttttttttttgtgcgtttttttatttcgtttttttgtttttgcgtttttcgtttgtgtttttttttttttttcgtttttttcggttcgggcgtttagaggtcgttcggcggggttcgtaggcgatgcgcggcgtcggtggttttcgcggttttcggggtttcgttaagatgttgttgttgttggcgttggtttgcgttagttcgttttcggaggaggcgtcggggtcgggcggggtcggtgggttcggttggcggtttcggcggggcgcggtcgtttaacgtggcgttcgtgttttcggggttcgcgtacgttcgtagagcggtacgtttgggttttggtcgtggcggcggttggtgcgtattcggtgttttagacgtgcggttcgtggcgttgcgtgtttaacggttcggattcgcgtagtttcgtgttgttagttttgcgagtttgttgtcgggggttgcgtttgtacggcgtgggttttcgaagacgatttgcggtcgttttcgtcgcgtttattttcgattttttgtcggcgtagatttcgttgtttatcgtggtcggtttacgcggcgtcgcgttcgtgttacgtttaaggtgcgcgcgatcggggcg

SEQ ID NO: 11744 - DNA, 793 bp, Artificial Sequence
  chemically treated genomic DNA (Homo sapiens) CpG-island No: 11744
cgccccgatcgcgcgcaccttaaacgtaacacgaacgcgacgccgcgtaaaccgaccacgataaacaacgaaatctacgccgacaaaaaatcgaaaataaacgcgacgaaaacgaccgcaaatcgtcttcgaaaacccacgccgtacaaacgcaacccccgacaacaaactcgcaaaactaacaacacgaaactacgcgaatccgaaccgttaaacacgcaacgccacgaaccgcacgtctaaaacaccgaatacgcaccaaccgccgccacgaccaaaacccaaacgtaccgctctacgaacgtacgcgaaccccgaaaacacgaacgccacgttaaacgaccgcgccccgccgaaaccgccaaccgaacccaccgaccccgcccgaccccgacgcctcctccgaaaacgaactaacgcaaaccaacgccaacaacaacaacatcttaacgaaaccccgaaaaccgcgaaaaccaccgacgccgcgcatcgcctacgaaccccgccgaacgacctctaaacgcccgaaccgaaaaaaacgaaaaaaaaaaaaaaacacaaacgaaaaacgcaaaaacaaaaaaacgaaataaaaaaacgcacaaaaaaaaaaatacaacgaaaaacaaacgccgaaataaaaaaaacaaaaaacgatcgaaataataaaacaaaaaaaaaaacaaaaacgaaaaacgaaaaaaataaaaaaaaaaaaaacaaaaaaaaaaaaaaataaaaaaaaaacaaaaaaaaaaacgaacaaaaataaaaaaaaataaaaaaaaaaaaa

SEQ ID NO: 11745 - DNA, 522 bp, Artificial Sequence
  chemically treated genomic DNA (Homo sapiens) CpG-island No: 11745
agaagtcgaaggcgtttgcggaaagttggggacgggttggcgaagaagacgggcgaggagggcggcgaacgcgggcggcggggcgcgcgcggggttaggggttcgggtaggaacgtttcgtttttagtcgttatcgttatcgggaaggttattagttgtagtttcgggatgcggtttaggtcgcgcggtcgcgttatggtcgcggggcggtttcgtttcggcgggcgttggggagttgcgtcgtttatttcgttaggtttacgtaggtcgtttgtttagtttcgggttcgcgggttttatttcgttttgtcgtttcggttttttcggtttcgcgttggagtcgtttttagggcggggcgggtttggggcgttcgtacggttttggtggggattttttcgtagattttaaagtcgttcgcgttggttttaatgtttttataatcgtcggacgcgtttttataaatattagggatatttttaaatttgtggggatatttttgtaaatttttcgtggtgttgata

SEQ ID NO: 11746 - DNA, 522 bp, Artificial Sequence
  chemically treated genomic DNA (Homo sapiens) CpG-island No: 11746
tatcaacaccacgaaaaatttacaaaaatatccccacaaatttaaaaatatccctaatatttataaaaacgcgtccgacgattataaaaacattaaaaccaacgcgaacgactttaaaatctacgaaaaaatccccaccaaaaccgtacgaacgccccaaacccgccccgccctaaaaacgactccaacgcgaaaccgaaaaaaccgaaacgacaaaacgaaataaaacccgcgaacccgaaactaaacaaacgacctacgtaaacctaacgaaataaacgacgcaactccccaacgcccgccgaaacgaaaccgccccgcgaccataacgcgaccgcgcgacctaaaccgcatcccgaaactacaactaataaccttcccgataacgataacgactaaaaacgaaacgttcctacccgaacccctaaccccgcgcgcgccccgccgcccgcgttcgccgccctcctcgcccgtcttcttcgccaacccgtccccaactttccgcaaacgccttcgacttct

SEQ ID NO: 11747 - DNA, 522 bp, Artificial Sequence
  chemically treated genomic DNA (Homo sapiens) CpG-island No: 11747
tgttaatattacggggagtttgtaggagtgtttttatagatttgggggtgtttttggtgtttgtggggacgcgttcggcgattgtgaggatattagagttaacgcgggcggttttggggtttgcgggagagtttttattagagtcgtgcgggcgttttagattcgtttcgttttgggggcggttttagcgcgaagtcggaagggtcgaggcgatagggcggggtggggttcgcgggttcggggttgggtaggcggtttgcgtgggtttggcggggtgggcggcgtagttttttagcgttcgtcgaggcggggtcgtttcgcggttatggcgcggtcgcgcggtttaggtcgtatttcggagttgtaattggtggttttttcggtggcggtggcggttgaggacgaggcgtttttgttcgagtttttggtttcgcgcgcgtttcgtcgttcgcgttcgtcgtttttttcgttcgtttttttcgttagttcgtttttaatttttcgtagacgttttcggttttt

SEQ ID NO: 11748 - DNA, 522 bp, Artificial Sequence
  chemically treated genomic DNA (Homo sapiens) CpG-island No: 11748
aaaaaccgaaaacgtctacgaaaaattaaaaacgaactaacgaaaaaaacgaacgaaaaaaacgacgaacgcgaacgacgaaacgcgcgcgaaaccaaaaactcgaacaaaaacgcctcgtcctcaaccgccaccgccaccgaaaaaaccaccaattacaactccgaaatacgacctaaaccgcgcgaccgcgccataaccgcgaaacgaccccgcctcgacgaacgctaaaaaactacgccgcccaccccgccaaacccacgcaaaccgcctacccaaccccgaacccgcgaaccccaccccgccctatcgcctcgacccttccgacttcgcgctaaaaccgcccccaaaacgaaacgaatctaaaacgcccgcacgactctaataaaaactctcccgcaaaccccaaaaccgcccgcgttaactctaatatcctcacaatcgccgaacgcgtccccacaaacaccaaaaacacccccaaatctataaaaacactcctacaaactccccgtaatattaaca

SEQ ID NO: 11749 - DNA, 856 bp, Artificial Sequence
  chemically treated genomic DNA (Homo sapiens) CpG-island No: 11749
ggcgcgtcgttttcggtttcggttcggtcgcgttgtcgtcggtttttgaattagttgttgatttgcgtgagcgataggtcggtgagtgtggttaggcggcgtttttcgttcggcgtggggtagcggttgtcgcggtagtaggttttgagcgttgcgcgggagcgttttttgaagtagtagattgttttttcgtcgttttagatggttttgggtagcgggaattttttgcgtagtcgatatttgtttattgcgttaagcgcgcggtcgcgggttcgttcggttttatggtagcgcgcgcgtaggtagaggttttgtaggaaggcgtggtgggcggcggggaaggggcggttttcgagtagtcggtagagttcggcgtattcgtttcgttggaaggttattagggttcgcgcgcgtaatatcgggtcgttgttacgtaggcgttcggtcgggggtagtgcgtttaggaagcggtttaagcggtcggcgtggttcgtttggagtagcgtttcgtagacgtacgttatttgttcgggcgagaagcggaggttcgtgggcggttcggaagcggtttcggggggcgattcggggacgttcggggatttcgggtttttagttttcgtagtcgttgcgttcgtttcggtttcggtcgtcgtcgtcgttttattttcggtcgtttgtaaagtttgtaagagttggcgcgttttttttttttttttttcggtcgtcgtcgtcgtcgttatcgttttttttttagtcgtcggtttcgcgttcggtttcgtaggtaaggtagttatgttttgtaattttgggaagtttttttttttttttttttttttttcgggttttttttagtttt

SEQ ID NO: 11750 - DNA, 856 bp, Artificial Sequence
  chemically treated genomic DNA (Homo sapiens) CpG-island No: 11750
aaaactaaaaaaaacccgaaaaaaaaaaaaaaaaaaaaaaaaacttcccaaaattacaaaacataactaccttacctacgaaaccgaacgcgaaaccgacgactaaaaaaaaaacgataacgacgacgacgacgaccgaaaaaaaaaaaaaaaaaacgcgccaactcttacaaactttacaaacgaccgaaaataaaacgacgacgacgaccgaaaccgaaacgaacgcaacgactacgaaaactaaaaacccgaaatccccgaacgtccccgaatcgccccccgaaaccgcttccgaaccgcccacgaacctccgcttctcgcccgaacaaataacgtacgtctacgaaacgctactccaaacgaaccacgccgaccgcttaaaccgcttcctaaacgcactacccccgaccgaacgcctacgtaacaacgacccgatattacgcgcgcgaaccctaataaccttccaacgaaacgaatacgccgaactctaccgactactcgaaaaccgccccttccccgccgcccaccacgccttcctacaaaacctctacctacgcgcgcgctaccataaaaccgaacgaacccgcgaccgcgcgcttaacgcaataaacaaatatcgactacgcaaaaaattcccgctacccaaaaccatctaaaacgacgaaaaaacaatctactacttcaaaaaacgctcccgcgcaacgctcaaaacctactaccgcgacaaccgctaccccacgccgaacgaaaaacgccgcctaaccacactcaccgacctatcgctcacgcaaatcaacaactaattcaaaaaccgacgacaacgcgaccgaaccgaaaccgaaaacgacgcgcc

SEQ ID NO: 11751 - DNA, 856 bp, Artificial Sequence
  chemically treated genomic DNA (Homo sapiens) CpG-island No: 11751
gaggttggggaaagttcgagggaggaagagagggagggaggaattttttaaagttgtaaaatatggttattttgtttgcggagtcgagcgcggggtcggcggttgggggggaggcggtggcggcggcggcggcgatcgaagaggaggaggaggaagcgcgttagtttttgtagattttgtaggcggtcgagggtgaggcggcggcggcggtcggggtcggggcgggcgtagcggttgcgggagttgagggttcgggattttcgggcgttttcgggtcgtttttcgaggtcgttttcgaatcgtttacgggttttcgtttttcgttcgagtaggtggcgtgcgtttgcgaggcgttgttttaggcgggttacgtcggtcgtttgagtcgttttttgggcgtattgttttcggtcgagcgtttacgtggtagcgattcggtgttgcgcgcgcgggttttggtggttttttagcggggcgagtacgtcgagttttatcggttattcgagagtcgtttttttttcgtcgtttattacgtttttttgtaggatttttatttgcgcgcgcgttattatgaggtcgagcgggttcgcggtcgcgcgtttggcgtagtggataagtatcgattgcgtaagaagttttcgttgtttaagattatttgggacggcgaggagatagtttattgttttaaggagcgttttcgcgtagcgtttaaggtttgttatcgcggtaatcgttattttacgtcggacgagaagcgtcgtttggttatatttatcggtttgtcgtttacgtaggttagtaattggtttaagaatcggcgatagcgcgatcggatcggggtcggaggcggcgcgtt

SEQ ID NO: 11752 - DNA, 856 bp, Artificial Sequence
  chemically treated genomic DNA (Homo sapiens) CpG-island No: 11752
aacgcgccgcctccgaccccgatccgatcgcgctatcgccgattcttaaaccaattactaacctacgtaaacgacaaaccgataaatataaccaaacgacgcttctcgtccgacgtaaaataacgattaccgcgataacaaaccttaaacgctacgcgaaaacgctccttaaaacaataaactatctcctcgccgtcccaaataatcttaaacaacgaaaacttcttacgcaatcgatacttatccactacgccaaacgcgcgaccgcgaacccgctcgacctcataataacgcgcgcgcaaataaaaatcctacaaaaaaacgtaataaacgacgaaaaaaaaacgactctcgaataaccgataaaactcgacgtactcgccccgctaaaaaaccaccaaaacccgcgcgcgcaacaccgaatcgctaccacgtaaacgctcgaccgaaaacaatacgcccaaaaaacgactcaaacgaccgacgtaacccgcctaaaacaacgcctcgcaaacgcacgccacctactcgaacgaaaaacgaaaacccgtaaacgattcgaaaacgacctcgaaaaacgacccgaaaacgcccgaaaatcccgaaccctcaactcccgcaaccgctacgcccgccccgaccccgaccgccgccgccgcctcaccctcgaccgcctacaaaatctacaaaaactaacgcgcttcctcctcctcctcttcgatcgccgccgccgccgccaccgcctcccccccaaccgccgaccccgcgctcgactccgcaaacaaaataaccatattttacaactttaaaaaattcctccctccctctcttcctccctcgaactttccccaacctc

SEQ ID NO: 11753 - DNA, 508 bp, Artificial Sequence
  chemically treated genomic DNA (Homo sapiens) CpG-island No: 11753
gggcggggaacgggttagaaagtttgtagtaatttttttcgagtttgcgttttaggagcggatgcgcgtggcgtgcgtaggcgtagtggaaggaggatggtcgcgcgcgttgttagtttagtttttttttttcgacgttcggtggtatagttgggttatagttgggcgggggcggtgttttcgggtggttcgttcgtttttttattggtcggacgttaaagtttcgtttcgtggtttttttttttttaattttgattcggtcgtttcgtatttcgttagttttttttagattttcggtcgtttttatacgttttcggattggttcgttgcggagttttcggtttataacgtaaatcgcggatattgtggagtttagagttttgggtagatggagggttttttattcgcgagggtcgggggtgggggtttaggtggggatagataataaatatcgaggaatgtcggggttttagtgtatttaaaacgtggattggggttgttgggggtt

SEQ ID NO: 11754 - DNA, 508 bp, Artificial Sequence
  chemically treated genomic DNA (Homo sapiens) CpG-island No: 11754
aacccccaacaaccccaatccacgttttaaatacactaaaaccccgacattcctcgatatttattatctatccccacctaaacccccacccccgaccctcgcgaataaaaaaccctccatctacccaaaactctaaactccacaatatccgcgatttacgttataaaccgaaaactccgcaacgaaccaatccgaaaacgtataaaaacgaccgaaaatctaaaaaaaactaacgaaatacgaaacgaccgaatcaaaattaaaaaaaaaaaaaccacgaaacgaaactttaacgtccgaccaataaaaaaacgaacgaaccacccgaaaacaccgcccccgcccaactataacccaactataccaccgaacgtcgaaaaaaaaaaactaaactaacaacgcgcgcgaccatcctccttccactacgcctacgcacgccacgcgcatccgctcctaaaacgcaaactcgaaaaaaattactacaaactttctaacccgttccccgccc

SEQ ID NO: 11755 - DNA, 508 bp, Artificial Sequence
  chemically treated genomic DNA (Homo sapiens) CpG-island No: 11755
gatttttaataattttaatttacgttttggatgtattgagatttcgatatttttcggtatttattgtttgtttttatttagatttttattttcgattttcgcgaataaaaggttttttatttgtttaaagttttggattttatagtgttcgcggtttgcgttgtgggtcggaggtttcgtagcgggttaattcggaggcgtgtggaggcggtcgaaggtttgggaggagttagcgggatgcgaagcggtcgaattagggttgggggaggaaaagttacggggcggggttttggcgttcggttaataggagggcgagcgggttattcggaggtatcgttttcgtttagttgtggtttagttgtgttatcgagcgtcgagaagagggggttgggttggtagcgcgcgcggttattttttttttattgcgtttgcgtacgttacgcgtattcgtttttgggacgtaagttcgagaaaagttgttgtaaattttttagttcgtttttcgttt

SEQ ID NO: 11756 - DNA, 508 bp, Artificial Sequence
  chemically treated genomic DNA (Homo sapiens) CpG-island No: 11756
aaacgaaaaacgaactaaaaaatttacaacaacttttctcgaacttacgtcccaaaaacgaatacgcgtaacgtacgcaaacgcaataaaaaaaaaataaccgcgcgcgctaccaacccaaccccctcttctcgacgctcgataacacaactaaaccacaactaaacgaaaacgatacctccgaataacccgctcgccctcctattaaccgaacgccaaaaccccgccccgtaacttttcctcccccaaccctaattcgaccgcttcgcatcccgctaactcctcccaaaccttcgaccgcctccacacgcctccgaattaacccgctacgaaacctccgacccacaacgcaaaccgcgaacactataaaatccaaaactttaaacaaataaaaaaccttttattcgcgaaaatcgaaaataaaaatctaaataaaaacaaacaataaataccgaaaaatatcgaaatctcaatacatccaaaacgtaaattaaaattattaaaaatc

SEQ ID NO: 11757 - DNA, 747 bp, Artificial Sequence
  chemically treated genomic DNA (Homo sapiens) CpG-island No: 11757
tacggtttaagttgaagtagacgcggttttttttcgagtttagtttcgcgggcgtggcgggcggtttttcggtttcggcgttgttcggtttttcgaggcgtacgaggttgaggcgtacggcgggtagggcgggttcgggttcggggtttgcgggcggcggggacgacgcggggtttgtagcgtcgggatcggaggcggaggtagggtcgggcgggggttgcggtggttgaggcggtatcggagtttgggcggaagtcggattcgatttgcgagcggcgtcgtcgttcgggagtagtttgtagaaattttcgcgcgtgcggaattgcgatttaattttcgcgtagttttttatggcggcgtcggggttcgagtcgtttttcgcgtcgttcgtcgttattttgggcgtttttcgggtttcgttattgtcggattgtcgttcgtagtcgggttttttttcggaagtcgttggttcgcgtcggaaaaggtggggtcgtcgttcgggtaacgttttttcgattggtatttagattcggaggcgggacgaattttcgcggtcgttcgggtaacggtgttgggattgtgggcggggcgagaaggtgggcgcggtttttgagtttgtgatcgatttgtggttggttgcgggggcggagttcgtaatggaaagaggcgtggttagttagaaagtttaagtttttagtaatcgcgttttgggaacgtttgtttagtaacggagggattttttttttt

SEQ ID NO: 11758 - DNA, 747 bp, Artificial Sequence
  chemically treated genomic DNA (Homo sapiens) CpG-island No: 11758
aaaaaaaaaaatccctccgttactaaacaaacgttcccaaaacgcgattactaaaaacttaaactttctaactaaccacgcctctttccattacgaactccgcccccgcaaccaaccacaaatcgatcacaaactcaaaaaccgcgcccaccttctcgccccgcccacaatcccaacaccgttacccgaacgaccgcgaaaattcgtcccgcctccgaatctaaataccaatcgaaaaaacgttacccgaacgacgaccccaccttttccgacgcgaaccaacgacttccgaaaaaaaacccgactacgaacgacaatccgacaataacgaaacccgaaaaacgcccaaaataacgacgaacgacgcgaaaaacgactcgaaccccgacgccgccataaaaaactacgcgaaaattaaatcgcaattccgcacgcgcgaaaatttctacaaactactcccgaacgacgacgccgctcgcaaatcgaatccgacttccgcccaaactccgataccgcctcaaccaccgcaacccccgcccgaccctacctccgcctccgatcccgacgctacaaaccccgcgtcgtccccgccgcccgcaaaccccgaacccgaacccgccctacccgccgtacgcctcaacctcgtacgcctcgaaaaaccgaacaacgccgaaaccgaaaaaccgcccgccacgcccgcgaaactaaactcgaaaaaaaaccgcgtctacttcaacttaaaccgta

SEQ ID NO: 11759 - DNA, 747 bp, Artificial Sequence
  chemically treated genomic DNA (Homo sapiens) CpG-island No: 11759
aaaaaaaaaaattttttcgttgttaggtaaacgtttttagggcgcggttgttaaggatttgagttttttaattggttacgtttttttttattgcgggtttcgttttcgtagttaattataagtcggttataggtttaaaggtcgcgtttattttttcgtttcgtttatagttttagtatcgttattcgagcgatcgcggggattcgtttcgttttcggatttgggtgttaatcgaagaggcgttgttcgggcgacgattttatttttttcggcgcgggttagcggttttcgggagggggttcggttgcgggcggtagttcggtagtggcggggttcggggggcgtttaagatggcggcgggcggcgcggagggcggttcgggtttcggcgtcgttatgggggattgcgcggagattaagtcgtaatttcgtacgcgcgagggtttttataagttattttcgggcgacggcgtcgttcgtaggtcgggttcggttttcgtttagatttcggtgtcgttttagttatcgtagttttcgttcggttttgttttcgttttcggtttcggcgttgtaggtttcgcgtcgttttcgtcgttcgtaggtttcggattcgggttcgttttgttcgtcgtgcgttttagtttcgtgcgtttcggggagtcggatagcgtcggggtcggggagtcgttcgttacgttcgcggggttgggttcggggggagatcgcgtttgttttaatttgggtcgtg

SEQ ID NO: 11760 - DNA, 747 bp, Artificial Sequence
  chemically treated genomic DNA (Homo sapiens) CpG-island No: 11760
cacgacccaaattaaaacaaacgcgatctccccccgaacccaaccccgcgaacgtaacgaacgactccccgaccccgacgctatccgactccccgaaacgcacgaaactaaaacgcacgacgaacaaaacgaacccgaatccgaaacctacgaacgacgaaaacgacgcgaaacctacaacgccgaaaccgaaaacgaaaacaaaaccgaacgaaaactacgataactaaaacgacaccgaaatctaaacgaaaaccgaacccgacctacgaacgacgccgtcgcccgaaaataacttataaaaaccctcgcgcgtacgaaattacgacttaatctccgcgcaatcccccataacgacgccgaaacccgaaccgccctccgcgccgcccgccgccatcttaaacgccccccgaaccccgccactaccgaactaccgcccgcaaccgaaccccctcccgaaaaccgctaacccgcgccgaaaaaaataaaatcgtcgcccgaacaacgcctcttcgattaacacccaaatccgaaaacgaaacgaatccccgcgatcgctcgaataacgatactaaaactataaacgaaacgaaaaaataaacgcgacctttaaacctataaccgacttataattaactacgaaaacgaaacccgcaataaaaaaaaacgtaaccaattaaaaaactcaaatccttaacaaccgcgccctaaaaacgtttacctaacaacgaaaaaattttttttttt

SEQ ID NO: 11761 - DNA, 560 bp, Artificial Sequence
  chemically treated genomic DNA (Homo sapiens) CpG-island No: 11761
ttagtacggggatgttttcgaagttcgggtttttttcgtaggagtcgcgtttagtattatttttttttttttcgtcgtttttttttttattaaattggtagaagtttagcgggttgatttgcgtggcggtcgagatgcgggttatttgggttcgtaggtagttggtttcgttgttcgggaagggtgggtagttgacgattggcgtgtttaggtagtttgtgaagaattttttgatttttcgggcgtttacgatttgggttggagtgacgtggggtagtcgcgtttatggtaggttcggttcgttgtatataaagtataggtatttgttggcgtttgagcggtttttttttttggggattacgggcggcggtttttatacggatttagggacgatgtttacggtttttttttcgtttttttcgttttttttttcgtcgtgcgtttttatgatttcgttatttttcgttattttttttattttttttttttttgtttttttttcgttttttcggaattttatttcggttattaggtagttgcgtttgatttttaggattttg

SEQ ID NO: 11762 - DNA, 560 bp, Artificial Sequence
  chemically treated genomic DNA (Homo sapiens) CpG-island No: 11762
caaaatcctaaaaatcaaacgcaactacctaataaccgaaataaaattccgaaaaaacgaaaaaaaaacaaaaaaaaaaaaaataaaaaaaataacgaaaaataacgaaatcataaaaacgcacgacgaaaaaaaaaacgaaaaaaacgaaaaaaaaaccgtaaacatcgtccctaaatccgtataaaaaccgccgcccgtaatccccaaaaaaaaaaaccgctcaaacgccaacaaatacctatactttatatacaacgaaccgaacctaccataaacgcgactaccccacgtcactccaacccaaatcgtaaacgcccgaaaaatcaaaaaattcttcacaaactacctaaacacgccaatcgtcaactacccacccttcccgaacaacgaaaccaactacctacgaacccaaataacccgcatctcgaccgccacgcaaatcaacccgctaaacttctaccaatttaataaaaaaaaaaacgacgaaaaaaaaaaaaataatactaaacgcgactcctacgaaaaaaacccgaacttcgaaaacatccccgtactaa

SEQ ID NO: 11763 - DNA, 560 bp, Artificial Sequence
  chemically treated genomic DNA (Homo sapiens) CpG-island No: 11763
taagattttgggaattaaacgtagttatttggtggtcgaggtggaatttcgggagggcgaggaggaggtagaggaggaggaggtggaggagatgacggaaggtggcgaggttatggaggcgtacggcgaggaggagggcgaggaggacgaggagaaggtcgtggatatcgtttttaagttcgtatggaagtcgtcgttcgtgatttttaaggaggagagtcgtttaggcgttaataagtatttgtattttgtgtgtaacgagtcgggtttgttatggacgcggttgttttacgttattttagtttagatcgtgaacgttcgaaagattaagaagttttttataggttatttggatacgttagtcgttagttatttatttttttcgggtaacgaggttaattatttgcgggtttagatagttcgtatttcggtcgttacgtaggttagttcgttgggtttttattagtttagtgaggaggagggcgacgaggaggaggaaggtggtgttgggcgcgatttttacgaggagaattcggatttcgagggtattttcgtgttgg

SEQ ID NO: 11764 - DNA, 560 bp, Artificial Sequence
  chemically treated genomic DNA (Homo sapiens) CpG-island No: 11764
ccaacacgaaaataccctcgaaatccgaattctcctcgtaaaaatcgcgcccaacaccaccttcctcctcctcgtcgccctcctcctcactaaactaataaaaacccaacgaactaacctacgtaacgaccgaaatacgaactatctaaacccgcaaataattaacctcgttacccgaaaaaaataaataactaacgactaacgtatccaaataacctataaaaaacttcttaatctttcgaacgttcacgatctaaactaaaataacgtaaaacaaccgcgtccataacaaacccgactcgttacacacaaaatacaaatacttattaacgcctaaacgactctcctccttaaaaatcacgaacgacgacttccatacgaacttaaaaacgatatccacgaccttctcctcgtcctcctcgccctcctcctcgccgtacgcctccataacctcgccaccttccgtcatctcctccacctcctcctcctctacctcctcctcgccctcccgaaattccacctcgaccaccaaataactacgtttaattcccaaaatctta

SEQ ID NO: 11765 - DNA, 853 bp, Artificial Sequence
  chemically treated genomic DNA (Homo sapiens) CpG-island No: 11765
  unsure (799, 804..805, 807, 810, 816, 828, 830, 833)
ttagcggcgtttatatatttatcgtcgtatgcgcgtatcgttcgcggttcgggtggagcggttttcggggatatagtttggggattcgtacgttttttaggttcgcggtttcgggcgcgttttttcgtaggcggggcgcgggtggacgtcgtgggagtcgtttaattttttttttttcggtttttttggggcgcgtttttttcgggcgtttttcgttttttttttttttcgtttcgtcgtttttttggggtttacgtttttttttattcgttttttttgtttttttgcgtttagattttggttttgcggtttattttattcgtcgcgtcgtagggcggaggatgtttgggtgcgtgggaggggggcgtttcgcggttattcggggagtttttttagatgcggagtttcgcgcgtcggggttatttcggggcgggtttcggatacgttagaggttatcgaggagttttgaggatatcggtttggcgcgtagttcggttttttataggggatttaagaaaggtttttcgcgggttcggatttttaggtttcgtcgcgtcgatcggtttttcgggaggcggtatttgaagtcgttgtacgggtggatgatttaggttttcgtcgatttgacgcgtttttgttcgcgatttacggtttattggttgtcgaatattcgtagcgagaatttgttgacgttcggttgtaggagcgcgtcgaattggcgttgtatgaagttggtttggtagtcgcgcggatttttcgtcgggttcgttttttcgatgttaggattattcgtaggttntgttnnnnaangtcgtngttgaatgtaantnttnaataaattttaaaattttaa

SEQ ID NO: 11766 - DNA, 853 bp, Artificial Sequence
  chemically treated genomic DNA (Homo sapiens) CpG-island No: 11766
  unsure (21, 24, 26, 38, 44, 47..48, 50, 55)
ttaaaattttaaaatttattnaananttacattcaacnacgacnttnnnnaacanaacctacgaataatcctaacatcgaaaaaacgaacccgacgaaaaatccgcgcgactaccaaaccaacttcatacaacgccaattcgacgcgctcctacaaccgaacgtcaacaaattctcgctacgaatattcgacaaccaataaaccgtaaatcgcgaacaaaaacgcgtcaaatcgacgaaaacctaaatcatccacccgtacaacgacttcaaataccgcctcccgaaaaaccgatcgacgcgacgaaacctaaaaatccgaacccgcgaaaaacctttcttaaatcccctataaaaaaccgaactacgcgccaaaccgatatcctcaaaactcctcgataacctctaacgtatccgaaacccgccccgaaataaccccgacgcgcgaaactccgcatctaaaaaaactccccgaataaccgcgaaacgcccccctcccacgcacccaaacatcctccgccctacgacgcgacgaataaaataaaccgcaaaaccaaaatctaaacgcaaaaaaacaaaaaaaacgaataaaaaaaaacgtaaaccccaaaaaaacgacgaaacgaaaaaaaaaaaaaacgaaaaacgcccgaaaaaaacgcgccccaaaaaaaccgaaaaaaaaaaaattaaacgactcccacgacgtccacccgcgccccgcctacgaaaaaacgcgcccgaaaccgcgaacctaaaaaacgtacgaatccccaaactatatccccgaaaaccgctccacccgaaccgcgaacgatacgcgcatacgacgataaatatataaacgccgctaa

SEQ ID NO: 11767 - DNA, 853 bp, Artificial Sequence
  chemically treated genomic DNA (Homo sapiens) CpG-island No: 11767
  unsure (21, 24, 26, 38, 44, 47..48, 50, 55)
ttggggttttggggtttattnggnanttgtatttagtngcggtnttnnnnagtanggtttgcggatagttttggtatcgaggaggcgggttcggcgggggattcgcgcggttgttaggttagttttatgtagcgttagttcggcgcgtttttgtagtcgggcgttaataagttttcgttgcggatgttcggtagttagtaggtcgtggatcgcgagtaggagcgcgttaagtcggcgggggtttggattatttattcgtatagcgattttaggtatcgtttttcggagggtcggtcggcgcgacggggtttggggattcgggttcgcggggagttttttttggattttttgtggagggtcgggttgcgcgttaggtcggtgtttttagggtttttcggtgatttttggcgtgttcgggattcgtttcggagtgatttcggcgcgcgaggtttcgtatttgggggggtttttcgggtgatcgcggagcgttttttttttacgtatttagatatttttcgttttgcggcgcggcgggtggggtgggtcgtagggttagggtttgagcgtagaggggtagagaggacgaatagaggggaacgtgggttttagagaggcggcggagcgggagggaggaggaacgaagggcgttcgggaaggacgcgttttagggaggtcgggggagagggggttaagcggtttttacggcgtttattcgcgtttcgtttgcgaggaggcgcgttcggggtcgcgggtttggaaagcgtgcgggtttttaggttgtgttttcgggagtcgttttattcgagtcgcgggcggtgcgcgtatgcggcggtgggtgtgtagacgtcgttga

SEQ ID NO: 11768 - DNA, 853 bp, Artificial Sequence
  chemically treated genomic DNA (Homo sapiens) CpG-island No: 11768
  unsure (799, 804..805, 807, 810, 816, 828, 830, 833)
tcaacgacgtctacacacccaccgccgcatacgcgcaccgcccgcgactcgaataaaacgactcccgaaaacacaacctaaaaacccgcacgctttccaaacccgcgaccccgaacgcgcctcctcgcaaacgaaacgcgaataaacgccgtaaaaaccgcttaaccccctctcccccgacctccctaaaacgcgtccttcccgaacgcccttcgttcctcctccctcccgctccgccgcctctctaaaacccacgttcccctctattcgtcctctctacccctctacgctcaaaccctaaccctacgacccaccccacccgccgcgccgcaaaacgaaaaatatctaaatacgtaaaaaaaaaacgctccgcgatcacccgaaaaacccccccaaatacgaaacctcgcgcgccgaaatcactccgaaacgaatcccgaacacgccaaaaatcaccgaaaaaccctaaaaacaccgacctaacgcgcaacccgaccctccacaaaaaatccaaaaaaaactccccgcgaacccgaatccccaaaccccgtcgcgccgaccgaccctccgaaaaacgatacctaaaatcgctatacgaataaataatccaaacccccgccgacttaacgcgctcctactcgcgatccacgacctactaactaccgaacatccgcaacgaaaacttattaacgcccgactacaaaaacgcgccgaactaacgctacataaaactaacctaacaaccgcgcgaatcccccgccgaacccgcctcctcgataccaaaactatccgcaaaccntactnnnnaanaccgcnactaaatacaantnccnaataaaccccaaaaccccaa

SEQ ID NO: 11769 - DNA, 723 bp, Artificial Sequence
  chemically treated genomic DNA (Homo sapiens) CpG-island No: 11769
ttttttcgcgtttattttttttttttttcgtttttttttttattttttttttgtttttttttgggttttattttatatttttagttatttttttcgtgttttcgcgtttttttttcgttttttttttttttttttttttcgtttattttttttcgttttttttttttttttttatcgtgtttttttattttttttttttttgtttttcgtttcgttttttttgtcgtttttttattttttgttttttttttttttttttcgtttttttttttcgtcgttttatttttttttttatttttttgttttttttttttcgcgtcgtttttttttttttttttttttttttttttttcgttttttagtatttttttcgtatttttttcgttttttcgttgtcgttttttttttttcgtttttttttttttttttttttcgtttattttttttttatttttgttttttttttcgttttttttgttcgtttgtttattcgttttttttttttttgttttttttttttttttttttatttttttttttttacgttttttgtttttattggttgtttggtcgtcgtattgatagaatttagagtcggtttcgttttttacggtatatgggcgcgaatcgttgataagttggtattaatcgatagtaaaggtgaaaagttatattatcgggcgaaaggcgatgcgttggagatgttcgatcgtgaaggtaatt

SEQ ID NO: 11770 - DNA, 723 bp, Artificial Sequence
  chemically treated genomic DNA (Homo sapiens) CpG-island No: 11770
aattaccttcacgatcgaacatctccaacgcatcgcctttcgcccgataatataacttttcacctttactatcgattaataccaacttatcaacgattcgcgcccatataccgtaaaaaacgaaaccgactctaaattctatcaatacgacgaccaaacaaccaataaaaacaaaaaacgtaaaaaaaaaaaaataaaaaaaaaaaaaaaaaaaacaaaaaaaaaaaaaacgaataaacaaacgaacaaaaaaaacgaaaaaaaaaacaaaaataaaaaaaaaataaacgaaaaaaaaaaaaaaaaaaaaacgaaaaaaaaaaaacgacaacgaaaaaacgaaaaaaatacgaaaaaaatactaaaaaacgaaaaaaaaaaaaaaaaaaaaaaaaaaaaaaacgacgcgaaaaaaaaaaaacaaaaaaataaaaaaaaaaataaaacgacgaaaaaaaaaaacgaaaaaaaaaaaaaaaaaacaaaaaataaaaaaacgacaaaaaaaacgaaacgaaaaacaaaaaaaaaaaaaataaaaaaacacgataaaaaaaaaaaaaaaaaacgaaaaaaaataaacgaaaaaaaaaaaaaaaaaaaaaacgaaaaaaaaacgcgaaaacacgaaaaaaataactaaaaatataaaataaaacccaaaaaaaaacaaaaaaaaaataaaaaaaaaaacgaaaaaaaaaaaaaataaacgcgaaaaaa

SEQ ID NO: 11771 - DNA, 723 bp, Artificial Sequence
  chemically treated genomic DNA (Homo sapiens) CpG-island No: 11771
gattgtttttacgatcgagtatttttagcgtatcgtttttcgttcgataatatgattttttatttttgttgtcggttaatattagtttgttagcggttcgcgtttatgtatcgtaggaagcggagtcgattttaggttttgttaatacgacggttaggtaattagtgaaagtaaaagacgtggagaggaggggatgagggagaaagaagaggaagtaaggagaagagaagcgggtgggtaagcgggtagggaggacgagaaggggaataagagtggaaagagagtgggcgagaagaggaagaggggggagacggggggaaggaggcggtagcggggagacgaaaggagtgcggggaaagtgttgggagacgaggaggagggaagagagggaaagagggaggacggcgcgaaggggaggaaatagaagagtggagaggagagtggagcgacgaaggaggggagcgggggggaggggggaggagtaggaagtgggaagacggtagagagagcgaggcggggagtaaaagagggagaagtggaggggtacggtgggagggaggagagagaacgaggaggagtggacgaggagggagagggagagaggagcgaagggggggcgcgaagatacgaggagagtaattggggatgtggagtaggatttagggagaagtagagagagagtggggggagaagcgaagggagggagggataagcgcggggggg

SEQ ID NO: 11772 - DNA, 723 bp, Artificial Sequence
  chemically treated genomic DNA (Homo sapiens) CpG-island No: 11772
cccccccgcgcttatccctccctcccttcgcttctccccccactctctctctacttctccctaaatcctactccacatccccaattactctcctcgtatcttcgcgcccccccttcgctcctctctccctctccctcctcgtccactcctcctcgttctctctcctccctcccaccgtacccctccacttctccctcttttactccccgcctcgctctctctaccgtcttcccacttcctactcctcccccctcccccccgctcccctccttcgtcgctccactctcctctccactcttctatttcctccccttcgcgccgtcctccctctttccctctcttccctcctcctcgtctcccaacactttccccgcactcctttcgtctccccgctaccgcctccttccccccgtctcccccctcttcctcttctcgcccactctctttccactcttattccccttctcgtcctccctacccgcttacccacccgcttctcttctccttacttcctcttctttctccctcatcccctcctctccacgtcttttactttcactaattacctaaccgtcgtattaacaaaacctaaaatcgactccgcttcctacgatacataaacgcgaaccgctaacaaactaatattaaccgacaacaaaaataaaaaatcatattatcgaacgaaaaacgatacgctaaaaatactcgatcgtaaaaacaatc

SEQ ID NO: 11773 - DNA, 700 bp, Artificial Sequence
  chemically treated genomic DNA (Homo sapiens) CpG-island No: 11773
gttttcgtagggtcgtttttaataataacgtgagcgtggtttacgagtgtttgagcgtcggcgggcgtaggaagaggtcggggttggacgggcgtatttatagcgagttgtttaggcgtatttgtcgggacggttaagttttcgaggaggtggtggcgtcgttgttgcgtaaggtgtagtgtcgtgattacgaggcggtgtcgttgagcgtttttcgcgcgggtatatttatttgtttcgtgttgttggagttcgtggcgcgcgtcggcgcgtttttttagttgttggaggattcggtcgtcgtcgtggtcgatcgtcgcgtgggttaggtcgtgttggatattttggagggcgcgttgtaggttagcgacgtcgtcgcgttcgcgcgttttttggaggtcggttcgcgtttggggttcgatagtttggcgttggcgttggatcgcgtcgtcggggggcggcggtttagcgcgtttatgattcgcgaggagtttttggagagggtcgtcgcgttttttatcgcgaaggttaagtcggtgggttgaggttcgtgggtcgcgcggattcgggatttgcgttggggggttttcgcgtgcggggcgcgcggagtttttttttcgttttggtgaggttttgttataattaggcgtttagttttgcggaggaggtcggggtttttaggaagcggacgttcggtttt

SEQ ID NO: 11774 - DNA, 700 bp, Artificial Sequence
  chemically treated genomic DNA (Homo sapiens) CpG-island No: 11774
aaaaccgaacgtccgcttcctaaaaaccccgacctcctccgcaaaactaaacgcctaattataacaaaacctcaccaaaacgaaaaaaaaactccgcgcgccccgcacgcgaaaaccccccaacgcaaatcccgaatccgcgcgacccacgaacctcaacccaccgacttaaccttcgcgataaaaaacgcgacgaccctctccaaaaactcctcgcgaatcataaacgcgctaaaccgccgccccccgacgacgcgatccaacgccaacgccaaactatcgaaccccaaacgcgaaccgacctccaaaaaacgcgcgaacgcgacgacgtcgctaacctacaacgcgccctccaaaatatccaacacgacctaacccacgcgacgatcgaccacgacgacgaccgaatcctccaacaactaaaaaaacgcgccgacgcgcgccacgaactccaacaacacgaaacaaataaatatacccgcgcgaaaaacgctcaacgacaccgcctcgtaatcacgacactacaccttacgcaacaacgacgccaccacctcctcgaaaacttaaccgtcccgacaaatacgcctaaacaactcgctataaatacgcccgtccaaccccgacctcttcctacgcccgccgacgctcaaacactcgtaaaccacgctcacgttattattaaaaacgaccctacgaaaac

SEQ ID NO: 11775 - DNA, 700 bp, Artificial Sequence
  chemically treated genomic DNA (Homo sapiens) CpG-island No: 11775
gggatcgggcgttcgttttttgggagtttcggtttttttcgtagggttgggcgtttggttatggtagggttttattagggcgaagggaaggtttcgcgcgtttcgtacgcggggattttttagcgtagatttcggattcgcgcggtttacgggttttagtttatcggtttgattttcgcgatgaagagcgcggcggttttttttagaaatttttcgcgggttatgggcgcgttgggtcgtcgtttttcgacggcgcggtttagcgttagcgttaggttgtcgggttttaagcgcgagtcggtttttaggaagcgcgcgggcgcggcggcgtcgttggtttgtagcgcgttttttagggtgtttagtacggtttggtttacgcggcggtcggttacggcggcggtcgagttttttagtagttggaagagcgcgtcggcgcgcgttacgaattttagtagtacgaagtaggtgagtgtgttcgcgcggaagacgtttagcggtatcgtttcgtggttacggtattgtattttgcgtagtagcggcgttattattttttcgggggtttggtcgtttcggtagatgcgtttgagtagttcgttgtaggtgcgttcgtttagtttcggtttttttttgcgttcgtcggcgtttaggtattcgtaggttacgtttacgttgttgttgaaggcggttttgcggagat

SEQ ID NO: 11776 - DNA, 700 bp, Artificial Sequence
  chemically treated genomic DNA (Homo sapiens) CpG-island No: 11776
atctccgcaaaaccgccttcaacaacaacgtaaacgtaacctacgaatacctaaacgccgacgaacgcaaaaaaaaaccgaaactaaacgaacgcacctacaacgaactactcaaacgcatctaccgaaacgaccaaacccccgaaaaaataataacgccgctactacgcaaaatacaataccgtaaccacgaaacgataccgctaaacgtcttccgcgcgaacacactcacctacttcgtactactaaaattcgtaacgcgcgccgacgcgctcttccaactactaaaaaactcgaccgccgccgtaaccgaccgccgcgtaaaccaaaccgtactaaacaccctaaaaaacgcgctacaaaccaacgacgccgccgcgcccgcgcgcttcctaaaaaccgactcgcgcttaaaacccgacaacctaacgctaacgctaaaccgcgccgtcgaaaaacgacgacccaacgcgcccataacccgcgaaaaatttctaaaaaaaaccgccgcgctcttcatcgcgaaaatcaaaccgataaactaaaacccgtaaaccgcgcgaatccgaaatctacgctaaaaaatccccgcgtacgaaacgcgcgaaaccttcccttcgccctaataaaaccctaccataaccaaacgcccaaccctacgaaaaaaaccgaaactcccaaaaaacgaacgcccgatccc

SEQ ID NO: 11777 - DNA, 527 bp, Artificial Sequence
  chemically treated genomic DNA (Homo sapiens) CpG-island No: 11777
gtgagtacgggtcgggggtttagtattttcggtgagtacgggtcgagggtttagtagtaatttcggtgagtacgggtcgggggtttagtattttagtgagtacgggtcgggggttcggtatttttagtgagtacgggtcgggtgtttcgtagtattttcggtgagtacgggtcgggggtttagtagtattttcggtgagtacgggtcgggggtttagtattttcggtgagtacgggtcgggggtttagtagtattttcggtgagtacgggtcgggggtttagtagtattttcggtgagtacgggtcgggggtttagtatttttagtgagtacgggtcgggggtttcgtagtattttcggtgagtacgggtcgggggtttagcggtattttcggtgagtacgggtcgggggtttagcggtattttcggtgagtacgggtcgggggtttagcggtattttcggtgagtacgggttgggggttgagtaataggatataaaatataggagagtcgggcgcggtggtttacg

SEQ ID NO: 11778 - DNA, 527 bp, Artificial Sequence
  chemically treated genomic DNA (Homo sapiens) CpG-island No: 11778
cgtaaaccaccgcgcccgactctcctatattttatatcctattactcaacccccaacccgtactcaccgaaaataccgctaaacccccgacccgtactcaccgaaaataccgctaaacccccgacccgtactcaccgaaaataccgctaaacccccgacccgtactcaccgaaaatactacgaaacccccgacccgtactcactaaaaatactaaacccccgacccgtactcaccgaaaatactactaaacccccgacccgtactcaccgaaaatactactaaacccccgacccgtactcaccgaaaatactaaacccccgacccgtactcaccgaaaatactactaaacccccgacccgtactcaccgaaaatactacgaaacacccgacccgtactcactaaaaataccgaacccccgacccgtactcactaaaatactaaacccccgacccgtactcaccgaaattactactaaaccctcgacccgtactcaccgaaaatactaaacccccgacccgtactcac

SEQ ID NO: 11779 - DNA, 527 bp, Artificial Sequence
  chemically treated genomic DNA (Homo sapiens) CpG-island No: 11779
cgtgagttatcgcgttcggtttttttgtgttttgtgttttgttgtttagtttttagttcgtgtttatcggaaatgtcgttgagttttcggttcgtgtttatcggaaatgtcgttgagttttcggttcgtgtttatcggaaatgtcgttgagttttcggttcgtgtttatcggaaatgttgcggagttttcggttcgtgtttattggaaatgttgagttttcggttcgtgtttatcggaaatgttgttgagttttcggttcgtgtttatcggaaatgttgttgagttttcggttcgtgtttatcggaaatgttgagttttcggttcgtgtttatcggaaatgttgttgagttttcggttcgtgtttatcggaaatgttgcggagtattcggttcgtgtttattggaaatgtcgagttttcggttcgtgtttattgaaatgttgagttttcggttcgtgtttatcggaattgttgttgagttttcggttcgtgtttatcggaaatgttgagttttcggttcgtgtttat

SEQ ID NO: 11780 - DNA, 527 bp, Artificial Sequence
  chemically treated genomic DNA (Homo sapiens) CpG-island No: 11780
ataaacacgaaccgaaaactcaacatttccgataaacacgaaccgaaaactcaacaacaattccgataaacacgaaccgaaaactcaacatttcaataaacacgaaccgaaaactcgacatttccaataaacacgaaccgaatactccgcaacatttccgataaacacgaaccgaaaactcaacaacatttccgataaacacgaaccgaaaactcaacatttccgataaacacgaaccgaaaactcaacaacatttccgataaacacgaaccgaaaactcaacaacatttccgataaacacgaaccgaaaactcaacatttccaataaacacgaaccgaaaactccgcaacatttccgataaacacgaaccgaaaactcaacgacatttccgataaacacgaaccgaaaactcaacgacatttccgataaacacgaaccgaaaactcaacgacatttccgataaacacgaactaaaaactaaacaacaaaacacaaaacacaaaaaaaccgaacgcgataactcacg

SEQ ID NO: 11781 - DNA, 1127 bp, Artificial Sequence
  chemically treated genomic DNA (Homo sapiens) CpG-island No: 11781
atcgaggtagcgtcgcgtttggaagttaggtttgcggatttcgtttcgttttcgtttttttttttttttcgcgtggttagcgcgattttaggatagatttcgcgttcgttttttgtatagacggggaaacggagacggggacgcggggtcgcgtcggatggatcggttttgttttttcggtttcggttaggatttcgcgtcgcgtttcgtttatcgttcgcggtttcgtttcgcgtcggtacgttataaaataattttaaagtcgggggatcgggtcggtgacggcgtagagtagttttgttcgtttttttgcgtatagcgttcgcggtgttggtcgagtagggggcgacggcggcggtttcggggatcggaagagttcggggttgcgcgttcgaattttttttttcggcggaggcgttcggcgtcgtaggcgggatcggggtcgggattttatttttcggcgttttttgcggtcgggcgcgtaggcgtaagtcggatttggtcgcggagcgtaggcgtagtcggggttaggcggtgcgcgtaggcgtagcggggggcggggcgcgcgggttcggttaaggtaagcgtcggtggggcggcggcgttagagttgttggagcgttcggggttttcgggcggcggcggcggcgtagaggaggaggtaggcggcggtttcggtggttttttttcggacggtgcgcggttcggttcgtttcgcgaattcgcggtggtcgcgcggtttcgcgttgtttcgatttcgggttttttcgtcgtcgttatggttcggtcgttagtgtttagttcgtagaaggcgttgttgttggagtttaaggggttgtaggaagagtcggtcgagggatttcgcgtgatattggtggacgagggcgatttatataattgggaggtggttattttcgggttttttaatatttattacgagggcggttattttaaggtgagcgcggcgattttcgttcgggtttcggagtttacgagcgatttcgggcgtcgggaattagttttttgtttcgcggttttagcgttgttgttgggcgggtttcgaagttttttggtttgggttcgttttttttttatggttacgtttttttatttagttttgttcggtt

SEQ ID NO: 11782 - DNA, 1127 bp, Artificial Sequence
  chemically treated genomic DNA (Homo sapiens) CpG-island No: 11782
aaccgaacaaaactaaataaaaaaacgtaaccataaaaaaaaaacgaacccaaaccaaaaaacttcgaaacccgcccaacaacaacgctaaaaccgcgaaacaaaaaactaattcccgacgcccgaaatcgctcgtaaactccgaaacccgaacgaaaatcgccgcgctcaccttaaaataaccgccctcgtaataaatattaaaaaacccgaaaataaccacctcccaattatataaatcgccctcgtccaccaatatcacgcgaaatccctcgaccgactcttcctacaaccccttaaactccaacaacaacgccttctacgaactaaacactaacgaccgaaccataacgacgacgaaaaaacccgaaatcgaaacaacgcgaaaccgcgcgaccaccgcgaattcgcgaaacgaaccgaaccgcgcaccgtccgaaaaaaaaccaccgaaaccgccgcctacctcctcctctacgccgccgccgccgcccgaaaaccccgaacgctccaacaactctaacgccgccgccccaccgacgcttaccttaaccgaacccgcgcgccccgccccccgctacgcctacgcgcaccgcctaaccccgactacgcctacgctccgcgaccaaatccgacttacgcctacgcgcccgaccgcaaaaaacgccgaaaaataaaatcccgaccccgatcccgcctacgacgccgaacgcctccgccgaaaaaaaaaattcgaacgcgcaaccccgaactcttccgatccccgaaaccgccgccgtcgccccctactcgaccaacaccgcgaacgctatacgcaaaaaaacgaacaaaactactctacgccgtcaccgacccgatcccccgactttaaaattattttataacgtaccgacgcgaaacgaaaccgcgaacgataaacgaaacgcgacgcgaaatcctaaccgaaaccgaaaaaacaaaaccgatccatccgacgcgaccccgcgtccccgtctccgtttccccgtctatacaaaaaacgaacgcgaaatctatcctaaaatcgcgctaaccacgcgaaaaaaaaaaaaaaacgaaaacgaaacgaaatccgcaaacctaacttccaaacgcgacgctacctcgat

SEQ ID NO: 11783 - DNA, 1127 bp, Artificial Sequence
  chemically treated genomic DNA (Homo sapiens) CpG-island No: 11783
ggtcgggtagagttgggtgggggaacgtggttatagaagggaaacgagtttaagttaggaggtttcggggttcgtttagtaatagcgttaggatcgcggggtagggagttggttttcggcgttcgaggtcgttcgtgggtttcgggattcgggcgggggtcgtcgcgtttattttgaagtagtcgttttcgtagtaggtgttggggggttcgaagatggttattttttagttgtatagatcgttttcgtttattagtgttacgcggaatttttcgatcggttttttttgtagttttttgagttttagtagtagcgttttttgcgagttgggtattagcggtcgagttatggcggcggcggaggggttcggggtcggagtagcgcggggtcgcgcgattatcgcgagttcgcgagacgggtcgggtcgcgtatcgttcgggggggagttatcggggtcgtcgtttgtttttttttttgcgtcgtcgtcgtcgttcggggatttcgagcgttttagtagttttggcgtcgtcgttttatcggcgtttgttttggtcgggttcgcgcgtttcgtttttcgttgcgtttgcgcgtatcgtttggtttcgattgcgtttgcgtttcgcggttaggttcgatttgcgtttgcgcgttcggtcgtaggggacgtcgggaggtggagtttcggtttcggtttcgtttacggcgtcgagcgttttcgtcgggagggagggttcgagcgcgtagtttcgggttttttcgattttcgaggtcgtcgtcgtcgttttttgttcgattagtatcgcggacgttgtgcgtaaggaggcgggtagggttgttttgcgtcgttatcggttcggtttttcggttttggggttgttttgtgacgtgtcggcgcggggcggggtcgcgggcggtgaacggggcgcggcgcggggttttgatcgggatcggaggggtagggtcggtttattcggcgcgatttcgcgttttcgttttcgttttttcgtttgtgtaggggacgggcgcgaagtttgttttagggtcgcgttggttacgcggaagggaggaaggggcgggagcgaggcgggattcgtagatttggtttttaggcgcggcgttgtttcggt

SEQ ID NO: 11784 - DNA, 1127 bp, Artificial Sequence
  chemically treated genomic DNA (Homo sapiens) CpG-island No: 11784
accgaaacaacgccgcgcctaaaaaccaaatctacgaatcccgcctcgctcccgccccttcctcccttccgcgtaaccaacgcgaccctaaaacaaacttcgcgcccgtcccctacacaaacgaaaaaacgaaaacgaaaacgcgaaatcgcgccgaataaaccgaccctacccctccgatcccgatcaaaaccccgcgccgcgccccgttcaccgcccgcgaccccgccccgcgccgacacgtcacaaaacaaccccaaaaccgaaaaaccgaaccgataacgacgcaaaacaaccctacccgcctccttacgcacaacgtccgcgatactaatcgaacaaaaaacgacgacgacgacctcgaaaatcgaaaaaacccgaaactacgcgctcgaaccctccctcccgacgaaaacgctcgacgccgtaaacgaaaccgaaaccgaaactccacctcccgacgtcccctacgaccgaacgcgcaaacgcaaatcgaacctaaccgcgaaacgcaaacgcaatcgaaaccaaacgatacgcgcaaacgcaacgaaaaacgaaacgcgcgaacccgaccaaaacaaacgccgataaaacgacgacgccaaaactactaaaacgctcgaaatccccgaacgacgacgacgacgcaaaaaaaaaaacaaacgacgaccccgataactcccccccgaacgatacgcgacccgacccgtctcgcgaactcgcgataatcgcgcgaccccgcgctactccgaccccgaacccctccgccgccgccataactcgaccgctaatacccaactcgcaaaaaacgctactactaaaactcaaaaaactacaaaaaaaaccgatcgaaaaattccgcgtaacactaataaacgaaaacgatctatacaactaaaaaataaccatcttcgaaccccccaacacctactacgaaaacgactacttcaaaataaacgcgacgacccccgcccgaatcccgaaacccacgaacgacctcgaacgccgaaaaccaactccctaccccgcgatcctaacgctattactaaacgaaccccgaaacctcctaacttaaactcgtttcccttctataaccacgttcccccacccaactctacccgacc

SEQ ID NO: 11785 - DNA, 621 bp, Artificial Sequence
  chemically treated genomic DNA (Homo sapiens) CpG-island No: 11785
cgtttcgtcgggtcgggtttgtttattgcgtgtcggcgtgttcgggcgggcggagcgcgggcgcggcgggggcgggcggttaggtagtcgggcgggtgcgcggggcgttcggggttcggggttagagttggagcggagtcgggcgggcgttatggaggggttgcggcgggggttgtcgcgttgaagcgttattatattaaggtgtatttggcggacgaggcgttgttgttacgttgatcgtgcggtcgcgggatacgtttagcgatttgcgcgtttagttgtgggttagggcgtgagtttttggaagcgcgttttttattataacgcgcgcggttggacgattattagacggtgcgcgacgcgcgtttgtaggacggtcggtgttgttgttcgttagcgattttaggtggtcgcggggttcggggtgggtggggcgggggcggcggtcggggatttttggagagcggcgggggagggggcgtttaaggcggtttttcgggtcggtattgtttttttatttcgcgcgttcgttcggttttttttttgattcggttttgtcggtgttaggttttgtttcgggttttttgtttgtgtttgtttttttgtttgtttttgtttttg

SEQ ID NO: 11786 - DNA, 621 bp, Artificial Sequence
  chemically treated genomic DNA (Homo sapiens) CpG-island No: 11786
caaaaacaaaaacaaacaaaaaaacaaacacaaacaaaaaacccgaaacaaaacctaacaccgacaaaaccgaatcaaaaaaaaaaccgaacgaacgcgcgaaataaaaaaacaataccgacccgaaaaaccgccttaaacgccccctcccccgccgctctccaaaaatccccgaccgccgcccccgccccacccaccccgaaccccgcgaccacctaaaatcgctaacgaacaacaacaccgaccgtcctacaaacgcgcgtcgcgcaccgtctaataatcgtccaaccgcgcgcgttataataaaaaacgcgcttccaaaaactcacgccctaacccacaactaaacgcgcaaatcgctaaacgtatcccgcgaccgcacgatcaacgtaacaacaacgcctcgtccgccaaatacaccttaatataataacgcttcaacgcgacaacccccgccgcaacccctccataacgcccgcccgactccgctccaactctaaccccgaaccccgaacgccccgcgcacccgcccgactacctaaccgcccgcccccgccgcgcccgcgctccgcccgcccgaacacgccgacacgcaataaacaaacccgacccgacgaaacg

SEQ ID NO: 11787 - DNA, 621 bp, Artificial Sequence
  chemically treated genomic DNA (Homo sapiens) CpG-island No: 11787
tagagatagaaataggtagagaaataggtatagatagagagttcgaagtaagatttgatatcggtaaggtcgggttaggagagaggtcgggcgggcgcgcgaggtgggaaagtagtgtcggttcgggaggtcgttttgggcgttttttttttcgtcgttttttaggggttttcggtcgtcgttttcgttttatttatttcgagtttcgcggttatttggggtcgttgacgagtagtagtatcggtcgttttgtaggcgcgcgtcgcgtatcgtttggtggtcgtttagtcgcgcgcgttgtagtagaaggcgcgtttttaggagtttacgttttggtttatagttgggcgcgtaggtcgttgagcgtgtttcgcggtcgtacggttagcgtagtagtagcgtttcgttcgttaggtgtattttgatgtggtagcgttttagcgcgatagttttcgtcgtagtttttttatggcgttcgttcggtttcgttttagttttggtttcgggtttcgagcgtttcgcgtattcgttcgattatttggtcgttcgttttcgtcgcgttcgcgtttcgttcgttcggatacgtcggtacgtagtgggtaggttcggttcggcggggcg

SEQ ID NO: 11788 - DNA, 621 bp, Artificial Sequence
  chemically treated genomic DNA (Homo sapiens) CpG-island No: 11788
cgccccgccgaaccgaacctacccactacgtaccgacgtatccgaacgaacgaaacgcgaacgcgacgaaaacgaacgaccaaataatcgaacgaatacgcgaaacgctcgaaacccgaaaccaaaactaaaacgaaaccgaacgaacgccataaaaaaactacgacgaaaactatcgcgctaaaacgctaccacatcaaaatacacctaacgaacgaaacgctactactacgctaaccgtacgaccgcgaaacacgctcaacgacctacgcgcccaactataaaccaaaacgtaaactcctaaaaacgcgccttctactacaacgcgcgcgactaaacgaccaccaaacgatacgcgacgcgcgcctacaaaacgaccgatactactactcgtcaacgaccccaaataaccgcgaaactcgaaataaataaaacgaaaacgacgaccgaaaacccctaaaaaacgacgaaaaaaaaaacgcccaaaacgacctcccgaaccgacactactttcccacctcgcgcgcccgcccgacctctctcctaacccgaccttaccgatatcaaatcttacttcgaactctctatctatacctatttctctacctatttctatctcta

SEQ ID NO: 11789 - DNA, 1375 bp, Artificial Sequence
  chemically treated genomic DNA (Homo sapiens) CpG-island No: 11789
acggggtcgaagtttttagagaagagttttcgcgtgacgatttcgcggggggatattttaattcgcgttttagaggtaattttgagttgtttgaggtcgttagtttagttggcgcgaggttagtagtgagcgcgtcgtgagttagttttggtgcggttcgttcggttttgtcgtcggtgagttggttacgatttttcgtttgcggagggcgttgggattcggcggggagggagttagtcggagttcggtgggaaattagcgcgtttaacgaggtgtcgcgtgggagcgcgtcggagggggcggtgttttcggggcggtatcgttcggtttcgtttttttaatttagggttcgttttttacgtttggagtttcgtttacgagtttttttttttttttaggtttcgtttttcggtcgttacgtttcgtttagtcgggcgcgggcggcggcgtcgtttttaagagtttttcggtgttttgggggtcgcgggtcggcgcgttgatttggtgcgtatgtttcgggcggtgacgtcggcgtcgggtttatgtgtgcggtcgaggggcgtattatttggtcggcggcgcgggcgggcggcggatcggcgtagcgagcgtcgcgggttcgggcggttttataggcggacgagcgcgcgcggttcggcgttttcggttttttcgtcgttcggtttcggggcgatttcggattagtagttttcgtaatttgcgcgttgttttagggtcggtcgattcgcggttcggtaagttttggattaaatttggcggggggcggggttggggacgtacggttgagattggagcggcgcgggtcgcgtagggtggggtttcggggggttttgaaggatttttgtatgagcgtggaaaagtgaagcgagcgagttttattttttgtattttgggagcgtttttttgcgttgtttggaaagttttttgtttcgaggcggttcgggtacgtgggggtcgggcgggcgggggtttcggaaagtcgcggcgtcgtttcgttttcgttttgcgtttttgcggggtcgggggaagggttgggtcgcgaggcgtttttttcgagtgtcgggacgggtggaggcggcgggaagacggtacgtgggcgcgcggggcggggtttcgtttaggggcgggggttcggggcgggttgggtagtaacgttgatttcgcggcggcggcggcggcggcggcggcggatttcgtgttagaatagagttttcgcgcgtttacggttggagggtcggtttttttttagttcgcgtttttttgtttaattttcgggagtcgcgggatttttttttttttttgatttcggttttttttaaggttcgatattttaaatttgtttttttatttaggg

SEQ ID NO: 11790 - DNA, 1375 bp, Artificial Sequence
  chemically treated genomic DNA (Homo sapiens) CpG-island No: 11790
ccctaaataaaaaaacaaatttaaaatatcgaaccttaaaaaaaaccgaaatcaaaaaaaaaaaaaaatcccgcgactcccgaaaattaaacaaaaaaacgcgaactaaaaaaaaaccgaccctccaaccgtaaacgcgcgaaaactctattctaacacgaaatccgccgccgccgccgccgccgccgccgcgaaatcaacgttactacccaacccgccccgaacccccgcccctaaacgaaaccccgccccgcgcgcccacgtaccgtcttcccgccgcctccacccgtcccgacactcgaaaaaaacgcctcgcgacccaacccttcccccgaccccgcaaaaacgcaaaacgaaaacgaaacgacgccgcgactttccgaaacccccgcccgcccgacccccacgtacccgaaccgcctcgaaacaaaaaactttccaaacaacgcaaaaaaacgctcccaaaatacaaaaaataaaactcgctcgcttcacttttccacgctcatacaaaaatccttcaaaaccccccgaaaccccaccctacgcgacccgcgccgctccaatctcaaccgtacgtccccaaccccgccccccgccaaatttaatccaaaacttaccgaaccgcgaatcgaccgaccctaaaacaacgcgcaaattacgaaaactactaatccgaaatcgccccgaaaccgaacgacgaaaaaaccgaaaacgccgaaccgcgcgcgctcgtccgcctataaaaccgcccgaacccgcgacgctcgctacgccgatccgccgcccgcccgcgccgccgaccaaataatacgcccctcgaccgcacacataaacccgacgccgacgtcaccgcccgaaacatacgcaccaaatcaacgcgccgacccgcgacccccaaaacaccgaaaaactcttaaaaacgacgccgccgcccgcgcccgactaaacgaaacgtaacgaccgaaaaacgaaacctaaaaaaaaaaaaaaactcgtaaacgaaactccaaacgtaaaaaacgaaccctaaattaaaaaaacgaaaccgaacgataccgccccgaaaacaccgccccctccgacgcgctcccacgcgacacctcgttaaacgcgctaatttcccaccgaactccgactaactccctccccgccgaatcccaacgccctccgcaaacgaaaaatcgtaaccaactcaccgacgacaaaaccgaacgaaccgcaccaaaactaactcacgacgcgctcactactaacctcgcgccaactaaactaacgacctcaaacaactcaaaattacctctaaaacgcgaattaaaatatccccccgcgaaatcgtcacgcgaaaactcttctctaaaaacttcgaccccgt

SEQ ID NO: 11791 - DNA, 1375 bp, Artificial Sequence
  chemically treated genomic DNA (Homo sapiens) CpG-island No: 11791
ttttagatggggaggtaaatttaaagtgtcgggttttgagaaaggtcggaattagagaggggaaagggtttcgcggttttcgggggttaggtaggaaggcgcgagttgggggagggtcggttttttagtcgtgggcgcgcggggattttattttgatacgggattcgtcgtcgtcgtcgtcgtcgtcgtcgcggggttagcgttgttgtttaattcgtttcggattttcgtttttgagcgggatttcgtttcgcgcgtttacgtgtcgttttttcgtcgtttttattcgtttcgatattcggaagaggcgtttcgcggtttagtttttttttcgatttcgtaggagcgtaggacggaagcggggcgacgtcgcgatttttcgggattttcgttcgttcggtttttacgtgttcgggtcgtttcggggtaaggaattttttaggtagcgtaagaagacgtttttagaatataaggagtagaattcgttcgttttatttttttacgtttatgtaggggttttttagagtttttcgaggttttattttgcgcggttcgcgtcgttttagttttagtcgtgcgtttttagtttcgtttttcgttaagtttggtttagaatttatcgggtcgcgggtcggtcggttttagggtagcgcgtaggttacgggggttgttggttcggggtcgtttcggggtcgggcggcggaggggtcgggggcgtcgggtcgcgcgcgttcgttcgtttgtggggtcgttcgggttcgcggcgttcgttgcgtcggttcgtcgttcgttcgcgtcgtcggttagataatgcgtttttcggtcgtatatatgagttcggcgtcggcgttatcgttcgggatatgcgtattaggttagcgcgtcggttcgcggtttttaaaatatcggggagtttttaaaggcgacgtcgtcgttcgcgttcggttgggcggggcgtggcgatcgaggggcggggtttgagagaagggaggagttcgtgggcggggttttaggcgtagaaggcgggttttgagttgagggggcggggtcggacggtatcgtttcggaagtatcgtttttttcggcgcgtttttacgcgatatttcgttgggcgcgttggttttttatcgggtttcggttggtttttttttcgtcgagttttagcgtttttcgtaggcgaagggtcgtggttaatttatcggcggtaaagtcgggcgggtcgtattaaggttgatttacgacgcgtttattgttgatttcgcgttagttgagttggcgattttaagtaatttagggttgtttttgaaacgcgggttagaatgttttttcgcggggtcgttacgcggaagtttttttttgggaatttcggtttcgt

SEQ ID NO: 11792 - DNA, 1375 bp, Artificial Sequence
  chemically treated genomic DNA (Homo sapiens) CpG-island No: 11792
acgaaaccgaaattcccaaaaaaaaacttccgcgtaacgaccccgcgaaaaaacattctaacccgcgtttcaaaaacaaccctaaattacttaaaatcgccaactcaactaacgcgaaatcaacaataaacgcgtcgtaaatcaaccttaatacgacccgcccgactttaccgccgataaattaaccacgacccttcgcctacgaaaaacgctaaaactcgacgaaaaaaaaaccaaccgaaacccgataaaaaaccaacgcgcccaacgaaatatcgcgtaaaaacgcgccgaaaaaaacgatacttccgaaacgataccgtccgaccccgccccctcaactcaaaacccgccttctacgcctaaaaccccgcccacgaactcctcccttctctcaaaccccgcccctcgatcgccacgccccgcccaaccgaacgcgaacgacgacgtcgcctttaaaaactccccgatattttaaaaaccgcgaaccgacgcgctaacctaatacgcatatcccgaacgataacgccgacgccgaactcatatatacgaccgaaaaacgcattatctaaccgacgacgcgaacgaacgacgaaccgacgcaacgaacgccgcgaacccgaacgaccccacaaacgaacgaacgcgcgcgacccgacgcccccgacccctccgccgcccgaccccgaaacgaccccgaaccaacaacccccgtaacctacgcgctaccctaaaaccgaccgacccgcgacccgataaattctaaaccaaacttaacgaaaaacgaaactaaaaacgcacgactaaaactaaaacgacgcgaaccgcgcaaaataaaacctcgaaaaactctaaaaaacccctacataaacgtaaaaaaataaaacgaacgaattctactccttatattctaaaaacgtcttcttacgctacctaaaaaattccttaccccgaaacgacccgaacacgtaaaaaccgaacgaacgaaaatcccgaaaaatcgcgacgtcgccccgcttccgtcctacgctcctacgaaatcgaaaaaaaaactaaaccgcgaaacgcctcttccgaatatcgaaacgaataaaaacgacgaaaaaacgacacgtaaacgcgcgaaacgaaatcccgctcaaaaacgaaaatccgaaacgaattaaacaacaacgctaaccccgcgacgacgacgacgacgacgacgacgaatcccgtatcaaaataaaatccccgcgcgcccacgactaaaaaaccgaccctcccccaactcgcgccttcctacctaacccccgaaaaccgcgaaaccctttcccctctctaattccgacctttctcaaaacccgacactttaaatttacctccccatctaaaa

SEQ ID NO: 11793 - DNA, 612 bp, Artificial Sequence
  chemically treated genomic DNA (Homo sapiens) CpG-island No: 11793
  unsure (49)
ggtagtcgttcgagggaaaaaggggcgatcgaaagcggagggggagganatagaaggggagggaggaaggggagtcgcgggcgaacggcgacggattaaggggatggtttttgattggtttcgcggttcgtttttatttattattggtaggatgtttggtagttattcggtttcgttttttcggatttgtttcggcgggcggcgcgatcgcgagaattagtcggttcgcgcgttcgttggtcgtcgttttataaggggtgagtttggcggtgggttgggggggggtggggttgtatcggcgcgttcgtttttgggtttgtggtgttatttgggttgcgtacggttgtttgatttgtcgtgggtggcgtgcggtggtagtgtgcgtatcggttgttgaggtgtgtttgtagggggaggggtgggcggttttttgggcggggtcgtgttggatgttgtgcggggggagttggtattcggggttggcggggtgtgtgcgggatggttgtcgttgttttaggcgcggtgatattgtggtattagtggttgagttttgtgagagtttcgtatggttattggtagatgttgggtgtgtggaggtgttgtcggtgtagt

SEQ ID NO: 11794 - DNA, 612 bp, Artificial Sequence
  chemically treated genomic DNA (Homo sapiens) CpG-island No: 11794
  unsure (564)
actacaccgacaacacctccacacacccaacatctaccaataaccatacgaaactctcacaaaactcaaccactaataccacaatatcaccgcgcctaaaacaacgacaaccatcccgcacacaccccgccaaccccgaataccaactccccccgcacaacatccaacacgaccccgcccaaaaaaccgcccacccctccccctacaaacacacctcaacaaccgatacgcacactaccaccgcacgccacccacgacaaatcaaacaaccgtacgcaacccaaataacaccacaaacccaaaaacgaacgcgccgatacaaccccacccccccccaacccaccgccaaactcaccccttataaaacgacgaccaacgaacgcgcgaaccgactaattctcgcgatcgcgccgcccgccgaaacaaatccgaaaaaacgaaaccgaataactaccaaacatcctaccaataataaataaaaacgaaccgcgaaaccaatcaaaaaccatccccttaatccgtcgccgttcgcccgcgactccccttcctccctccccttctatntcctccccctccgctttcgatcgcccctttttccctcgaacgactacc

SEQ ID NO: 11795 - DNA, 612 bp, Artificial Sequence
  chemically treated genomic DNA (Homo sapiens) CpG-island No: 11795
  unsure (564)
attatatcgataatatttttatatatttagtatttattaatgattatacgaaatttttataaaatttaattattgatattatagtattatcgcgtttgaagtagcgataattatttcgtatatatttcgttaatttcgaatattaatttttttcgtataatatttagtacgatttcgtttagaaaatcgtttatttttttttttataagtatattttaataatcggtacgtatattgttatcgtacgttatttacgataaattaaatagtcgtacgtagtttaaatgatattataaatttaaaaacgaacgcgtcggtatagttttatttttttttaatttatcgttaagtttattttttgtaaaacgacggttagcgagcgcgcgggtcggttggttttcgcgatcgcgtcgttcgtcggggtaagttcgaggaggcgggatcgaatgattgttaggtattttgttaatggtagatgggagcgggtcgcggagttaattaaaggttatttttttggttcgtcgtcgttcgttcgcggtttttttttttttttttttttttgtntttttttttttcgttttcggtcgtttttttttttttcgggcggttgtt

SEQ ID NO: 11796 - DNA, 612 bp, Artificial Sequence
  chemically treated genomic DNA (Homo sapiens) CpG-island No: 11796
  unsure (49)
aacaaccgcccgaaaaaaaaaaaaacgaccgaaaacgaaaaaaaaaaanacaaaaaaaaaaaaaaaaaaaaaaaccgcgaacgaacgacgacgaaccaaaaaaataacctttaattaactccgcgacccgctcccatctaccattaacaaaatacctaacaatcattcgatcccgcctcctcgaacttaccccgacgaacgacgcgatcgcgaaaaccaaccgacccgcgcgctcgctaaccgtcgttttacaaaaaataaacttaacgataaattaaaaaaaaataaaactataccgacgcgttcgtttttaaatttataatatcatttaaactacgtacgactatttaatttatcgtaaataacgtacgataacaatatacgtaccgattattaaaatatacttataaaaaaaaaaataaacgattttctaaacgaaatcgtactaaatattatacgaaaaaaattaatattcgaaattaacgaaatatatacgaaataattatcgctacttcaaacgcgataatactataatatcaataattaaattttataaaaatttcgtataatcattaataaatactaaatatataaaaatattatcgatataat

SEQ ID NO: 11797 - DNA, 791 bp, Artificial Sequence
  chemically treated genomic DNA (Homo sapiens) CpG-island No: 11797
  unsure (98, 333, 364, 372, 498)
gtcgtggggggcgtgcgtgttgtcgggtaattttttatttcgacgttggcgtgtacggaatggagttttgtttgggttcggtttttgttttttggagnggtcgggtggagtcggttatatatgagcgacgtgcgatttttttttcgtgtatcgtatttttagttgtagtgtcgtcggtttatgtggtcgtcgacgcgcggtagtttgcgtggacgttttttgttcgtgttgggggttttgtggcgtttttggcgtttggatagtcgtggagagtcgtgtttgtgtatcgttttcgttgttcgtatcgagtaggtttgtgggtacgtcgtgagnttttttcgcgcgttttagagtgtttttttgngttggtgnagagtttcggtcgcgtattcgcgttttcggtttattgtatttttggttattggcgtcggcggcgagtatgtttttttcgagcggtttttttgtagtttcgcgtgcgggtggtgattcgtgagaggnagttttcgttcgcgtttttgttttattattgggggtgaggttattatcgaggttcgttttttaagggtttttatggtgtggttttcgttggtttgttcggagggtggggttttcgtcgatcgtgttgagtgcgtttcgtttttcgttttgttttgaagttaattcggtggggagatttttttcggttcgcgtttttataatcgttttttgttttcgtagggttgagggggttcgttttttttgttttttggttttttttacggtggattagtatttttatcgcgttttgtttt

SEQ ID NO: 11798 - DNA, 791 bp, Artificial Sequence
  chemically treated genomic DNA (Homo sapiens) CpG-island No: 11798
  unsure (294, 420, 428, 459, 694)
aaaacaaaacgcgataaaaatactaatccaccgtaaaaaaaaccaaaaaacaaaaaaaacgaaccccctcaaccctacgaaaacaaaaaacgattataaaaacgcgaaccgaaaaaaatctccccaccgaattaacttcaaaacaaaacgaaaaacgaaacgcactcaacacgatcgacgaaaaccccaccctccgaacaaaccaacgaaaaccacaccataaaaacccttaaaaaacgaacctcgataataacctcacccccaataataaaacaaaaacgcgaacgaaaactncctctcacgaatcaccacccgcacgcgaaactacaaaaaaaccgctcgaaaaaaacatactcgccgccgacgccaataaccaaaaatacaataaaccgaaaacgcgaatacgcgaccgaaactctncaccaacncaaaaaaacactctaaaacgcgcgaaaaaanctcacgacgtacccacaaacctactcgatacgaacaacgaaaacgatacacaaacacgactctccacgactatccaaacgccaaaaacgccacaaaacccccaacacgaacaaaaaacgtccacgcaaactaccgcgcgtcgacgaccacataaaccgacgacactacaactaaaaatacgatacacgaaaaaaaaatcgcacgtcgctcatatataaccgactccacccgaccnctccaaaaaacaaaaaccgaacccaaacaaaactccattccgtacacgccaacgtcgaaataaaaaattacccgacaacacgcacgccccccacgac

SEQ ID NO: 11799 - DNA, 791 bp, Artificial Sequence
  chemically treated genomic DNA (Homo sapiens) CpG-island No: 11799
  unsure (294, 420, 428, 459, 694)
ggaataaggcgcggtaaaaatgttgatttatcgtagggagggttagaggataaggaagacgggtttttttaattttgcgggggtagggggcggttataaaagcgcgagtcggaaggaatttttttatcgaattggttttaaaatagagcggagggcggggcgtatttagtacggtcggcggagattttatttttcggataaattagcgagaattatattataaaaatttttgaaagacgagtttcggtaatggttttatttttaatggtgaggtaagggcgcgaacgggaattnttttttacgaattattattcgtacgcgggattgtaaggaaatcgttcgaggaggatatattcgtcgtcggcgttagtagttaagaatgtagtggatcgaaaacgcggatgcgcgatcggggttttntattaatntagaggaatattttagggcgcgcgggggagntttacggcgtatttatagatttgttcggtgcgggtaacgaaaacgatatataggtacggttttttacgattatttaagcgttaggggcgttataaggtttttagtacgagtagggagcgtttacgtaggttatcgcgcgtcggcgattatataggtcggcggtattatagttgggagtgcggtgtacgaagagaagatcgtacgtcgtttatatgtaatcgattttattcggttnttttagaggatagaagtcgagtttaagtagggttttatttcgtgtacgttaacgtcggggtgaggagttattcggtagtacgtacgttttttacggt

SEQ ID NO: 11800 - DNA, 791 bp, Artificial Sequence
  chemically treated genomic DNA (Homo sapiens) CpG-island No: 11800
  unsure (98, 333, 364, 372, 498)
accgtaaaaaacgtacgtactaccgaataactcctcaccccgacgttaacgtacacgaaataaaaccctacttaaactcgacttctatcctctaaaanaaccgaataaaatcgattacatataaacgacgtacgatcttctcttcgtacaccgcactcccaactataataccgccgacctatataatcgccgacgcgcgataacctacgtaaacgctccctactcgtactaaaaaccttataacgcccctaacgcttaaataatcgtaaaaaaccgtacctatatatcgttttcgttacccgcaccgaacaaatctataaatacgccgtaaanctcccccgcgcgccctaaaatattcctctanattaatanaaaaccccgatcgcgcatccgcgttttcgatccactacattcttaactactaacgccgacgacgaatatatcctcctcgaacgatttccttacaatcccgcgtacgaataataattcgtaaaaaanaattcccgttcgcgcccttacctcaccattaaaaataaaaccattaccgaaactcgtctttcaaaaatttttataatataattctcgctaatttatccgaaaaataaaatctccgccgaccgtactaaatacgccccgccctccgctctattttaaaaccaattcgataaaaaaattccttccgactcgcgcttttataaccgccccctacccccgcaaaattaaaaaaacccgtcttccttatcctctaaccctccctacgataaatcaacatttttaccgcgccttattcc

SEQ ID NO: 11801 - DNA, 503 bp, Artificial Sequence
  chemically treated genomic DNA (Homo sapiens) CpG-island No: 11801
ggagtcggattcgggaagtgggggcgcggatcggagagtgggggtacggatcgaggagttggggggcggattcggagagtgagggggtggattcgggaatggaggcgcggattagtgtagtgggggggcggatcggggagtggggcgcggatcggggattagggggcggatcggggagtagggggcggaataggtaaatggggacgtggagttcggtttttttttttttagcgagcgtttcggagcgttaggaggggtgttttcggttgagttatagtgagtggtttcgtacggtagttttgggcgttcgatatcggcgcgataacgggagggcgcggtattgtgaagtttcggtgagagcgtggattgggttcgagtggaaggagggtagttagcgcggcgtacgttaaggttgcgggtgttattcggtgatagttttttaggggtggggttttagttcgtttttttttcgaagataataaaagaatagaaggaaaaaatta

SEQ ID NO: 11802 - DNA, 503 bp, Artificial Sequence
  chemically treated genomic DNA (Homo sapiens) CpG-island No: 11802
taattttttccttctattcttttattatcttcgaaaaaaaaacgaactaaaaccccacccctaaaaaactatcaccgaataacacccgcaaccttaacgtacgccgcgctaactaccctccttccactcgaacccaatccacgctctcaccgaaacttcacaataccgcgccctcccgttatcgcgccgatatcgaacgcccaaaactaccgtacgaaaccactcactataactcaaccgaaaacacccctcctaacgctccgaaacgctcgctaaaaaaaaaaaaaccgaactccacgtccccatttacctattccgccccctactccccgatccgccccctaatccccgatccgcgccccactccccgatccgcccccccactacactaatccgcgcctccattcccgaatccaccccctcactctccgaatccgccccccaactcctcgatccgtacccccactctccgatccgcgcccccacttcccgaatccgactcc

SEQ ID NO: 11803 - DNA, 503 bp, Artificial Sequence
  chemically treated genomic DNA (Homo sapiens) CpG-island No: 11803
tagttttttttttttatttttttattgttttcggggaggggacgggttggggttttatttttgggaagttgttatcgagtggtattcgtagttttgacgtgcgtcgcgttggttgttttttttttattcggatttagtttacgtttttatcggggttttatagtgtcgcgttttttcgttgtcgcgtcgatgtcgagcgtttaaggttgtcgtgcggggttatttattgtagtttagtcggggatattttttttggcgtttcggggcgttcgttgggggaggggaaatcggattttacgtttttatttatttgtttcgttttttatttttcggttcgttttttaattttcggttcgcgttttatttttcggttcgtttttttattgtattggttcgcgtttttattttcgggtttatttttttatttttcgggttcgttttttaatttttcggttcgtgtttttatttttcggttcgcgtttttatttttcgggttcgatttt

SEQ ID NO: 11804 - DNA, 503 bp, Artificial Sequence
  chemically treated genomic DNA (Homo sapiens) CpG-island No: 11804
aaaatcgaacccgaaaaataaaaacgcgaaccgaaaaataaaaacacgaaccgaaaaattaaaaaacgaacccgaaaaataaaaaaataaacccgaaaataaaaacgcgaaccaatacaataaaaaaacgaaccgaaaaataaaacgcgaaccgaaaattaaaaaacgaaccgaaaaataaaaaacgaaacaaataaataaaaacgtaaaatccgatttcccctcccccaacgaacgccccgaaacgccaaaaaaaatatccccgactaaactacaataaataaccccgcacgacaaccttaaacgctcgacatcgacgcgacaacgaaaaaacgcgacactataaaaccccgataaaaacgtaaactaaatccgaataaaaaaaaaacaaccaacgcgacgcacgtcaaaactacgaataccactcgataacaacttcccaaaaataaaaccccaacccgtcccctccccgaaaacaataaaaaaataaaaaaaaaaaacta

SEQ ID NO: 11805 - DNA, 522 bp, Artificial Sequence
  chemically treated genomic DNA (Homo sapiens) CpG-island No: 11805
  unsure (64, 67, 257)
ggggtttcgtggggtttagaagttcggaatttgagcgttaatttagtgtgttcgtgcgaggggnttnatggtatgtgtagttttatattggttcggaatacgttggtcgacgcgtgggttatcgttcgatggtgtgtataggatatacggtggttcgtacgtttgtttttgcgggggggtgtgcgcgaggaggggggtggttattttgcgtttttgggcgggagattggtggtttgtttgtgtgtttgcgtgggttnggggtagcgtagatgcggtgttcggcgggcggcggcgagtaggtatgaatcgtatttaggcgcgatatgcgttgggggggttggagagtagtattagcggtgtcgcgtgtttgcggtcgggtgggagcgtagcgtgggattaataagaataattttttcggcgtggtttattagtttacgttggaatcggttttttgggagggcgggggggattttttcgggggtgggttcggcgtttcgaatattatggggggtattggggggg

SEQ ID NO: 11806 - DNA, 522 bp, Artificial Sequence
  chemically treated genomic DNA (Homo sapiens) CpG-island No: 11806
  unsure (266, 456, 459)
cccccccaataccccccataatattcgaaacgccgaacccacccccgaaaaaatcccccccgccctcccaaaaaaccgattccaacgtaaactaataaaccacgccgaaaaaattattcttattaatcccacgctacgctcccacccgaccgcaaacacgcgacaccgctaatactactctccaacccccccaacgcatatcgcgcctaaatacgattcatacctactcgccgccgcccgccgaacaccgcatctacgctaccccnaacccacgcaaacacacaaacaaaccaccaatctcccgcccaaaaacgcaaaataaccacccccctcctcgcgcacacccccccgcaaaaacaaacgtacgaaccaccgtatatcctatacacaccatcgaacgataacccacgcgtcgaccaacgtattccgaaccaatataaaactacacataccatnaancccctcgcacgaacacactaaattaacgctcaaattccgaacttctaaaccccacgaaacccc

SEQ ID NO: 11807 - DNA, 522 bp, Artificial Sequence
  chemically treated genomic DNA (Homo sapiens) CpG-island No: 11807
  unsure (266, 456, 459)
tttttttagtgttttttatggtattcgggacgtcgaatttattttcgggagagtttttttcgtttttttaagaggtcgattttagcgtgggttagtaaattacgtcgagagggttgtttttattggttttacgttgcgtttttattcggtcgtaggtacgcgatatcgttggtgttattttttagtttttttagcgtatatcgcgtttgagtgcggtttatatttgttcgtcgtcgttcgtcggatatcgtatttgcgttgttttnagtttacgtagatatataggtaggttattagtttttcgtttagaggcgtaagatagttattttttttttcgcgtatattttttcgtaaggatagacgtgcgggttatcgtgtgttttatatatattatcgaacgatgatttacgcgtcggttagcgtgtttcgggttaatgtggaattgtatatattatnaantttttcgtacgaatatattagattggcgtttaagtttcgagtttttagattttacgagatttt

SEQ ID NO: 11808 - DNA, 522 bp, Artificial Sequence
  chemically treated genomic DNA (Homo sapiens) CpG-island No: 11808
  unsure (64, 67, 257)
aaaatctcgtaaaatctaaaaactcgaaacttaaacgccaatctaatatattcgtacgaaaaanttnataatatatacaattccacattaacccgaaacacgctaaccgacgcgtaaatcatcgttcgataatatatataaaacacacgataacccgcacgtctatccttacgaaaaaatatacgcgaaaaaaaaaataactatcttacgcctctaaacgaaaaactaataacctacctatatatctacgtaaactnaaaacaacgcaaatacgatatccgacgaacgacgacgaacaaatataaaccgcactcaaacgcgatatacgctaaaaaaactaaaaaataacaccaacgatatcgcgtacctacgaccgaataaaaacgcaacgtaaaaccaataaaaacaaccctctcgacgtaatttactaacccacgctaaaatcgacctcttaaaaaaacgaaaaaaactctcccgaaaataaattcgacgtcccgaataccataaaaaacactaaaaaaa

SEQ ID NO: 11809 - DNA, 564 bp, Artificial Sequence
  chemically treated genomic DNA (Homo sapiens) CpG-island No: 11809
  unsure (452)
atttacgaggattagtttgagtaggtgagtgggcgcgtttcgcgtggcgcgttaggtatttgttcgtgggttagtggggtttggtgaaggtttacgttgtacgggcgtgtgtgttgagtcggcgcgtcgatttgagtagttcgggggttcgttgttgtagttgttgttttcgtgttgtttgttttttttgtggcgtgcgcgtcggattagcgtggttgggttatttgcgtttgagcgtgggattgtgttcgagtaggtattcgcgttcgcgtgaggacgtatatttttggcggcgtttcgacgtggttttattagtcgtgatggtttattggtgcgatgtagtttgtaagttggtggtttcgttagttagtagggcgtcggttcggttcggttgtgggtttttgggtttgcgcgtattcgttttttcggtgggtttcgtaagtttgaacggnttggttggacgcgggcgttatttcgggggtttttatcgggtttagaatttcgagttgaacgttatttggttaacgttattgtattatatgtgggtttatgggggggatttta

SEQ ID NO: 11810 - DNA, 564 bp, Artificial Sequence
  chemically treated genomic DNA (Homo sapiens) CpG-island No: 11810
  unsure (113)
taaaatcccccccataaacccacatataatacaataacgttaaccaaataacgttcaactcgaaattctaaacccgataaaaacccccgaaataacgcccgcgtccaaccaanccgttcaaacttacgaaacccaccgaaaaaacgaatacgcgcaaacccaaaaacccacaaccgaaccgaaccgacgccctactaactaacgaaaccaccaacttacaaactacatcgcaccaataaaccatcacgactaataaaaccacgtcgaaacgccgccaaaaatatacgtcctcacgcgaacgcgaatacctactcgaacacaatcccacgctcaaacgcaaataacccaaccacgctaatccgacgcgcacgccacaaaaaaaacaaacaacacgaaaacaacaactacaacaacgaacccccgaactactcaaatcgacgcgccgactcaacacacacgcccgtacaacgtaaaccttcaccaaaccccactaacccacgaacaaatacctaacgcgccacgcgaaacgcgcccactcacctactcaaactaatcctcgtaaat

SEQ ID NO: 11811 - DNA, 564 bp, Artificial Sequence
  chemically treated genomic DNA (Homo sapiens) CpG-island No: 11811
  unsure (113)
taaggttttttttataaatttatatgtagtgtagtggcgttggttaggtagcgtttaattcgggattttgagttcgataggaattttcggagtggcgttcgcgtttagttagntcgtttaaatttacgaaatttatcgagggggcgggtgcgcgtaaatttagaagtttatagtcgggtcgggtcggcgttttattggttggcgaggttattagtttgtagattgtatcgtattaatggattattacgattaatggggttacgtcgaagcgtcgttaaaggtgtacgtttttacgcgggcgcgggtgtttgttcgaatataattttacgtttagacgtaagtgatttagttacgttgattcgacgcgtacgttatagggagggtaagtagtacggaagtaatagttatagtagcgaattttcgagttgtttaaatcgacgcgtcggtttagtatatacgttcgtgtaacgtgggtttttattaggttttattggtttacgagtaggtgtttaacgcgttacgcgggacgcgtttatttatttgtttaaattggttttcgtaagt

SEQ ID NO: 11812 - DNA, 564 bp, Artificial Sequence
  chemically treated genomic DNA (Homo sapiens) CpG-island No: 11812
  unsure (452)
acttacgaaaaccaatttaaacaaataaataaacgcgtcccgcgtaacgcgttaaacacctactcgtaaaccaataaaacctaataaaaacccacgttacacgaacgtatatactaaaccgacgcgtcgatttaaacaactcgaaaattcgctactataactattacttccgtactacttaccctccctataacgtacgcgtcgaatcaacgtaactaaatcacttacgtctaaacgtaaaattatattcgaacaaacacccgcgcccgcgtaaaaacgtacacctttaacgacgcttcgacgtaaccccattaatcgtaataatccattaatacgatacaatctacaaactaataacctcgccaaccaataaaacgccgacccgacccgactataaacttctaaatttacgcgcacccgccccctcgataaatttcgtaaatttaaacganctaactaaacgcgaacgccactccgaaaattcctatcgaactcaaaatcccgaattaaacgctacctaaccaacgccactacactacatataaatttataaaaaaaacctta

SEQ ID NO: 11813 - DNA, 1247 bp, Artificial Sequence
  chemically treated genomic DNA (Homo sapiens) CpG-island No: 11813
gatcgtacgatcgagaatatacgtgtgtattagtttagtaattgatcgatcgtataacgtagacgatcgtgtttaatcgagcgttgttcggttttatacgtagatatcgtggttttagtttacgaggtacggtttatattagatatcgttttatttacgtttttcgtttatattagatatcgtgttttatttacgttttcggtttatattagatatcgttttatttacgttttcggtttatattagatatcgtgttttatttacgttttcggtttatattagatatcgtgttttatttacgttttcggtttatattagatatcgttttatttacgttttcggtttatattagatatcgtgttttatttacgtttatcgtttatattagatatcgtgttttatttacgttttcggtttatattagatatcgttttatttacgttttcggtttatattagataatgtgttttatttacgttttcggtttatattagatatcgtgttttatttacgttttcggtttatattagatatcgtgttttatttacgttttcggtttatattagatatcgttttatttacgtttttcgtttatattagatatcgtgttttatttacgttgtcggtttatattagatatcgttttatttacgtttttcgtttatattagatatcgtgttttatttacgttgtcggtttatattagatatcgttttatttacgttttcggtttatattagatatcgtgttttatttacgttgtcggtttatattagatatcgttttatttacgtttttcgtttatattagatatcgtgttttatttacgttttcggtttatattagatatcgttttatttacgttttcggtttatattagatatcgtgttttatttacgttttcggtttatattagatatcgtgttttatttacgttttcggtttatattagatatcgttttatttacgttttcggtttatattagatatcgtgttttatttacgtttatcgtttatattagatatcgtgttttatttacggtttcggtttatattagatatcgttttattacgttttcggtttatattagataatgtgttttatttacgttttcggtttatattagatatcgttttatttacgttttcggtttatattagatatcgtgttttatttacgttttcggtatatataagatatcgttttatttacgttcggttagagtttatatataatgtataatata

SEQ ID NO: 11814 - DNA, 1247 bp, Artificial Sequence
  chemically treated genomic DNA (Homo sapiens) CpG-island No: 11814
tatattatacattatatataaactctaaccgaacgtaaataaaacgatatcttatatataccgaaaacgtaaataaaacacgatatctaatataaaccgaaaacgtaaataaaacgatatctaatataaaccgaaaacgtaaataaaacacattatctaatataaaccgaaaacgtaataaaacgatatctaatataaaccgaaaccgtaaataaaacacgatatctaatataaacgataaacgtaaataaaacacgatatctaatataaaccgaaaacgtaaataaaacgatatctaatataaaccgaaaacgtaaataaaacacgatatctaatataaaccgaaaacgtaaataaaacacgatatctaatataaaccgaaaacgtaaataaaacgatatctaatataaaccgaaaacgtaaataaaacacgatatctaatataaacgaaaaacgtaaataaaacgatatctaatataaaccgacaacgtaaataaaacacgatatctaatataaaccgaaaacgtaaataaaacgatatctaatataaaccgacaacgtaaataaaacacgatatctaatataaacgaaaaacgtaaataaaacgatatctaatataaaccgacaacgtaaataaaacacgatatctaatataaacgaaaaacgtaaataaaacgatatctaatataaaccgaaaacgtaaataaaacacgatatctaatataaaccgaaaacgtaaataaaacacgatatctaatataaaccgaaaacgtaaataaaacacattatctaatataaaccgaaaacgtaaataaaacgatatctaatataaaccgaaaacgtaaataaaacacgatatctaatataaacgataaacgtaaataaaacacgatatctaatataaaccgaaaacgtaaataaaacgatatctaatataaaccgaaaacgtaaataaaacacgatatctaatataaaccgaaaacgtaaataaaacacgatatctaatataaaccgaaaacgtaaataaaacgatatctaatataaaccgaaaacgtaaataaaacacgatatctaatataaacgaaaaacgtaaataaaacgatatctaatataaaccgtacctcgtaaactaaaaccacgatatctacgtataaaaccgaacaacgctcgattaaacacgatcgtctacgttatacgatcgatcaattactaaactaatacacacgtatattctcgatcgtacgatc

SEQ ID NO: 11815 - DNA, 1247 bp, Artificial Sequence
  chemically treated genomic DNA (Homo sapiens) CpG-island No: 11815
tgtattatgtattatatgtaagttttggtcgagcgtgggtgggacggtgttttgtgtatatcgggagcgtgggtgggatacggtgtttggtgtagatcgggagcgtgggtgggacggtgtttggtgtagatcgggaacgtgggtgggatatattgtttggtgtagatcgggagcgtggtgggacggtgtttggtgtagatcgggatcgtgggtgggatacggtgtttggtgtagacggtaagcgtgggtgggatacggtgtttggtgtagatcgggagcgtgggtgggacggtgtttggtgtagatcgggagcgtgggtgggatacggtgtttggtgtagatcgggagcgtgggtgggatacggtgtttggtgtagatcgggagcgtgggtgggacggtgtttggtgtagatcgggagcgtgggtgggatacggtgtttggtgtagacggggagcgtgggtgggacggtgtttggtgtagatcggtagcgtgggtgggatacggtgtttggtgtagatcgggagcgtgggtgggacggtgtttggtgtagatcggtagcgtgggtgggatacggtgtttggtgtagacggggagcgtgggtgggacggtgtttggtgtagatcggtagcgtgggtgggatacggtgtttggtgtagacggggagcgtgggtgggacggtgtttggtgtagatcgggagcgtgggtgggatacggtgtttggtgtagatcgggagcgtgggtgggatacggtgtttggtgtagatcgggagcgtgggtgggatatattgtttggtgtagatcgggagcgtgggtgggacggtgtttggtgtagatcgggagcgtgggtgggatacggtgtttggtgtagacggtaagcgtgggtgggatacggtgtttggtgtagatcgggagcgtgggtgggacggtgtttggtgtagatcgggagcgtgggtgggatacggtgtttggtgtagatcgggagcgtgggtgggatacggtgtttggtgtagatcgggagcgtgggtgggacggtgtttggtgtagatcgggagcgtgggtgggatacggtgtttggtgtagacggggagcgtgggtgggacggtgtttggtgtagatcgtgtttcgtgggttgggattacggtgtttgcgtgtaggatcgggtagcgttcggttgggtacggtcgtttgcgttgtacggtcggttagttgttgggttggtgtatacgtgtgttttcggtcgtacgatt

SEQ ID NO: 11816 - DNA, 1247 bp, Artificial Sequence
  chemically treated genomic DNA (Homo sapiens) CpG-island No: 11816
aatcgtacgaccgaaaacacacgtatacaccaacccaacaactaaccgaccgtacaacgcaaacgaccgtacccaaccgaacgctacccgatcctacacgcaaacaccgtaatcccaacccacgaaacacgatctacaccaaacaccgtcccacccacgctccccgtctacaccaaacaccgtatcccacccacgctcccgatctacaccaaacaccgtcccacccacgctcccgatctacaccaaacaccgtatcccacccacgctcccgatctacaccaaacaccgtatcccacccacgctcccgatctacaccaaacaccgtcccacccacgctcccgatctacaccaaacaccgtatcccacccacgcttaccgtctacaccaaacaccgtatcccacccacgctcccgatctacaccaaacaccgtcccacccacgctcccgatctacaccaaacaatatatcccacccacgctcccgatctacaccaaacaccgtatcccacccacgctcccgatctacaccaaacaccgtatcccacccacgctcccgatctacaccaaacaccgtcccacccacgctccccgtctacaccaaacaccgtatcccacccacgctaccgatctacaccaaacaccgtcccacccacgctccccgtctacaccaaacaccgtatcccacccacgctaccgatctacaccaaacaccgtcccacccacgctcccgatctacaccaaacaccgtatcccacccacgctaccgatctacaccaaacaccgtcccacccacgctccccgtctacaccaaacaccgtatcccacccacgctcccgatctacaccaaacaccgtcccacccacgctcccgatctacaccaaacaccgtatcccacccacgctcccgatctacaccaaacaccgtatcccacccacgctcccgatctacaccaaacaccgtcccacccacgctcccgatctacaccaaacaccgtatcccacccacgcttaccgtctacaccaaacaccgtatcccacccacgatcccgatctacaccaaacaccgtcccaccacgctcccgatctacaccaaacaatatatcccacccacgttcccgatctacaccaaacaccgtcccacccacgctcccgatctacaccaaacaccgtatcccacccacgctcccgatatacacaaaacaccgtcccacccacgctcgaccaaaacttacatataatacataataca

SEQ ID NO: 11817 - DNA, 570 bp, Artificial Sequence
  chemically treated genomic DNA (Homo sapiens) CpG-island No: 11817
tagatcgggagcgtgggtgggatagtgtttggtgtagatcgggagcgtgggtgggatacggtgtttggtgtagatcgggagcgtgggtgggatacggtgtttggtgtagacggggagcgtgggtgggacggtgtttggtgtagatcgggagcgtgggtgggatacggtgtttggtgtagacggggagcgtgggtgggacggtgtttggtgtagatcggtagcgtgggtgggatacggtgtttggtgtagatcgggagcgtgggtgggacggtgtttggtgtagatcgggagcgtgggtgggatacggtgtttggtgtagacggggagcgtgggtgggacggtgtttggtgtagatcggtagcgtgggtgggatacggtgtttggtgtagacggtaagcgtgggtgggatacggtgtttggtgtagatcgggagcgtgggtgggacgtagtttttggtttatacggagagtttgcgtgagatcgcgttcggtgtatatgtttaggttgcgtttgattttttttgcgttagttgtttgttagcgtgttttttatgggggttgaggatgattg

SEQ ID NO: 11818 - DNA, 570 bp, Artificial Sequence
  chemically treated genomic DNA (Homo sapiens) CpG-island No: 11818
caatcatcctcaacccccataaaaaacacgctaacaaacaactaacgcaaaaaaaatcaaacgcaacctaaacatatacaccgaacgcgatctcacgcaaactctccgtataaaccaaaaactacgtcccacccacgctcccgatctacaccaaacaccgtatcccacccacgcttaccgtctacaccaaacaccgtatcccacccacgctaccgatctacaccaaacaccgtcccacccacgctccccgtctacaccaaacaccgtatcccacccacgctcccgatctacaccaaacaccgtcccacccacgctcccgatctacaccaaacaccgtatcccacccacgctaccgatctacaccaaacaccgtcccacccacgctccccgtctacaccaaacaccgtatcccacccacgctcccgatctacaccaaacaccgtcccacccacgctccccgtctacaccaaacaccgtatcccacccacgctcccgatctacaccaaacaccgtatcccacccacgctcccgatctacaccaaacactatcccacccacgctcccgatcta

SEQ ID NO: 11819 - DNA, 570 bp, Artificial Sequence
  chemically treated genomic DNA (Homo sapiens) CpG-island No: 11819
tagttatttttaatttttatggaggatacgttggtaggtagttagcgtagggagggttagacgtagtttgggtatatatatcggacgcggttttacgtagatttttcgtgtagattagagattgcgttttatttacgttttcggtttatattagatatcgtgttttatttacgtttatcgtttatattagatatcgtgttttatttacgttgtcggtttatattagatatcgttttatttacgtttttcgtttatattagatatcgtgttttatttacgttttcggtttatattagatatcgttttatttacgttttcggtttatattagatatcgtgttttatttacgttgtcggtttatattagatatcgttttatttacgtttttcgtttatattagatatcgtgttttatttacgttttcggtttatattagatatcgttttatttacgtttttcgtttatattagatatcgtgttttatttacgttttcggtttatattagatatcgtgttttatttacgttttcggtttatattagatattgttttatttacgttttcggttta

SEQ ID NO: 11820 - DNA, 570 bp, Artificial Sequence
  chemically treated genomic DNA (Homo sapiens) CpG-island No: 11820
taaaccgaaaacgtaaataaaacaatatctaatataaaccgaaaacgtaaataaaacacgatatctaatataaaccgaaaacgtaaataaaacacgatatctaatataaacgaaaaacgtaaataaaacgatatctaatataaaccgaaaacgtaaataaaacacgatatctaatataaacgaaaaacgtaaataaaacgatatctaatataaaccgacaacgtaaataaaacacgatatctaatataaaccgaaaacgtaaataaaacgatatctaatataaaccgaaaacgtaaataaaacacgatatctaatataaacgaaaaacgtaaataaaacgatatctaatataaaccgacaacgtaaataaaacacgatatctaatataaacgataaacgtaaataaaacacgatatctaatataaaccgaaaacgtaaataaaacgcaatctctaatctacacgaaaaatctacgtaaaaccgcgtccgatatatatacccaaactacgtctaaccctccctacgctaactacctaccaacgtatcctccataaaaattaaaaataacta

SEQ ID NO: 11821 - DNA, 915 bp, Artificial Sequence
  chemically treated genomic DNA (Homo sapiens) CpG-island No: 11821
tagatcgggagcgtgggtgggatagtgtttggtgtagatcgggagcgtgggtgggatacggtgtttggtgtagatcgggagcgtgggtgggacggtgtttggtgtagacggggagcgtgggtgggacggtgtttggtgtagatcgggagcgtgggtgggatacggtttttggtgtagatcgggagcgtgggtgggatacggtgtttggtgtagatcgggagcgtgggtgggacggtgtttggtaaagatcgggagcgtggggtgggatatattgtttggtgtagatcgggagcgtgggtgggatagtgtttggtgtagatcgggagcgtgggtgggatacggtgtttggtgtagacggtaagcgtgggtgggatacggtgtttggtgtagatcgggagcgtgggtgggacggtgtttggtgtagatcgggagcgtgggtgggatacggtgtttggtgtagacggggagcgtgggtgggacggtgtttggtgtagatcggtagcgtgggtgggatacggtgtttggtgtagatcgggagcgtgggtgggatatattgtttggtgtatatcgggagcgtgggtgggacggtgtttggtgtagatcgggagcgtgggtgggatacggtgtttggtgtagatcgggagcgtgggtgggacggtgtttggtgtatatcgggagcgtgggtgggatacggtgtttggtgtagacggggagcgtgggtgggatacggtgtttggtgtagacggggagcgtgggtgggacggtgtttggtgtagacggggagcgtgggtgggatacggtgtttggtgtagatcgggagcgtgggtgggatacggtgtttggtgtagaatggaatgggagtgtgtgtttgtgatatggtgttttacgtagaaggaatagtaaggttttgatatt

SEQ ID NO: 11822 - DNA, 915 bp, Artificial Sequence
  chemically treated genomic DNA (Homo sapiens) CpG-island No: 11822
aatatcaaaaccttactattccttctacgtaaaacaccatatcacaaacacacactcccattccattctacaccaaacaccgtatcccacccacgctcccgatctacaccaaacaccgtatcccacccacgctccccgtctacaccaaacaccgtcccacccacgctccccgtctacaccaaacaccgtatcccacccacgctccccgtctacaccaaacaccgtatcccacccacgctcccgatatacaccaaacaccgtcccacccacgctcccgatctacaccaaacaccgtatcccacccacgctcccgatctacaccaaacaccgtcccacccacgctcccgatatacaccaaacaatatatcccacccacgctcccgatctacaccaaacaccgtatcccacccacgctaccgatctacaccaaacaccgtcccacccacgctccccgtctacaccaaacaccgtatcccacccacgctcccgatctacaccaaacaccgtcccacccacgctcccgatctacaccaaacaccgtatcccacccacgcttaccgtctacaccaaacaccgtatcccacccacgctcccgatctacaccaaacactatcccacccacgctcccgatctacaccaaacaatatatcccaccccacgctcccgatctttaccaaacaccgtcccacccacgctcccgatctacaccaaacaccgtatcccacccacgctcccgatctacaccaaaaaccgtatcccacccacgctcccgatctacaccaaacaccgtcccacccacgctccccgtctacaccaaacaccgtcccacccacgctcccgatctacaccaaacaccgtatcccacccacgctcccgatctacaccaaacactatcccacccacgctcccgatcta

SEQ ID NO: 11823 - DNA, 915 bp, Artificial Sequence
  chemically treated genomic DNA (Homo sapiens) CpG-island No: 11823
aatgttaagattttgttgttttttttacgtgagatattatgttataaatatatatttttattttattttatattagatatcgtgttttatttacgttttcggtttatattagatatcgtgttttatttacgtttttcgtttatattagatatcgttttatttacgtttttcgtttatattagatatcgtgttttatttacgtttttcgtttatattagatatcgtgttttatttacgttttcggtatatattagatatcgttttatttacgttttcggtttatattagatatcgtgttttatttacgttttcggtttatattagatatcgttttatttacgttttcggtatatattagataatgtgttttatttacgttttcggtttatattagatatcgtgttttatttacgttgtcggtttatattagatatcgttttatttacgtttttcgtttatattagatatcgtgttttatttacgttttcggtttatattagatatcgttttatttacgttttcggtttatattagatatcgtgttttatttacgtttatcgtttatattagatatcgtgttttatttacgttttcggtttatattagatattgttttatttacgttttcggtttatattagataatgtgttttattttacgttttcggtttttattagatatcgttttatttacgttttcggtttatattagatatcgtgttttatttacgttttcggtttatattagagatcgtgttttatttacgttttcggtttatattagatatcgttttatttacgtttttcgtttatattagatatcgttttatttacgttttcggtttatattagatatcgtgttttatttacgttttcggtttatattagatattgttttatttacgttttcggttta

SEQ ID NO: 11824 - DNA, 915 bp, Artificial Sequence
  chemically treated genomic DNA (Homo sapiens) CpG-island No: 11824
taaaccgaaaacgtaaataaaacaatatctaatataaaccgaaaacgtaaataaaacacgatatctaatataaaccgaaaacgtaaataaaacgatatctaatataaacgaaaaacgtaaataaaacgatatctaatataaaccgaaaacgtaaataaaacacgatctctaatataaaccgaaaacgtaaataaaacacgatatctaatataaaccgaaaacgtaaataaaacgatatctaataaaaaccgaaaacgtaaaataaaacacattatctaatataaaccgaaaacgtaaataaaacaatatctaatataaaccgaaaacgtaaataaaacacgatatctaatataaacgataaacgtaaataaaacacgatatctaatataaaccgaaaacgtaaataaaacgatatctaatataaaccgaaaacgtaaataaaacacgatatctaatataaacgaaaaacgtaaataaaacgatatctaatataaaccgacaacgtaaataaaacacgatatctaatataaaccgaaaacgtaaataaaacacattatctaatatataccgaaaacgtaaataaaacgatatctaatataaaccgaaaacgtaaataaaacacgatatctaatataaaccgaaaacgtaaataaaacgatatctaatatataccgaaaacgtaaataaaacacgatatctaatataaacgaaaaacgtaaataaaacacgatatctaatataaacgaaaaacgtaaataaaacgatatctaatataaacgaaaaacgtaaataaaacacgatatctaatataaaccgaaaacgtaaataaaacacgatatctaatataaaataaaataaaaatatatatttataacataatatctcacgtaaaaaaaacaacaaaatcttaacatt

SEQ ID NO: 11825 - DNA, 877 bp, Artificial Sequence
  chemically treated genomic DNA (Homo sapiens) CpG-island No: 11825
ggtagcgcggtgacgttacggttgaggatttcgttttacgaagggtttattttacgcgatttacgtcgttcgttcgttttttttttttacgtagtatttcggttgtttcgtggggaaattgagtttggatttttcgtgttcgttcgggagaaggacgcgggaggcgcggtcgagttgcggggagaggttgggtttatttcgggttagagcgagttcgcgtaaacgggagtgtttatcgttggcgggttagttattagcgttggttacgcgtcggttattcgggcgataggaggcggggcggcgcggaagttattttttaattaggtgtttcgggggcgggttcggaaaattgtttaattaaggtacggggcggatatcgggaagcggattgtaggtttgtagtagtgtttaatcgaaggttttaggggtgaagggggcgtgtttaaaacgttgttcgtttagagcgttgaaagggcgggggtttagagattgtttaattagggcgtcgttttttgagtttcgaggtttcgagggcgggacgtttcgttttttttgtcgcgcgtgttttgtttattacgagcggttcgggagtatttgtattttttagttgcgtcggtcgcgaggttacggagagttcgttttggagagtttaggagtaggggagatatggtgagtgcgaggtaggagtagagttaggggacggtcggagcgacgggaatcggttggaattagagttcgtcgaagtttgcggtcgggattggttgagggacgcgcggggcggcgtaggattagtatttgggattcggggacgttattatagcggtcgggttggaggattgggggtagtttggggggacggaaggggcggtaaggagtt

SEQ ID NO: 11826 - DNA, 877 bp, Artificial Sequence
  chemically treated genomic DNA (Homo sapiens) CpG-island No: 11826
aactccttaccgccccttccgtccccccaaactacccccaatcctccaacccgaccgctataataacgtccccgaatcccaaatactaatcctacgccgccccgcgcgtccctcaaccaatcccgaccgcaaacttcgacgaactctaattccaaccgattcccgtcgctccgaccgtcccctaactctactcctacctcgcactcaccatatctcccctactcctaaactctccaaaacgaactctccgtaacctcgcgaccgacgcaactaaaaaatacaaatactcccgaaccgctcgtaataaacaaaacacgcgcgacaaaaaaaacgaaacgtcccgccctcgaaacctcgaaactcaaaaaacgacgccctaattaaacaatctctaaacccccgccctttcaacgctctaaacgaacaacgttttaaacacgcccccttcacccctaaaaccttcgattaaacactactacaaacctacaatccgcttcccgatatccgccccgtaccttaattaaacaattttccgaacccgcccccgaaacacctaattaaaaaataacttccgcgccgccccgcctcctatcgcccgaataaccgacgcgtaaccaacgctaataactaacccgccaacgataaacactcccgtttacgcgaactcgctctaacccgaaataaacccaacctctccccgcaactcgaccgcgcctcccgcgtccttctcccgaacgaacacgaaaaatccaaactcaatttccccacgaaacaaccgaaatactacgtaaaaaaaaaaaacgaacgaacgacgtaaatcgcgtaaaataaacccttcgtaaaacgaaatcctcaaccgtaacgtcaccgcgctacc

SEQ ID NO: 11827 - DNA, 877 bp, Artificial Sequence
  chemically treated genomic DNA (Homo sapiens) CpG-island No: 11827
agttttttgtcgtttttttcgtttttttaaattgtttttagttttttagttcggtcgttgtgatggcgttttcgggttttaggtgttagttttgcgtcgtttcgcgcgttttttagttaatttcggtcgtagatttcggcggattttggttttagtcggttttcgtcgtttcgatcgttttttggttttgtttttgtttcgtatttattatgttttttttgtttttgggttttttaaggcgagtttttcgtggtttcgcggtcggcgtagttgaaaggtataggtattttcgggtcgttcgtggtaggtagggtacgcgcggtagggaggacgaaacgtttcgttttcggggtttcggagtttaggaagcggcgttttgattggataatttttaagttttcgtttttttaacgttttgagcggatagcgttttggatacgttttttttatttttggggttttcgattggatattattgtaaatttgtaattcgtttttcggtgttcgtttcgtgttttgattggatagtttttcggattcgttttcggagtatttgattggaagataattttcgcgtcgtttcgttttttgtcgttcgagtgatcggcgcgtagttaacgttagtggttgattcgttagcggtggatattttcgtttgcgcgaattcgttttggttcggggtgagtttaattttttttcgtagttcggtcgcgtttttcgcgtttttttttcgaacgggtacgagaagtttagatttagtttttttacggagtagtcggagtgttgcgtggaggggaggggcgagcgagcggcgtgggtcgcgtggggtgagtttttcgtggggcggggtttttagtcgtgacgttatcgcgttgtt

SEQ ID NO: 11828 - DNA, 877 bp, Artificial Sequence
  chemically treated genomic DNA (Homo sapiens) CpG-island No: 11828
aacaacgcgataacgtcacgactaaaaaccccgccccacgaaaaactcaccccacgcgacccacgccgctcgctcgcccctcccctccacgcaacactccgactactccgtaaaaaaactaaatctaaacttctcgtacccgttcgaaaaaaaaacgcgaaaaacgcgaccgaactacgaaaaaaaattaaactcaccccgaaccaaaacgaattcgcgcaaacgaaaatatccaccgctaacgaatcaaccactaacgttaactacgcgccgatcactcgaacgacaaaaaacgaaacgacgcgaaaattatcttccaatcaaatactccgaaaacgaatccgaaaaactatccaatcaaaacacgaaacgaacaccgaaaaacgaattacaaatttacaataatatccaatcgaaaaccccaaaaataaaaaaaacgtatccaaaacgctatccgctcaaaacgttaaaaaaacgaaaacttaaaaattatccaatcaaaacgccgcttcctaaactccgaaaccccgaaaacgaaacgtttcgtcctccctaccgcgcgtaccctacctaccacgaacgacccgaaaatacctatacctttcaactacgccgaccgcgaaaccacgaaaaactcgccttaaaaaacccaaaaacaaaaaaaacataataaatacgaaacaaaaacaaaaccaaaaaacgatcgaaacgacgaaaaccgactaaaaccaaaatccgccgaaatctacgaccgaaattaactaaaaaacgcgcgaaacgacgcaaaactaacacctaaaacccgaaaacgccatcacaacgaccgaactaaaaaactaaaaacaatttaaaaaaacgaaaaaaacgacaaaaaact

SEQ ID NO: 11829 - DNA, 583 bp, Artificial Sequence
  chemically treated genomic DNA (Homo sapiens) CpG-island No: 11829
cgcgttcgtagtttttcggtcgggattcgtaacgcgcgttagtcgtcgtcgtcgttatttcggagtagacgtagtagtagttggagtaggaaggcgtttaggacggtcggtagtttttattcgttcggttttgggaagtttgggagggcgatggaaagagaggtcgggtcgtttcggtaagcgtttttttttttatcgggtcgtaggtttcgcgtagttttcgcgtttcgaggatcgggcgtgggatttgttgtcggatttgggtcgttcgaggtaggtttttcgggaggggaagggattttttcgggaagataggaatgcgttttcggaatttcggagattattcgtattcgtttatcgtgatatattttttacgtatatttttttttgcgtgcgttttttataattttatatatttatatttttttgcgcgtgtattttattttcgcgatatttgtgtgtttttatatttatattatttatacgttttacgcgtttttttatacgtagtattatattcgttttggagggtgttggagttgatatttgtttttttagagaaggttttagttgtaggaggatt

SEQ ID NO: 11830 - DNA, 583 bp, Artificial Sequence
  chemically treated genomic DNA (Homo sapiens) CpG-island No: 11830
aatcctcctacaactaaaaccttctctaaaaaaacaaatatcaactccaacaccctccaaaacgaatataatactacgtataaaaaaacgcgtaaaacgtataaataatataaatataaaaacacacaaatatcgcgaaaataaaatacacgcgcaaaaaaatataaatatataaaattataaaaaacgcacgcaaaaaaaaatatacgtaaaaaatatatcacgataaacgaatacgaataatctccgaaattccgaaaacgcattcctatcttcccgaaaaaatcccttcccctcccgaaaaacctacctcgaacgacccaaatccgacaacaaatcccacgcccgatcctcgaaacgcgaaaactacgcgaaacctacgacccgataaaaaaaaaaacgcttaccgaaacgacccgacctctctttccatcgccctcccaaacttcccaaaaccgaacgaataaaaactaccgaccgtcctaaacgccttcctactccaactactactacgtctactccgaaataacgacgacgacgactaacgcgcgttacgaatcccgaccgaaaaactacgaacgcg

SEQ ID NO: 11831 - DNA, 583 bp, Artificial Sequence
  chemically treated genomic DNA (Homo sapiens) CpG-island No: 11831
ggtttttttataattagaattttttttagaaaggtagatgttaattttagtattttttagggcgagtgtgatattgcgtgtgagagggcgcgtggggcgtgtaaatgatgtgagtgtgaggatatataggtgtcgcgggaatggggtgtacgcgtaggaggatatgagtgtgtaaagttgtgggagacgtacgtagaagaaggtgtgcgtgaagagtgtgttacggtgggcgagtgcgagtggttttcggggtttcgaaagcgtatttttgttttttcggaggggtttttttttttttcggaaggtttgtttcgggcggtttaaattcggtagtaaattttacgttcggttttcggagcgcggagattgcgcggggtttacgattcggtgggaagagaggcgtttgtcggggcggttcggtttttttttttatcgtttttttagattttttagggtcgggcgggtggggattgtcgatcgttttgggcgtttttttgttttagttgttgttgcgtttgtttcgaggtggcggcggcggcggttggcgcgcgttgcgggtttcggtcgaggggttgcgggcgcg

SEQ ID NO: 11832 - DNA, 583 bp, Artificial Sequence
  chemically treated genomic DNA (Homo sapiens) CpG-island No: 11832
cgcgcccgcaacccctcgaccgaaacccgcaacgcgcgccaaccgccgccgccgccacctcgaaacaaacgcaacaacaactaaaacaaaaaaacgcccaaaacgatcgacaatccccacccgcccgaccctaaaaaatctaaaaaaacgataaaaaaaaaaaccgaaccgccccgacaaacgcctctcttcccaccgaatcgtaaaccccgcgcaatctccgcgctccgaaaaccgaacgtaaaatttactaccgaatttaaaccgcccgaaacaaaccttccgaaaaaaaaaaaaacccctccgaaaaaacaaaaatacgctttcgaaaccccgaaaaccactcgcactcgcccaccgtaacacactcttcacgcacaccttcttctacgtacgtctcccacaactttacacactcatatcctcctacgcgtacaccccattcccgcgacacctatatatcctcacactcacatcatttacacgccccacgcgccctctcacacgcaatatcacactcgccctaaaaaatactaaaattaacatctacctttctaaaaaaaattctaattataaaaaaacc

SEQ ID NO: 11833 - DNA, 554 bp, Artificial Sequence
  chemically treated genomic DNA (Homo sapiens) CpG-island No: 11833
tttggttcgttaagtcggttgttcgtttttgtgtttagtatttttcggtagggtaggatttagggatcgtgaagtcgttttttagttcggtttcgaaagggaatttttaagcgcggggtcgcgcgcggtttagggtttttttcgtttgtttaggtttcgcgaggggagcggttttttttaggcggttgtcgggagttgcgggcgtagaagtcgattcgggttttcggcgggataggttacgttttgcgtattgttttcggtggtttttcggggtacgcgcgcgtgcgtggggtcggggggggcgcgggggattttaggcggcgaggggattcgcggttatttgggtttttggttttgcgtttcgcggacggttgtattttttgttttttttcggcggtcgcgtgggttttattcggtggagcgtgggggtttttgcgggagggacgtaggcgtttcgggtttagattttaattcgcgtttggtgtttttggcggtttttgggtcgtttagttattggatattgtgttttgagagggtttattcggatttttttt

SEQ ID NO: 11834 - DNA, 554 bp, Artificial Sequence
  chemically treated genomic DNA (Homo sapiens) CpG-island No: 11834
aaaaaaaatccgaataaaccctctcaaaacacaatatccaataactaaacgacccaaaaaccgccaaaaacaccaaacgcgaattaaaatctaaacccgaaacgcctacgtccctcccgcaaaaacccccacgctccaccgaataaaacccacgcgaccgccgaaaaaaaacaaaaaatacaaccgtccgcgaaacgcaaaaccaaaaacccaaataaccgcgaatcccctcgccgcctaaaatcccccgcgccccccccgaccccacgcacgcgcgcgtaccccgaaaaaccaccgaaaacaatacgcaaaacgtaacctatcccgccgaaaacccgaatcgacttctacgcccgcaactcccgacaaccgcctaaaaaaaaccgctcccctcgcgaaacctaaacaaacgaaaaaaaccctaaaccgcgcgcgaccccgcgcttaaaaattccctttcgaaaccgaactaaaaaacgacttcacgatccctaaatcctaccctaccgaaaaatactaaacacaaaaacgaacaaccgacttaacgaaccaaa

SEQ ID NO: 11835 - DNA, 554 bp, Artificial Sequence
  chemically treated genomic DNA (Homo sapiens) CpG-island No: 11835
gaaagaagttcggatgggtttttttagaatataatgtttaatagttgagcggtttagggatcgttagaaatattaagcgcgggttggagtttgaattcgaggcgtttgcgtttttttcgtagggatttttacgttttatcgggtggggtttacgcggtcgtcgggagggggtaggaaatgtaatcgttcgcgagacgtagagttaaaaatttaaatgatcgcgggttttttcgtcgtttggggtttttcgcgtttttttcgattttacgtacgcgcgcgtgtttcgggaagttatcggggatagtgcgtagggcgtggtttgtttcgtcgggggttcggatcggtttttgcgttcgtagttttcggtagtcgtttagggaaggtcgtttttttcgcgaggtttgggtaggcgggaagggttttaggtcgcgcgcggtttcgcgtttgggagttttttttcggggtcgggttggggagcggttttacggtttttggattttgttttgtcgagaagtgttgggtataggagcgagtagtcggtttagcgggttagg

SEQ ID NO: 11836 - DNA, 554 bp, Artificial Sequence
  chemically treated genomic DNA (Homo sapiens) CpG-island No: 11836
cctaacccgctaaaccgactactcgctcctatacccaacacttctcgacaaaacaaaatccaaaaaccgtaaaaccgctccccaacccgaccccgaaaaaaaactcccaaacgcgaaaccgcgcgcgacctaaaacccttcccgcctacccaaacctcgcgaaaaaaacgaccttccctaaacgactaccgaaaactacgaacgcaaaaaccgatccgaacccccgacgaaacaaaccacgccctacgcactatccccgataacttcccgaaacacgcgcgcgtacgtaaaatcgaaaaaaacgcgaaaaaccccaaacgacgaaaaaacccgcgatcatttaaatttttaactctacgtctcgcgaacgattacatttcctaccccctcccgacgaccgcgtaaaccccacccgataaaacgtaaaaatccctacgaaaaaaacgcaaacgcctcgaattcaaactccaacccgcgcttaatatttctaacgatccctaaaccgctcaactattaaacattatattctaaaaaaacccatccgaacttctttc

SEQ ID NO: 11837 - DNA, 647 bp, Artificial Sequence
  chemically treated genomic DNA (Homo sapiens) CpG-island No: 11837
ggatgtcgggagcggggcgagcgggcgggggttgttagttcgatttcgcgagagaggacggaagtttgtgggagttcgtggtttttaaagtgtcgtttagtttttttttttaggggtgttttgtaaatacggttgtgtttagggttcgcgggtgatcgaaaggattatgaattagtgatttggaaaggtgagtaacgatgggtagaggttagtagggttggagattgtagggatacggagaaagaaggcgttaatatggcgacgtcgtttagtatagtttttatttttcgttttttattatttcgggtgtttttgacgtgttttttagtttttggggcgattgtggttgtgttgttatttcggcggttcgcgcggtgtgggttttgggaatttgattggttgggtcggatcgttaggtaattagcgttcgttgtttcggtttttttttttcgcgcgtttttttaaggtagaggaaaaaggaataacggtttttttttagattttttttttcgaattatttttattttatttgggttagtttagaggttttcggggcgcgcgtcgagttagtcgtgtgcgtagggagattttttttatttatagtttttgggttgggcggggagagggtttattttggtttttttatt

SEQ ID NO: 11838 - DNA, 647 bp, Artificial Sequence
  chemically treated genomic DNA (Homo sapiens) CpG-island No: 11838
aataaaaaaaccaaaataaaccctctccccgcccaacccaaaaactataaataaaaaaaatctccctacgcacacgactaactcgacgcgcgccccgaaaacctctaaactaacccaaataaaataaaaataattcgaaaaaaaaaatctaaaaaaaaaccgttattcctttttcctctaccttaaaaaaacgcgcgaaaaaaaaaaaccgaaacaacgaacgctaattacctaacgatccgacccaaccaatcaaattcccaaaacccacaccgcgcgaaccgccgaaataacaacacaaccacaatcgccccaaaaactaaaaaacacgtcaaaaacacccgaaataataaaaaacgaaaaataaaaactatactaaacgacgtcgccatattaacgccttctttctccgtatccctacaatctccaaccctactaacctctacccatcgttactcacctttccaaatcactaattcataatcctttcgatcacccgcgaaccctaaacacaaccgtatttacaaaacacccctaaaaaaaaaaactaaacgacactttaaaaaccacgaactcccacaaacttccgtcctctctcgcgaaatcgaactaacaacccccgcccgctcgccccgctcccgacatcc

SEQ ID NO: 11839 - DNA, 647 bp, Artificial Sequence
  chemically treated genomic DNA (Homo sapiens) CpG-island No: 11839
ggtggggagattagagtgggtttttttttcgtttaatttaaggattgtgggtgggagaggtttttttgcgtatacggttgattcgacgcgcgtttcgaggatttttgaattgatttaagtagggtgaagataattcggagggaggggtttaagagggagtcgttattttttttttttttgttttaggaaagcgcgcgagagggaggggtcggaataacgaacgttggttatttaacggttcggtttagttagttaggtttttaaagtttatatcgcgcgggtcgtcgaggtggtagtatagttataatcgttttaagggttaaggagtacgttaggagtattcgaggtgatgggaaacggggggtggggattgtgttgagcgacgtcgttatgttagcgtttttttttttcgtatttttatagtttttagttttgttgatttttgtttatcgttatttatttttttaggttattagtttatgattttttcggttattcgcgagttttgagtatagtcgtgtttataaagtatttttggaggaaaaggttgaacggtattttaaaggttacgggtttttataggttttcgttttttttcgcgagatcggattgataattttcgttcgttcgtttcgttttcggtattt

SEQ ID NO: 11840 - DNA, 647 bp, Artificial Sequence
  chemically treated genomic DNA (Homo sapiens) CpG-island No: 11840
aaataccgaaaacgaaacgaacgaacgaaaattatcaatccgatctcgcgaaaaaaaacgaaaacctataaaaacccgtaacctttaaaataccgttcaaccttttcctccaaaaatactttataaacacgactatactcaaaactcgcgaataaccgaaaaaatcataaactaataacctaaaaaaataaataacgataaacaaaaatcaacaaaactaaaaactataaaaatacgaaaaaaaaaaacgctaacataacgacgtcgctcaacacaatccccaccccccgtttcccatcacctcgaatactcctaacgtactccttaacccttaaaacgattataactatactaccacctcgacgacccgcgcgatataaactttaaaaacctaactaactaaaccgaaccgttaaataaccaacgttcgttattccgacccctccctctcgcgcgctttcctaaaacaaaaaaaaaaaaaataacgactccctcttaaacccctccctccgaattatcttcaccctacttaaatcaattcaaaaatcctcgaaacgcgcgtcgaatcaaccgtatacgcaaaaaaacctctcccacccacaatccttaaattaaacgaaaaaaaaacccactctaatctccccacc

SEQ ID NO: 11841 - DNA, 539 bp, Artificial Sequence
  chemically treated genomic DNA (Homo sapiens) CpG-island No: 11841
agtagtaaatttgtcgtatttggttaggttatttggggggtttcgtcgtttagtcgtcgtcgttttgggaggggaaatagagttcgttggaaaatcggaaatagcgtaacgttagcgttttttagttttttatcggtagttcggggaggtggtttagttagggtagggggtaggcggtaagcgggtcgcgatgcgtagcgcggcgtagcgtagcgtttttattttgtgcgttaggatttggaggaggatgcggaggatgggacgttcgtttatttgttttttcgcgttttttttgttttcggatcgagtagggagcgcggtttttgtaggggaagtttgggattgtattgttttagtgttcgtttttagttcgtaggggcgcgggaggaatcgtgttattttttgttttcgggatttatcggtatgatagtgggggtggtgcgtgaggagaaggcgaagaagagataacgggtttttggtattattttatgaacgtggtaatgggacgtagggcgtgttttttgtttttggttagtagt

SEQ ID NO: 11842 - DNA, 539 bp, Artificial Sequence
  chemically treated genomic DNA (Homo sapiens) CpG-island No: 11842
actactaaccaaaaacaaaaaacacgccctacgtcccattaccacgttcataaaataataccaaaaacccgttatctcttcttcgccttctcctcacgcaccacccccactatcataccgataaatcccgaaaacaaaaaataacacgattcctcccgcgcccctacgaactaaaaacgaacactaaaacaatacaatcccaaacttcccctacaaaaaccgcgctccctactcgatccgaaaacaaaaaaaacgcgaaaaaacaaataaacgaacgtcccatcctccgcatcctcctccaaatcctaacgcacaaaataaaaacgctacgctacgccgcgctacgcatcgcgacccgcttaccgcctaccccctaccctaactaaaccacctccccgaactaccgataaaaaactaaaaaacgctaacgttacgctatttccgattttccaacgaactctatttcccctcccaaaacgacgacgactaaacgacgaaaccccccaaataacctaaccaaatacgacaaatttactact

SEQ ID NO: 11843 - DNA, 539 bp, Artificial Sequence
  chemically treated genomic DNA (Homo sapiens) CpG-island No: 11843
gttgttggttaaaggtagggggtacgttttgcgttttattattacgtttataggatggtgttaggagttcgttatttttttttcgttttttttttacgtattatttttattgttatgtcgataaatttcgggagtaaagggtggtacgatttttttcgcgtttttgcgggttgaaggcgggtattaaagtagtgtagttttaagttttttttgtagaagtcgcgttttttattcggttcgggggtagagggggcgcgagagagtaagtgggcgggcgttttatttttcgtatttttttttaggttttggcgtatagggtgggagcgttgcgttgcgtcgcgttgcgtatcgcggttcgtttgtcgtttgttttttgttttagttgggttattttttcgggttgtcggtggagggttaagaggcgttaacgttacgttgttttcggttttttagcgggttttgtttttttttttaaggcggcggcggttgagcggcggagttttttaaatggtttggttagatgcggtaggtttgttgtt

SEQ ID NO: 11844 - DNA, 539 bp, Artificial Sequence
  chemically treated genomic DNA (Homo sapiens) CpG-island No: 11844
aacaacaaacctaccgcatctaaccaaaccatttaaaaaactccgccgctcaaccgccgccgccttaaaaaaaaaaacaaaacccgctaaaaaaccgaaaacaacgtaacgttaacgcctcttaaccctccaccgacaacccgaaaaaataacccaactaaaacaaaaaacaaacgacaaacgaaccgcgatacgcaacgcgacgcaacgcaacgctcccaccctatacgccaaaacctaaaaaaaaatacgaaaaataaaacgcccgcccacttactctctcgcgccccctctacccccgaaccgaataaaaaacgcgacttctacaaaaaaaacttaaaactacactactttaatacccgccttcaacccgcaaaaacgcgaaaaaaatcgtaccaccctttactcccgaaatttatcgacataacaataaaaataatacgtaaaaaaaaaacgaaaaaaaaataacgaactcctaacaccatcctataaacgtaataataaaacgcaaaacgtaccccctacctttaaccaacaac

SEQ ID NO: 11845 - DNA, 583 bp, Artificial Sequence
  chemically treated genomic DNA (Homo sapiens) CpG-island No: 11845
tcgagttattacggttacgatggcgttacgcgacgcgtaagtcgtcgttaatgtcgattttgtacgacgttgtcgttcgatgattatgtattcgacgttcgatattaagcgtagttttacgtcgttattcggtgacgagtcgaatgtttattattattttcgacgtcgacgttacgattttatacgtcggatggtatgatcgatttagcgtacgagtcgacgtttatttgttcgattgtacgtaattgtttttatgtgtttcgtttggttattatttgtatttacgatatcgttcgcgtttatttttatcgtatgtttcgttatttatgttattattatattgtatcgttcgatattattttttatatcgtttttatttattttttttttaatttattatttttacgtattttttttttattttatttattttttatatttttttttttcgtattttttttttttttttttagattaattattacgtacgttttatattttcgtggtgaatgttatgattgtttttacgtttttttcggcgacgattattatattgtcgatattatggtatcgcgtcgtgata

SEQ ID NO: 11846 - DNA, 583 bp, Artificial Sequence
  chemically treated genomic DNA (Homo sapiens) CpG-island No: 11846
tatcacgacgcgataccataatatcgacaatataataatcgtcgccgaaaaaaacgtaaaaacaatcataacattcaccacgaaaatataaaacgtacgtaataattaatctaaaaaaaaaaaaaaaaaatacgaaaaaaaaaaatataaaaaataaataaaataaaaaaaaaatacgtaaaaataataaattaaaaaaaaaataaataaaaacgatataaaaaataatatcgaacgatacaatataataataacataaataacgaaacatacgataaaaataaacgcgaacgatatcgtaaatacaaataataaccaaacgaaacacataaaaacaattacgtacaatcgaacaaataaacgtcgactcgtacgctaaatcgatcataccatccgacgtataaaatcgtaacgtcgacgtcgaaaataataataaacattcgactcgtcaccgaataacgacgtaaaactacgcttaatatcgaacgtcgaatacataatcatcgaacgacaacgtcgtacaaaatcgacattaacgacgacttacgcgtcgcgtaacgccatcgtaaccgtaataactcga

SEQ ID NO: 11847 - DNA, 583 bp, Artificial Sequence
  chemically treated genomic DNA (Homo sapiens) CpG-island No: 11847
tgttacgacgcggtgttatgatgtcgataatgtgatggtcgtcgtcgggaggagcgtgggaatagttatggtatttattacgagagtgtagagcgtgcgtgatgattgatttggaaaggggaagaggaagtacgagaagaggggatgtaaagggtgggtagagtgagaggaggatgcgtagaggtagtaggttggggagaaggtaggtgagagcgatatgaaggatgatgtcgagcgatgtaatgtggtagtagtatgagtggcggggtatgcgatgagagtgagcgcgggcgatatcgtaagtgtaggtagtggttagacgagatatatgagggtaattgcgtgtagtcggatagatgagcgtcgattcgtgcgttggatcgattatattattcggcgtgtagagtcgtggcgtcgacgtcgagggtggtgatggatattcgattcgttatcgagtggcgacgtggaattacgtttagtgtcgaacgtcgagtgtatggttatcgagcggtagcgtcgtgtagggtcggtattggcggcgatttacgcgtcgcgtgacgttatcgtagtcgtgatggttcgg

SEQ ID NO: 11848 - DNA, 583 bp, Artificial Sequence
  chemically treated genomic DNA (Homo sapiens) CpG-island No: 11848
ccgaaccatcacgactacgataacgtcacgcgacgcgtaaatcgccgccaataccgaccctacacgacgctaccgctcgataaccatacactcgacgttcgacactaaacgtaattccacgtcgccactcgataacgaatcgaatatccatcaccaccctcgacgtcgacgccacgactctacacgccgaataatataatcgatccaacgcacgaatcgacgctcatctatccgactacacgcaattaccctcatatatctcgtctaaccactacctacacttacgatatcgcccgcgctcactctcatcgcataccccgccactcatactactaccacattacatcgctcgacatcatccttcatatcgctctcacctaccttctccccaacctactacctctacgcatcctcctctcactctacccaccctttacatcccctcttctcgtacttcctcttcccctttccaaatcaatcatcacgcacgctctacactctcgtaataaataccataactattcccacgctcctcccgacgacgaccatcacattatcgacatcataacaccgcgtcgtaaca

SEQ ID NO: 11849 - DNA, 525 bp, Artificial Sequence
  chemically treated genomic DNA (Homo sapiens) CpG-island No: 11849
agagggcgcgtttcgaagatgtttattcgtagtatcgcgtaggttgacgtttttttttttttcgggttggaggtgagagcgtttttttttttattacgtttttattttttcggtttcggattacgttatagttggtaaaaggatttttttatgagaaaatagataagttaattagcgcgtcgtatattcgattttttaggttcgtacgggcggtcgttcgggtttttagttcgatatagcgttttaggggttgataaggaggtcgcggggttacgttttttggggtaacggttcgagggtttcgcggaatttcggtgtagaagtttggatttttcgagtagttttcgcgtttttttcggttcggtttcgagtttgtagacggcgttttcggggttaatttagcgcgagaagaggaagcgacgtagcgagtaataggttgtatggacggatagcggattgaaggggggtgtgtgtgtgtttgtttgttaataaggtcgttttattttttcgttgtcgagtcgggta

SEQ ID NO: 11850 - DNA, 525 bp, Artificial Sequence
  chemically treated genomic DNA (Homo sapiens) CpG-island No: 11850
tacccgactcgacaacgaaaaaataaaacgaccttattaacaaacaaacacacacacaccccccttcaatccgctatccgtccatacaacctattactcgctacgtcgcttcctcttctcgcgctaaattaaccccgaaaacgccgtctacaaactcgaaaccgaaccgaaaaaaacgcgaaaactactcgaaaaatccaaacttctacaccgaaattccgcgaaaccctcgaaccgttaccccaaaaaacgtaaccccgcgacctccttatcaacccctaaaacgctatatcgaactaaaaacccgaacgaccgcccgtacgaacctaaaaaatcgaatatacgacgcgctaattaacttatctattttctcataaaaaaatccttttaccaactataacgtaatccgaaaccgaaaaaataaaaacgtaataaaaaaaaaaacgctctcacctccaacccgaaaaaaaaaaaaacgtcaacctacgcgatactacgaataaacatcttcgaaacgcgccctct

SEQ ID NO: 11851 - DNA, 525 bp, Artificial Sequence
  chemically treated genomic DNA (Homo sapiens) CpG-island No: 11851
tgttcggttcggtagcgggaaggtgagacggttttgttggtaggtagatatatatatatttttttttagttcgttgttcgtttatatagtttgttattcgttgcgtcgtttttttttttcgcgttgagttagtttcgggggcgtcgtttgtaggttcggagtcgagtcggagggggcgcggaggttgttcggagggtttagatttttgtatcgggatttcgcgagattttcgggtcgttgttttagggagcgtgatttcgcggtttttttgttagtttttggagcgttgtgtcgggttgagagttcgggcggtcgttcgtgcgagtttgggaggtcgagtgtgcggcgcgttggttgatttgtttgtttttttatgaaaaagtttttttgttagttgtggcgtaattcgaggtcgggaaggtagggacgtggtaggaggaagggcgtttttatttttagttcgagaggaggggaggcgttagtttgcgcggtgttgcgggtggatattttcgggacgcgtttttt

SEQ ID NO: 11852 - DNA, 525 bp, Artificial Sequence
  chemically treated genomic DNA (Homo sapiens) CpG-island No: 11852
aaaaaacgcgtcccgaaaatatccacccgcaacaccgcgcaaactaacgcctcccctcctctcgaactaaaaataaaaacgcccttcctcctaccacgtccctaccttcccgacctcgaattacgccacaactaacaaaaaaactttttcataaaaaaacaaacaaatcaaccaacgcgccgcacactcgacctcccaaactcgcacgaacgaccgcccgaactctcaacccgacacaacgctccaaaaactaacaaaaaaaccgcgaaatcacgctccctaaaacaacgacccgaaaatctcgcgaaatcccgatacaaaaatctaaaccctccgaacaacctccgcgccccctccgactcgactccgaacctacaaacgacgcccccgaaactaactcaacgcgaaaaaaaaaaacgacgcaacgaataacaaactatataaacgaacaacgaactaaaaaaaaatatatatatatctacctaccaacaaaaccgtctcaccttcccgctaccgaaccgaaca

SEQ ID NO: 11853 - DNA, 852 bp, Artificial Sequence
  chemically treated genomic DNA (Homo sapiens) CpG-island No: 11853
tcgtcgttttttttcgttgttaatgcgtaggcgttggcgggatagcgcgtcgtcgagtcgagaaagaggttacgaattttgattttttagaaatatttaaatatagaaagtttttttcgtcgtgaatttcgattttatatttcgtcggttttttttaattttttttttcggagcgttttttaatttacgagtggtagtcgcgggattgtcgcgtcggcgttcgacgtcggagttagtagggcgtaaaagcgtcggtaagaaacgttgggtggggatattagcgatcgcgtcgggggcgggggttagggggtgttttttattttaatcgttaacggacgcggttttagcgtatttttcggtcggcgttttgcggttagcggagtcgtttagtttgggagcgtcgtttggggttgttcgatttcggttgggagcgcggagttgcggcgttaaatgcgcggggtttcgggagaggcgggggcgataggggcggcgggacgcggggtcggacggcgagcggtttggagtatataattttttttttagttgcgtttatcgtagcgtttttgatttttaatttgtagggaaagttttcgcggcgttgtagtttttttcgttcgggagagtcgcgcgtagcgtcggggtttttagggcgtacggttaacgtcggtacgagtgagacgtgggagaggtcgattttcggttagtggtcgtaagtttcggtttgtatttcgttattaattttcgtgtttttacgggacggatagaatgattttttttatttttattttttttttacggtaaatttggttagggtcgtcgtttgttgtgggtttggatttttttagaagaaat

SEQ ID NO: 11854 - DNA, 852 bp, Artificial Sequence
  chemically treated genomic DNA (Homo sapiens) CpG-island No: 11854
atttcttctaaaaaaatccaaacccacaacaaacgacgaccctaaccaaatttaccgtaaaaaaaaaataaaaataaaaaaaatcattctatccgtcccgtaaaaacacgaaaattaataacgaaatacaaaccgaaacttacgaccactaaccgaaaatcgacctctcccacgtctcactcgtaccgacgttaaccgtacgccctaaaaaccccgacgctacgcgcgactctcccgaacgaaaaaaactacaacgccgcgaaaactttccctacaaattaaaaatcaaaaacgctacgataaacgcaactaaaaaaaaaattatatactccaaaccgctcgccgtccgaccccgcgtcccgccgcccctatcgcccccgcctctcccgaaaccccgcgcatttaacgccgcaactccgcgctcccaaccgaaatcgaacaaccccaaacgacgctcccaaactaaacgactccgctaaccgcaaaacgccgaccgaaaaatacgctaaaaccgcgtccgttaacgattaaaataaaaaacaccccctaacccccgcccccgacgcgatcgctaatatccccacccaacgtttcttaccgacgcttttacgccctactaactccgacgtcgaacgccgacgcgacaatcccgcgactaccactcgtaaattaaaaaacgctccgaaaaaaaaaattaaaaaaaaccgacgaaatataaaatcgaaattcacgacgaaaaaaactttctatatttaaatatttctaaaaaatcaaaattcgtaacctctttctcgactcgacgacgcgctatcccgccaacgcctacgcattaacaacgaaaaaaaacgacga

SEQ ID NO: 11855 - DNA, 852 bp, Artificial Sequence
  chemically treated genomic DNA (Homo sapiens) CpG-island No: 11855
attttttttgaaaagatttaggtttatagtaagcgacgattttggttagatttgtcgtgagagaaaagtgaaagtggggggagttattttgttcgtttcgtgaaagtacgggagttagtgacgggatgtaggtcgggatttgcggttattagtcgagggtcggttttttttacgttttattcgtgtcggcgttagtcgtgcgttttggaagtttcggcgttgcgcgcggttttttcgggcggggaaagttgtagcgtcgcggaagttttttttgtaggttaaaggttagaggcgttgcggtaagcgtagttggaaagggggttgtgtgttttaagtcgttcgtcgttcggtttcgcgtttcgtcgtttttgtcgttttcgtttttttcggggtttcgcgtatttggcgtcgtagtttcgcgtttttagtcgaagtcgagtagttttaagcggcgtttttaaattgaacggtttcgttggtcgtaggacgtcggtcgggggatgcgttgggatcgcgttcgttggcggttggggtgaagggtattttttggttttcgttttcgacgcggtcgttggtgtttttatttagcgttttttatcggcgtttttgcgttttgttgatttcggcgtcgggcgtcgacgcgatagtttcgcggttgttattcgtggattggggggcgtttcgggaagagaggttgaagaaagtcgacgggatgtgggatcgagatttacggcggagagagttttttgtgtttgggtatttttggggggttagagttcgtgatttttttttcggttcggcggcgcgttatttcgttagcgtttgcgtattagtaacggggagaagcggcga

SEQ ID NO: 11856 - DNA, 852 bp, Artificial Sequence
  chemically treated genomic DNA (Homo sapiens) CpG-island No: 11856
tcgccgcttctccccgttactaatacgcaaacgctaacgaaataacgcgccgccgaaccgaaaaaaaaatcacgaactctaaccccccaaaaatacccaaacacaaaaaactctctccgccgtaaatctcgatcccacatcccgtcgactttcttcaacctctcttcccgaaacgccccccaatccacgaataacaaccgcgaaactatcgcgtcgacgcccgacgccgaaatcaacaaaacgcaaaaacgccgataaaaaacgctaaataaaaacaccaacgaccgcgtcgaaaacgaaaaccaaaaaatacccttcaccccaaccgccaacgaacgcgatcccaacgcatcccccgaccgacgtcctacgaccaacgaaaccgttcaatttaaaaacgccgcttaaaactactcgacttcgactaaaaacgcgaaactacgacgccaaatacgcgaaaccccgaaaaaaacgaaaacgacaaaaacgacgaaacgcgaaaccgaacgacgaacgacttaaaacacacaaccccctttccaactacgcttaccgcaacgcctctaacctttaacctacaaaaaaaacttccgcgacgctacaactttccccgcccgaaaaaaccgcgcgcaacgccgaaacttccaaaacgcacgactaacgccgacacgaataaaacgtaaaaaaaaccgaccctcgactaataaccgcaaatcccgacctacatcccgtcactaactcccgtactttcacgaaacgaacaaaataactccccccactttcacttttctctcacgacaaatctaaccaaaatcgtcgcttactataaacctaaatcttttcaaaaaaaat

SEQ ID NO: 11857 - DNA, 564 bp, Artificial Sequence
  chemically treated genomic DNA (Homo sapiens) CpG-island No: 11857
cgtcgattttcgttagcgagtcgtcggatttcggggtcgatattcggttattcggagattcgattattcgttacgcgattacgtcggggtttttggtttagcgttcgtcggttttcgcggtttcggttttaagttcgagttttaggttagttaagttcgttttttcgtcgtcgttcgtttggcgtagcgcgaggtcgggtcggaggaatgtggttttgaagtgggcggggtagggcgggggcggggtcggagggcgagttgggggcggggtcggagggcgagttgggggcggggttgcgcgcgggggcgagattgtacggagcgtgtggggaagagagtataggaggcgtggttatacggcgtcgcggaagaagtatagggggcggggggttaggggcggggcgttaggggcggggttacgcgtaggggcggggtcgagtcgaggcgcggggtgtagagcgtaagggcggagttttagatattgtatttaggttttagcgcgcgaagtttttgttttggaaggaggattttgcgtagtttttttaatattggcgtttttcggga

SEQ ID NO: 11858 - DNA, 564 bp, Artificial Sequence
  chemically treated genomic DNA (Homo sapiens) CpG-island No: 11858
tcccgaaaaacgccaatattaaaaaaactacgcaaaatcctccttccaaaacaaaaacttcgcgcgctaaaacctaaatacaatatctaaaactccgcccttacgctctacaccccgcgcctcgactcgaccccgcccctacgcgtaaccccgcccctaacgccccgcccctaaccccccgccccctatacttcttccgcgacgccgtataaccacgcctcctatactctcttccccacacgctccgtacaatctcgcccccgcgcgcaaccccgcccccaactcgccctccgaccccgcccccaactcgccctccgaccccgcccccgccctaccccgcccacttcaaaaccacattcctccgacccgacctcgcgctacgccaaacgaacgacgacgaaaaaacgaacttaactaacctaaaactcgaacttaaaaccgaaaccgcgaaaaccgacgaacgctaaaccaaaaaccccgacgtaatcgcgtaacgaataatcgaatctccgaataaccgaatatcgaccccgaaatccgacgactcgctaacgaaaatcgacg

SEQ ID NO: 11859 - DNA, 564 bp, Artificial Sequence
  chemically treated genomic DNA (Homo sapiens) CpG-island No: 11859
tttcgggaggcgttagtgttggaggggttgcgtaaagttttttttttagaatagaggtttcgcgcgttgggatttggatgtagtgtttgggatttcgtttttgcgttttgtatttcgcgtttcggttcggtttcgtttttgcgcgtagtttcgtttttgacgtttcgtttttgatttttcgttttttgtgtttttttcgcggcgtcgtgtggttacgttttttgtgtttttttttttatacgtttcgtgtagtttcgttttcgcgcgtagtttcgtttttagttcgtttttcggtttcgtttttagttcgtttttcggtttcgttttcgttttgtttcgtttattttagggttatattttttcggttcggtttcgcgttgcgttaagcgggcggcggcggaggggcgggtttggttggtttggggttcggatttggggtcggagtcgcgggagtcggcggacgttggattaggagtttcgacgtgatcgcgtggcgggtggtcgggttttcgggtggtcgggtgtcggtttcgggattcggcggttcgttggcgggagtcggcg

SEQ ID NO: 11860 - DNA, 564 bp, Artificial Sequence
  chemically treated genomic DNA (Homo sapiens) CpG-island No: 11860
cgccgactcccgccaacgaaccgccgaatcccgaaaccgacacccgaccacccgaaaacccgaccacccgccacgcgatcacgtcgaaactcctaatccaacgtccgccgactcccgcgactccgaccccaaatccgaaccccaaaccaaccaaacccgcccctccgccgccgcccgcttaacgcaacgcgaaaccgaaccgaaaaaatataaccctaaaataaacgaaacaaaacgaaaacgaaaccgaaaaacgaactaaaaacgaaaccgaaaaacgaactaaaaacgaaactacgcgcgaaaacgaaactacacgaaacgtataaaaaaaaaaacacaaaaaacgtaaccacacgacgccgcgaaaaaaacacaaaaaacgaaaaatcaaaaacgaaacgtcaaaaacgaaactacgcgcaaaaacgaaaccgaaccgaaacgcgaaatacaaaacgcaaaaacgaaatcccaaacactacatccaaatcccaacgcgcgaaacctctattctaaaaaaaaaactttacgcaacccctccaacactaacgcctcccgaaa

SEQ ID NO: 11861 - DNA, 1055 bp, Artificial Sequence
  chemically treated genomic DNA (Homo sapiens) CpG-island No: 11861
atttggtttgaggtgcgtttgttcgttgtttattgggggtttggggtagtttgagggaaatgtcgggggtcgtagtgttttcggtttcgcgtttggatttcgcgtatttcgtttttttgatttattcgttgtagcggttgtatcgatttgagcgttttttattcgtttaggttcgggtgacgtcggcggtcggggcggtatcgtttttttcgttttttagtatagtcgcgtacgtatatatatttttcgaggggggaaattgaggttaggcgcggcgaggttattcgttaaggttacggcgtacgggcggtggggcgggtaggagggcggcgcgcggggaggtcgtttcgtcggtggcgttggtatcgggttcgggtttcggtttcggttttcgagcgttcgttttcgttttttcgcgttcggttatcggacgttttggggtcgcgtcggtcgcggggacggcgcgttttcggcggttgcgggcggattcgcgaggtaggaggcgggtcggcgggggacgcgttcggcgatcggtgcggtgcggggtttcgggcgggggtcgttggggttgtagtcgggaatgtttttcgcggggcggtttgggcggtagtttcgttttcggggtcgcggttgtatcgatacgtagttggttttcgggaatttggggcgcgcggggatcgcggcgggtttcgcggagcgggtttcggaaggaggttgcgaggtcgtagttgttaagttcgtatcggtcgtagggttgtggggttggggattagcggtcgttaagtttacgggaatgggggtcggggcgcgttagcgttagtttttttgagttgggttgtgcggtgtcgttttttgggattggagcggtgaggacgtagaagttttaattttcgcggttatgtagacggtttatttcgaagttttgcgaacgttaaaggcgcgatattgggggtcggggaggggcggggtgttttatttttttattagtgtagttggttgttttttcgaagcgggggtacgtgaatttagatttcgagggtcgttatgtaaagtat

SEQ ID NO: 11862 - DNA, 1055 bp, Artificial Sequence
  chemically treated genomic DNA (Homo sapiens) CpG-island No: 11862
atactttacataacgaccctcgaaatctaaattcacgtacccccgcttcgaaaaaacaaccaactacactaataaaaaaataaaacaccccgcccctccccgacccccaatatcgcgcctttaacgttcgcaaaacttcgaaataaaccgtctacataaccgcgaaaattaaaacttctacgtcctcaccgctccaatcccaaaaaacgacaccgcacaacccaactcaaaaaaactaacgctaacgcgccccgacccccattcccgtaaacttaacgaccgctaatccccaaccccacaaccctacgaccgatacgaacttaacaactacgacctcgcaacctccttccgaaacccgctccgcgaaacccgccgcgatccccgcgcgccccaaattcccgaaaaccaactacgtatcgatacaaccgcgaccccgaaaacgaaactaccgcccaaaccgccccgcgaaaaacattcccgactacaaccccaacgacccccgcccgaaaccccgcaccgcaccgatcgccgaacgcgtcccccgccgacccgcctcctacctcgcgaatccgcccgcaaccgccgaaaacgcgccgtccccgcgaccgacgcgaccccaaaacgtccgataaccgaacgcgaaaaaacgaaaacgaacgctcgaaaaccgaaaccgaaacccgaacccgataccaacgccaccgacgaaacgacctccccgcgcgccgccctcctacccgccccaccgcccgtacgccgtaaccttaacgaataacctcgccgcgcctaacctcaatttcccccctcgaaaaatatatatacgtacgcgactatactaaaaaacgaaaaaaacgataccgccccgaccgccgacgtcacccgaacctaaacgaataaaaaacgctcaaatcgatacaaccgctacaacgaataaatcaaaaaaacgaaatacgcgaaatccaaacgcgaaaccgaaaacactacgacccccgacatttccctcaaactaccccaaacccccaataaacaacgaacaaacgcacctcaaaccaaat

SEQ ID NO: 11863 - DNA, 1055 bp, Artificial Sequence
  chemically treated genomic DNA (Homo sapiens) CpG-island No: 11863
gtgttttgtatggcgattttcggggtttggatttacgtattttcgtttcggggaggtaattaattgtattgatgaagagatggagtatttcgttttttttcgatttttaatatcgcgtttttagcgttcgtaaggtttcgggataagtcgtttgtatagtcgcggaggttggggtttttgcgtttttatcgttttagttttagagagcgatatcgtatagtttagtttagaaagattggcgttggcgcgtttcggtttttattttcgtgagtttggcggtcgttgatttttaattttataattttgcggtcggtgcgggtttagtaattgcggtttcgtaattttttttcgagattcgtttcgcgaagttcgtcgcgattttcgcgcgttttaggttttcgagagttaattgcgtgtcggtgtaatcgcggtttcgggggcggagttgtcgtttaggtcgtttcgcggagggtattttcggttgtagttttagcgattttcgttcggggtttcgtatcgtatcggtcgtcgggcgcgtttttcgtcggttcgttttttatttcgcgggttcgttcgtagtcgtcgagagcgcgtcgttttcgcggtcggcgcggttttagagcgttcggtggtcgggcgcgggggggcgggggcgggcgttcgggagtcggagtcggagttcgagttcgatattagcgttatcggcggggcggttttttcgcgcgtcgtttttttgttcgttttatcgttcgtgcgtcgtgattttggcgggtggtttcgtcgcgtttggttttagttttttttttcggaaggtgtgtgtgcgtgcgcggttgtgttggggggcggggaggacggtgtcgtttcggtcgtcgacgttattcgagtttggacgagtggagggcgtttaggtcggtgtagtcgttgtagcggatgggttaggagagcggggtacgcggggtttaggcgcggaatcgggggtattgcgattttcggtattttttttagattattttagatttttaataaatagcgaataaacgtattttaggttaagt

SEQ ID NO: 11864 - DNA, 1055 bp, Artificial Sequence
  chemically treated genomic DNA (Homo sapiens) CpG-island No: 11864
acttaacctaaaatacgtttattcgctatttattaaaaatctaaaataatctaaaaaaaataccgaaaatcgcaatacccccgattccgcgcctaaaccccgcgtaccccgctctcctaacccatccgctacaacgactacaccgacctaaacgccctccactcgtccaaactcgaataacgtcgacgaccgaaacgacaccgtcctccccgccccccaacacaaccgcgcacgcacacacaccttccgaaaaaaaaaactaaaaccaaacgcgacgaaaccacccgccaaaatcacgacgcacgaacgataaaacgaacaaaaaaacgacgcgcgaaaaaaccgccccgccgataacgctaatatcgaactcgaactccgactccgactcccgaacgcccgcccccgcccccccgcgcccgaccaccgaacgctctaaaaccgcgccgaccgcgaaaacgacgcgctctcgacgactacgaacgaacccgcgaaataaaaaacgaaccgacgaaaaacgcgcccgacgaccgatacgatacgaaaccccgaacgaaaatcgctaaaactacaaccgaaaataccctccgcgaaacgacctaaacgacaactccgcccccgaaaccgcgattacaccgacacgcaattaactctcgaaaacctaaaacgcgcgaaaatcgcgacgaacttcgcgaaacgaatctcgaaaaaaaattacgaaaccgcaattactaaacccgcaccgaccgcaaaattataaaattaaaaatcaacgaccgccaaactcacgaaaataaaaaccgaaacgcgccaacgccaatctttctaaactaaactatacgatatcgctctctaaaactaaaacgataaaaacgcaaaaaccccaacctccgcgactatacaaacgacttatcccgaaaccttacgaacgctaaaaacgcgatattaaaaatcgaaaaaaaacgaaatactccatctcttcatcaatacaattaattacctccccgaaacgaaaatacgtaaatccaaaccccgaaaatcgccatacaaaacac

SEQ ID NO: 11865 - DNA, 634 bp, Artificial Sequence
  chemically treated genomic DNA (Homo sapiens) CpG-island No: 11865
cgcggggcgagttatattttcgggggtggcgggtttttttagggaggttggggcgggagcggggggcggcgttagtagcgggttgtggagggttttggtacgtagcgcgcgtttatatcgtgtttaggagcgagcgaggacgtcgagtaatcgtggtcgttaggttgggcgggggcgtttatttcgttgttatttgggtttattttggggtttttttttttcgtttattcggggtgcggggcgcggggatgaggaggggagggtcgagagaaggttgtttcgggtttgttttcgtagtattcggagaaggggcgggcgcgtcggagttttttttatttttcgcgtttaaggagtaacgtagtgcggtcgcgtcggattaatcgtcgaggcgttggtcgttatggtaatagtagtattaggcgcggtcgtttcgttgcgttttcgcggtaaagttatatattcggcggggcgcggggcgtcggtttttttttggttcgcgttggaaatttggaagtttgttgttaaaatgtacgcgtcgcgcggagtttacgatgatattattttttaaggcggtttttttgttttcggtattgagatacgcgagtcgcggagttttcggggttttggttttgga

SEQ ID NO: 11866 - DNA, 634 bp, Artificial Sequence
  chemically treated genomic DNA (Homo sapiens) CpG-island No: 11866
tccaaaaccaaaaccccgaaaactccgcgactcgcgtatctcaataccgaaaacaaaaaaaccgccttaaaaaataatatcatcgtaaactccgcgcgacgcgtacattttaacaacaaacttccaaatttccaacgcgaaccaaaaaaaaaccgacgccccgcgccccgccgaatatataactttaccgcgaaaacgcaacgaaacgaccgcgcctaatactactattaccataacgaccaacgcctcgacgattaatccgacgcgaccgcactacgttactccttaaacgcgaaaaataaaaaaaactccgacgcgcccgccccttctccgaatactacgaaaacaaacccgaaacaaccttctctcgaccctcccctcctcatccccgcgccccgcaccccgaataaacgaaaaaaaaaaaccccaaaataaacccaaataacaacgaaataaacgcccccgcccaacctaacgaccacgattactcgacgtcctcgctcgctcctaaacacgatataaacgcgcgctacgtaccaaaaccctccacaacccgctactaacgccgccccccgctcccgccccaacctccctaaaaaaacccgccacccccgaaaatataactcgccccgcg

SEQ ID NO: 11867 - DNA, 634 bp, Artificial Sequence
  chemically treated genomic DNA (Homo sapiens) CpG-island No: 11867
tttagggttagagtttcgagagtttcgcggttcgcgtgttttagtgtcgaaggtagaaaagtcgttttggaaagtagtgttatcgtaggtttcgcgcggcgcgtgtattttagtaatagatttttaggtttttagcgcgggttaggaaggggtcggcgtttcgcgtttcgtcgggtgtgtgattttgtcgcgagggcgtagcggagcggtcgcgtttgatgttgttgttgttatggcgattagcgtttcggcgattggttcggcgcggtcgtattacgttgttttttggacgcggggggtgggggaggtttcggcgcgttcgtttttttttcggatgttgcgagagtaaattcggggtagttttttttcgatttttttttttttattttcgcgtttcgtatttcggatggacgggagggaaaaattttaaggtgggtttaggtagtagcgaggtggacgttttcgtttagtttggcgattacggttattcgacgttttcgttcgtttttgggtacggtgtgagcgcgcgttacgtgttagggttttttatagttcgttgttggcgtcgtttttcgttttcgttttagtttttttggaggagttcgttattttcgggaatgtgattcgtttcgcg

SEQ ID NO: 11868 - DNA, 634 bp, Artificial Sequence
  chemically treated genomic DNA (Homo sapiens) CpG-island No: 11868
cgcgaaacgaatcacattcccgaaaataacgaactcctccaaaaaaactaaaacgaaaacgaaaaacgacgccaacaacgaactataaaaaaccctaacacgtaacgcgcgctcacaccgtacccaaaaacgaacgaaaacgtcgaataaccgtaatcgccaaactaaacgaaaacgtccacctcgctactacctaaacccaccttaaaatttttccctcccgtccatccgaaatacgaaacgcgaaaataaaaaaaaaaaaatcgaaaaaaaactaccccgaatttactctcgcaacatccgaaaaaaaaacgaacgcgccgaaacctcccccaccccccgcgtccaaaaaacaacgtaatacgaccgcgccgaaccaatcgccgaaacgctaatcgccataacaacaacaacatcaaacgcgaccgctccgctacgccctcgcgacaaaatcacacacccgacgaaacgcgaaacgccgaccccttcctaacccgcgctaaaaacctaaaaatctattactaaaatacacgcgccgcgcgaaacctacgataacactactttccaaaacgacttttctaccttcgacactaaaacacgcgaaccgcgaaactctcgaaactctaaccctaaa

SEQ ID NO: 11869 - DNA, 735 bp, Artificial Sequence
  chemically treated genomic DNA (Homo sapiens) CpG-island No: 11869
  unsure (612)
tcgaggcgtaggcgttgatcgttatttacggtcgtgatcgtgattttggtcggtcgttgtggttggggtcggttaagtcgaatatcggttatacgtaagcggcggcgggtgtggttggtgtgattaagatggtgatggcgatgcggtacgggtagttgttacgtacgttgtacgtggaatcgtcgtcgtcggaggtggattggtcggcggggacggtttaattttttacggagaatacgttttggtttaggagtggtcgtgttcgtcgggtgggggtgtcgtcgttcgggattagtggtattaacgcgtacgttattttcgaatagttttcgggagtgtcgagttagtttgcggggtcgggaacggaagattttggtttcggggtgtattcggtattgttggacgcggttttgtacgtaacggttgttcgagatatggatgacgtacgtttgtcgttttagtgggaaggtgtgtttttgtacgttaaggtcgcgtcggttttgcgggttcgcgtggtttcggttggtgacgatgttaagtttttggttggttgtgatgggatcggtcgatcggtgatttcggtggatcgattcgttttggcggtcggtttgnggtcgggaggatcgtttcgcgtttatagcgtttttaagtttcgtttgttttcgtttgagttcgattacgggtttatttgtggatattcgtttagtttttgttttggtttttttttcgagattt

SEQ ID NO: 11870 - DNA, 735 bp, Artificial Sequence
  chemically treated genomic DNA (Homo sapiens) CpG-island No: 11870
  unsure (124)
aaatctcgaaaaaaaaaccaaaacaaaaactaaacgaatatccacaaataaacccgtaatcgaactcaaacgaaaacaaacgaaacttaaaaacgctataaacgcgaaacgatcctcccgaccncaaaccgaccgccaaaacgaatcgatccaccgaaatcaccgatcgaccgatcccatcacaaccaaccaaaaacttaacatcgtcaccaaccgaaaccacgcgaacccgcaaaaccgacgcgaccttaacgtacaaaaacacaccttcccactaaaacgacaaacgtacgtcatccatatctcgaacaaccgttacgtacaaaaccgcgtccaacaataccgaatacaccccgaaaccaaaatcttccgttcccgaccccgcaaactaactcgacactcccgaaaactattcgaaaataacgtacgcgttaataccactaatcccgaacgacgacacccccacccgacgaacacgaccactcctaaaccaaaacgtattctccgtaaaaaattaaaccgtccccgccgaccaatccacctccgacgacgacgattccacgtacaacgtacgtaacaactacccgtaccgcatcgccatcaccatcttaatcacaccaaccacacccgccgccgcttacgtataaccgatattcgacttaaccgaccccaaccacaacgaccgaccaaaatcacgatcacgaccgtaaataacgatcaacgcctacgcctcga

SEQ ID NO: 11871 - DNA, 735 bp, Artificial Sequence
  chemically treated genomic DNA (Homo sapiens) CpG-island No: 11871
  unsure (124)
aggtttcgaaaaaaaagttagagtagagattgaacggatgtttataaatgaattcgtggtcgagtttaaacgggaataaacggagtttgagggcgttatgggcgcgagacggttttttcggttntaagtcggtcgttaaaacgagtcggtttatcgagattatcggtcgatcggttttattataattagttagggatttggtatcgttattagtcgggattacgcggattcgtaaagtcggcgcggttttggcgtgtagggatatatttttttattggaacggtaagcgtgcgttatttatgtttcggatagtcgttgcgtgtagagtcgcgtttagtagtgtcggatgtatttcgaaattagaatttttcgttttcggtttcgtagattgattcggtattttcgggggttgttcgaggatgacgtgcgcgttagtattattgatttcgaacgacgatatttttattcgacgaatacgattatttttgggttagggcgtgtttttcgtaaggagttgaatcgttttcgtcgattaatttattttcggcgacggcgattttacgtgtaacgtgcgtggtagttgttcgtgtcgtatcgttattattattttgattatattagttatattcgtcgtcgtttgcgtatgatcgatgttcgatttgatcgattttaattataacggtcggttaggattacgattacggtcgtaggtggcgattagcgtttgcgtttcga

SEQ ID NO: 11872 - DNA, 735 bp, Artificial Sequence
  chemically treated genomic DNA (Homo sapiens) CpG-island No: 11872
  unsure (612)
tcgaaacgcaaacgctaatcgccacctacgaccgtaatcgtaatcctaaccgaccgttataattaaaatcgatcaaatcgaacatcgatcatacgcaaacgacgacgaatataactaatataatcaaaataataataacgatacgacacgaacaactaccacgcacgttacacgtaaaatcgccgtcgccgaaaataaattaatcgacgaaaacgattcaactccttacgaaaaacacgccctaacccaaaaataatcgtattcgtcgaataaaaatatcgtcgttcgaaatcaataatactaacgcgcacgtcatcctcgaacaacccccgaaaataccgaatcaatctacgaaaccgaaaacgaaaaattctaatttcgaaatacatccgacactactaaacgcgactctacacgcaacgactatccgaaacataaataacgcacgcttaccgttccaataaaaaaatatatccctacacgccaaaaccgcgccgactttacgaatccgcgtaatcccgactaataacgataccaaatccctaactaattataataaaaccgatcgaccgataatctcgataaaccgactcgttttaacgaccgacttanaaccgaaaaaaccgtctcgcgcccataacgccctcaaactccgtttattcccgtttaaactcgaccacgaattcatttataaacatccgttcaatctctactctaacttttttttcgaaacct

SEQ ID NO: 11873 - DNA, 572 bp, Artificial Sequence
  chemically treated genomic DNA (Homo sapiens) CpG-island No: 11873
taatcgggagttttagtgggggatgaataattttcgttagtagatcggtaattattaatagtaacgtatttgttagggtcgaaataggtagtagtttgcggtgacgtttatcggtgatgttacgtattatatgcggtattacgagattaataaagttaatcgggtcgtaggcggttacgtcggtagatgttatggcgatagttagtaataaagtttagaatcgggtatggggtatcgatatatcgagcgtggtggcgcgcgtatcgtcgagtgtaaggaggtcgagatcgcggtaaaaatttaagtttagcggtagaaataaaatttttagcgggatggttatttttataaagttttagttacggttttataagttgtcggtaagttttagaaaggcgttgttatattttgcgggcgcgagaagtatagaatattcgttaggttgttttagtttgttaaaagggttttcgtcggtgagcgtttatttttatattggttgtgggttttttggtcgtattttttagtaaaattaaatttcgttattttcggttcgtaaagtttaataagggaag

SEQ ID NO: 11874 - DNA, 572 bp, Artificial Sequence
  chemically treated genomic DNA (Homo sapiens) CpG-island No: 11874
cttcccttattaaactttacgaaccgaaaataacgaaatttaattttactaaaaaatacgaccaaaaaacccacaaccaatataaaaataaacgctcaccgacgaaaacccttttaacaaactaaaacaacctaacgaatattctatacttctcgcgcccgcaaaatataacaacgcctttctaaaacttaccgacaacttataaaaccgtaactaaaactttataaaaataaccatcccgctaaaaattttatttctaccgctaaacttaaatttttaccgcgatctcgacctccttacactcgacgatacgcgcgccaccacgctcgatatatcgataccccatacccgattctaaactttattactaactatcgccataacatctaccgacgtaaccgcctacgacccgattaactttattaatctcgtaataccgcatataatacgtaacatcaccgataaacgtcaccgcaaactactacctatttcgaccctaacaaatacgttactattaataattaccgatctactaacgaaaattattcatcccccactaaaactcccgatta

SEQ ID NO: 11875 - DNA, 572 bp, Artificial Sequence
  chemically treated genomic DNA (Homo sapiens) CpG-island No: 11875
ttttttttgttgggttttgcgggtcgggaatggcggggtttaattttgttaaaagatgcggttaaaaaatttataattaatataaaagtgggcgtttatcggcgggggtttttttggtaagttggggtagtttgacgaatattttatgtttttcgcgttcgtagaatgtaataacgtttttttgggatttgtcggtagtttatggggtcgtgattggagttttgtaaagatggttatttcgttgaagattttatttttgtcgttgagtttgagtttttgtcgcgatttcgatttttttgtattcggcgatgcgcgcgttattacgttcggtgtgtcggtgttttatattcgattttgggttttgttattagttgtcgttatgatatttatcggcgtggtcgtttgcggttcgattagttttattggtttcgtggtgtcgtatatgatgcgtagtattatcggtggacgttatcgtagattgttgtttgtttcggttttgataggtgcgttgttgttggtggttgtcgatttgttggcgagaattatttattttttattggagttttcggttg

SEQ ID NO: 11876 - DNA, 572 bp, Artificial Sequence
  chemically treated genomic DNA (Homo sapiens) CpG-island No: 11876
caaccgaaaactccaataaaaaataaataattctcgccaacaaatcgacaaccaccaacaacaacgcacctatcaaaaccgaaacaaacaacaatctacgataacgtccaccgataatactacgcatcatatacgacaccacgaaaccaataaaactaatcgaaccgcaaacgaccacgccgataaatatcataacgacaactaataacaaaacccaaaatcgaatataaaacaccgacacaccgaacgtaataacgcgcgcatcgccgaatacaaaaaaatcgaaatcgcgacaaaaactcaaactcaacgacaaaaataaaatcttcaacgaaataaccatctttacaaaactccaatcacgaccccataaactaccgacaaatcccaaaaaaacgttattacattctacgaacgcgaaaaacataaaatattcgtcaaactaccccaacttaccaaaaaaacccccgccgataaacgcccacttttatattaattataaattttttaaccgcatcttttaacaaaattaaaccccgccattcccgacccgcaaaacccaacaaaaaaaa

SEQ ID NO: 11877 - DNA, 708 bp, Artificial Sequence
  chemically treated genomic DNA (Homo sapiens) CpG-island No: 11877
  unsure (360, 473, 544, 589..)
gtatattagcgaagtgttggggttgaattacgataagtcgtaggtagtagatagtacgtcgaaatcgtagttgaaatcgtaattcgtttaaaaagaagtggcggatattgcgttgtaatgatacgttatattcggtatggtatgtcggatgtggcgtatgttgataagacgcgttagcgtcgtattaggtaatcggttcgggcgttagatgttggatgcggcgtaatcgttttatttaatttacggggtggagtattttatagcggtgtaggtttgataagacgcgttagcgtcgtattaggtaatcggtttgggcgttagatgtcggatgcggcgtaatcgttttattcgatttacggngtggagtattttatagcggtgtaggtttgataagacgcgttagcgtcgtattaggtaatcggttcggacgttggatgtcggatgcggcgtaatcgttttatttaatttacggngtggagtattttatagcggtgtaggtttgataagacgcgttagcgtcgtattaggtaatcggtttgggcgntagatgttcggaatgcggcgttaatcgttttattcgatttacggnngtggagtattttatagtcggtgtaggtttgataagacgcgttagcgtcgtattaggtaatcggttcggcgtttggatgttcggatgtcggcgtgatcgttttgtttgatttacgggga

SEQ ID NO: 11878 - DNA, 708 bp, Artificial Sequence
  chemically treated genomic DNA (Homo sapiens) CpG-island No: 11878
  unsure (119..120, 165, 236, 349)
tccccgtaaatcaaacaaaacgatcacgccgacatccgaacatccaaacgccgaaccgattacctaatacgacgctaacgcgtcttatcaaacctacaccgactataaaatactccacnnccgtaaatcgaataaaacgattaacgccgcattccgaacatctancgcccaaaccgattacctaatacgacgctaacgcgtcttatcaaacctacaccgctataaaatactccacnccgtaaattaaataaaacgattacgccgcatccgacatccaacgtccgaaccgattacctaatacgacgctaacgcgtcttatcaaacctacaccgctataaaatactccacnccgtaaatcgaataaaacgattacgccgcatccgacatctaacgcccaaaccgattacctaatacgacgctaacgcgtcttatcaaacctacaccgctataaaatactccaccccgtaaattaaataaaacgattacgccgcatccaacatctaacgcccgaaccgattacctaatacgacgctaacgcgtcttatcaacatacgccacatccgacataccataccgaatataacgtatcattacaacgcaatatccgccacttctttttaaacgaattacgatttcaactacgatttcgacgtactatctactacctacgacttatcgtaattcaaccccaacacttcgctaatatac

SEQ ID NO: 11879 - DNA, 708 bp, Artificial Sequence
  chemically treated genomic DNA (Homo sapiens) CpG-island No: 11879
  unsure (119..120, 165, 236, 349)
ttttcgtaggttagataaggcggttacgtcggtattcgaatatttaaacgtcgagtcggttgtttgatgcgacgttggcgcgttttattaggtttatatcggttgtgaagtgttttatnntcgtaggtcggataaggcggttaacgtcgtatttcggatatttancgtttaagtcggttgtttgatgcgacgttggcgcgttttattaggtttatatcgttgtgaagtgttttatntcgtaggttggataaggcggttacgtcgtattcgatatttaacgttcgagtcggttgtttgatgcgacgttggcgcgttttattaggtttatatcgttgtgaagtgttttatntcgtaggtcggataaggcggttacgtcgtattcgatatttaacgtttaagtcggttgtttgatgcgacgttggcgcgttttattaggtttatatcgttgtgaagtgttttatttcgtaggttggataaggcggttacgtcgtatttaatatttaacgttcgagtcggttgtttgatgcgacgttggcgcgttttattagtatacgttatattcggtatattatgtcggatgtggcgtattattataacgtaatattcgttatttttttttgaacgggttgcggttttaattgcggtttcggcgtattatttgttgtttgcggtttgtcgtagtttaattttagtatttcgttggtgtat

SEQ ID NO: 11880 - DNA, 708 bp, Artificial Sequence
  chemically treated genomic DNA (Homo sapiens) CpG-island No: 11880
  unsure (360, 473, 544, 589..)
atacaccaacgaaatactaaaattaaactacgacaaaccgcaaacaacaaataatacgccgaaaccgcaattaaaaccgcaacccgttcaaaaaaaaataacgaatattacgttataataatacgccacatccgacataatataccgaatataacgtatactaataaaacgcgccaacgtcgcatcaaacaaccgactcgaacgttaaatattaaatacgacgtaaccgccttatccaacctacgaaataaaacacttcacaacgatataaacctaataaaacgcgccaacgtcgcatcaaacaaccgacttaaacgttaaatatcgaatacgacgtaaccgccttatccgacctacganataaaacacttcacaacgatataaacctaataaaacgcgccaacgtcgcatcaaacaaccgactcgaacgttaaatatcgaatacgacgtaaccgccttatccaacctacganataaaacacttcacaacgatataaacctaataaaacgcgccaacgtcgcatcaaacaaccgacttaaacgntaaatatccgaaatacgacgttaaccgccttatccgacctacgannataaaacacttcacaaccgatataaacctaataaaacgcgccaacgtcgcatcaaacaaccgactcgacgtttaaatattcgaataccgacgtaaccgccttatctaacctacgaaaa

SEQ ID NO: 11881 - DNA, 829 bp, Artificial Sequence
  chemically treated genomic DNA (Homo sapiens) CpG-island No: 11881
cgatttttatttcggtaaggtttgtttcgaaagcggaaacggtttaaggcgaggtggtttcgtttttagaaagacggtcggggattgttttcggatagtgagttcgaaggtattcgtatagaaggcggatgagatcggaacggttttttgggtcggtagttgttgggttttttgaggtggtttcgtttagacgcgtgtcgcgagcgtgagaaattttttagttgttgttgagaagaggacgatgacgaggaagagttatcgttttcgttagatttatcgtttcgggtcgagtgaggaggttttcgtcgcggatagggtaatagttcgtcgtcgttgttgttgttgttgtttcgatttcgtatttggttgttattatcgtcgttattgatttttttatttttaagtttttttttttttttcggcgagaggttattggaggtcggggtcggagtatttgcggtcgttattcggggagtagcgttttttatataattttagtttttcgttcggggattcgttcgataattgtttcgtttttttttttttttaacggattgggtcggtgcggttttattttattcggatattaagcggtttttgttttttaattttttcgtattttagtattttagttttttttcgtcggatcgtcgtaatttagtttttttttttagcgtttttttgttttttagcgatcggggttttttcgtttcgcgagaaagggattttggtagcggttgtattcgaaacgttattttttgcgatacgtaggaaataaaggtttttagtttacgcgataataagattaattcgatatttattaggattt

SEQ ID NO: 11882 - DNA, 829 bp, Artificial Sequence
  chemically treated genomic DNA (Homo sapiens) CpG-island No: 11882
aaatcctaataaatatcgaattaatcttattatcgcgtaaactaaaaacctttatttcctacgtatcgcaaaaaataacgtttcgaatacaaccgctaccaaaatccctttctcgcgaaacgaaaaaaccccgatcgctaaaaaacaaaaaaacgctaaaaaaaaaaactaaattacgacgatccgacgaaaaaaaactaaaatactaaaatacgaaaaaattaaaaaacaaaaaccgcttaatatccgaataaaataaaaccgcaccgacccaatccgttaaaaaaaaaaaaaaacgaaacaattatcgaacgaatccccgaacgaaaaactaaaattatataaaaaacgctactccccgaataacgaccgcaaatactccgaccccgacctccaataacctctcgccgaaaaaaaaaaaaaaacttaaaaataaaaaaatcaataacgacgataataacaaccaaatacgaaatcgaaacaacaacaacaacaacgacgacgaactattaccctatccgcgacgaaaacctcctcactcgacccgaaacgataaatctaacgaaaacgataactcttcctcgtcatcgtcctcttctcaacaacaactaaaaaatttctcacgctcgcgacacgcgtctaaacgaaaccacctcaaaaaacccaacaactaccgacccaaaaaaccgttccgatctcatccgccttctatacgaataccttcgaactcactatccgaaaacaatccccgaccgtctttctaaaaacgaaaccacctcgccttaaaccgtttccgctttcgaaacaaaccttaccgaaataaaaatcg

SEQ ID NO: 11883 - DNA, 829 bp, Artificial Sequence
  chemically treated genomic DNA (Homo sapiens) CpG-island No: 11883
aaattttagtgagtatcgagttggttttattatcgcgtgaattgggagtttttgttttttgcgtgtcgtaggaagtgacgtttcgggtatagtcgttattagagtttttttttcgcgaggcggaagaatttcgatcgttgaggagtaagggggcgttaggaaagggaattgggttgcgacggttcggcgagagagagttggggtgttggggtgcggggaagttggggagtagaggtcgtttggtgttcgagtagggtaagatcgtatcgatttagttcgttaggaaagaagggaaacgaggtaattgtcgggcggattttcggacggagggttaaggttgtgtggaaggcgttgtttttcggatggcgatcgtagatatttcggtttcggtttttagtggtttttcgtcgaaggaagaaggggagtttgaagatggggaaattagtgacgacgataataatagttagatacggagtcggagtagtagtagtagtagcggcggcgggttgttattttattcgcggcgaaggtttttttattcggttcggggcggtggatttggcggaggcggtggttttttttcgttatcgttttttttttagtagtagttgaggaattttttacgttcgcggtacgcgtttgagcggggttattttaggggatttagtagttatcgatttaaagaatcgtttcggttttattcgttttttgtacggatgttttcgagtttattgttcgaaagtagttttcggtcgtttttttgggagcggagttatttcgttttggatcgttttcgttttcgaggtaggttttatcggggtgggagtcg

SEQ ID NO: 11884 - DNA, 829 bp, Artificial Sequence
  chemically treated genomic DNA (Homo sapiens) CpG-island No: 11884
cgactcccaccccgataaaacctacctcgaaaacgaaaacgatccaaaacgaaataactccgctcccaaaaaaacgaccgaaaactactttcgaacaataaactcgaaaacatccgtacaaaaaacgaataaaaccgaaacgattctttaaatcgataactactaaatcccctaaaataaccccgctcaaacgcgtaccgcgaacgtaaaaaattcctcaactactactaaaaaaaaaacgataacgaaaaaaaaccaccgcctccgccaaatccaccgccccgaaccgaataaaaaaaccttcgccgcgaataaaataacaacccgccgccgctactactactactactccgactccgtatctaactattattatcgtcgtcactaatttccccatcttcaaactccccttcttccttcgacgaaaaaccactaaaaaccgaaaccgaaatatctacgatcgccatccgaaaaacaacgccttccacacaaccttaaccctccgtccgaaaatccgcccgacaattacctcgtttcccttctttcctaacgaactaaatcgatacgatcttaccctactcgaacaccaaacgacctctactccccaacttccccgcaccccaacaccccaactctctctcgccgaaccgtcgcaacccaattccctttcctaacgcccccttactcctcaacgatcgaaattcttccgcctcgcgaaaaaaaaactctaataacgactatacccgaaacgtcacttcctacgacacgcaaaaaacaaaaactcccaattcacgcgataataaaaccaactcgatactcactaaaattt

SEQ ID NO: 11885 - DNA, 728 bp, Artificial Sequence
  chemically treated genomic DNA (Homo sapiens) CpG-island No: 11885
gattttttggttttttaattttacgatttatagtatcgtcgtacggaagtattttcggggttttatataatacggtatattttattttttatttcggtttcgcgtatcgtttatttatcgttttaacgttttttaaattatacgtttttatttatattggtgtatttcgagtttcgttttttttaacgtggtcgttagattaattatacgtcggatagtatattttattattttatttcgtaatcgtattttttttcgtgttgtgttattaatcgacgttttttttgtacgcggttatagttaatattcgttttgttgcgtattttttattttttttttcgttttcgttatcggcgtatagaagtatcgattgtatattcgttttcgttattttttttttttttgtcgtttttaaggtgtttacgtttttacgttaacgttacgcgtattttaattagcgtcgattttcgttttttttttcgatttttattttttttatttttttgatatcgtttcgtttcgtagttatatttacgttttttttttttatttttttttttttttttttatcgatcgcgatcgtttttatttattttaattttattttatttattcgttttttttatttttttaagttttttttatttatcgttatttatttttattatttgtacggcgtttttacggtattttatttttcgcgttcgttacgttattttttttttttt

SEQ ID NO: 11886 - DNA, 728 bp, Artificial Sequence
  chemically treated genomic DNA (Homo sapiens) CpG-island No: 11886
aaaaaaaaaaaaataacgtaacgaacgcgaaaaataaaataccgtaaaaacgccgtacaaataataaaaataaataacgataaataaaaaaaacttaaaaaaataaaaaaaacgaataaataaaataaaattaaaataaataaaaacgatcgcgatcgataaaaaaaaaaaaaaaaaaataaaaaaaaaaaacgtaaatataactacgaaacgaaacgatatcaaaaaaataaaaaaaataaaaatcgaaaaaaaaaacgaaaatcgacgctaattaaaatacgcgtaacgttaacgtaaaaacgtaaacaccttaaaaacgacaaaaaaaaaaaaaataacgaaaacgaatatacaatcgatacttctatacgccgataacgaaaacgaaaaaaaaaataaaaaatacgcaacaaaacgaatattaactataaccgcgtacaaaaaaaacgtcgattaataacacaacacgaaaaaaaatacgattacgaaataaaataataaaatatactatccgacgtataattaatctaacgaccacgttaaaaaaaacgaaactcgaaatacaccaatataaataaaaacgtataatttaaaaaacgttaaaacgataaataaacgatacgcgaaaccgaaataaaaaataaaatataccgtattatataaaaccccgaaaatacttccgtacgacgatactataaatcgtaaaattaaaaaaccaaaaaatc

SEQ ID NO: 11887 - DNA, 728 bp, Artificial Sequence
  chemically treated genomic DNA (Homo sapiens) CpG-island No: 11887
agggagagggaggtgacgtggcggacgcggggggtgaggtgtcgtgggggcgtcgtgtaaatggtgaaggtgggtggcggtggatgggggaagtttgggagggtgagaggggcgaatgggtgaggtagagttgggatgggtgggggcgatcgcgatcgatggggaaggaggggaagaagtggggagaaggggcgtggatgtggttacggagcggggcgatattaggggggtgggagaagtggggatcggaaggggaggcgggagtcggcgttggttagggtacgcgtgacgttagcgtaggagcgtgagtattttgagaacggtagagggaggaggggtagcggagacgggtgtgtaatcggtgtttttgtacgtcggtggcggagacggggagaggggtaaaaggtgcgtagtagggcggatattgattgtaatcgcgtatagaggaggcgtcggttggtagtatagtacggggagaggtgcgattacggagtgaggtagtagggtgtgttgttcgacgtgtagttgatttggcgattacgttgaggagggcggggttcgggatgtattagtgtaaataaaagcgtatggtttgaggggcgttggagcggtgggtaagcggtacgcgaggtcgagatgggggatggagtgtgtcgtgttatgtggggtttcgggggtgttttcgtgcgacgatgttatggatcgtggggttggggggttagaggatt

SEQ ID NO: 11888 - DNA, 728 bp, Artificial Sequence
  chemically treated genomic DNA (Homo sapiens) CpG-island No: 11888
aatcctctaaccccccaaccccacgatccataacatcgtcgcacgaaaacacccccgaaaccccacataacacgacacactccatcccccatctcgacctcgcgtaccgcttacccaccgctccaacgcccctcaaaccatacgcttttatttacactaatacatcccgaaccccgccctcctcaacgtaatcgccaaatcaactacacgtcgaacaacacaccctactacctcactccgtaatcgcacctctccccgtactatactaccaaccgacgcctcctctatacgcgattacaatcaatatccgccctactacgcaccttttacccctctccccgtctccgccaccgacgtacaaaaacaccgattacacacccgtctccgctacccctcctccctctaccgttctcaaaatactcacgctcctacgctaacgtcacgcgtaccctaaccaacgccgactcccgcctccccttccgatccccacttctcccacccccctaatatcgccccgctccgtaaccacatccacgccccttctccccacttcttcccctccttccccatcgatcgcgatcgcccccacccatcccaactctacctcacccattcgcccctctcaccctcccaaacttcccccatccaccgccacccaccttcaccatttacacgacgcccccacgacacctcaccccccgcgtccgccacgtcacctccctctccct

SEQ ID NO: 11889 - DNA, 828 bp, Artificial Sequence
  chemically treated genomic DNA (Homo sapiens) CpG-island No: 11889
  unsure (518, 576, 638)
atagggcgtttacgtcgtattcggtagtcgttgtttgatgcgacgtttgtcgcgttttattatgtttataggtttgtgtcgaatcgtaggtcggataaggcgtttacgtcgtattcggtagttggcgtataatgtttgatgcgacgtttgacgcgttttattaggtttataagtttgtgtcgaatcgtaggtcgtattcggtatgttataaatagagcgtcggaaatattaatcggtttatttcgcgtatttttaacgtattagttaacggtttaacgtttttcggcgtggcgttcgtttagttttgcgtttcgttatatacgtcgtgggtatgaaacgcgtttaggcgtatcggaatatcgtcgagttttttgataaacgtcgttagtttttcgatgtgttgtaaataatttatttggttagggattattagtaaacgtagtttcgttagtttgtcgcgttttgttagtaaatagatgttgcgtttaatttgttgattatcgcgttcggtgagttgntgatgatattcgtttttttacgttttgagatcgagtattgcgtcgtcgtatatcgggnagtattttttttagtcggtttcgtttaatatgtcggtattgtttattagataggtgaagggngttagttgcggaatcgttttgaaagtagtaaatagcgttattataaacggagttggggcggggggtttatcggtatttatcggtaattttttcgataatagtattgtttttcggatatggttaattattttttttatttaattgggatgcggatggggcggggtatgttttcgggatattttttaggtag

SEQ ID NO: 11890 - DNA, 828 bp, Artificial Sequence
  chemically treated genomic DNA (Homo sapiens) CpG-island No: 11890
  unsure (191, 253, 311)
ctacctaaaaaatatcccgaaaacataccccgccccatccgcatcccaattaaataaaaaaaataattaaccatatccgaaaaacaatactattatcgaaaaaattaccgataaataccgataaaccccccgccccaactccgtttataataacgctatttactactttcaaaacgattccgcaactaacncccttcacctatctaataaacaataccgacatattaaacgaaaccgactaaaaaaaatactncccgatatacgacgacgcaatactcgatctcaaaacgtaaaaaaacgaatatcatcancaactcaccgaacgcgataatcaacaaattaaacgcaacatctatttactaacaaaacgcgacaaactaacgaaactacgtttactaataatccctaaccaaataaattatttacaacacatcgaaaaactaacgacgtttatcaaaaaactcgacgatattccgatacgcctaaacgcgtttcatacccacgacgtatataacgaaacgcaaaactaaacgaacgccacgccgaaaaacgttaaaccgttaactaatacgttaaaaatacgcgaaataaaccgattaatatttccgacgctctatttataacataccgaatacgacctacgattcgacacaaacttataaacctaataaaacgcgtcaaacgtcgcatcaaacattatacgccaactaccgaatacgacgtaaacgccttatccgacctacgattcgacacaaacctataaacataataaaacgcgacaaacgtcgcatcaaacaacgactaccgaatacgacgtaaacgccctat

SEQ ID NO: 11891 - DNA, 828 bp, Artificial Sequence
  chemically treated genomic DNA (Homo sapiens) CpG-island No: 11891
  unsure (191, 253, 311)
ttgtttgaaaagtgtttcgaaaatatgtttcgttttattcgtattttaattaggtggaggaagtggttagttatgttcgaaaagtagtgttgttatcgaagggattatcggtgaatgtcggtaaatttttcgttttagtttcgtttgtggtggcgttgtttattgtttttaaaacgatttcgtaattggtnttttttatttgtttggtggatagtatcggtatgttgagcgaaatcggttgggaaaaatgttnttcggtgtgcgacggcgtaatgttcgattttaaagcgtgggggagcgaatgttattantaatttatcggacgcgataattagtagattaagcgtagtatttatttgttggtagagcgcggtaagttggcggaattgcgtttgttggtgatttttggttaggtggattatttgtaatatatcgaagaattggcggcgtttattaagggattcggcgatgtttcggtacgtttgaacgcgttttatgtttacggcgtgtatggcgaggcgtaaagttgggcgagcgttacgtcggaagacgttgagtcgttggttgatgcgttaaaggtgcgcggggtgagtcggttgatattttcggcgttttatttgtgatatgtcggatacggtttacggttcggtatagatttgtaggtttgataagacgcgttaagcgtcgtattaggtattgtgcgttaattgtcggatgcggcgtaaacgttttattcggtttacggttcggtataaatttgtaggtatgataagacgcgataagcgtcgtattaggtaacggttgtcggatgcggcgtgaacgttttat

SEQ ID NO: 11892 - DNA, 828 bp, Artificial Sequence
  chemically treated genomic DNA (Homo sapiens) CpG-island No: 11892
  unsure (518, 576, 638)
ataaaacgttcacgccgcatccgacaaccgttacctaatacgacgcttatcgcgtcttatcatacctacaaatttataccgaaccgtaaaccgaataaaacgtttacgccgcatccgacaattaacgcacaatacctaatacgacgcttaacgcgtcttatcaaacctacaaatctataccgaaccgtaaaccgtatccgacatatcacaaataaaacgccgaaaatatcaaccgactcaccccgcgcacctttaacgcatcaaccaacgactcaacgtcttccgacgtaacgctcgcccaactttacgcctcgccatacacgccgtaaacataaaacgcgttcaaacgtaccgaaacatcgccgaatcccttaataaacgccgccaattcttcgatatattacaaataatccacctaaccaaaaatcaccaacaaacgcaattccgccaacttaccgcgctctaccaacaaataaatactacgcttaatctactaattatcgcgtccgataaattantaataacattcgctcccccacgctttaaaatcgaacattacgccgtcgcacaccgaanaacatttttcccaaccgatttcgctcaacataccgatactatccaccaaacaaataaaaaanaccaattacgaaatcgttttaaaaacaataaacaacgccaccacaaacgaaactaaaacgaaaaatttaccgacattcaccgataatcccttcgataacaacactacttttcgaacataactaaccacttcctccacctaattaaaatacgaataaaacgaaacatattttcgaaacacttttcaaacaa

SEQ ID NO: 11893 - DNA, 1217 bp, Artificial Sequence
  chemically treated genomic DNA (Homo sapiens) CpG-island No: 11893
gtgaatagtaacgagtggcgttggtacgagtttttaatggtcgatttgatgtgttgtttgtcgacgaatttatcggtaattttgatcgttagacgggcgataaaattgtcgatttgttgtttttttttaatcgtgaatatggtattacgttgattatggtgatttacgatttgtaattggcggtacgttgcgatcgttgtttacggttggtgaacgggtagttgtaggaggaagtatgattgtacgttggttttggcgcgaatggcgttcgtcgtcgttattaattgtttggttggcgttaagtttggcggtggtttgcgtgttggcgttgggtaatattagcgatcgtatggagaagggtttaagttagtaaagtcgtgagtttatggcgggcgatcgggcgttgcgtagtttacgcgaagtgtcgtaagcgtggttggaggaagcgtaaaagcgcggtttgaaagtcggtaagtagttgattttcgttataatgatttttgtaggcgatatatcgtagttggcgaacgttaaagcggtggatgatatttattcgatgtatggcgatttgtaaattaatttttttggtttgaaatcgtaggcgggtagcgtattgttggttttacgtttgatggtattgtttaatttgaaaacgggcgatattattgacgtgggcgatgttattttgcggattgtcggagaagtgatttaggaatcggatttcggttttaattttttttagatggtttcgcgtttgatgatgaatttggcggatgtcgataaaatcggagtcgtgtagtcggggagtcgggttatttggcgttataaattcggcggtaacgagaattagttcgacggttatgagaaatggttgttattttagtttaaattcgaataacgttggtacggtttggaataggacgaaggcgcgttggggcgatcgatggaacgttcgtaatagtttttgttgttttcggcgtttttgattttgttgttggtagtggtagcggtggcggtagcgatgaattattattgtcgtagtcgttacgatttggtggcgatttttaaaacgttgggggtagggcgagcgtaattgcgtaagttaatcgtcggttagtggttgatggtgttgacgtttttagtcgttatcggtggggttataggtttgttgttcgaaaacgtgttgaggtgttgtttaatgatgaattataagtagt

SEQ ID NO: 11894 - DNA, 1217 bp, Artificial Sequence
  chemically treated genomic DNA (Homo sapiens) CpG-island No: 11894
actacttataattcatcattaaacaacacctcaacacgttttcgaacaacaaacctataaccccaccgataacgactaaaaacgtcaacaccatcaaccactaaccgacgattaacttacgcaattacgctcgccctacccccaacgttttaaaaatcgccaccaaatcgtaacgactacgacaataataattcatcgctaccgccaccgctaccactaccaacaacaaaatcaaaaacgccgaaaacaacaaaaactattacgaacgttccatcgatcgccccaacgcgccttcgtcctattccaaaccgtaccaacgttattcgaatttaaactaaaataacaaccatttctcataaccgtcgaactaattctcgttaccgccgaatttataacgccaaataacccgactccccgactacacgactccgattttatcgacatccgccaaattcatcatcaaacgcgaaaccatctaaaaaaaattaaaaccgaaatccgattcctaaatcacttctccgacaatccgcaaaataacatcgcccacgtcaataatatcgcccgttttcaaattaaacaataccatcaaacgtaaaaccaacaatacgctacccgcctacgatttcaaaccaaaaaaattaatttacaaatcgccatacatcgaataaatatcatccaccgctttaacgttcgccaactacgatatatcgcctacaaaaatcattataacgaaaatcaactacttaccgactttcaaaccgcgcttttacgcttcctccaaccacgcttacgacacttcgcgtaaactacgcaacgcccgatcgcccgccataaactcacgactttactaacttaaacccttctccatacgatcgctaatattacccaacgccaacacgcaaaccaccgccaaacttaacgccaaccaaacaattaataacgacgacgaacgccattcgcgccaaaaccaacgtacaatcatacttcctcctacaactacccgttcaccaaccgtaaacaacgatcgcaacgtaccgccaattacaaatcgtaaatcaccataatcaacgtaataccatattcacgattaaaaaaaaacaacaaatcgacaattttatcgcccgtctaacgatcaaaattaccgataaattcgtcgacaaacaacacatcaaatcgaccattaaaaactcgtaccaacgccactcgttactattcac

SEQ ID NO: 11895 - DNA, 1217 bp, Artificial Sequence
  chemically treated genomic DNA (Homo sapiens) CpG-island No: 11895
gttgtttgtagtttattattgagtagtattttaatacgttttcgaataataggtttatggttttatcggtaacggttgaaagcgttagtattattaattattgatcgacgattagtttacgtagttgcgttcgttttgtttttagcgttttgaggatcgttattagatcgtagcgattgcgatagtaatgatttatcgttatcgttatcgttgttattgttagtagtaaggttagaagcgtcgaaagtagtaggaattgttgcgagcgttttatcgatcgttttagcgcgttttcgttttgttttagatcgtattagcgttgttcgggtttaagttgaggtaataattattttttatagtcgtcgagttggttttcgttgtcgtcgaatttataacgttaggtgattcgatttttcggttgtacggtttcggttttatcgatattcgttagatttattattagacgcggagttatttggaaggggttaaaatcggaattcggtttttgaattattttttcggtaattcgtaaggtggtatcgtttacgttaatggtgtcgttcgtttttaggttaagtagtgttattaggcgtggggttagtaatacgttgttcgtttgcggttttaggttagggggattagtttgtagatcgttatatatcgggtagatattatttatcgttttgacgttcgttagttgcggtgtgtcgtttgtaaaggttattgtggcgaaagttagttgtttgtcgatttttaggtcgcgtttttgcgttttttttagttacgtttgcggtatttcgcgtgaattgcgtaacgttcgatcgttcgttataaatttacggttttgttggtttaagtttttttttatgcgatcgttgatattgtttagcgttagtacgtaggttatcgttaggtttagcgttagttagataattaatagcgacggcgaacgttattcgcgttagaattaacgtgtaattatgtttttttttgtaattgttcgtttattagtcgtaagtagcggtcgtagcgtgtcgttagttgtaggtcgtgggttattataattaacgtggtgttatgtttacggttgaggaaaaatagtaggtcggtaattttatcgttcgtttggcggttaaggttgtcggtgggttcgtcggtaaatagtatattaggtcgattattaaaggttcgtgttagcgttattcgttgttgtttat

SEQ ID NO: 11896 - DNA, 1217 bp, Artificial Sequence
  chemically treated genomic DNA (Homo sapiens) CpG-island No: 11896
ataaacaacaacgaataacgctaacacgaacctttaataatcgacctaatatactatttaccgacgaacccaccgacaaccttaaccgccaaacgaacgataaaattaccgacctactatttttcctcaaccgtaaacataacaccacgttaattataataacccacgacctacaactaacgacacgctacgaccgctacttacgactaataaacgaacaattacaaaaaaaaacataattacacgttaattctaacgcgaataacgttcgccgtcgctattaattatctaactaacgctaaacctaacgataacctacgtactaacgctaaacaatatcaacgatcgcataaaaaaaaacttaaaccaacaaaaccgtaaatttataacgaacgatcgaacgttacgcaattcacgcgaaataccgcaaacgtaactaaaaaaaacgcaaaaacgcgacctaaaaatcgacaaacaactaactttcgccacaataacctttacaaacgacacaccgcaactaacgaacgtcaaaacgataaataatatctacccgatatataacgatctacaaactaatccccctaacctaaaaccgcaaacgaacaacgtattactaaccccacgcctaataacactacttaacctaaaaacgaacgacaccattaacgtaaacgataccaccttacgaattaccgaaaaaataattcaaaaaccgaattccgattttaaccccttccaaataactccgcgtctaataataaatctaacgaatatcgataaaaccgaaaccgtacaaccgaaaaatcgaatcacctaacgttataaattcgacgacaacgaaaaccaactcgacgactataaaaaataattattacctcaacttaaacccgaacaacgctaatacgatctaaaacaaaacgaaaacgcgctaaaacgatcgataaaacgctcgcaacaattcctactactttcgacgcttctaaccttactactaacaataacaacgataacgataacgataaatcattactatcgcaatcgctacgatctaataacgatcctcaaaacgctaaaaacaaaacgaacgcaactacgtaaactaatcgtcgatcaataattaataatactaacgctttcaaccgttaccgataaaaccataaacctattattcgaaaacgtattaaaatactactcaataataaactacaaacaac

SEQ ID NO: 11897 - DNA, 536 bp, Artificial Sequence
  chemically treated genomic DNA (Homo sapiens) CpG-island No: 11897
cggatagcgtattttcggtttttcgttaataaaagtatggcgtattttgtttattatcgttttcggttttaacgtaaagcgggcggcgatgtcgggattttcgattggtttattattttgcgtttggttgacgttgtcggtgaagcgagtacgaatgggatcgggttcgattaggttgattttaatttcgttgtggcgtagttttatgcgtagtgtatttgattacgtttttagcgtatatttattggtcgcgtaagcgttacgattcggcgtggagattaattttattatcgatgatgttattataatacgttttttatcgtgcggtaatatcgcgggtaataggcgtatggtgagttggtgtgcgtcgaaaaagttggcggaaaattgttgttttatttgcgtacggttgatggtggaaagggggttatatatgtcgaattcggtattgttaaagattttatatagataattatcggttagggcgattatttcgtcggttgcgcgattaatattttttggtgaatttagatcga

SEQ ID NO: 11898 - DNA, 536 bp, Artificial Sequence
  chemically treated genomic DNA (Homo sapiens) CpG-island No: 11898
tcgatctaaattcaccaaaaaatattaatcgcgcaaccgacgaaataatcgccctaaccgataattatctatataaaatctttaacaataccgaattcgacatatataaccccctttccaccatcaaccgtacgcaaataaaacaacaattttccgccaactttttcgacgcacaccaactcaccatacgcctattacccgcgatattaccgcacgataaaaaacgtattataataacatcatcgataataaaattaatctccacgccgaatcgtaacgcttacgcgaccaataaatatacgctaaaaacgtaatcaaatacactacgcataaaactacgccacaacgaaattaaaatcaacctaatcgaacccgatcccattcgtactcgcttcaccgacaacgtcaaccaaacgcaaaataataaaccaatcgaaaatcccgacatcgccgcccgctttacgttaaaaccgaaaacgataataaacaaaatacgccatacttttattaacgaaaaaccgaaaatacgctatccg

SEQ ID NO: 11899 - DNA, 536 bp, Artificial Sequence
  chemically treated genomic DNA (Homo sapiens) CpG-island No: 11899
tcgatttggatttattagaaagtgttgatcgcgtagtcgacgaggtgatcgttttgatcgataattgtttgtatgggatttttaataatgtcggattcggtatgtatggttttttttttattattagtcgtgcgtagatggaatagtagtttttcgttaattttttcggcgtatattagtttattatgcgtttgttattcgcgatgttatcgtacggtgaagggcgtattgtgatgatattatcggtgatgggattaatttttacgtcgggtcgtggcgtttacgcggttagtaaatatgcgttggaggcgtggttagatgtattgcgtatggagttgcgttatagcggaattaaagttagtttgatcgaattcggttttattcgtattcgttttatcgataacgttaattagacgtaaagtgataaattagtcgaaaatttcggtatcgtcgttcgttttacgttgggatcggaagcggtggtggataaagtacgttatgtttttattagcgagaagtcgaagatgcgttattcg

SEQ ID NO: 11900 - DNA, 536 bp, Artificial Sequence
  chemically treated genomic DNA (Homo sapiens) CpG-island No: 11900
cgaataacgcatcttcgacttctcgctaataaaaacataacgtactttatccaccaccgcttccgatcccaacgtaaaacgaacgacgataccgaaattttcgactaatttatcactttacgtctaattaacgttatcgataaaacgaatacgaataaaaccgaattcgatcaaactaactttaattccgctataacgcaactccatacgcaatacatctaaccacgcctccaacgcatatttactaaccgcgtaaacgccacgacccgacgtaaaaattaatcccatcaccgataatatcatcacaatacgcccttcaccgtacgataacatcgcgaataacaaacgcataataaactaatatacgccgaaaaaattaacgaaaaactactattccatctacgcacgactaataataaaaaaaaaaccatacataccgaatccgacattattaaaaatcccatacaaacaattatcgatcaaaacgatcacctcgtcgactacgcgatcaacactttctaataaatccaaatcga

SEQ ID NO: 11901 - DNA, 661 bp, Artificial Sequence
  chemically treated genomic DNA (Homo sapiens) CpG-island No: 11901
aatttcgcggtggtgattgttatttatgatttaggcgtcgttcgtttgttggcggatcgtttgttggtgatgaagtaggggtaagtggtggagagtgggttaatcgatcgcgtgttcgacgattcgtattattcgtatatatagttgttggtgttatcggttttgtagaattgagtcggtgtcggatgcggcgtaaacgttttattcggtttataaatgcgtttttcgtacgtcggataagacgcgttagcgtcgtatacgatattcgaattacgaggcgaataatgattaacgtataaaacgttagtaaaatttttattttgtattagtaaaacggcgtgcgtttgttcgtttttaatcgcgtttcgtttatcgttaacgcgggcgaatgcgtggtgttatacggttatttcggtagcggtaaattaattttgttacgttcgttgtacgttaattatttgttcgacgaaggttaaatttagattaaatacggtgacgaatgggtagatttggttatcgcgttagcgcgtaaagtggtggaaattcgtataattatcgttcgttgggtgagttagttttttgtcgttatttcgcgtattttagtattggaagggtgatgtaatcgttgttcgattacgcggttcgcgtggaattttgttcg

SEQ ID NO: 11902 - DNA, 661 bp, Artificial Sequence
  chemically treated genomic DNA (Homo sapiens) CpG-island No: 11902
cgaacaaaattccacgcgaaccgcgtaatcgaacaacgattacatcacccttccaatactaaaatacgcgaaataacgacaaaaaactaactcacccaacgaacgataattatacgaatttccaccactttacgcgctaacgcgataaccaaatctacccattcgtcaccgtatttaatctaaatttaaccttcgtcgaacaaataattaacgtacaacgaacgtaacaaaattaatttaccgctaccgaaataaccgtataacaccacgcattcgcccgcgttaacgataaacgaaacgcgattaaaaacgaacaaacgcacgccgttttactaatacaaaataaaaattttactaacgttttatacgttaatcattattcgcctcgtaattcgaatatcgtatacgacgctaacgcgtcttatccgacgtacgaaaaacgcatttataaaccgaataaaacgtttacgccgcatccgacaccgactcaattctacaaaaccgataacaccaacaactatatatacgaataatacgaatcgtcgaacacgcgatcgattaacccactctccaccacttacccctacttcatcaccaacaaacgatccgccaacaaacgaacgacgcctaaatcataaataacaatcaccaccgcgaaatt

SEQ ID NO: 11903 - DNA, 661 bp, Artificial Sequence
  chemically treated genomic DNA (Homo sapiens) CpG-island No: 11903
cgagtaaggttttacgcgaatcgcgtaatcgagtagcgattgtattatttttttagtgttgagatacgcgggatgacggtaagaaattggtttatttagcggacggtggttgtgcggatttttattattttgcgcgttggcgcggtgattaggtttatttattcgttatcgtgtttgatttggatttgattttcgtcgggtagatagttggcgtatagcgagcgtagtagagttgatttgtcgttgtcggaatggtcgtgtagtattacgtattcgttcgcgttgacggtgagcgaggcgcgattgaggacgggtaggcgtacgtcgttttgttggtgtaggatgaaggttttattgacgttttgtacgttaattattgttcgtttcgtggttcgggtgtcgtatgcgacgttgacgcgttttattcgacgtacggggagcgtatttgtaggtcggataaggcgtttacgtcgtattcggtatcggtttaattttgtaaaatcgatgatattagtagttgtgtatacggatgatgcgggtcgtcgagtacgcggtcggttaatttattttttattatttgtttttgttttattattagtaaacggttcgttagtaggcgggcgacgtttaaattatgggtgataattattatcgcgaggtt

SEQ ID NO: 11904 - DNA, 661 bp, Artificial Sequence
  chemically treated genomic DNA (Homo sapiens) CpG-island No: 11904
aacctcgcgataataattatcacccataatttaaacgtcgcccgcctactaacgaaccgtttactaataataaaacaaaaacaaataataaaaaataaattaaccgaccgcgtactcgacgacccgcatcatccgtatacacaactactaatatcatcgattttacaaaattaaaccgataccgaatacgacgtaaacgccttatccgacctacaaatacgctccccgtacgtcgaataaaacgcgtcaacgtcgcatacgacacccgaaccacgaaacgaacaataattaacgtacaaaacgtcaataaaaccttcatcctacaccaacaaaacgacgtacgcctacccgtcctcaatcgcgcctcgctcaccgtcaacgcgaacgaatacgtaatactacacgaccattccgacaacgacaaatcaactctactacgctcgctatacgccaactatctacccgacgaaaatcaaatccaaatcaaacacgataacgaataaataaacctaatcaccgcgccaacgcgcaaaataataaaaatccgcacaaccaccgtccgctaaataaaccaatttcttaccgtcatcccgcgtatctcaacactaaaaaaataatacaatcgctactcgattacgcgattcgcgtaaaaccttactcg

SEQ ID NO: 11905 - DNA, 704 bp, Artificial Sequence
  chemically treated genomic DNA (Homo sapiens) CpG-island No: 11905
cggtaaatgaggcggttttagggtcgcggcggagaggaggggggtttcgtttttacgtgtttgttttgttgtcggttcggcgcggtcggggttaattcggagcggaaggatttcgtagcgtgtgcgtagaattgtagagttatagtttttttttcgagagggcgggattttttcgtcgtttcgttttaatataaaatagggtcgtttttttttttttttttttttttcgagtggggtgtttcgggtaaaaggttttttcggatttagcgtcgaaggttttacgaatttttacgatcgttgtttagtttttgggttaggaaatagttttttcgtaggaattattttatcggtcgaataggaggcggagggggggaggcggagcggcgtcgcgttgtattattttttttttcggttgtaaatggttgtttcgttttttatttttcgtttagttttttgatttttcggtgtcgggagtcggggttgggttatgtatttttaggtcgtttgcgattatagttagtcgggggtcgagggggtgttatcgattagagtcggttaggtcgggggcggggtagttttcgaggttagaggggaagggaggcgagcgtagggtttggagcggtcggaggggagcgggtagagggttcgtatcgttcgtttttttttttttttcgtttatttagttttttttttttttcgggggg

SEQ ID NO: 11906 - DNA, 704 bp, Artificial Sequence
  chemically treated genomic DNA (Homo sapiens) CpG-island No: 11906
ccccccgaaaaaaaaaaaaaactaaataaacgaaaaaaaaaaaaaaacgaacgatacgaaccctctacccgctcccctccgaccgctccaaaccctacgctcgcctcccttcccctctaacctcgaaaactaccccgcccccgacctaaccgactctaatcgataacaccccctcgacccccgactaactataatcgcaaacgacctaaaaatacataacccaaccccgactcccgacaccgaaaaatcaaaaaactaaacgaaaaataaaaaacgaaacaaccatttacaaccgaaaaaaaaaataatacaacgcgacgccgctccgcctccccccctccgcctcctattcgaccgataaaataattcctacgaaaaaactatttcctaacccaaaaactaaacaacgatcgtaaaaattcgtaaaaccttcgacgctaaatccgaaaaaaccttttacccgaaacaccccactcgaaaaaaaaaaaaaaaaaaaaaaacgaccctattttatattaaaacgaaacgacgaaaaaatcccgccctctcgaaaaaaaaactataactctacaattctacgcacacgctacgaaatccttccgctccgaattaaccccgaccgcgccgaaccgacaacaaaacaaacacgtaaaaacgaaacccccctcctctccgccgcgaccctaaaaccgcctcatttaccg

SEQ ID NO: 11907 - DNA, 704 bp, Artificial Sequence
  chemically treated genomic DNA (Homo sapiens) CpG-island No: 11907
tttttcggggaagggaggaggttaggtaggcgaggaaaaggaaggggcgggcggtgcgagttttttgttcgttttttttcggtcgttttaggttttgcgttcgtttttttttttttttggtttcgggagttgtttcgttttcggtttggtcggttttggtcggtggtattttttcgattttcggttgattgtgatcgtaggcggtttagaggtgtatggtttaatttcggttttcggtatcggggggttaggaaattgagcggaaagtggggaacgaggtagttatttgtaatcggagaggaaagtagtgtagcgcggcgtcgtttcgttttttttttttcgttttttgttcggtcggtagggtggtttttgcgaaggggttattttttggtttaagagttgggtagcggtcgtgaagattcgtgaagttttcggcgttagattcgggggggttttttgttcggggtattttattcgagagggggagaaaggagaagaggcggttttattttgtgttggagcggagcggcggagggatttcgttttttcggaggaaaggttgtgattttgtagttttacgtatacgttgcgggattttttcgtttcgggttaatttcgatcgcgtcgggtcggtagtagggtagatacgtgggaacgaagtttttttttttttcgtcgcggttttggagtcgttttatttatcg

SEQ ID NO: 11908 - DNA, 704 bp, Artificial Sequence
  chemically treated genomic DNA (Homo sapiens) CpG-island No: 11908
cgataaataaaacgactccaaaaccgcgacgaaaaaaaaaaaaacttcgttcccacgtatctaccctactaccgacccgacgcgatcgaaattaacccgaaacgaaaaaatcccgcaacgtatacgtaaaactacaaaatcacaacctttcctccgaaaaaacgaaatccctccgccgctccgctccaacacaaaataaaaccgcctcttctcctttctccccctctcgaataaaataccccgaacaaaaaacccccccgaatctaacgccgaaaacttcacgaatcttcacgaccgctacccaactcttaaaccaaaaaataaccccttcgcaaaaaccaccctaccgaccgaacaaaaaacgaaaaaaaaaaaacgaaacgacgccgcgctacactactttcctctccgattacaaataactacctcgttccccactttccgctcaatttcctaaccccccgataccgaaaaccgaaattaaaccatacacctctaaaccgcctacgatcacaatcaaccgaaaatcgaaaaaataccaccgaccaaaaccgaccaaaccgaaaacgaaacaactcccgaaaccaaaaaaaaaaaaaaacgaacgcaaaacctaaaacgaccgaaaaaaaacgaacaaaaaactcgcaccgcccgccccttccttttcctcgcctacctaacctcctcccttccccgaaaaa

SEQ ID NO: 11909 - DNA, 994 bp, Artificial Sequence
  chemically treated genomic DNA (Homo sapiens) CpG-island No: 11909
gtcgcgatttagagcgtatgcgtaaagcgtagtggcggtttttcgtttaggagcggcgggaaggtaacggtcgcgcgtgcgcgtttttgtttttagttgttttttattttcgtttttcgcgtttaagaggaagtgagggttggaagagttcgcgcgcgcgtttatttaaggcggagtaagggtatgcgttggaaaggattgcggggattcgagggatcgtatttaggatatagttacgcgataaaagagagtttcggatacggcggagggtagttcgagttttttattttttttagagttcgagaagaaattttggcgtttttcgattttttcgggttttcgttatttatatatatcgaggttttattattttcgttttggtttttcgtttcgtttttcgttttttaaacggacggttttgaggttagtttttttcggttgtatatagggttttagcgtttcgtcggttcgtttttttttgtttttttgaaagtagtcgggagtcgtacggtttatttattatagtggttagggattaggaggcgaaggcgataggagtagatatcgggtttcgggtatcgttttcgataagttaagagtcgaggtaagtaacgtattagggcggggtcggcgttggagttttttaagtagcggttgcggaggggcgggcgggtataggcggtgtcgcggtcgttggtttttttttcggtttcgcgcgtttatttcgcgttcggtttggtcgtcgtagaggcgggtttcgagtttcgagtttttttttttcgcgcggtcgcggggtggggtttgtcgcgtttgcgggtaacgcgcgttagtattgtagtgtgcggcgtatggttgcgagggtttgtcgaggggcgggcgcgagtcggaaagatatcgattagggaatgggcgacgaggtttgttttaattcggaggaaatttaggatttgagagagttatataatttgaaagacgaagtatcgtgaaatgtaga

SEQ ID NO: 11910 - DNA, 994 bp, Artificial Sequence
  chemically treated genomic DNA (Homo sapiens) CpG-island No: 11910
tctacatttcacgatacttcgtctttcaaattatataactctctcaaatcctaaatttcctccgaattaaaacaaacctcgtcgcccattccctaatcgatatctttccgactcgcgcccgcccctcgacaaaccctcgcaaccatacgccgcacactacaatactaacgcgcgttacccgcaaacgcgacaaaccccaccccgcgaccgcgcgaaaaaaaaaaactcgaaactcgaaacccgcctctacgacgaccaaaccgaacgcgaaataaacgcgcgaaaccgaaaaaaaaaccaacgaccgcgacaccgcctatacccgcccgcccctccgcaaccgctacttaaaaaactccaacgccgaccccgccctaatacgttacttacctcgactcttaacttatcgaaaacgatacccgaaacccgatatctactcctatcgccttcgcctcctaatccctaaccactataataaataaaccgtacgactcccgactactttcaaaaaaacaaaaaaaaacgaaccgacgaaacgctaaaaccctatatacaaccgaaaaaaactaacctcaaaaccgtccgtttaaaaaacgaaaaacgaaacgaaaaaccaaaacgaaaataataaaacctcgatatatataaataacgaaaacccgaaaaaatcgaaaaacgccaaaatttcttctcgaactctaaaaaaaataaaaaactcgaactaccctccgccgtatccgaaactctcttttatcgcgtaactatatcctaaatacgatccctcgaatccccgcaatcctttccaacgcatacccttactccgccttaaataaacgcgcgcgcgaactcttccaaccctcacttcctcttaaacgcgaaaaacgaaaataaaaaacaactaaaaacaaaaacgcgcacgcgcgaccgttaccttcccgccgctcctaaacgaaaaaccgccactacgctttacgcatacgctctaaatcgcgac

SEQ ID NO: 11911 - DNA, 994 bp, Artificial Sequence
  chemically treated genomic DNA (Homo sapiens) CpG-island No: 11911
tttgtattttacggtgtttcgttttttaaattgtatggtttttttaagttttgggtttttttcgaattaaggtaagtttcgtcgtttattttttggtcggtgttttttcgattcgcgttcgtttttcggtaggttttcgtagttatgcgtcgtatattgtagtattggcgcgcgttgttcgtaggcgcggtagattttatttcgcggtcgcgcgaggggagggggttcggggttcggagttcgtttttgcggcggttaggtcgggcgcggagtgggcgcgcggggtcggaggaggggttagcgatcgcggtatcgtttgtgttcgttcgttttttcgtagtcgttatttaagaggttttagcgtcggtttcgttttagtgcgttatttatttcgatttttagtttgtcggggacggtattcgggattcggtgtttgtttttgtcgttttcgttttttaatttttagttattatggtgagtaagtcgtgcggttttcggttgtttttagggaagtagggaaaagcgagtcggcggggcgttggggttttgtatatagtcgggaagggttggttttagagtcgttcgtttggagggcggaaaacgaggcgagaggttagggcgggagtggtgagatttcggtgtgtgtaaatagcgggggttcggaaaggtcgaggggcgttaggattttttttcggattttggaagggatggggggttcgggttgtttttcgtcgtattcggagtttttttttgtcgcgtaattgtgttttgggtgcggtttttcgagttttcgtagttttttttagcgtatgtttttatttcgttttgggtggacgcgcgcgcggatttttttagtttttatttttttttgagcgcgaaaagcgggggtgggaagtagttggagataaaagcgcgtacgcgcgatcgttattttttcgtcgtttttgggcgggaaatcgttattgcgttttgcgtatgcgttttgggtcgcgat

SEQ ID NO: 11912 - DNA, 994 bp, Artificial Sequence
  chemically treated genomic DNA (Homo sapiens) CpG-island No: 11912
atcgcgacccaaaacgcatacgcaaaacgcaataacgatttcccgcccaaaaacgacgaaaaaataacgatcgcgcgtacgcgcttttatctccaactacttcccacccccgcttttcgcgctcaaaaaaaaataaaaactaaaaaaatccgcgcgcgcgtccacccaaaacgaaataaaaacatacgctaaaaaaaactacgaaaactcgaaaaaccgcacccaaaacacaattacgcgacaaaaaaaaactccgaatacgacgaaaaacaacccgaaccccccatcccttccaaaatccgaaaaaaaatcctaacgcccctcgacctttccgaacccccgctatttacacacaccgaaatctcaccactcccgccctaacctctcgcctcgttttccgccctccaaacgaacgactctaaaaccaacccttcccgactatatacaaaaccccaacgccccgccgactcgcttttccctacttccctaaaaacaaccgaaaaccgcacgacttactcaccataataactaaaaattaaaaaacgaaaacgacaaaaacaaacaccgaatcccgaataccgtccccgacaaactaaaaatcgaaataaataacgcactaaaacgaaaccgacgctaaaacctcttaaataacgactacgaaaaaacgaacgaacacaaacgataccgcgatcgctaacccctcctccgaccccgcgcgcccactccgcgcccgacctaaccgccgcaaaaacgaactccgaaccccgaaccccctcccctcgcgcgaccgcgaaataaaatctaccgcgcctacgaacaacgcgcgccaatactacaatatacgacgcataactacgaaaacctaccgaaaaacgaacgcgaatcgaaaaaacaccgaccaaaaaataaacgacgaaacttaccttaattcgaaaaaaacccaaaacttaaaaaaaccatacaatttaaaaaacgaaacaccgtaaaatacaaa

SEQ ID NO: 11913 - DNA, 520 bp, Artificial Sequence
  chemically treated genomic DNA (Homo sapiens) CpG-island No: 11913
ggcggagttcggcgcggcgcggtttagtagtttttcgggcgttcggttttttggcgttagacgtgttgtgttgtgattacgtgggtagtttcgggcgcggcgtttgttttggtttttttttaatttgtttacggtagtttcggggtgagcgatttttttgtattagttgtcgcgtttgtttatattttgatttcgttttcgggttttttgagttcgtagtttcgtaagtttttggggcgggtttttgttatgtcgttagttcgttataggaaggtggttattttcggatatcgttgtgtaggtgagtttttcgttttgtagagttcggacgcgtagtagttttgtagttagaagaggcgcgttgtcgtgggaacgcgatttagggaggaatgatgatatcgtaaggatggggttgtagagcgaggattggaagagtggaggaatggaagagtggaggattggaagagttggtggtgtgtggaggttgtaggaagcgggagtatttaagggttaatgcgga

SEQ ID NO: 11914 - DNA, 520 bp, Artificial Sequence
  chemically treated genomic DNA (Homo sapiens) CpG-island No: 11914
tccgcattaacccttaaatactcccgcttcctacaacctccacacaccaccaactcttccaatcctccactcttccattcctccactcttccaatcctcgctctacaaccccatccttacgatatcatcattcctccctaaatcgcgttcccacgacaacgcgcctcttctaactacaaaactactacgcgtccgaactctacaaaacgaaaaactcacctacacaacgatatccgaaaataaccaccttcctataacgaactaacgacataacaaaaacccgccccaaaaacttacgaaactacgaactcaaaaaacccgaaaacgaaatcaaaatataaacaaacgcgacaactaatacaaaaaaatcgctcaccccgaaactaccgtaaacaaattaaaaaaaaaccaaaacaaacgccgcgcccgaaactacccacgtaatcacaacacaacacgtctaacgccaaaaaaccgaacgcccgaaaaactactaaaccgcgccgcgccgaactccgcc

SEQ ID NO: 11915 - DNA, 520 bp, Artificial Sequence
  chemically treated genomic DNA (Homo sapiens) CpG-island No: 11915
ttcgtattaatttttaagtgttttcgttttttgtagtttttatatattattaatttttttaattttttatttttttatttttttatttttttaattttcgttttataattttatttttacgatgttattatttttttttgggtcgcgtttttacggtagcgcgttttttttggttataaagttgttgcgcgttcgagttttgtagggcgggagatttatttatatagcggtattcgaggatgattatttttttgtagcggattagcggtatggtaggagttcgttttaggggtttgcggaattgcgggtttagagagttcgaaaacgaggttagggtgtgagtaggcgcggtagttggtgtaggaaagtcgtttatttcgaagttgtcgtgggtaagttagaaggaaattaaaataagcgtcgcgttcggagttgtttacgtgattataatatagtacgtttaacgttagggagtcgggcgttcggggaattattgagtcgcgtcgcgtcgggtttcgtt

SEQ ID NO: 11916 - DNA, 520 bp, Artificial Sequence
  chemically treated genomic DNA (Homo sapiens) CpG-island No: 11916
aacgaaacccgacgcgacgcgactcaataattccccgaacgcccgactccctaacgttaaacgtactatattataatcacgtaaacaactccgaacgcgacgcttattttaatttccttctaacttacccacgacaacttcgaaataaacgactttcctacaccaactaccgcgcctactcacaccctaacctcgttttcgaactctctaaacccgcaattccgcaaacccctaaaacgaactcctaccataccgctaatccgctacaaaaaaataatcatcctcgaataccgctatataaataaatctcccgccctacaaaactcgaacgcgcaacaactttataaccaaaaaaaacgcgctaccgtaaaaacgcgacccaaaaaaaaataataacatcgtaaaaataaaattataaaacgaaaattaaaaaaataaaaaaataaaaaaataaaaaattaaaaaaattaataatatataaaaactacaaaaaacgaaaacacttaaaaattaatacgaa

SEQ ID NO: 11917 - DNA, 745 bp, Artificial Sequence
  chemically treated genomic DNA (Homo sapiens) CpG-island No: 11917
cgggcgtttcgaggtttttatgtttgggacgtttagtttagtagttttttcgttaagcggtagaggagtcgagagtattaatgtatgttagtcggttggacggtttcgtcggggagtagcgtttttagcgcgtgtagtagttttaagggggtaaaagcgcggtgcgtttattggtgattttttagaatcgcgtagtaagaggttaggatatcgtttattagtagcgtttcgtgcgcggtgagcggcgcgaatacgtttacggttttttttcgcgttatacgggttacgcgcgttggtcgaagcgtattttcgtcgggcgttagtatcgagtttttagcgcgtagtcggcgcgcgaatatcggtgtaaagtcgtttggcgcgggcgtcggttttcgagcggtaaatattaggtgttagggcgtgagtaatagtttgcgtggaggttattcggtttttatagttataaatgaagttcggcgttgtaagtttcggtttaggaagagtagtatcggcgtgggtattattcggtttgacgtatcggtcgttaaaatttagttttcgcggtgtagttttcgtagtttttttcgttcgtcgttttataggcgtatagttgtatttttcggaaagtagtcgttcgttcggatcgttagtgagttatttgtagggaataattatagggaggattgaattaagattagcggttttagaacgatttttaaggttagcgtagatatcgttagttatg

SEQ ID NO: 11918 - DNA, 745 bp, Artificial Sequence
  chemically treated genomic DNA (Homo sapiens) CpG-island No: 11918
cataactaacgatatctacgctaaccttaaaaatcgttctaaaaccgctaatcttaattcaatcctccctataattattccctacaaataactcactaacgatccgaacgaacgactactttccgaaaaatacaactatacgcctataaaacgacgaacgaaaaaaactacgaaaactacaccgcgaaaactaaattttaacgaccgatacgtcaaaccgaataatacccacgccgatactactcttcctaaaccgaaacttacaacgccgaacttcatttataactataaaaaccgaataacctccacgcaaactattactcacgccctaacacctaatatttaccgctcgaaaaccgacgcccgcgccaaacgactttacaccgatattcgcgcgccgactacgcgctaaaaactcgatactaacgcccgacgaaaatacgcttcgaccaacgcgcgtaacccgtataacgcgaaaaaaaaccgtaaacgtattcgcgccgctcaccgcgcacgaaacgctactaataaacgatatcctaacctcttactacgcgattctaaaaaatcaccaataaacgcaccgcgcttttacccccttaaaactactacacgcgctaaaaacgctactccccgacgaaaccgtccaaccgactaacatacattaatactctcgactcctctaccgcttaacgaaaaaactactaaactaaacgtcccaaacataaaaacctcgaaacgcccg

SEQ ID NO: 11919 - DNA, 745 bp, Artificial Sequence
  chemically treated genomic DNA (Homo sapiens) CpG-island No: 11919
tatgattggcgatatttgcgttggttttgagaatcgttttggaatcgttggttttgatttaattttttttgtggttgttttttgtagataatttattggcggttcgggcgggcggttgtttttcgggaaatgtaattgtgcgtttgtggagcggcgagcggaaagggttgcgggaattgtatcgcggagattgggttttggcggtcgatgcgttaggtcgggtggtgtttacgtcggtgttgttttttttggatcgggatttgtagcgtcgggttttatttgtggttgtggagatcgagtggtttttacgtaaattgttgtttacgttttggtatttggtgtttgtcgttcgagggtcggcgttcgcgttaggcgattttgtatcggtgttcgcgcgtcggttacgcgttggggattcggtgttggcgttcggcggggatgcgtttcggttagcgcgcgtggttcgtgtggcgcgggaggaagtcgtgggcgtgttcgcgtcgtttatcgcgtacgggacgttgttggtgaacgatgttttggttttttgttacgcggttttggagagttattagtgggcgtatcgcgtttttgtttttttgagattgttgtacgcgttaggggcgttgtttttcggcggggtcgtttagtcgattggtatgtattggtattttcggtttttttatcgtttagcggaggagttattgggttgagcgttttaggtatagaaatttcgaagcgttcg

SEQ ID NO: 11920 - DNA, 745 bp, Artificial Sequence
  chemically treated genomic DNA (Homo sapiens) CpG-island No: 11920
cgaacgcttcgaaatttctatacctaaaacgctcaacccaataactcctccgctaaacgataaaaaaaccgaaaataccaatacataccaatcgactaaacgaccccgccgaaaaacaacgcccctaacgcgtacaacaatctcaaaaaaacaaaaacgcgatacgcccactaataactctccaaaaccgcgtaacaaaaaaccaaaacatcgttcaccaacaacgtcccgtacgcgataaacgacgcgaacacgcccacgacttcctcccgcgccacacgaaccacgcgcgctaaccgaaacgcatccccgccgaacgccaacaccgaatccccaacgcgtaaccgacgcgcgaacaccgatacaaaatcgcctaacgcgaacgccgaccctcgaacgacaaacaccaaataccaaaacgtaaacaacaatttacgtaaaaaccactcgatctccacaaccacaaataaaacccgacgctacaaatcccgatccaaaaaaaacaacaccgacgtaaacaccacccgacctaacgcatcgaccgccaaaacccaatctccgcgatacaattcccgcaaccctttccgctcgccgctccacaaacgcacaattacatttcccgaaaaacaaccgcccgcccgaaccgccaataaattatctacaaaaaacaaccacaaaaaaaattaaatcaaaaccaacgattccaaaacgattctcaaaaccaacgcaaatatcgccaatcata

SEQ ID NO: 11921 - DNA, 722 bp, Artificial Sequence
  chemically treated genomic DNA (Homo sapiens) CpG-island No: 11921
  unsure (576, 691)
tagtttttatcgaaataattttatttttggtagattgattttcgcgtaaatttattttcgtagatgaatatatttttttattgcgtttttttcgcgtcgagaaaattttttgagtataattatttgtttatggtacgtcgttggtaattttttttcggggggtgtcgaattaaaaacgtttttttttacgtgcggtttttaatacgttaacgtattcgcgttttaatatttttcgtagcgtaataaatttataagagcgggttttttatatattttttttttacgtttagtagatttttttttatataattatatatagcggtcgcgcgatgattagtttatcgtgtttattacgagatttgtagttatcgtcgtagttacggttatgatagtatgattatttttacgagagttcgtttcgttataatgttattcgatgtcgttaacgattgtttatattcggacgattttcgtattatcgtacgatcgtattgtgtttttatattcgatatatttatttaaacgtttatttacgttcggttgtatcgttagtagcgcgtttattttacgtttgantacgtatcgattatatgatattttttattcgatgaaatgaaattttattttagttatttttttttattggttagtcgttcgttattacgtcgtcgtttttatttatttttttatntgttacgtttttattattatacgttattcgt

SEQ ID NO: 11922 - DNA, 722 bp, Artificial Sequence
  chemically treated genomic DNA (Homo sapiens) CpG-island No: 11922
  unsure (32, 147)
acgaataacgtataataataaaaacgtaacanataaaaaaataaataaaaacgacgacgtaataacgaacgactaaccaataaaaaaaaataactaaaataaaatttcatttcatcgaataaaaaatatcatataatcgatacgtantcaaacgtaaaataaacgcgctactaacgatacaaccgaacgtaaataaacgtttaaataaatatatcgaatataaaaacacaatacgatcgtacgataatacgaaaatcgtccgaatataaacaatcgttaacgacatcgaataacattataacgaaacgaactctcgtaaaaataatcatactatcataaccgtaactacgacgataactacaaatctcgtaataaacacgataaactaatcatcgcgcgaccgctatatataattatataaaaaaaaatctactaaacgtaaaaaaaaaatatataaaaaacccgctcttataaatttattacgctacgaaaaatattaaaacgcgaatacgttaacgtattaaaaaccgcacgtaaaaaaaaacgtttttaattcgacaccccccgaaaaaaaattaccaacgacgtaccataaacaaataattatactcaaaaaattttctcgacgcgaaaaaaacgcaataaaaaaatatattcatctacgaaaataaatttacgcgaaaatcaatctaccaaaaataaaattatttcgataaaaacta

SEQ ID NO: 11923 - DNA, 722 bp, Artificial Sequence
  chemically treated genomic DNA (Homo sapiens) CpG-island No: 11923
  unsure (32, 147)
acgggtggcgtgtgatgatggagacgtgatangtggagaggtggatagaggcgacgacgtgataacgagcggttagttagtggaggagagtgattgaggtgggattttattttatcgagtggagagtgttatatggtcgatacgtgnttagacgtggagtaagcgcgttgttaacgatatagtcgggcgtaggtgggcgtttagatgagtatgtcgagtgtgagagtatagtgcgatcgtacggtagtgcggagatcgttcgagtgtaagtagtcgttagcgatatcgagtagtattatgacgagacgggttttcgtggagatagttatgttgttataatcgtggttacggcggtagttgtagatttcgtgatgggtacgatgggttagttatcgcgcgatcgttgtatgtagttatgtaaagaggggtttgttgggcgtgaaagaggggtgtgtagaggattcgtttttgtgagtttgttacgttgcgagaggtgttgagacgcgagtgcgttggcgtgttgagggtcgtacgtaaaggggggcgtttttggttcggtatttttcgaggagggattgttagcgacgtattatgagtaggtagttgtgtttagagggttttttcggcgcggagagaacgtagtagagagatgtgtttatttgcggaaatggatttgcgcgagaattagtttgttaaaagtggggttgtttcggtaggaattg

SEQ ID NO: 11924 - DNA, 722 bp, Artificial Sequence
  chemically treated genomic DNA (Homo sapiens) CpG-island No: 11924
  unsure (576, 691)
caattcctaccgaaacaaccccacttttaacaaactaattctcgcgcaaatccatttccgcaaataaacacatctctctactacgttctctccgcgccgaaaaaaccctctaaacacaactacctactcataatacgtcgctaacaatccctcctcgaaaaataccgaaccaaaaacgcccccctttacgtacgaccctcaacacgccaacgcactcgcgtctcaacacctctcgcaacgtaacaaactcacaaaaacgaatcctctacacacccctctttcacgcccaacaaacccctctttacataactacatacaacgatcgcgcgataactaacccatcgtacccatcacgaaatctacaactaccgccgtaaccacgattataacaacataactatctccacgaaaacccgtctcgtcataatactactcgatatcgctaacgactacttacactcgaacgatctccgcactaccgtacgatcgcactatactctcacactcgacatactcatctaaacgcccacctacgcccgactatatcgttaacaacgcgcttactccacgtctaancacgtatcgaccatataacactctccactcgataaaataaaatcccacctcaatcactctcctccactaactaaccgctcgttatcacgtcgtcgcctctatccacctctccacntatcacgtctccatcatcacacgccacccgt

SEQ ID NO: 11925 - DNA, 507 bp, Artificial Sequence
  chemically treated genomic DNA (Homo sapiens) CpG-island No: 11925
  unsure (61)
gggggggcggggcgggcgggcgggcggtttcgtcgcgggggcggggcgtcgcgggcgtcgngggttcgtggcgcgggcgcggcgtttcggcgcgttcgcgcggggcgcgttttttttcggtcggcggtcgcgcgggcgtcggcgggggtcgggcgcgcgcggggggggggcgcggttcgtgtcgggttttcgtcggtggcgcgttttttcggtcgggcggtcgtcgttcgcggtttcgttcgcggttttttcgcggggcggcgtgtcgtcgtcgtttttttcggtcgcgcgcgcgggtttttcgcgggttcggttttgtgcgtttcggtcgttcggcgcgcggtcgcggcgcggtcggcgggtcggcgttgttttcgggggttgcgtgcggtttcggggttgtcggttgtcggcgcggttttttcgtgggtcgggtcgcgggggcgtcgcggtcggcgggtgcggttcgcgggttttgcgtcgcgcgcgcgggcgtcgatataagga

SEQ ID NO: 11926 - DNA, 507 bp, Artificial Sequence
  chemically treated genomic DNA (Homo sapiens) CpG-island No: 11926
  unsure (447)
tccttatatcgacgcccgcgcgcgcgacgcaaaacccgcgaaccgcacccgccgaccgcgacgcccccgcgacccgacccacgaaaaaaccgcgccgacaaccgacaaccccgaaaccgcacgcaacccccgaaaacaacgccgacccgccgaccgcgccgcgaccgcgcgccgaacgaccgaaacgcacaaaaccgaacccgcgaaaaacccgcgcgcgcgaccgaaaaaaacgacgacgacacgccgccccgcgaaaaaaccgcgaacgaaaccgcgaacgacgaccgcccgaccgaaaaaacgcgccaccgacgaaaacccgacacgaaccgcgccccccccccgcgcgcgcccgacccccgccgacgcccgcgcgaccgccgaccgaaaaaaaacgcgccccgcgcgaacgcgccgaaacgccgcgcccgcgccacgaacccncgacgcccgcgacgccccgcccccgcgacgaaaccgcccgcccgcccgccccgccccccc

SEQ ID NO: 11927 - DNA, 507 bp, Artificial Sequence
  chemically treated genomic DNA (Homo sapiens) CpG-island No: 11927
  unsure (447)
tttttgtgtcggcgttcgcgcgcgcggcgtagggttcgcgggtcgtattcgtcggtcgcggcgttttcgcggttcggtttacgggggagtcgcgtcggtagtcgatagtttcggggtcgtacgtagttttcgagggtagcgtcggttcgtcggtcgcgtcgcggtcgcgcgtcgggcggtcgaggcgtatagagtcggattcgcggagggttcgcgcgcgcggtcggggggggcggcggcggtacgtcgtttcgcgggggggtcgcgggcgggatcgcgggcggcggtcgttcggtcgggggagcgcgttatcgacggaggttcggtacggatcgcgtttttttttcgcgcgcgttcgattttcgtcggcgttcgcgcggtcgtcgatcgggggggggcgcgtttcgcgcgggcgcgtcggggcgtcgcgttcgcgttacgagtttncggcgttcgcggcgtttcgttttcgcggcggggtcgttcgttcgttcgtttcgttttttt

SEQ ID NO: 11928 - DNA, 507 bp, Artificial Sequence
  chemically treated genomic DNA (Homo sapiens) CpG-island No: 11928
  unsure (61)
aaaaaaacgaaacgaacgaacgaacgaccccgccgcgaaaacgaaacgccgcgaacgccgnaaactcgtaacgcgaacgcgacgccccgacgcgcccgcgcgaaacgcgcccccccccgatcgacgaccgcgcgaacgccgacgaaaatcgaacgcgcgcgaaaaaaaaacgcgatccgtaccgaacctccgtcgataacgcgctcccccgaccgaacgaccgccgcccgcgatcccgcccgcgacccccccgcgaaacgacgtaccgccgccgccccccccgaccgcgcgcgcgaaccctccgcgaatccgactctatacgcctcgaccgcccgacgcgcgaccgcgacgcgaccgacgaaccgacgctaccctcgaaaactacgtacgaccccgaaactatcgactaccgacgcgactcccccgtaaaccgaaccgcgaaaacgccgcgaccgacgaatacgacccgcgaaccctacgccgcgcgcgcgaacgccgacacaaaaa

SEQ ID NO: 11929 - DNA, 703 bp, Artificial Sequence
  chemically treated genomic DNA (Homo sapiens) CpG-island No: 11929
tttattaggtggcgatgttagcggcgggcgggtttggtcggattggtcgcgtcgtttttgtcgtgggtgtcgacggcggcgtcgggacgggcgtggggggtagggcgagttatatgattcgttcggttttttgggtttggttgttgtcgttcgtcggtgttcgttcgtgtcgcgtcggggtattaaggagtcgttggagggttcgggcggaggttcgttcgtgtggaagtcgtcgacgtcgtcgttcgttcgttttttcgttcgttttcgttttcggtcgttattatgttggcgtttatttttcgtttgttggattggtttcgttcgtttttttggaaggaagagatggagttgacgttcgtggggttgtagtattcgggtaagattattttcgttaatgttatcgcggtgagcgttcgtttatttattcgttcggggtttcgtagttaggagttcggttcggcgtttttttaaggtttgagttggggtttttttcggcgcgatgggattgatggcggggggcgtgcgaagttgggtttgttatttttcgagggttagtatttggaatttttcgcgtgttggcggcgcggggagtagtattgagatcggtagcggaagggttaagttagtgtagatattttttaagggttgtgtttttaacgtcgcgggggttcggaaagagttaaattgaattcgttatatt

SEQ ID NO: 11930 - DNA, 703 bp, Artificial Sequence
  chemically treated genomic DNA (Homo sapiens) CpG-island No: 11930
aatataacgaattcaatttaactctttccgaacccccgcgacgttaaaaacacaacccttaaaaaatatctacactaacttaacccttccgctaccgatctcaatactactccccgcgccgccaacacgcgaaaaattccaaatactaaccctcgaaaaataacaaacccaacttcgcacgccccccgccatcaatcccatcgcgccgaaaaaaaccccaactcaaaccttaaaaaaacgccgaaccgaactcctaactacgaaaccccgaacgaataaataaacgaacgctcaccgcgataacattaacgaaaataatcttacccgaatactacaaccccacgaacgtcaactccatctcttccttccaaaaaaacgaacgaaaccaatccaacaaacgaaaaataaacgccaacataataacgaccgaaaacgaaaacgaacgaaaaaacgaacgaacgacgacgtcgacgacttccacacgaacgaacctccgcccgaaccctccaacgactccttaataccccgacgcgacacgaacgaacaccgacgaacgacaacaaccaaacccaaaaaaccgaacgaatcatataactcgccctaccccccacgcccgtcccgacgccgccgtcgacacccacgacaaaaacgacgcgaccaatccgaccaaacccgcccgccgctaacatcgccacctaataaa

SEQ ID NO: 11931 - DNA, 703 bp, Artificial Sequence
  chemically treated genomic DNA (Homo sapiens) CpG-island No: 11931
aatgtgacgagtttaatttaatttttttcgagttttcgcggcgttgaggatatagtttttggaaaatgtttatattgatttaattttttcgttgtcgattttagtgttatttttcgcgtcgttaatacgcgggaaattttaaatgttggttttcgggagatgataggtttagtttcgtacgtttttcgttattagttttatcgcgtcgaggggggttttaatttaggttttggagaagcgtcgggtcggatttttggttgcggagtttcgggcgagtgagtgggcgggcgtttatcgcgatgatattgacgaaggtggttttgttcgagtattgtagttttacgagcgttagttttattttttttttttagaagagcgaacggaattagtttagtaggcgggagatgagcgttagtatgatggcggtcgggagcgagaacggacgggaggacggacgagcggcggcgtcgacgatttttatacgagcgggttttcgttcggattttttaacggttttttggtgtttcggcgcgatacgggcggatatcggcgggcggtagtagttagatttaggaagtcgagcggattatatgattcgttttattttttacgttcgtttcggcgtcgtcgtcggtatttacggtaagagcggcgcggttaattcggttaggttcgttcgtcgttggtatcgttatttggtggg

SEQ ID NO: 11932 - DNA, 703 bp, Artificial Sequence
  chemically treated genomic DNA (Homo sapiens) CpG-island No: 11932
cccaccaaataacgataccaacgacgaacgaacctaaccgaattaaccgcgccgctcttaccgtaaataccgacgacgacgccgaaacgaacgtaaaaaataaaacgaatcatataatccgctcgacttcctaaatctaactactaccgcccgccgatatccgcccgtatcgcgccgaaacaccaaaaaaccgttaaaaaatccgaacgaaaacccgctcgtataaaaatcgtcgacgccgccgctcgtccgtcctcccgtccgttctcgctcccgaccgccatcatactaacgctcatctcccgcctactaaactaattccgttcgctcttctaaaaaaaaaaaataaaactaacgctcgtaaaactacaatactcgaacaaaaccaccttcgtcaatatcatcgcgataaacgcccgcccactcactcgcccgaaactccgcaaccaaaaatccgacccgacgcttctccaaaacctaaattaaaacccccctcgacgcgataaaactaataacgaaaaacgtacgaaactaaacctatcatctcccgaaaaccaacatttaaaatttcccgcgtattaacgacgcgaaaaataacactaaaatcgacaacgaaaaaattaaatcaatataaacattttccaaaaactatatcctcaacgccgcgaaaactcgaaaaaaattaaattaaactcgtcacatt

SEQ ID NO: 11933 - DNA, 929 bp, Artificial Sequence
  chemically treated genomic DNA (Homo sapiens) CpG-island No: 11933
  unsure (484, 486, 489, 512, 576, 579, 584..)
tttattcgaatatacgaaaagcggattcgagcggggggtttaaggtttcgtatattcgttttcggtcgtttttttcgtttttattttataaaatgtcgacgtcgaggtcgttagtgaaaaagattttcgtcggtggttataattcgggttaggggaatttaggagttttagtttttcgttgggacggaaacggcggaatttaaaagtgatagtatgataggatttttagagtcgatagattagtttttagtaatttttatttttttaagtcggttcggttttttcggttttcggttttttattcgttcggtttcgttcggttttattcggtttcgttcggttttattttgtttcgttcggttttatttattttcgtttggtattattcgattcgcgtttcgtttttgttcggtttgtattcggttatttcggttgcgttttattttttcggttcgtttatttggttttattcgtttcgttgggntncgntttttcgttttgtttcgatcggntcgcgcgttcgttttttttgttaggtggaataacgcgggatgttttgttcgtttcgtcgggttncgngtggnnggtcgtttgttttatttggtttagttttcgtttcggttttagcgggttgcgtcgggtataggtcggttttatcgggtttgttttttttttttttttcggttatttacgaggttagttcgtgtatttgttttttttttatttattcgatagttttagggtagttcggttcgaaacgatttaggaggggttttgtaaagttttttattatcgtgggtatcgtttaggttgaggaacgaatttagtttcggggtattttgatttggcgacgcgtttcgggatttttatattatatttggatgttttggggtagttttcgtatatttgagtttttttatttgtaaaat

SEQ ID NO: 11934 - DNA, 929 bp, Artificial Sequence
  chemically treated genomic DNA (Homo sapiens) CpG-island No: 11934
  unsure (345..346, 351, 354, 418, 441, 444, 446)
attttacaaataaaaaaactcaaatatacgaaaactaccccaaaacatccaaatataatataaaaatcccgaaacgcgtcgccaaatcaaaataccccgaaactaaattcgttcctcaacctaaacgatacccacgataataaaaaactttacaaaacccctcctaaatcgtttcgaaccgaactaccctaaaactatcgaataaataaaaaaaaaacaaatacacgaactaacctcgtaaataaccgaaaaaaaaaaaaaaaacaaacccgataaaaccgacctatacccgacgcaacccgctaaaaccgaaacgaaaactaaaccaaataaaacaaacgaccnnccacncgnaacccgacgaaacgaacaaaacatcccgcgttattccacctaacaaaaaaaacgaacgcgcganccgatcgaaacaaaacgaaaaancgnancccaacgaaacgaataaaaccaaataaacgaaccgaaaaaataaaacgcaaccgaaataaccgaatacaaaccgaacaaaaacgaaacgcgaatcgaataataccaaacgaaaataaataaaaccgaacgaaacaaaataaaaccgaacgaaaccgaataaaaccgaacgaaaccgaacgaataaaaaaccgaaaaccgaaaaaaccgaaccgacttaaaaaaataaaaattactaaaaactaatctatcgactctaaaaatcctatcatactatcacttttaaattccgccgtttccgtcccaacgaaaaactaaaactcctaaattcccctaacccgaattataaccaccgacgaaaatctttttcactaacgacctcgacgtcgacattttataaaataaaaacgaaaaaaacgaccgaaaacgaatatacgaaaccttaaaccccccgctcgaatccgcttttcgtatattcgaataaa

SEQ ID NO: 11935 - DNA, 929 bp, Artificial Sequence
  chemically treated genomic DNA (Homo sapiens) CpG-island No: 11935
  unsure (345..346, 351, 354, 418, 441, 444, 446)
attttgtagatggggagatttagatgtgcgagggttattttagggtatttaggtgtgatgtgggggtttcgagacgcgtcgttaagttaagatatttcggagttaagttcgttttttagtttgagcggtgtttacgatgatggaagattttgtaagattttttttgggtcgtttcgaatcgagttgttttagagttgtcgggtaggtgagggggagataggtgtacgagttgatttcgtaggtgatcgaagaaggggagggaagtaggttcgatggagtcgatttgtattcgacgtaattcgttggggtcgaaacgggagttaagttagatggaataaacgattnnttatncgnagttcggcggggcgaataggatatttcgcgttgttttatttggtaaaaagggcgagcgcgcggntcgatcggagtagagcgagaggncgngntttaacggagcggatggggttaagtggacgagtcgagggagtggggcgtagtcgaagtagtcgagtgtaagtcgaatagagacgaggcgcgggtcgggtggtgttaagcggaaatgagtggggtcgagcggggtagggtggagtcgagcggagtcgggtggagtcgagcggagtcgagcgagtgagaagtcggaggtcgagagggtcgggtcgatttgaagaggtggggattgttgagggttggtttgtcggttttggaaattttgttatattgttatttttggatttcgtcgttttcgttttaacggaaaattggggtttttggatttttttgattcgagttgtaattatcgacgagaattttttttattggcggtttcggcgtcggtattttataaaatgagagcggggagggcggtcgaagacgagtgtgcggagttttaggtttttcgttcgggttcgtttttcgtatattcgggtagg

SEQ ID NO: 11936 - DNA, 929 bp, Artificial Sequence
  chemically treated genomic DNA (Homo sapiens) CpG-island No: 11936
  unsure (484, 486, 489, 512, 576, 579, 584..)
cctacccgaatatacgaaaaacgaacccgaacgaaaaacctaaaactccgcacactcgtcttcgaccgccctccccgctctcattttataaaataccgacgccgaaaccgccaataaaaaaaattctcgtcgataattacaactcgaatcaaaaaaatccaaaaaccccaattttccgttaaaacgaaaacgacgaaatccaaaaataacaatataacaaaatttccaaaaccgacaaaccaaccctcaacaatccccacctcttcaaatcgacccgaccctctcgacctccgacttctcactcgctcgactccgctcgactccacccgactccgctcgactccaccctaccccgctcgaccccactcatttccgcttaacaccacccgacccgcgcctcgtctctattcgacttacactcgactacttcgactacgccccactccctcgactcgtccacttaaccccatccgctccgttaaancncgncctctcgctctactccgatcganccgcgcgctcgccctttttaccaaataaaacaacgcgaaatatcctattcgccccgccgaactncgnataannaatcgtttattccatctaacttaactcccgtttcgaccccaacgaattacgtcgaatacaaatcgactccatcgaacctacttccctccccttcttcgatcacctacgaaatcaactcgtacacctatctccccctcacctacccgacaactctaaaacaactcgattcgaaacgacccaaaaaaaatcttacaaaatcttccatcatcgtaaacaccgctcaaactaaaaaacgaacttaactccgaaatatcttaacttaacgacgcgtctcgaaacccccacatcacacctaaataccctaaaataaccctcgcacatctaaatctccccatctacaaaat

SEQ ID NO: 11937 - DNA, 515 bp, Artificial Sequence
  chemically treated genomic DNA (Homo sapiens) CpG-island No: 11937
cggcgggagggcggttcgcgggcgggcggggcggttaggggaggttattttttgttgttttttttttttgtttttttcgttattcgtgtttttttttttcgtttttaattaaaaaggagataaagtcgtacgcggttcgagttaatcggttcgagttaatcggttttattggttttttggatgttgaatgtgcgcggggcggcggggcgcgggttaagatgaagattaaagtaggggaaaaaaaggaaagttatttagacgcgggcgaattaataatatttaaaatatatcggtaggttggcggtattggcgcgagtttcgtagtcgttttttcgtcgttggtcgggttggcggtttttggtcggttttgtacgtatttgttagcggtcgcggtcggataatttgcgaaattttcgttttagagacgtggattggggaagtgacggggtaggggggtagtagtgataaaatataaagggtttgttacgtatattttttcgtcgtagtttttgcgg

SEQ ID NO: 11938 - DNA, 515 bp, Artificial Sequence
  chemically treated genomic DNA (Homo sapiens) CpG-island No: 11938
ccgcaaaaactacgacgaaaaaatatacgtaacaaaccctttatattttatcactactacccccctaccccgtcacttccccaatccacgtctctaaaacgaaaatttcgcaaattatccgaccgcgaccgctaacaaatacgtacaaaaccgaccaaaaaccgccaacccgaccaacgacgaaaaaacgactacgaaactcgcgccaataccgccaacctaccgatatattttaaatattattaattcgcccgcgtctaaataactttcctttttttcccctactttaatcttcatcttaacccgcgccccgccgccccgcgcacattcaacatccaaaaaaccaataaaaccgattaactcgaaccgattaactcgaaccgcgtacgactttatctcctttttaattaaaaacgaaaaaaaaaaacacgaataacgaaaaaaacaaaaaaaaaaaacaacaaaaaataacctcccctaaccgccccgcccgcccgcgaaccgccctcccgccg

SEQ ID NO: 11939 - DNA, 515 bp, Artificial Sequence
  chemically treated genomic DNA (Homo sapiens) CpG-island No: 11939
tcgtaggggttgcggcgaggggatgtgcgtggtagattttttgtgttttgttattattatttttttatttcgttatttttttagtttacgtttttggagcggggatttcgtaagttgttcggtcgcggtcgttagtaggtgcgtgtagagtcgattaggggtcgttagttcgattagcggcggagaggcggttgcggggttcgcgttagtatcgttagtttgtcggtgtgttttaagtgttattgattcgttcgcgtttgggtggttttttttttttttttttgttttaatttttattttggttcgcgtttcgtcgtttcgcgtatatttagtatttaggaagttagtagggtcgattggttcgagtcgattgattcgggtcgcgtgcggttttattttttttttaattagaaacggggaggagggatacgggtggcgggggagatagaaagggaaaatagtagaaaataattttttttggtcgtttcgttcgttcgcgggtcgttttttcgtcg

SEQ ID NO: 11940 - DNA, 515 bp, Artificial Sequence
  chemically treated genomic DNA (Homo sapiens) CpG-island No: 11940
cgacgaaaaaacgacccgcgaacgaacgaaacgaccaaaaaaaattattttctactattttccctttctatctcccccgccacccgtatccctcctccccgtttctaattaaaaaaaaaataaaaccgcacgcgacccgaatcaatcgactcgaaccaatcgaccctactaacttcctaaatactaaatatacgcgaaacgacgaaacgcgaaccaaaataaaaattaaaacaaaaaaaaaaaaaaaaaaccacccaaacgcgaacgaatcaataacacttaaaacacaccgacaaactaacgatactaacgcgaaccccgcaaccgcctctccgccgctaatcgaactaacgacccctaatcgactctacacgcacctactaacgaccgcgaccgaacaacttacgaaatccccgctccaaaaacgtaaactaaaaaaataacgaaataaaaaaataataataacaaaacacaaaaaatctaccacgcacatcccctcgccgcaacccctacga

SEQ ID NO: 11941 - DNA, 752 bp, Artificial Sequence
  chemically treated genomic DNA (Homo sapiens) CpG-island No: 11941
ttatttacggtcgtgatcgtgattttggtcggtcgttgtggttggggtcggttaagtcgaatatcggttatacgtaagcggcggcgggtgtggttggtgtgattaagatggtgatggcgatgcggtacgggtagttgttacgtacgttgtacgtggaatcgtcgtcgtcggaggtggattggtcggcggggacggtttaattttttacggagaatacgttttggtttaggagtggtcgtgttcgtcgggtgggggtgtcgtcgttcgggattagtggtattaacgcgtacgttattttcgaatagttttcgggagtgtcgagttagtttgcggggtcgggttcgggttttgtcgtggatgtttcggtggtgtcgtggatggtgtcgggtaaaatattcgaagcgttattcgcgtaggtaacggcgttgatgatttatttggacgagcgatttgatgttttttcgttggatgttgggtattcgttggcgttgatacgggtcggcgttggatgagcgaacggtggtgttggggtcggatcgtgaaacgtttgttgggcggcgtgaaagcgtttgtttgtcggttatgaggtttttggggttggtgatcggattttgggggggttggggggtcgatcgggtttgtgttttttcgtttcggtggtttaatgttgggggttggtcggggggtttttcggggtttttcgggggttcgttggtgtttttggcgaagttgggtttaattggaagttaata

SEQ ID NO: 11942 - DNA, 752 bp, Artificial Sequence
  chemically treated genomic DNA (Homo sapiens) CpG-island No: 11942
tattaacttccaattaaacccaacttcgccaaaaacaccaacgaacccccgaaaaaccccgaaaaaccccccgaccaacccccaacattaaaccaccgaaacgaaaaaacacaaacccgatcgaccccccaacccccccaaaatccgatcaccaaccccaaaaacctcataaccgacaaacaaacgctttcacgccgcccaacaaacgtttcacgatccgaccccaacaccaccgttcgctcatccaacgccgacccgtatcaacgccaacgaatacccaacatccaacgaaaaaacatcaaatcgctcgtccaaataaatcatcaacgccgttacctacgcgaataacgcttcgaatattttacccgacaccatccacgacaccaccgaaacatccacgacaaaacccgaacccgaccccgcaaactaactcgacactcccgaaaactattcgaaaataacgtacgcgttaataccactaatcccgaacgacgacacccccacccgacgaacacgaccactcctaaaccaaaacgtattctccgtaaaaaattaaaccgtccccgccgaccaatccacctccgacgacgacgattccacgtacaacgtacgtaacaactacccgtaccgcatcgccatcaccatcttaatcacaccaaccacacccgccgccgcttacgtataaccgatattcgacttaaccgaccccaaccacaacgaccgaccaaaatcacgatcacgaccgtaaataa

SEQ ID NO: 11943 - DNA, 752 bp, Artificial Sequence
  chemically treated genomic DNA (Homo sapiens) CpG-island No: 11943
tattggtttttagttgggtttaatttcgttaaaggtattaacgaattttcggaaagtttcggaaaatttttcggttaatttttagtattgaattatcgggacggagaagtataaattcgatcggttttttagtttttttaagattcggttattaattttagaagttttatgatcggtaggtaagcgtttttacgtcgtttaatagacgttttacggttcgattttagtattatcgttcgtttatttagcgtcgattcgtgttaacgttagcgagtatttaatatttagcgaggagatattaggtcgttcgtttagataggttattaacgtcgttgtttgcgcggatagcgtttcgggtgttttgttcgatattatttacggtattatcggaatatttacgatagaattcgaattcggtttcgtagattgattcggtattttcgggggttgttcgaggatgacgtgcgcgttagtattattgatttcgaacgacgatatttttattcgacgaatacgattatttttgggttagggcgtgtttttcgtaaggagttgaatcgttttcgtcgattaatttattttcggcgacggcgattttacgtgtaacgtgcgtggtagttgttcgtgtcgtatcgttattattattttgattatattagttatattcgtcgtcgtttgcgtatgatcgatgttcgatttgatcgattttaattataacggtcggttaggattacgattacggtcgtaggtgg

SEQ ID NO: 11944 - DNA, 752 bp, Artificial Sequence
  chemically treated genomic DNA (Homo sapiens) CpG-island No: 11944
ccacctacgaccgtaatcgtaatcctaaccgaccgttataattaaaatcgatcaaatcgaacatcgatcatacgcaaacgacgacgaatataactaatataatcaaaataataataacgatacgacacgaacaactaccacgcacgttacacgtaaaatcgccgtcgccgaaaataaattaatcgacgaaaacgattcaactccttacgaaaaacacgccctaacccaaaaataatcgtattcgtcgaataaaaatatcgtcgttcgaaatcaataatactaacgcgcacgtcatcctcgaacaacccccgaaaataccgaatcaatctacgaaaccgaattcgaattctatcgtaaatattccgataataccgtaaataatatcgaacaaaacacccgaaacgctatccgcgcaaacaacgacgttaataacctatctaaacgaacgacctaatatctcctcgctaaatattaaatactcgctaacgttaacacgaatcgacgctaaataaacgaacgataatactaaaatcgaaccgtaaaacgtctattaaacgacgtaaaaacgcttacctaccgatcataaaacttctaaaattaataaccgaatcttaaaaaaactaaaaaaccgatcgaatttatacttctccgtcccgataattcaatactaaaaattaaccgaaaaattttccgaaactttccgaaaattcgttaatacctttaacgaaattaaacccaactaaaaaccaata

SEQ ID NO: 11945 - DNA, 522 bp, Artificial Sequence
  chemically treated genomic DNA (Homo sapiens) CpG-island No: 11945
ttgagttcgcgggggaattttttatttttttttcgattaggcgcgggtttcgtggggtttttattttgtcgatttcggttttattcgtttttcgttcgttcgtttaaggtttttcgggttcgtcgtttgcggttcgtttttttttcgtcgtcgggttatttcgggataggcgttttattttcgtttttttcgcggcgggagtttaaggttttagcggttgcggcggcggagtttcgtgttagtgtcgggttttgaattttcgcgcgatattgggatttatttttaatttttaattttcgcgtttcggtttcgggttttcggcgatcggcggtcgcgattacggtggattcggggttcggtgaagtttttggttgtgtttcgggtggtcgagtaaagggcgttacggtgaggagacggacggtcggcgtttacggtttggaggggttgttttaggttgtaggattgagattcgagttgttcgttcgggttttatattttcggtgttttttgttttgaagtttt

SEQ ID NO: 11946 - DNA, 522 bp, Artificial Sequence
  chemically treated genomic DNA (Homo sapiens) CpG-island No: 11946
aaaacttcaaaacaaaaaacaccgaaaatataaaacccgaacgaacaactcgaatctcaatcctacaacctaaaacaacccctccaaaccgtaaacgccgaccgtccgtctcctcaccgtaacgccctttactcgaccacccgaaacacaaccaaaaacttcaccgaaccccgaatccaccgtaatcgcgaccgccgatcgccgaaaacccgaaaccgaaacgcgaaaattaaaaattaaaaataaatcccaatatcgcgcgaaaattcaaaacccgacactaacacgaaactccgccgccgcaaccgctaaaaccttaaactcccgccgcgaaaaaaacgaaaataaaacgcctatcccgaaataacccgacgacgaaaaaaaaacgaaccgcaaacgacgaacccgaaaaaccttaaacgaacgaacgaaaaacgaataaaaccgaaatcgacaaaataaaaaccccacgaaacccgcgcctaatcgaaaaaaaaataaaaaattcccccgcgaactcaa

SEQ ID NO: 11947 - DNA, 522 bp, Artificial Sequence
  chemically treated genomic DNA (Homo sapiens) CpG-island No: 11947
ggagttttagagtaagaaatatcgaaggtgtaaagttcgagcgagtagttcgagttttagttttgtagtttaaggtagtttttttaagtcgtgggcgtcggtcgttcgtttttttatcgtggcgttttttattcggttattcggggtatagttaggggttttatcgagtttcgggtttatcgtggtcgcggtcgtcggtcgtcgggagttcggagtcgggacgcgagggttgggggttggggatgggttttagtgtcgcgcgggagtttaaagttcggtattggtacggggtttcgtcgtcgtagtcgttggagttttgggttttcgtcgcggggagagcgggggtagggcgtttgtttcggagtgattcggcggcggaggaagggcgggtcgtaggcggcgggttcgggggattttgagcgggcgggcgaggagcgggtgagatcgaggtcgatagagtgggggttttacgaggttcgcgtttggtcgggaagagagtaggagattttttcgcgagtttag

SEQ ID NO: 11948 - DNA, 522 bp, Artificial Sequence
  chemically treated genomic DNA (Homo sapiens) CpG-island No: 11948
ctaaactcgcgaaaaaatctcctactctcttcccgaccaaacgcgaacctcgtaaaacccccactctatcgacctcgatctcacccgctcctcgcccgcccgctcaaaatcccccgaacccgccgcctacgacccgcccttcctccgccgccgaatcactccgaaacaaacgccctacccccgctctccccgcgacgaaaacccaaaactccaacgactacgacgacgaaaccccgtaccaataccgaactttaaactcccgcgcgacactaaaacccatccccaacccccaaccctcgcgtcccgactccgaactcccgacgaccgacgaccgcgaccacgataaacccgaaactcgataaaacccctaactataccccgaataaccgaataaaaaacgccacgataaaaaaacgaacgaccgacgcccacgacttaaaaaaactaccttaaactacaaaactaaaactcgaactactcgctcgaactttacaccttcgatatttcttactctaaaactcc

SEQ ID NO: 11949 - DNA, 669 bp, Artificial Sequence
  chemically treated genomic DNA (Homo sapiens) CpG-island No: 11949
gttgtatacgtttgattcggttatttgtttattcgattattaagcgaaatatcgtatcgagcgagtacgtattcggatggaagtcggttttgtcgattaggatgatttggacgaagagtattaggggttttcgttagtcgaattgttcgttaggtttaaggcgcgtatgttcgacggcgaggatttcgtcgtgatttatggcgatgtttgtttgtcgaatattatggtggaaaatggtcgtttttttggatttatcgattgtggtcggttgggtgtggcggatcgttattaggatatagcgtttggttattcgtgatattgttgaagagtttggcggcgaaatggttgatcgttttttcgggttttacggtatcgtcgttttcgattcgtagcgtatcgttttttattttttttttgacgagtttttttgagcggaattttgggggtcgaaatgatcgattaagcgacgtttaattttgtattacgagatttcgattttatcgtcgttttttatgaaagggtggggtttcggaattcggtttttcgggatcgtcggttggatgaatttttttagcgcggggaatttaatggttggaagtttttcgtttatttcgggtttcgattttttcgggaggtgggttaagttggttgtttgaggtttaattattt

SEQ ID NO: 11950 - DNA, 669 bp, Artificial Sequence
  chemically treated genomic DNA (Homo sapiens) CpG-island No: 11950
aaataattaaacctcaaacaaccaacttaacccacctcccgaaaaaatcgaaacccgaaataaacgaaaaacttccaaccattaaattccccgcgctaaaaaaattcatccaaccgacgatcccgaaaaaccgaattccgaaaccccaccctttcataaaaaacgacgataaaatcgaaatctcgtaatacaaaattaaacgtcgcttaatcgatcatttcgacccccaaaattccgctcaaaaaaactcgtcaaaaaaaaaataaaaaacgatacgctacgaatcgaaaacgacgataccgtaaaacccgaaaaaacgatcaaccatttcgccgccaaactcttcaacaatatcacgaataaccaaacgctatatcctaataacgatccgccacacccaaccgaccacaatcgataaatccaaaaaaacgaccattttccaccataatattcgacaaacaaacatcgccataaatcacgacgaaatcctcgccgtcgaacatacgcgccttaaacctaacgaacaattcgactaacgaaaacccctaatactcttcgtccaaatcatcctaatcgacaaaaccgacttccatccgaatacgtactcgctcgatacgatatttcgcttaataatcgaataaacaaataaccgaatcaaacgtatacaac

SEQ ID NO: 11951 - DNA, 669 bp, Artificial Sequence
  chemically treated genomic DNA (Homo sapiens) CpG-island No: 11951
gggtggttaagttttaggtagttagtttaatttatttttcgagggggtcgaagttcggggtgggcgaaaaatttttagttattagatttttcgcgttgggaggatttatttagtcggcggtttcggaaaatcgaatttcggagttttatttttttatagaaggcggcggtggaatcgaaatttcgtgatgtaaggttgggcgtcgtttggtcggttatttcgatttttagagtttcgtttagaagaattcgttaagaagggggtagaaggcgatgcgttgcgaatcgggagcggcgatatcgtaaagttcgaggaagcggttaattatttcgtcgttaagttttttagtaatattacgggtagttaaacgttatgttttgatagcggttcgttatatttagtcggttatagtcgatgaatttagaaaagcggttattttttattatgatattcggtaagtaggtatcgttatgggttacgacgagattttcgtcgtcgggtatgcgcgttttgagtttggcgaatagttcggttggcgagagtttttgatgtttttcgtttagattattttgatcgataagatcggtttttattcgagtacgtgttcgttcgatgcgatgtttcgtttggtggtcgaatgggtaggtagtcggattaagcgtatgtagt

SEQ ID NO: 11952 - DNA, 669 bp, Artificial Sequence
  chemically treated genomic DNA (Homo sapiens) CpG-island No: 11952
actacatacgcttaatccgactacctacccattcgaccaccaaacgaaacatcgcatcgaacgaacacgtactcgaataaaaaccgatcttatcgatcaaaataatctaaacgaaaaacatcaaaaactctcgccaaccgaactattcgccaaactcaaaacgcgcatacccgacgacgaaaatctcgtcgtaacccataacgatacctacttaccgaatatcataataaaaaataaccgcttttctaaattcatcgactataaccgactaaatataacgaaccgctatcaaaacataacgtttaactacccgtaatattactaaaaaacttaacgacgaaataattaaccgcttcctcgaactttacgatatcgccgctcccgattcgcaacgcatcgccttctacccccttcttaacgaattcttctaaacgaaactctaaaaatcgaaataaccgaccaaacgacgcccaaccttacatcacgaaatttcgattccaccgccgccttctataaaaaaataaaactccgaaattcgattttccgaaaccgccgactaaataaatcctcccaacgcgaaaaatctaataactaaaaatttttcgcccaccccgaacttcgaccccctcgaaaaataaattaaactaactacctaaaacttaaccaccc

SEQ ID NO: 11953 - DNA, 511 bp, Artificial Sequence
  chemically treated genomic DNA (Homo sapiens) CpG-island No: 11953
  unsure (68, 83..84, 103, 252..253, 323..324, 349, 385)
ttttttcgcgtgggcgtcgggcgggtttttttttttgttgggtgtttttggcgttcgtttcgttgcgngttttttcggcgcgnnttttttttgttgttcgcgngtggggcgtttttttttgggtcgttggtcgtttttttttttgggggggttttttttttttggttcgtggttgggtttttttcgtttgtggcgtttcgtcgtttttcggtgtgcggcgtgggcgtttcgtttttttcgttggtcgcggtnnggtcgtcggtttttttttttgttttttttttttttttgggcgggtcgggggttcgtcgttcgttggttgnngtttttttttttttttttttttttntttttttcgtttgtgtggtcgtttttttcgttcgtntttttcgggtcgtttttttttcgggggggggttttttgttttttggtgttgttcggtcgtttttcgtttgtttttcgtcgcgtcggcgcgttttttttttcgtttttcgtttttttttttttttcg

SEQ ID NO: 11954 - DNA, 511 bp, Artificial Sequence
  chemically treated genomic DNA (Homo sapiens) CpG-island No: 11954
  unsure (127, 163, 188..189, 259..260, 409, 428..429, 444)
cgaaaaaaaaaaaaaaacgaaaaacgaaaaaaaaaacgcgccgacgcgacgaaaaacaaacgaaaaacgaccgaacaacaccaaaaaacaaaaaacccccccccgaaaaaaaaacgacccgaaaaanacgaacgaaaaaaacgaccacacaaacgaaaaaaanaaaaaaaaaaaaaaaaaaaaaaacnncaaccaacgaacgacgaacccccgacccgcccaaaaaaaaaaaaaaaacaaaaaaaaaaaccgacgaccnnaccgcgaccaacgaaaaaaacgaaacgcccacgccgcacaccgaaaaacgacgaaacgccacaaacgaaaaaaacccaaccacgaaccaaaaaaaaaaaacccccccaaaaaaaaaaacgaccaacgacccaaaaaaaaacgccccacncgcgaacaacaaaaaaaanncgcgccgaaaaaacncgcaacgaaacgaacgccaaaaacacccaacaaaaaaaaaaacccgcccgacgcccacgcgaaaaaa

SEQ ID NO: 11955 - DNA, 511 bp, Artificial Sequence
  chemically treated genomic DNA (Homo sapiens) CpG-island No: 11955
  unsure (127, 163, 188..189, 259..260, 409, 428..429, 444)
cgaagagaaaaaagaagcggggggcgaaaaagggggcgcgtcgacgcggcgaggaataaacgagaaacgatcgagtaatattagaagataagagattttttttcgaagaagaggcgattcggggagnacgaacggggggggcggttatataaacgagggaggngggagaaggaggggagaaagggatnntagttagcgggcggcggattttcggttcgtttaaaagaaggaggagagtagggggagaggtcggcggttnngtcgcggttaacggggaaggcggagcgtttacgtcgtatatcggggggcggcgaagcgttataaacggagggggtttagttacggattaaagaagggggatttttttaagaggaaaaacggttagcggtttagagaagagcgttttatncgcgaataataaagagggnncgcgtcgggaaaatncgtaacggggcgagcgttaggggtatttaatagaaaggggagttcgttcggcgtttacgcgagggaa

SEQ ID NO: 11956 - DNA, 511 bp, Artificial Sequence
  chemically treated genomic DNA (Homo sapiens) CpG-island No: 11956
  unsure (68, 83..84, 103, 252..253, 323..324, 349, 385)
ttccctcgcgtaaacgccgaacgaactcccctttctattaaatacccctaacgctcgccccgttacgnattttcccgacgcgnnccctctttattattcgcgnataaaacgctcttctctaaaccgctaaccgtttttcctcttaaaaaaatcccccttctttaatccgtaactaaaccccctccgtttataacgcttcgccgccccccgatatacgacgtaaacgctccgccttccccgttaaccgcgacnnaaccgccgacctctccccctactctcctccttcttttaaacgaaccgaaaatccgccgcccgctaactannatccctttctcccctccttctcccncctccctcgtttatataaccgccccccccgttcgtnctccccgaatcgcctcttcttcgaaaaaaaatctcttatcttctaatattactcgatcgtttctcgtttattcctcgccgcgtcgacgcgccccctttttcgccccccgcttcttttttctcttcg

SEQ ID NO: 11957 - DNA, 788 bp, Artificial Sequence
  chemically treated genomic DNA (Homo sapiens) CpG-island No: 11957
tttttagtacgtttttttttagcgttttgtagtcgttattttttagtatttttttagtataagaggggtcgtcgtttggttcggttttttcgtttttagtcgcgcgggtcgggggtagtagtagtagtttcgcgtcgttttcgttttagcggtttttacggtcgtttgttcggagcgcgtagaggaggttaatacgtaggaggtagagcggcggcggcggttttgggtttcggtagagggatagtcgcgttttgatgcgttataaggtttcggagtttcgagttgtcgggtttttgtcgtttttttgcgagcgtttattgaagggtattggtcgggttttttcgcggcgtttttgaatgggttattttttttattttcgagtgatatttagcggaaaaggcggtttttggcgttcgtatcgcgggggaaagtttagttttaagaggcgttcggtagtcggcgtacgttttattaatttggggtttttttaaagttcgttgcgtttacgttttttagcgttttttgtttcgtttttcgtcgtttatttgttttcgcgttcgtttttttggaaggcgattcggattcgagtttcggaaattttttttttttatttagggcgatcgtttaaggagttttggttgtttgattattgtcgacgtttatagggcgttgcgaggttatttttcgcgtttcgttttttttcggttcgcgggattttttgttaatagttttagaaagtgaggacgggggggcggaggcgggggtagtttttaggtagtgttgttttt

SEQ ID NO: 11958 - DNA, 788 bp, Artificial Sequence
  chemically treated genomic DNA (Homo sapiens) CpG-island No: 11958
aaaaacaacactacctaaaaactacccccgcctccgcccccccgtcctcactttctaaaactattaacaaaaaatcccgcgaaccgaaaaaaaacgaaacgcgaaaaataacctcgcaacgccctataaacgtcgacaataatcaaacaaccaaaactccttaaacgatcgccctaaataaaaaaaaaaaatttccgaaactcgaatccgaatcgccttccaaaaaaacgaacgcgaaaacaaataaacgacgaaaaacgaaacaaaaaacgctaaaaaacgtaaacgcaacgaactttaaaaaaaccccaaattaataaaacgtacgccgactaccgaacgcctcttaaaactaaactttcccccgcgatacgaacgccaaaaaccgccttttccgctaaatatcactcgaaaataaaaaaaataacccattcaaaaacgccgcgaaaaaacccgaccaatacccttcaataaacgctcgcaaaaaaacgacaaaaacccgacaactcgaaactccgaaaccttataacgcatcaaaacgcgactatccctctaccgaaacccaaaaccgccgccgccgctctacctcctacgtattaacctcctctacgcgctccgaacaaacgaccgtaaaaaccgctaaaacgaaaacgacgcgaaactactactactacccccgacccgcgcgactaaaaacgaaaaaaccgaaccaaacgacgacccctcttatactaaaaaaatactaaaaaataacgactacaaaacgctaaaaaaaaacgtactaaaaa

SEQ ID NO: 11959 - DNA, 788 bp, Artificial Sequence
  chemically treated genomic DNA (Homo sapiens) CpG-island No: 11959
agaggtagtattgtttggaggttgttttcgttttcgttttttcgtttttattttttgaggttgttagtagagagtttcgcgggtcggggagaagcgggacgcgggggatggtttcgtagcgttttgtgagcgtcggtagtagttaggtagttagggttttttgggcgatcgttttgggtagaggagaggagttttcggggttcgggttcgggtcgttttttaggggaacgagcgcggaagtaagtgggcggcgagaggcggagtaagagacgttggagggcgtggacgtagcgggttttggaaaggttttaagttaatgaggcgtgcgtcggttgtcgagcgttttttggagttgggttttttttcgcggtgcgggcgttaggagtcgtttttttcgttgggtgttattcgggggtggggaagatggtttatttaaaagcgtcgcgagggggttcggttagtgttttttagtgagcgttcgtaagaggacggtagaggttcggtagttcggagtttcgggattttgtggcgtattaggacgcggttgtttttttgtcgggatttagagtcgtcgtcgtcgttttgttttttgcgtgttagttttttttgcgcgtttcgggtaggcggtcgtgggagtcgttggggcgaggacggcgcgaggttgttgttgttgttttcggttcgcgcggttggaaacggagaggtcgagttaagcggcggttttttttatgttgggaggatgttggagagtagcggttgtaaagcgttgaaggagggcgtgttggaga

SEQ ID NO: 11960 - DNA, 788 bp, Artificial Sequence
  chemically treated genomic DNA (Homo sapiens) CpG-island No: 11960
tctccaacacgccctccttcaacgctttacaaccgctactctccaacatcctcccaacataaaaaaaaccgccgcttaactcgacctctccgtttccaaccgcgcgaaccgaaaacaacaacaacaacctcgcgccgtcctcgccccaacgactcccacgaccgcctacccgaaacgcgcaaaaaaaactaacacgcaaaaaacaaaacgacgacgacgactctaaatcccgacaaaaaaacaaccgcgtcctaatacgccacaaaatcccgaaactccgaactaccgaacctctaccgtcctcttacgaacgctcactaaaaaacactaaccgaaccccctcgcgacgcttttaaataaaccatcttccccacccccgaataacacccaacgaaaaaaacgactcctaacgcccgcaccgcgaaaaaaaacccaactccaaaaaacgctcgacaaccgacgcacgcctcattaacttaaaacctttccaaaacccgctacgtccacgccctccaacgtctcttactccgcctctcgccgcccacttacttccgcgctcgttcccctaaaaaacgacccgaacccgaaccccgaaaactcctctcctctacccaaaacgatcgcccaaaaaaccctaactacctaactactaccgacgctcacaaaacgctacgaaaccatcccccgcgtcccgcttctccccgacccgcgaaactctctactaacaacctcaaaaaataaaaacgaaaaaacgaaaacgaaaacaacctccaaacaatactacctct

SEQ ID NO: 11961 - DNA, 1015 bp, Artificial Sequence
  chemically treated genomic DNA (Homo sapiens) CpG-island No: 11961
agcgcggcgtttgggtttcggggttgtaggagttttcggtgggggtatggaggtcgtcggggaaggaggacggtttagttgttaggtaattcggtttggattcgtttttcgttcgcgttgttgggagattataaggtcgggaggagggcggcgaaagggttttacgtgttgacgttaattgtatatgagcgcgagcggcgggtttttgggttttttttagcgttatttgttcgcggcgtcgttttttgtttttttcgttgttgttgtcgttgtcgttttgagttattgtttgcgtagtttcggtcgtttggttttttatattagtcgtcggtaacggatgggggtttggaagggaagggggaacgtggtgttggttgggcggtttgcgtagatgggagggtcggagggatggagggattgggagtcgggagtcggggtcgttggtcgttcgtggttttcggggtcgttttgtgaggtcggataggatcgcggagttcggatttcggagtttgagaggggtttcggggtcgattagcgtttttatcggggacggttgaggcgacgtaggggttggcgcggtttggaggtttaaggttttttgagttttatcgtttttttcgcgtggatcggagcgaggtcgcggtgacgttcgggtgttttgagattcggttgcgtcgcgaggatcgggaggttttcggcgtacgggtcgggtcgagtgtagagttcgtcgttttttggatatttttttgttttttttttaaaaataatattaggagggaggtcgttgggagatgaaaagaacggcggaggttgcgaatttcgacgggagggaggggttgtggagggacgagttttcgaggcggggagggggcgggggaggttgcgacgttttcgggtttttcgtttattgggggcggtcgcgcggggaggggaaattttcggcggtttcgttttatacgtggtaatgggttttatggttattggttgggtttggttggagatttttgttttcggt

SEQ ID NO: 11962 - DNA, 1015 bp, Artificial Sequence
  chemically treated genomic DNA (Homo sapiens) CpG-island No: 11962
accgaaaacaaaaatctccaaccaaacccaaccaataaccataaaacccattaccacgtataaaacgaaaccgccgaaaatttcccctccccgcgcgaccgcccccaataaacgaaaaacccgaaaacgtcgcaacctcccccgccccctccccgcctcgaaaactcgtccctccacaacccctccctcccgtcgaaattcgcaacctccgccgttcttttcatctcccaacgacctccctcctaatattatttttaaaaaaaaaacaaaaaaatatccaaaaaacgacgaactctacactcgacccgacccgtacgccgaaaacctcccgatcctcgcgacgcaaccgaatctcaaaacacccgaacgtcaccgcgacctcgctccgatccacgcgaaaaaaacgataaaactcaaaaaaccttaaacctccaaaccgcgccaacccctacgtcgcctcaaccgtccccgataaaaacgctaatcgaccccgaaacccctctcaaactccgaaatccgaactccgcgatcctatccgacctcacaaaacgaccccgaaaaccacgaacgaccaacgaccccgactcccgactcccaatccctccatccctccgaccctcccatctacgcaaaccgcccaaccaacaccacgttcccccttcccttccaaacccccatccgttaccgacgactaatataaaaaaccaaacgaccgaaactacgcaaacaataactcaaaacgacaacgacaacaacaacgaaaaaaacaaaaaacgacgccgcgaacaaataacgctaaaaaaaacccaaaaacccgccgctcgcgctcatatacaattaacgtcaacacgtaaaaccctttcgccgccctcctcccgaccttataatctcccaacaacgcgaacgaaaaacgaatccaaaccgaattacctaacaactaaaccgtcctccttccccgacgacctccatacccccaccgaaaactcctacaaccccgaaacccaaacgccgcgct

SEQ ID NO: 11963 - DNA, 1015 bp, Artificial Sequence
  chemically treated genomic DNA (Homo sapiens) CpG-island No: 11963
atcgagggtaagggtttttaattaggtttagttagtggttatgaagtttattattacgtgtggagcgaagtcgtcgggggtttttttttttcgcgcggtcgtttttaatgggcggagagttcgggagcgtcgtagtttttttcgtttttttttcgtttcggggattcgtttttttatagtttttttttttcgtcggaattcgtagttttcgtcgttttttttattttttagcggttttttttttggtattatttttgagggaaaagtaggggggtgtttaagaggcggcgggttttgtattcggttcggttcgtacgtcgggggtttttcggttttcgcggcgtagtcgagttttagggtattcgggcgttatcgcggtttcgtttcggtttacgcggaaaagacggtggagtttagagaattttaggtttttaggtcgcgttaatttttacgtcgttttagtcgttttcgataaaagcgttggtcggtttcggggttttttttaggtttcggggttcggatttcgcggttttgttcgattttataggacgatttcggaggttacgggcggttagcggtttcgattttcggtttttagtttttttattttttcggtttttttatttgcgtaggtcgtttagttaatattacgttttttttttttttttaggtttttattcgttatcggcgattagtatggggagttaggcggtcggagttgcgtaggtagtgatttagggcggtagcggtagtagtagcgggaggagtaggaggcggcgtcgcgagtagatggcgttaaaaaagatttaagagttcgtcgttcgcgtttatatataattagcgttagtacgtagggttttttcgtcgtttttttttcggttttgtagttttttagtaacgcgagcgagaggcgggtttaggtcgggttgtttagtaattgaatcgtttttttttttcggcgatttttatatttttatcgaggatttttgtagtttcgaggtttaggcgtcgcgtt

SEQ ID NO: 11964 - DNA, 1015 bp, Artificial Sequence
  chemically treated genomic DNA (Homo sapiens) CpG-island No: 11964
aacgcgacgcctaaacctcgaaactacaaaaatcctcgataaaaatataaaaatcgccgaaaaaaaaaaacgattcaattactaaacaacccgacctaaacccgcctctcgctcgcgttactaaaaaactacaaaaccgaaaaaaaaacgacgaaaaaaccctacgtactaacgctaattatatataaacgcgaacgacgaactcttaaatcttttttaacgccatctactcgcgacgccgcctcctactcctcccgctactactaccgctaccgccctaaatcactacctacgcaactccgaccgcctaactccccatactaatcgccgataacgaataaaaacctaaaaaaaaaaaaaaaacgtaatattaactaaacgacctacgcaaataaaaaaaccgaaaaaataaaaaaactaaaaaccgaaaatcgaaaccgctaaccgcccgtaacctccgaaatcgtcctataaaatcgaacaaaaccgcgaaatccgaaccccgaaacctaaaaaaaaccccgaaaccgaccaacgcttttatcgaaaacgactaaaacgacgtaaaaattaacgcgacctaaaaacctaaaattctctaaactccaccgtcttttccgcgtaaaccgaaacgaaaccgcgataacgcccgaataccctaaaactcgactacgccgcgaaaaccgaaaaacccccgacgtacgaaccgaaccgaatacaaaacccgccgcctcttaaacacccccctacttttccctcaaaaataataccaaaaaaaaaaccgctaaaaaataaaaaaaacgacgaaaactacgaattccgacgaaaaaaaaaaactataaaaaaacgaatccccgaaacgaaaaaaaaacgaaaaaaactacgacgctcccgaactctccgcccattaaaaacgaccgcgcgaaaaaaaaaaacccccgacgacttcgctccacacgtaataataaacttcataaccactaactaaacctaattaaaaacccttaccctcgat

SEQ ID NO: 11965 - DNA, 898 bp, Artificial Sequence
  chemically treated genomic DNA (Homo sapiens) CpG-island No: 11965
agcgggcgatggagatagagagatattcgacgagaggaggcggggtgggggaggcggggagagtgcgggggcggaggttggtagggggtagttggaagttggagcggttcgtgcgtttttcgcgttcgagggtgtaggaggttttgaagcggttgttgtatcgcggggtttaggcggcggttggggggttggggggcgttgtcgtcgtcgtcgtcgggggcgtcgttggtttcggtttttttgttttcgcgcgttttttttcgtcgtttatttttttgttgtcgcgcggcggcggcggtgggcggcgtcggtttttttcgttcgaggtagtcgggttcggcgtcggggcggggagggggcggggggagtacgttagttttcgagagtggggggcgatggcgaagtttcgggtggtttacgagtatacggaagtcgaggataagagtattcggttcggtttgttttttattattttcggcgtcgtgtcgttttttattttcggtttttgttggttgagtttcgcgttgtaggatttgtaagttacggaggttaattgtacggtgttgtcggtgtagtagatcggcgaggtgttcgagtgtatttttatttgtggcgtcgattgtaggggtatttcgtagtatttttgcgtttaggtttacgtgaataattttgagtttaattttagggcgttgttgtatagcgacgagtattagtttttgattaattttaaggtaagaacgtttcgcgtatttaggggtttttcgcgagggaggtttggaggtagcgtcggtgttagatttcgcgcggggagggttcggcgtgtgttcgtattgttaggaggagattaggtggcgtaggttgtgtttaaattaggaatgattatattagggagttttag

SEQ ID NO: 11966 - DNA, 898 bp, Artificial Sequence
  chemically treated genomic DNA (Homo sapiens) CpG-island No: 11966
ctaaaactccctaatataatcattcctaatttaaacacaacctacgccacctaatctcctcctaacaatacgaacacacgccgaaccctccccgcgcgaaatctaacaccgacgctacctccaaacctccctcgcgaaaaacccctaaatacgcgaaacgttcttaccttaaaattaatcaaaaactaatactcgtcgctatacaacaacgccctaaaattaaactcaaaattattcacgtaaacctaaacgcaaaaatactacgaaatacccctacaatcgacgccacaaataaaaatacactcgaacacctcgccgatctactacaccgacaacaccgtacaattaacctccgtaacttacaaatcctacaacgcgaaactcaaccaacaaaaaccgaaaataaaaaacgacacgacgccgaaaataataaaaaacaaaccgaaccgaatactcttatcctcgacttccgtatactcgtaaaccacccgaaacttcgccatcgccccccactctcgaaaactaacgtactccccccgccccctccccgccccgacgccgaacccgactacctcgaacgaaaaaaaccgacgccgcccaccgccgccgccgcgcgacaacaaaaaaataaacgacgaaaaaaaacgcgcgaaaacaaaaaaaccgaaaccaacgacgcccccgacgacgacgacgacaacgccccccaaccccccaaccgccgcctaaaccccgcgatacaacaaccgcttcaaaacctcctacaccctcgaacgcgaaaaacgcacgaaccgctccaacttccaactaccccctaccaacctccgcccccgcactctccccgcctcccccaccccgcctcctctcgtcgaatatctctctatctccatcgcccgct

SEQ ID NO: 11967 - DNA, 898 bp, Artificial Sequence
  chemically treated genomic DNA (Homo sapiens) CpG-island No: 11967
ttggggttttttgatgtagttatttttggtttgagtatagtttgcgttatttggtttttttttagtaatgcgagtatacgtcgaatttttttcgcgcggagtttaatatcgacgttgtttttaaatttttttcgcggggagtttttgggtgcgcggggcgtttttattttggggttggttaggagttggtgttcgtcgttgtgtagtagcgttttagagttggatttagagttgtttacgtagatttggacgtaggggtattgcgaggtgtttttgtagtcggcgttataggtgaaggtgtattcgaatatttcgtcgatttgttgtatcgatagtatcgtgtaattggttttcgtggtttgtagattttgtagcgcgggatttagttagtagaagtcgaagatgaagagcgatacgacgtcggagatgatgagaaataagtcgagtcggatgtttttgttttcggttttcgtgtattcgtaagttattcggagtttcgttatcgttttttattttcgggggttggcgtgtttttttcgtttttttttcgtttcggcgtcgagttcgattgtttcgggcgggaggagtcggcgtcgtttatcgtcgtcgtcgcgcgatagtaggggagtgggcggcgagggggagcgcgcgagaataaaggggtcgaggttagcgacgttttcggcggcggcggcggtagcgttttttagttttttagtcgtcgtttgggtttcgcggtgtagtagtcgttttagagttttttgtattttcgggcgcggggagcgtacggatcgttttagtttttagttgttttttgttagttttcgttttcgtatttttttcgttttttttatttcgttttttttcgtcgggtgtttttttgtttttatcgttcgtt

SEQ ID NO: 11968 - DNA, 898 bp, Artificial Sequence
  chemically treated genomic DNA (Homo sapiens) CpG-island No: 11968
aacgaacgataaaaacaaaaaaacacccgacgaaaaaaaacgaaataaaaaaaacgaaaaaaatacgaaaacgaaaactaacaaaaaacaactaaaaactaaaacgatccgtacgctccccgcgcccgaaaatacaaaaaactctaaaacgactactacaccgcgaaacccaaacgacgactaaaaaactaaaaaacgctaccgccgccgccgccgaaaacgtcgctaacctcgacccctttattctcgcgcgctccccctcgccgcccactcccctactatcgcgcgacgacgacgataaacgacgccgactcctcccgcccgaaacaatcgaactcgacgccgaaacgaaaaaaaaacgaaaaaaacacgccaacccccgaaaataaaaaacgataacgaaactccgaataacttacgaatacacgaaaaccgaaaacaaaaacatccgactcgacttatttctcatcatctccgacgtcgtatcgctcttcatcttcgacttctactaactaaatcccgcgctacaaaatctacaaaccacgaaaaccaattacacgatactatcgatacaacaaatcgacgaaatattcgaatacaccttcacctataacgccgactacaaaaacacctcgcaatacccctacgtccaaatctacgtaaacaactctaaatccaactctaaaacgctactacacaacgacgaacaccaactcctaaccaaccccaaaataaaaacgccccgcgcacccaaaaactccccgcgaaaaaaatttaaaaacaacgtcgatattaaactccgcgcgaaaaaaattcgacgtatactcgcattactaaaaaaaaaccaaataacgcaaactatactcaaaccaaaaataactacatcaaaaaaccccaa

SEQ ID NO: 11969 - DNA, 505 bp, Artificial Sequence
  chemically treated genomic DNA (Homo sapiens) CpG-island No: 11969
  unsure (457, 471, 495)
gggtggtgttaagcggatgtgagtggggtcgagcggggtagggtggagtcgagcggagtcgggtggagtcgagcggagtcgagcgagtgagaagtcggaggtcgagagggtcgggtcgatttgaagaggtggggattgttgagggttggtttgtcggttttggaaattttgttatattgttatttttggatttcgtcgttttcgttttaacggaaaattggggtttttggatttttttgattcgagttgtaattatcgacgagaattttttttattggcggtttcggcgtcggtattttataaaatgagagcggggagggcggtcgaagacgagtgtgcggagttttaggtttttcgttcgggttcgtttttcgtatattcgggtaggatcggatgtggtgtttttcgttgaagtttttcggttttagtttattttggagcgggtgggggttttggngaatgttattttanagattttgtttttggggaacggtnttggcgtttt

SEQ ID NO: 11970 - DNA, 505 bp, Artificial Sequence
  chemically treated genomic DNA (Homo sapiens) CpG-island No: 11970
  unsure (11, 35, 49)
aaaacgccaanaccgttccccaaaaacaaaatctntaaaataacattcnccaaaacccccacccgctccaaaataaactaaaaccgaaaaacttcaacgaaaaacaccacatccgatcctacccgaatatacgaaaaacgaacccgaacgaaaaacctaaaactccgcacactcgtcttcgaccgccctccccgctctcattttataaaataccgacgccgaaaccgccaataaaaaaaattctcgtcgataattacaactcgaatcaaaaaaatccaaaaaccccaattttccgttaaaacgaaaacgacgaaatccaaaaataacaatataacaaaatttccaaaaccgacaaaccaaccctcaacaatccccacctcttcaaatcgacccgaccctctcgacctccgacttctcactcgctcgactccgctcgactccacccgactccgctcgactccaccctaccccgctcgaccccactcacatccgcttaacaccaccc

SEQ ID NO: 11971 - DNA, 505 bp, Artificial Sequence
  chemically treated genomic DNA (Homo sapiens) CpG-island No: 11971
  unsure (11, 35, 49)
aaggcgttagnatcgttttttaaaagtaaagtttntaaagtgatatttnttagaatttttattcgttttaaggtgaattggagtcgagggattttaacggaagatattatattcgattttattcgaatatacgaaaagcggattcgagcggggggtttaaggtttcgtatattcgttttcggtcgtttttttcgtttttattttataaaatgtcgacgtcgaggtcgttagtgaaaaagattttcgtcggtggttataattcgggttaggggaatttaggagttttagtttttcgttgggacggaaacggcggaatttaaaagtgatagtatgataggatttttagagtcgatagattagtttttagtaatttttatttttttaagtcggttcggttttttcggttttcggttttttattcgttcggtttcgttcggttttattcggtttcgttcggttttattttgtttcgttcggttttatttatattcgtttggtattattt

SEQ ID NO: 11972 - DNA, 505 bp, Artificial Sequence
  chemically treated genomic DNA (Homo sapiens) CpG-island No: 11972
  unsure (457, 471, 495)
aaataataccaaacgaatataaataaaaccgaacgaaacaaaataaaaccgaacgaaaccgaataaaaccgaacgaaaccgaacgaataaaaaaccgaaaaccgaaaaaaccgaaccgacttaaaaaaataaaaattactaaaaactaatctatcgactctaaaaatcctatcatactatcacttttaaattccgccgtttccgtcccaacgaaaaactaaaactcctaaattcccctaacccgaattataaccaccgacgaaaatctttttcactaacgacctcgacgtcgacattttataaaataaaaacgaaaaaaacgaccgaaaacgaatatacgaaaccttaaaccccccgctcgaatccgcttttcgtatattcgaataaaatcgaatataatatcttccgttaaaatccctcgactccaattcaccttaaaacgaataaaaattctaanaaatatcactttanaaactttacttttaaaaaacgatnctaacgcctt

SEQ ID NO: 11973 - DNA, 1252 bp, Artificial Sequence
  chemically treated genomic DNA (Homo sapiens) CpG-island No: 11973
gtttttgttttttatcgttttaggcggattttagaggattttattcgttttatttttggcggtattttgtatcgcgtattttaaagcgtggatattattgttggtaattagtgttttttcgttgtgtttgttggggatttttttcgtgcgtttcggcgtgttggtatcggtatacgcgtttgcgtttgattcggcgcgcggtatgtttattttcgtttttatggtgttggtgattggcggttcgatgttgttgtttgtcgcgcgtggatataaagttcgtttacgcgtaaataatgcgttgtggtcgcgggaatttttgttgttagcgaataatgttttgttggtcgttgcgatgttggtggtgttgttggggacgttgttgtcgttggtgtataagtaattgggattgggtagtatttcgattggcgaatcgttttttaatattatgtttatttggttgatggtgtcgtttgcgttattgtttggtgtcggttttttggtgcgttgggggcgggatcgtcgcgtaagattcgtaatttattgtttatcgtttttatttatacgttggtgttgtcgttgttgttgtcgtggttgttcgatagtaaatttttggcgatgacggtgtttcgtttggtaatggtttgttggattttcgggttttcgtaattgcgtaagttttcgttaattattttaacgcggttagataaatagttttgtacgtaattcggggttaaagtttacggtttaatttttcgggttcggtatttgaatatattgtttcggaatttgcgtttttaggttattaagatatttagtcgtttgaaggttttgaatttttttcgcgtttaaaattttttcggtcgatataaacggttcgtattaatttttaatggatttcgattcgtattttcgttttttttatacgtgatatatttttaataggaaggtgtttatttgttttcggtaattttgaacgtttttatagtttcgcgagcggtttaaaagttcgttatatttttataaaattttttaattcgcgagattcgtttcgtgtttttcgcggtaaaatttcgttattatattttttgttcggtcgttttcgtaattcgtaacgcgttatttgatattttcgttaaacgttttttattttattcgtttttttttcggttggcggcgttgagtaagtcggaggagtaatataatggtagttgttaaatgtaaatcgatattttcgggtcgtcgttacgtatta

SEQ ID NO: 11974 - DNA, 1252 bp, Artificial Sequence
  chemically treated genomic DNA (Homo sapiens) CpG-island No: 11974
taatacgtaacgacgacccgaaaatatcgatttacatttaacaactaccattatattactcctccgacttactcaacgccgccaaccgaaaaaaaaacgaataaaataaaaaacgtttaacgaaaatatcaaataacgcgttacgaattacgaaaacgaccgaacaaaaaatataataacgaaattttaccgcgaaaaacacgaaacgaatctcgcgaattaaaaaattttataaaaatataacgaacttttaaaccgctcgcgaaactataaaaacgttcaaaattaccgaaaacaaataaacaccttcctattaaaaatatatcacgtataaaaaaaacgaaaatacgaatcgaaatccattaaaaattaatacgaaccgtttatatcgaccgaaaaaattttaaacgcgaaaaaaattcaaaaccttcaaacgactaaatatcttaataacctaaaaacgcaaattccgaaacaatatattcaaataccgaacccgaaaaattaaaccgtaaactttaaccccgaattacgtacaaaactatttatctaaccgcgttaaaataattaacgaaaacttacgcaattacgaaaacccgaaaatccaacaaaccattaccaaacgaaacaccgtcatcgccaaaaatttactatcgaacaaccacgacaacaacaacgacaacaccaacgtataaataaaaacgataaacaataaattacgaatcttacgcgacgatcccgcccccaacgcaccaaaaaaccgacaccaaacaataacgcaaacgacaccatcaaccaaataaacataatattaaaaaacgattcgccaatcgaaatactacccaatcccaattacttatacaccaacgacaacaacgtccccaacaacaccaccaacatcgcaacgaccaacaaaacattattcgctaacaacaaaaattcccgcgaccacaacgcattatttacgcgtaaacgaactttatatccacgcgcgacaaacaacaacatcgaaccgccaatcaccaacaccataaaaacgaaaataaacataccgcgcgccgaatcaaacgcaaacgcgtataccgataccaacacgccgaaacgcacgaaaaaaatccccaacaaacacaacgaaaaaacactaattaccaacaataatatccacgctttaaaatacgcgatacaaaataccgccaaaaataaaacgaataaaatcctctaaaatccgcctaaaacgataaaaaacaaaaac

SEQ ID NO: 11975 - DNA, 1252 bp, Artificial Sequence
  chemically treated genomic DNA (Homo sapiens) CpG-island No: 11975
taatacgtggcgacgattcggagatgtcggtttatatttaataattgttattgtattattttttcgatttatttagcgtcgttaatcgaaaggagagcgggtgaagtgggagacgtttgacgggggtgttaaatggcgcgttgcgggttgcgagagcgatcgggtagggggtgtaatgacgaggttttgtcgcgagagatacgggacgggtttcgcgggttagggagttttgtggagatgtgacgggtttttgagtcgttcgcgagattgtgggaacgtttagagttgtcggggataaatgggtatttttttgttgggagtgtgttacgtgtgaagagggcggaagtgcggatcggagtttattgggaattagtgcgggtcgtttgtgtcggtcggggagattttgaacgcggggagaatttaaagtttttaaacggttgagtattttggtggtttgaaagcgtagatttcggaataatgtgtttaggtgtcgggttcgaaaggttgagtcgtggattttggtttcgagttacgtgtaaggttgtttgtttggtcgcgttgaaatagttagcgggagtttgcgtaattgcgaggattcggaaatttagtaggttattgttaggcggagtatcgttatcgttagaagtttgttgtcgaatagttacggtaatagtagcgatagtattagcgtatagatgaaggcggtaagtaataaattgcggattttacgcggcgatttcgtttttagcgtattagaggatcgatattaagtagtagcgtaaacggtattattagttaggtaaatatggtgttgaagaacggttcgttaatcgaaatattgtttagttttagttgtttatgtattaacggtagtagcgtttttagtaatattattagtatcgtagcgattagtaaaatattgttcgttaatagtaaagattttcgcgattatagcgtattgtttacgcgtgagcgaattttgtgtttacgcgcggtaaatagtagtatcgaatcgttaattattagtattatagaggcgaggataaatatatcgcgcgtcggattagacgtaaacgcgtgtatcgatattagtacgtcggaacgtacgaggaaagtttttaatagatataacgagaaggtattgattgttagtagtaatgtttacgttttgaagtgcgcgatgtagagtgtcgttagggatagaacgagtgggattttttagagttcgtttggagcgatggagggtaggggt

SEQ ID NO: 11976 - DNA, 1252 bp, Artificial Sequence
  chemically treated genomic DNA (Homo sapiens) CpG-island No: 11976
acccctaccctccatcgctccaaacgaactctaaaaaatcccactcgttctatccctaacgacactctacatcgcgcacttcaaaacgtaaacattactactaacaatcaataccttctcgttatatctattaaaaactttcctcgtacgttccgacgtactaatatcgatacacgcgtttacgtctaatccgacgcgcgatatatttatcctcgcctctataatactaataattaacgattcgatactactatttaccgcgcgtaaacacaaaattcgctcacgcgtaaacaatacgctataatcgcgaaaatctttactattaacgaacaatattttactaatcgctacgatactaataatattactaaaaacgctactaccgttaatacataaacaactaaaactaaacaatatttcgattaacgaaccgttcttcaacaccatatttacctaactaataataccgtttacgctactacttaatatcgatcctctaatacgctaaaaacgaaatcgccgcgtaaaatccgcaatttattacttaccgccttcatctatacgctaatactatcgctactattaccgtaactattcgacaacaaacttctaacgataacgatactccgcctaacaataacctactaaatttccgaatcctcgcaattacgcaaactcccgctaactatttcaacgcgaccaaacaaacaaccttacacgtaactcgaaaccaaaatccacgactcaacctttcgaacccgacacctaaacacattattccgaaatctacgctttcaaaccaccaaaatactcaaccgtttaaaaactttaaattctccccgcgttcaaaatctccccgaccgacacaaacgacccgcactaattcccaataaactccgatccgcacttccgccctcttcacacgtaacacactcccaacaaaaaaatacccatttatccccgacaactctaaacgttcccacaatctcgcgaacgactcaaaaacccgtcacatctccacaaaactccctaacccgcgaaacccgtcccgtatctctcgcgacaaaacctcgtcattacaccccctacccgatcgctctcgcaacccgcaacgcgccatttaacacccccgtcaaacgtctcccacttcacccgctctcctttcgattaacgacgctaaataaatcgaaaaaataatacaataacaattattaaatataaaccgacatctccgaatcgtcgccacgtatta

SEQ ID NO: 11977 - DNA, 531 bp, Artificial Sequence
  chemically treated genomic DNA (Homo sapiens) CpG-island No: 11977
  unsure (164)
ttggcggtgtttgtcgtcggtagcgttatcgttgcgtttttcgattttatttggggaattattttgggtcgggcgttataaggttttggagtaattgtcgtcgtcgttatggcgttgtttttcgattttacgcgcgaataaaatcgtattaaagcgatggcgtntatcggcgtgagttttggtattatttttgtttatgcgatggtgtttggttcgattatcgatgtaaaatagtaggatgcgatatattatttggagtatcgtttttgggatgttttttttcggatcgcgcgttttagcggtagtaattttaattagttttagatcgtcgaaggagaatataattatcgttagcggataaaattagtttattttagtcggtggcgaagaaattatcgtagcgttagaggttgtcgatattggttttttcgtcgtcgtgattagaaaatagtagttataggttaaagtcgattatatcgatgattgttagtattttaattaacgtaaattagaattcggtttcgttatata

SEQ ID NO: 11978 - DNA, 531 bp, Artificial Sequence
  chemically treated genomic DNA (Homo sapiens) CpG-island No: 11978
  unsure (368)
tatataacgaaaccgaattctaatttacgttaattaaaatactaacaatcatcgatataatcgactttaacctataactactattttctaatcacgacgacgaaaaaaccaatatcgacaacctctaacgctacgataatttcttcgccaccgactaaaataaactaattttatccgctaacgataattatattctccttcgacgatctaaaactaattaaaattactaccgctaaaacgcgcgatccgaaaaaaaacatcccaaaaacgatactccaaataatatatcgcatcctactattttacatcgataatcgaaccaaacaccatcgcataaacaaaaataataccaaaactcacgccgatanacgccatcgctttaatacgattttattcgcgcgtaaaatcgaaaaacaacgccataacgacgacgacaattactccaaaaccttataacgcccgacccaaaataattccccaaataaaatcgaaaaacgcaacgataacgctaccgacgacaaacaccgccaa

SEQ ID NO: 11979 - DNA, 531 bp, Artificial Sequence
  chemically treated genomic DNA (Homo sapiens) CpG-island No: 11979
  unsure (368)
tatatggcgaaatcgagttttggtttgcgttgattaaagtgttggtaattatcggtatgatcggttttggtttgtggttgttgttttttggttacggcggcgagaaagttagtatcgataatttttggcgttacggtggttttttcgttatcggttggaatgggttgattttgttcgttggcggtaattatgttttttttcggcggtttggagttgattgggattattgtcgttgaagcgcgcgattcggaaaaaagtattttaaaagcggtattttaggtggtgtatcgtattttgttgttttatatcggtgatcgggttaagtattatcgtatgggtaaaggtaatgttaaagtttacgtcgatanacgttatcgttttggtgcggttttgttcgcgcgtgagatcggaaagtagcgttataacggcggcggtaattgttttagagttttgtagcgttcggtttagaataattttttagatggagtcggaaagcgtagcgataacgttatcggcggtaaatatcgttag

SEQ ID NO: 11980 - DNA, 531 bp, Artificial Sequence
  chemically treated genomic DNA (Homo sapiens) CpG-island No: 11980
  unsure (164)
ctaacgatatttaccgccgataacgttatcgctacgctttccgactccatctaaaaaattattctaaaccgaacgctacaaaactctaaaacaattaccgccgccgttataacgctactttccgatctcacgcgcgaacaaaaccgcaccaaaacgataacgtntatcgacgtaaactttaacattacctttacccatacgataatacttaacccgatcaccgatataaaacaacaaaatacgatacaccacctaaaataccgcttttaaaatacttttttccgaatcgcgcgcttcaacgacaataatcccaatcaactccaaaccgccgaaaaaaaacataattaccgccaacgaacaaaatcaacccattccaaccgataacgaaaaaaccaccgtaacgccaaaaattatcgatactaactttctcgccgccgtaaccaaaaaacaacaaccacaaaccaaaaccgatcataccgataattaccaacactttaatcaacgcaaaccaaaactcgatttcgccatata

SEQ ID NO: 11981 - DNA, 960 bp, Artificial Sequence
  chemically treated genomic DNA (Homo sapiens) CpG-island No: 11981
cgtgcgtttttgatgatgcgggtggcgttgtgttcgttttagttattgtcgcgcgtgtcggagtagagtagcgcggtgttaaaatcgttgttcgttgtgtcgtttattattaggttgtgcgtttttttcgggttgttttgtgaagaggttgggttgagttgattttttacgttcgtttcgatattaaagttttgcggaatggtacgggtaataaagtttattacgtcgtttacgttttgcggttcgtaacgtatcgtattattatcgcgtattacgttaatggtatttatgttgtcgagcgaaacgggagttagtgaaagttgcggttgatcgtaagggcgaaggggacggggatgtcgtttattaggacggtcgagcggttggcgaggcgcgggtttaggtttcggatgttaaagtttatcgttaggtcgtggttgtcggtgtcgttgtttttcggcgcgttgacgttagggatgcggttaagtattttacgtatggtggttgcgtcggttttggcgaaatttttacggcggattacgttacgcgcgttagtatgtttaaatacgtcgtttttacgcgtattatttagttagtcgtcgattacggttagggtatttttttttggtgcgggcgcgggttttagcgtttagttgttattttttagcggttttatttgtagttcgttgtcgtttagtagttgttgtaggtcgttttcgacgtcgtaatcgtcgtgtaggtcgttgttttgtttgtcgcgcgttaggttggcgttaatcgagagggtaaattcgttgtgtgcggtatattgattgagcgttttatcgagcgatttcggtgcgatattaatttgtgtagtaaaagcggaaaacgagagatcggttagcggtagtaggtttagatagatatatttttacggtaagagttgaaagatgtaggatttttatttgaattaggttgtgt

SEQ ID NO: 11982 - DNA, 960 bp, Artificial Sequence
  chemically treated genomic DNA (Homo sapiens) CpG-island No: 11982
acacaacctaattcaaataaaaatcctacatctttcaactcttaccgtaaaaatatatctatctaaacctactaccgctaaccgatctctcgttttccgcttttactacacaaattaatatcgcaccgaaatcgctcgataaaacgctcaatcaatataccgcacacaacgaatttaccctctcgattaacgccaacctaacgcgcgacaaacaaaacaacgacctacacgacgattacgacgtcgaaaacgacctacaacaactactaaacgacaacgaactacaaataaaaccgctaaaaaataacaactaaacgctaaaacccgcgcccgcaccaaaaaaaaataccctaaccgtaatcgacgactaactaaataatacgcgtaaaaacgacgtatttaaacatactaacgcgcgtaacgtaatccgccgtaaaaatttcgccaaaaccgacgcaaccaccatacgtaaaatacttaaccgcatccctaacgtcaacgcgccgaaaaacaacgacaccgacaaccacgacctaacgataaactttaacatccgaaacctaaacccgcgcctcgccaaccgctcgaccgtcctaataaacgacatccccgtccccttcgcccttacgatcaaccgcaactttcactaactcccgtttcgctcgacaacataaataccattaacgtaatacgcgataataatacgatacgttacgaaccgcaaaacgtaaacgacgtaataaactttattacccgtaccattccgcaaaactttaatatcgaaacgaacgtaaaaaatcaactcaacccaacctcttcacaaaacaacccgaaaaaaacgcacaacctaataataaacgacacaacgaacaacgattttaacaccgcgctactctactccgacacgcgcgacaataactaaaacgaacacaacgccacccgcatcatcaaaaacgcacg

SEQ ID NO: 11983 - DNA, 960 bp, Artificial Sequence
  chemically treated genomic DNA (Homo sapiens) CpG-island No: 11983
gtatagtttagtttaagtagaaattttgtattttttagtttttatcgtagagatatgtttgtttgagtttgttgtcgttggtcggtttttcgtttttcgtttttgttgtataggttaatatcgtatcgggatcgttcgataaagcgtttaattagtatgtcgtatatagcggatttattttttcggttgacgttagtttgacgcgcggtaagtagagtaacggtttgtacggcgattacgacgtcgagagcggtttgtaataattgttggacggtagcggattgtaggtaaaatcgttgggaaataatagttggacgttggagttcgcgttcgtattaaaagaagatgttttgatcgtggtcggcgattggttgggtgatgcgcgtgaaaacgacgtatttgaatatgttggcgcgcgtgacgtgattcgtcgtgaggatttcgttaaaatcggcgtaattattatgcgtgaggtatttaatcgtatttttggcgttagcgcgtcggaaaataacggtatcggtagttacgatttggcgatgaattttggtattcggggtttgaattcgcgtttcgttagtcgttcgatcgttttgatggacggtattttcgtttttttcgtttttacggttagtcgtagtttttattggttttcgtttcgttcggtaatatggatgttattgacgtggtacgcggtggtggtgcggtgcgttacggatcgtagagcgtgggcggcgtggtgaattttgttattcgtgttatttcgtaggattttggtatcgaggcgggcgtggaaggttagtttagtttaatttttttataaaataattcgaaagagacgtataatttgatggtgggcggtatagcggataacggttttggtatcgcgttgttttatttcggtacgcgcggtagtgattggagcgagtatagcgttattcgtattattagggacgtacg

SEQ ID NO: 11984 - DNA, 960 bp, Artificial Sequence
  chemically treated genomic DNA (Homo sapiens) CpG-island No: 11984
cgtacgtccctaataatacgaataacgctatactcgctccaatcactaccgcgcgtaccgaaataaaacaacgcgataccaaaaccgttatccgctataccgcccaccatcaaattatacgtctctttcgaattattttataaaaaaattaaactaaactaaccttccacgcccgcctcgataccaaaatcctacgaaataacacgaataacaaaattcaccacgccgcccacgctctacgatccgtaacgcaccgcaccaccaccgcgtaccacgtcaataacatccatattaccgaacgaaacgaaaaccaataaaaactacgactaaccgtaaaaacgaaaaaaacgaaaataccgtccatcaaaacgatcgaacgactaacgaaacgcgaattcaaaccccgaataccaaaattcatcgccaaatcgtaactaccgataccgttattttccgacgcgctaacgccaaaaatacgattaaatacctcacgcataataattacgccgattttaacgaaatcctcacgacgaatcacgtcacgcgcgccaacatattcaaatacgtcgttttcacgcgcatcacccaaccaatcgccgaccacgatcaaaacatcttcttttaatacgaacgcgaactccaacgtccaactattatttcccaacgattttacctacaatccgctaccgtccaacaattattacaaaccgctctcgacgtcgtaatcgccgtacaaaccgttactctacttaccgcgcgtcaaactaacgtcaaccgaaaaaataaatccgctatatacgacatactaattaaacgctttatcgaacgatcccgatacgatattaacctatacaacaaaaacgaaaaacgaaaaaccgaccaacgacaacaaactcaaacaaacatatctctacgataaaaactaaaaaatacaaaatttctacttaaactaaactatac

SEQ ID NO: 11985 - DNA, 513 bp, Artificial Sequence
  chemically treated genomic DNA (Homo sapiens) CpG-island No: 11985
  unsure (40, 303, 473..474, 486)
cggtcgggggggcggtttcgtcgtcgtttcggtcgtcggncggttcgcgtcggcgggcgcgtagcgcggcggcggcgggcgcgcggggggcgggttttcggcgcgggcgggcggttcgcgcgggtttcgtcggcgtttcggcgcggcggtcgggcgcgtcgggcggcggtttttttcgcgacgcggcgcgcgtcggcggcgcgcgcggcgcggttcgtttcgcgggcggcgcgtcgttcgggtttcgagtcgggttcggcggggcgcgtcgtcggcgagcgcggggggcggggggggcggggngcggtcgtcggggcggcgggcgcggcggggcggggcgggcgttcgcggttcgggcggggcgcgggggggggaggtttacgttattaaaagggcgcgttcggtcgagggggggcggcgggggcgggcgcgggggggtcgcggttttttttttttcgcgggtcggggggggnnaacggggcgaanaaagagttttttttttttaggaggggg

SEQ ID NO: 11986 - DNA, 513 bp, Artificial Sequence
  chemically treated genomic DNA (Homo sapiens) CpG-island No: 11986
  unsure (28, 40..41, 211, 474)
ccccctcctaaaaaaaaaaaactctttnttcgccccgttnnccccccccgacccgcgaaaaaaaaaaaaccgcgacccccccgcgcccgcccccgccgccccccctcgaccgaacgcgcccttttaataacgtaaacctcccccccccgcgccccgcccgaaccgcgaacgcccgccccgccccgccgcgcccgccgccccgacgaccgcnccccgccccccccgccccccgcgctcgccgacgacgcgccccgccgaacccgactcgaaacccgaacgacgcgccgcccgcgaaacgaaccgcgccgcgcgcgccgccgacgcgcgccgcgtcgcgaaaaaaaccgccgcccgacgcgcccgaccgccgcgccgaaacgccgacgaaacccgcgcgaaccgcccgcccgcgccgaaaacccgccccccgcgcgcccgccgccgccgcgctacgcgcccgccgacgcgaaccgnccgacgaccgaaacgacgacgaaaccgcccccccgaccg

SEQ ID NO: 11987 - DNA, 513 bp, Artificial Sequence
  chemically treated genomic DNA (Homo sapiens) CpG-island No: 11987
  unsure (28, 40..41, 211, 474)
tttttttttggggggggggggttttttnttcgtttcgttnntttttttcggttcgcgggggggggggggtcgcggttttttcgcgttcgttttcgtcgttttttttcggtcgggcgcgtttttttggtggcgtgggtttttttttttcgcgtttcgttcgggtcgcgggcgttcgtttcgtttcgtcgcgttcgtcgtttcggcggtcgtntttcgtttttttcgtttttcgcgttcgtcggcggcgcgtttcgtcgggttcggttcggggttcgggcggcgcgtcgttcgcggggcgggtcgcgtcgcgcgcgtcgtcggcgcgcgtcgcgtcgcggggggggtcgtcgttcggcgcgttcggtcgtcgcgtcggggcgtcggcggggttcgcgcgggtcgttcgttcgcgtcgggggttcgtttttcgcgcgttcgtcgtcgtcgcgttgcgcgttcgtcggcgcgggtcgntcggcggtcggggcggcggcggggtcgttttttcggtcg

SEQ ID NO: 11988 - DNA, 513 bp, Artificial Sequence
  chemically treated genomic DNA (Homo sapiens) CpG-island No: 11988
  unsure (40, 303, 473..474, 486)
cgaccgaaaaaacgaccccgccgccgccccgaccgccgancgacccgcgccgacgaacgcgcaacgcgacgacgacgaacgcgcgaaaaacgaacccccgacgcgaacgaacgacccgcgcgaaccccgccgacgccccgacgcgacgaccgaacgcgccgaacgacgaccccccccgcgacgcgacgcgcgccgacgacgcgcgcgacgcgacccgccccgcgaacgacgcgccgcccgaaccccgaaccgaacccgacgaaacgcgccgccgacgaacgcgaaaaacgaaaaaaacgaaanacgaccgccgaaacgacgaacgcgacgaaacgaaacgaacgcccgcgacccgaacgaaacgcgaaaaaaaaaaacccacgccaccaaaaaaacgcgcccgaccgaaaaaaaacgacgaaaacgaacgcgaaaaaaccgcgacccccccccccccgcgaaccgaaaaaaannaacgaaacgaanaaaaaaccccccccccccaaaaaaaaa

SEQ ID NO: 11989 - DNA, 665 bp, Artificial Sequence
  chemically treated genomic DNA (Homo sapiens) CpG-island No: 11989
aagttcggaggagcggcggaggagaacgcggttgggaggtcggcggttagggtttcgaagcggtcggtttcgggttgcggtaggagtacgacggcggcggtttgggtttggcgtcggtttttttttttatcgttcgcgcgttaatttattagttcgttaattcgttttttttacgttcgtttttttcggtttagcgattttttagtttagttttttgtagattgcggttgttaagtgtcggggagtcgagttttattcgcgagcggtagttaatcgtcgcgttttttcgaggcgttttaggatttcgtcgtcgggggcggttaggtaggtgtttgagtcgaaggcgagtcggcggggcggggcggggcggggaggggcggggaggggcgggtttaaagttggggcggggaggggcggggcggatttaaagtttgggcggggcggattaaaatttgggcggggcgggcgggggtcgggtttggagggatcggttaggggttcgggggagtagtagaacgggtgcggtaatagcgtgagattggtggtagggacgtagatttttagttggtcggtgaattttatgttttaaaatagtacgaataggattgtcgtttgtaaatggagaagtttgcgtattaggattgattttttatattttttttcga

SEQ ID NO: 11990 - DNA, 665 bp, Artificial Sequence
  chemically treated genomic DNA (Homo sapiens) CpG-island No: 11990
tcgaaaaaaaatataaaaaatcaatcctaatacgcaaacttctccatttacaaacgacaatcctattcgtactattttaaaacataaaattcaccgaccaactaaaaatctacgtccctaccaccaatctcacgctattaccgcacccgttctactactcccccgaacccctaaccgatccctccaaacccgacccccgcccgccccgcccaaattttaatccgccccgcccaaactttaaatccgccccgcccctccccgccccaactttaaacccgcccctccccgcccctccccgccccgccccgccccgccgactcgccttcgactcaaacacctacctaaccgcccccgacgacgaaatcctaaaacgcctcgaaaaaacgcgacgattaactaccgctcgcgaataaaactcgactccccgacacttaacaaccgcaatctacaaaaaactaaactaaaaaatcgctaaaccgaaaaaaacgaacgtaaaaaaaacgaattaacgaactaataaattaacgcgcgaacgataaaaaaaaaaaccgacgccaaacccaaaccgccgccgtcgtactcctaccgcaacccgaaaccgaccgcttcgaaaccctaaccgccgacctcccaaccgcgttctcctccgccgctcctccgaactt

SEQ ID NO: 11991 - DNA, 665 bp, Artificial Sequence
  chemically treated genomic DNA (Homo sapiens) CpG-island No: 11991
tcggggaggagtatgaagagttaattttaatgcgtaggtttttttatttgtaggcgataattttgttcgtgttattttgggatatggggtttatcggttagttaagggtttacgtttttgttattagttttacgttattgtcgtattcgttttgttattttttcgggtttttagtcggtttttttaagttcgattttcgttcgtttcgtttaggttttggttcgtttcgtttaggttttgggttcgtttcgttttttttcgttttagttttgggttcgttttttttcgttttttttcgtttcgtttcgtttcgtcgattcgttttcggtttaggtatttgtttggtcgttttcggcggcggggttttgaggcgtttcggggaagcgcggcgattggttgtcgttcgcgggtagagttcggtttttcggtatttgataatcgtagtttgtaagaggttgagttgaggagtcgttgggtcgggaggggcggacgtgagaaggacggattgacgaattgatggattgacgcgcgggcggtaggagggaggatcgacgttaaatttagatcgtcgtcgtcgtgtttttgtcgtagttcggagtcggtcgtttcggggttttggtcgtcggttttttagtcgcgttttttttcgtcgttttttcgggttt

SEQ ID NO: 11992 - DNA, 665 bp, Artificial Sequence
  chemically treated genomic DNA (Homo sapiens) CpG-island No: 11992
aaacccgaaaaaacgacgaaaaaaaacgcgactaaaaaaccgacgaccaaaaccccgaaacgaccgactccgaactacgacaaaaacacgacgacgacgatctaaatttaacgtcgatcctccctcctaccgcccgcgcgtcaatccatcaattcgtcaatccgtccttctcacgtccgcccctcccgacccaacgactcctcaactcaacctcttacaaactacgattatcaaataccgaaaaaccgaactctacccgcgaacgacaaccaatcgccgcgcttccccgaaacgcctcaaaaccccgccgccgaaaacgaccaaacaaatacctaaaccgaaaacgaatcgacgaaacgaaacgaaacgaaaaaaaacgaaaaaaaacgaacccaaaactaaaacgaaaaaaaacgaaacgaacccaaaacctaaacgaaacgaaccaaaacctaaacgaaacgaacgaaaatcgaacttaaaaaaaccgactaaaaacccgaaaaaataacaaaacgaatacgacaataacgtaaaactaataacaaaaacgtaaacccttaactaaccgataaaccccatatcccaaaataacacgaacaaaattatcgcctacaaataaaaaaacctacgcattaaaattaactcttcatactcctccccga

SEQ ID NO: 11993 - DNA, 746 bp, Artificial Sequence
  chemically treated genomic DNA (Homo sapiens) CpG-island No: 11993
cgtattttgaggaatatttttttttttaggattcgttcgtttgtgttcggtggttttttttagaattttttaaggcgcgggagggggcggagagtttaaaagtcgcgggggggagcggattttcgttgttttagggagggagagcggtttgggttttggatgttgtgtgcggagttgtggcgtcgcgtgtgaggcgcgtgtagggtgagtgtgagtggacgcgtgagtgtgtgagtgtgcgcgtttggagcgtgttaggcgagtgcgtgcgtttatttttgcgttttttttttcgtttatattttgattttatttgatcggatcgtgattttagtttcgtcgggtcgattcgaaatgaaaagttttttttttgcgaagttttttcggggcgttgtgtagcgaggttttttaggcggcggttacgttgtggttttcgaggtttcggagttggttttgcggggttcggcgtttagaagtgatgaattgattagatagacgaggtcgggtttgttttcggttattgattatcgaggcgattttgatttgggtacggttatcgggttgcgggttgtcggtggcgtaggggcgagtacgtgaacggcggcggcgggcgaggatgttgagcgcggtggttaagggtaaatgagtcgttgtttttttttttggagttggaaggtcgcggaggtttttttcgtcgttgatatattttttttttatttttttatttttttttgtttttttttttt

SEQ ID NO: 11994 - DNA, 746 bp, Artificial Sequence
  chemically treated genomic DNA (Homo sapiens) CpG-island No: 11994
aaaaaaaaaaaacaaaaaaaaataaaaaaataaaaaaaaaatatatcaacgacgaaaaaaacctccgcgaccttccaactccaaaaaaaaaaacaacgactcatttacccttaaccaccgcgctcaacatcctcgcccgccgccgccgttcacgtactcgcccctacgccaccgacaacccgcaacccgataaccgtacccaaatcaaaatcgcctcgataatcaataaccgaaaacaaacccgacctcgtctatctaatcaattcatcacttctaaacgccgaaccccgcaaaaccaactccgaaacctcgaaaaccacaacgtaaccgccgcctaaaaaacctcgctacacaacgccccgaaaaaacttcgcaaaaaaaaaacttttcatttcgaatcgacccgacgaaactaaaatcacgatccgatcaaataaaatcaaaatataaacgaaaaaaaaaacgcaaaaataaacgcacgcactcgcctaacacgctccaaacgcgcacactcacacactcacgcgtccactcacactcaccctacacgcgcctcacacgcgacgccacaactccgcacacaacatccaaaacccaaaccgctctccctccctaaaacaacgaaaatccgctcccccccgcgacttttaaactctccgccccctcccgcgccttaaaaaattctaaaaaaaaccaccgaacacaaacgaacgaatcctaaaaaaaaaaatattcctcaaaatacg

SEQ ID NO: 11995 - DNA, 746 bp, Artificial Sequence
  chemically treated genomic DNA (Homo sapiens) CpG-island No: 11995
aaaaaagaaaaataaggagaaatgggaaagtgggaggaaagtatattagcggcgaaaaaggttttcgcgattttttagttttagggggaggggtagcggtttatttatttttggttatcgcgtttagtattttcgttcgtcgtcgtcgtttacgtgttcgtttttacgttatcggtagttcgtagttcggtggtcgtgtttagattagaatcgtttcgataattagtggtcggggataagttcggtttcgtttatttgattaatttattatttttgagcgtcgggtttcgtagggttagtttcgggatttcggggattatagcgtggtcgtcgtttaaggggtttcgttgtatagcgtttcgagggggtttcgtaggaggagagttttttatttcgggtcggttcggcggggttggggttacgattcgattaaataagattaaagtgtaagcgggaggaggggcgtaggggtgggcgtacgtattcgtttaatacgttttaagcgcgtatatttatatatttacgcgtttatttatatttattttgtacgcgttttatacgcgacgttatagtttcgtatataatatttaggatttaggtcgttttttttttttaaaatagcggaagttcgttttttttcgcgatttttaagtttttcgttttttttcgcgttttggaggattttgggagaaattatcgagtataggcggacgagttttgaggaagggggtgttttttagagtgcg

SEQ ID NO: 11996 - DNA, 746 bp, Artificial Sequence
  chemically treated genomic DNA (Homo sapiens) CpG-island No: 11996
cgcactctaaaaaacacccccttcctcaaaactcgtccgcctatactcgataatttctcccaaaatcctccaaaacgcgaaaaaaaacgaaaaacttaaaaatcgcgaaaaaaaacgaacttccgctattttaaaaaaaaaaaacgacctaaatcctaaatattatatacgaaactataacgtcgcgtataaaacgcgtacaaaataaatataaataaacgcgtaaatatataaatatacgcgcttaaaacgtattaaacgaatacgtacgcccacccctacgcccctcctcccgcttacactttaatcttatttaatcgaatcgtaaccccaaccccgccgaaccgacccgaaataaaaaactctcctcctacgaaaccccctcgaaacgctatacaacgaaaccccttaaacgacgaccacgctataatccccgaaatcccgaaactaaccctacgaaacccgacgctcaaaaataataaattaatcaaataaacgaaaccgaacttatccccgaccactaattatcgaaacgattctaatctaaacacgaccaccgaactacgaactaccgataacgtaaaaacgaacacgtaaacgacgacgacgaacgaaaatactaaacgcgataaccaaaaataaataaaccgctacccctccccctaaaactaaaaaatcgcgaaaacctttttcgccgctaatatactttcctcccactttcccatttctccttatttttctttttt

SEQ ID NO: 11997 - DNA, 654 bp, Artificial Sequence
  chemically treated genomic DNA (Homo sapiens) CpG-island No: 11997
aagggtcggtcgggtcgttcgggaggaggggcggtcgcgggtttataggttttaagtgtcgtttcgagggttcgggttcgggttcgttcgttttttgggttcgtttttttttagttttttcggatatagttaattcggggcgtcgcgttttcgtttcgtcgttcgtatagcggttcgtatttgtattatgatggttattcggagcgagtttttggggatgttttcgttgtattttttgtaagaggcgcgttcgtttttggcgtattcgattcgatagagtttattcgaagatttcgttatttttttttagttgtcgttaaagtttcggaagttcgacgttacgatttagaaatacgttgtcgtttcgtcgtttcgcgtgcgtttatttagtcgtaggcgtttgagcggttagagtcgttatcgaatacgtcgtatcggttatcgtcgttttttgatagattgttgatgtttggtcgcgggaacgtttacggaattcgcgtttacggggcggggtcggcggcgcgcgcgttttttgtcggtcggggggcggagtttttcgggcgtttgtcgggtggagttttgcgggtcgttgttttgggggtcgaggcggggtttgggttgagttagtagttttttggaggattcggcgttatt

SEQ ID NO: 11998 - DNA, 654 bp, Artificial Sequence
  chemically treated genomic DNA (Homo sapiens) CpG-island No: 11998
aataacgccgaatcctccaaaaaactactaactcaacccaaaccccgcctcgacccccaaaacaacgacccgcaaaactccacccgacaaacgcccgaaaaactccgccccccgaccgacaaaaaacgcgcgcgccgccgaccccgccccgtaaacgcgaattccgtaaacgttcccgcgaccaaacatcaacaatctatcaaaaaacgacgataaccgatacgacgtattcgataacgactctaaccgctcaaacgcctacgactaaataaacgcacgcgaaacgacgaaacgacaacgtatttctaaatcgtaacgtcgaacttccgaaactttaacgacaactaaaaaaaaataacgaaatcttcgaataaactctatcgaatcgaatacgccaaaaacgaacgcgcctcttacaaaaaatacaacgaaaacatccccaaaaactcgctccgaataaccatcataatacaaatacgaaccgctatacgaacgacgaaacgaaaacgcgacgccccgaattaactatatccgaaaaaactaaaaaaaaacgaacccaaaaaacgaacgaacccgaacccgaaccctcgaaacgacacttaaaacctataaacccgcgaccgcccctcctcccgaacgacccgaccgaccctt

SEQ ID NO: 11999 - DNA, 654 bp, Artificial Sequence
  chemically treated genomic DNA (Homo sapiens) CpG-island No: 11999
ggtggcgtcgggttttttaaagagttattagtttagtttaagtttcgtttcggtttttagggtagcggttcgtagagttttattcggtaggcgttcgggaaatttcgtttttcggtcggtagggggcgcgcgcgtcgtcggtttcgtttcgtggacgcgggtttcgtgggcgttttcgcggttaggtattagtaatttattagggaacggcggtggtcggtgcggcgtgttcggtggcggttttggtcgtttaggcgtttgcggttgggtgagcgtacgcgaggcggcgaggcggtagcgtgtttttaggtcgtggcgtcgggttttcggagttttggcggtagttaggggaggatggcggagttttcggataagttttatcgagtcgagtacgttaagagcgggcgcgttttttgtaagaaatgtagcgagagtatttttaaggattcgtttcggatggttattatggtgtaggtgcgggtcgttgtgcgggcggcggggcggggacgcggcgtttcgggttaattgtgttcgggaaggttgggggagggcgggtttagggagcgagcgggttcgggttcgggttttcggagcggtatttggggtttatgggttcgcggtcgttttttttttcgagcggttcggtcgattttt

SEQ ID NO: 12000 - DNA, 654 bp, Artificial Sequence
  chemically treated genomic DNA (Homo sapiens) CpG-island No: 12000
aaaaatcgaccgaaccgctcgaaaaaaaaaacgaccgcgaacccataaaccccaaataccgctccgaaaacccgaacccgaacccgctcgctccctaaacccgccctcccccaaccttcccgaacacaattaacccgaaacgccgcgtccccgccccgccgcccgcacaacgacccgcacctacaccataataaccatccgaaacgaatccttaaaaatactctcgctacatttcttacaaaaaacgcgcccgctcttaacgtactcgactcgataaaacttatccgaaaactccgccatcctcccctaactaccgccaaaactccgaaaacccgacgccacgacctaaaaacacgctaccgcctcgccgcctcgcgtacgctcacccaaccgcaaacgcctaaacgaccaaaaccgccaccgaacacgccgcaccgaccaccgccgttccctaataaattactaatacctaaccgcgaaaacgcccacgaaacccgcgtccacgaaacgaaaccgacgacgcgcgcgccccctaccgaccgaaaaacgaaatttcccgaacgcctaccgaataaaactctacgaaccgctaccctaaaaaccgaaacgaaacttaaactaaactaataactctttaaaaaacccgacgccacc

SEQ ID NO: 12001 - DNA, 634 bp, Artificial Sequence
  chemically treated genomic DNA (Homo sapiens) CpG-island No: 12001
cgtaggcgcggtacgcggtttttgttttggtttgggtttcgcggtagtcgcgttttcgtttcggcgcgggcggtagcgttcgggttggttgcggcgggcgtattcgtttagtatttttgagtcggtttggtcgtcgtcgcgggttcgacggcgggtttagtttgggtcgcgggcgcggtagcgagggtaattcgggttcgtcgcgtcggcggcgcgttgggcgtagtttcggtaaagcgagtggtcgtacggtagggtcgttgttttttcggggggttttaggtattcggcgtagttcgattttttcggtcgcggcggtagcggcggttgtagtaacggcggcgataatattaatagcgaaggtttagaagtcgggtttggggttttagttttagttgtcgtcgtttcgttatagcggtttcgtcggtttcgtcgatttagagcggttgttgtcgtcgcggaagaggttcgagtattcggatttgtagtcgttattttgtttttcgtttgaagggagagtcggttgcgagggagaagagtggagggcggggtagtacgcgcggtgggtagtgttatttatatatttatgaggggcgaggtttttgtgagtttaaagagggttttttttagattt

SEQ ID NO: 12002 - DNA, 634 bp, Artificial Sequence
  chemically treated genomic DNA (Homo sapiens) CpG-island No: 12002
aaatctaaaaaaaaccctctttaaactcacaaaaacctcgcccctcataaatatataaataacactacccaccgcgcgtactaccccgccctccactcttctccctcgcaaccgactctcccttcaaacgaaaaacaaaataacgactacaaatccgaatactcgaacctcttccgcgacgacaacaaccgctctaaatcgacgaaaccgacgaaaccgctataacgaaacgacgacaactaaaactaaaaccccaaacccgacttctaaaccttcgctattaatattatcgccgccgttactacaaccgccgctaccgccgcgaccgaaaaaatcgaactacgccgaatacctaaaaccccccgaaaaaacaacgaccctaccgtacgaccactcgctttaccgaaactacgcccaacgcgccgccgacgcgacgaacccgaattaccctcgctaccgcgcccgcgacccaaactaaacccgccgtcgaacccgcgacgacgaccaaaccgactcaaaaatactaaacgaatacgcccgccgcaaccaacccgaacgctaccgcccgcgccgaaacgaaaacgcgactaccgcgaaacccaaaccaaaacaaaaaccgcgtaccgcgcctacg

SEQ ID NO: 12003 - DNA, 634 bp, Artificial Sequence
  chemically treated genomic DNA (Homo sapiens) CpG-island No: 12003
aggtttgaggagaattttttttgggtttatagaagtttcgttttttatgaatatgtagatagtattgtttatcgcgcgtattgtttcgttttttatttttttttttcgtaatcgattttttttttaaacgggaaataagatggcggttgtaggttcgagtattcgggtttttttcgcggcggtagtagtcgttttgagtcggcggggtcggcggggtcgttgtgacgagacggcggtagttaagattggggttttaggttcggtttttggattttcgttgttggtgttgtcgtcgtcgttgttgtagtcgtcgttgtcgtcgcggtcggaggaatcgggttgcgtcgggtgtttggagtttttcggagaagtagcggttttgtcgtgcggttattcgttttgtcgaggttgcgtttaacgcgtcgtcgacgcggcgggttcgggttgttttcgttgtcgcgttcgcggtttaggttgggttcgtcgtcgggttcgcgacgacggttaggtcgatttagaggtgttgggcgagtgcgttcgtcgtagttaattcgagcgttgtcgttcgcgtcgggacgggggcgcggttgtcgcggggtttaggttagagtaggagtcgcgtgtcgcgtttgcg

SEQ ID NO: 12004 - DNA, 634 bp, Artificial Sequence
  chemically treated genomic DNA (Homo sapiens) CpG-island No: 12004
cgcaaacgcgacacgcgactcctactctaacctaaaccccgcgacaaccgcgcccccgtcccgacgcgaacgacaacgctcgaattaactacgacgaacgcactcgcccaacacctctaaatcgacctaaccgtcgtcgcgaacccgacgacgaacccaacctaaaccgcgaacgcgacaacgaaaacaacccgaacccgccgcgtcgacgacgcgttaaacgcaacctcgacaaaacgaataaccgcacgacaaaaccgctacttctccgaaaaactccaaacacccgacgcaacccgattcctccgaccgcgacgacaacgacgactacaacaacgacgacgacaacaccaacaacgaaaatccaaaaaccgaacctaaaaccccaatcttaactaccgccgtctcgtcacaacgaccccgccgaccccgccgactcaaaacgactactaccgccgcgaaaaaaacccgaatactcgaacctacaaccgccatcttatttcccgtttaaaaaaaaaatcgattacgaaaaaaaaaaataaaaaacgaaacaatacgcgcgataaacaatactatctacatattcataaaaaacgaaacttctataaacccaaaaaaaattctcctcaaacct

SEQ ID NO: 12005 - DNA, 511 bp, Artificial Sequence
  chemically treated genomic DNA (Homo sapiens) CpG-island No: 12005
ttttttttcgtagttttttcgtttttattcggcgtcgcgtttggagcgttcgtttcggagattcgtataagagaggaggggaaaaagtgggtttgtttttcgggtggttaatttatcgagttcgcggtgttttagaggaggcgttagcgttaggttagcgttaggtcgggttgtttgtttttcgcggtaaagtataaatgcgttcgagcgcggcgtttgaagtttttggcgagtatagtcggttcgcgtttagttttttttcgcggtcgtcgcgtcgtcgtcgttgttgggatcgtcgtttcgtcgggttttaggttttcgcgggtcgatttcgagtttatcgagtagggggcgttcggtcgtttttatttcgcgcgttcgtaatattcgttggtgtcgcgcgtttcgttcggcgttgtgcgttcgggagatatcgggtttttttttgtttttttttttttttttttttattttttttttttttttgatcgttttttttttttggtggatt

SEQ ID NO: 12006 - DNA, 511 bp, Artificial Sequence
  chemically treated genomic DNA (Homo sapiens) CpG-island No: 12006
aatccaccaaaaaaaaaaaacgatcaaaaaaaaaaaaaaaataaaaaaaaaaaaaaaaaaaaacaaaaaaaaacccgatatctcccgaacgcacaacgccgaacgaaacgcgcgacaccaacgaatattacgaacgcgcgaaataaaaacgaccgaacgccccctactcgataaactcgaaatcgacccgcgaaaacctaaaacccgacgaaacgacgatcccaacaacgacgacgacgcgacgaccgcgaaaaaaaactaaacgcgaaccgactatactcgccaaaaacttcaaacgccgcgctcgaacgcatttatactttaccgcgaaaaacaaacaacccgacctaacgctaacctaacgctaacgcctcctctaaaacaccgcgaactcgataaattaaccacccgaaaaacaaacccactttttcccctcctctcttatacgaatctccgaaacgaacgctccaaacgcgacgccgaataaaaacgaaaaaactacgaaaaaaaa

SEQ ID NO: 12007 - DNA, 511 bp, Artificial Sequence
  chemically treated genomic DNA (Homo sapiens) CpG-island No: 12007
ggtttattagaagggagaggcgattaaaaaaagggggaaggtgagaggaagaggaggaaaaagtagggagaggttcggtgtttttcgagcgtatagcgtcgggcgaggcgcgcggtattagcgggtgttgcgggcgcgcgggatagaggcggtcgggcgttttttgttcggtgggttcggggtcggttcgcgggggtttggggttcggcggggcggcggttttagtagcggcggcggcgcggcggtcgcggagggaggttgagcgcgggtcggttgtgttcgttaagggttttaggcgtcgcgttcgggcgtatttgtattttgtcgcgggaagtaggtagttcggtttggcgttggtttagcgttggcgttttttttggggtatcgcgggttcggtggattggttattcgagaaataggtttatttttttttttttttttttgtgcgggttttcgggacggacgttttaggcgcggcgtcgagtggaggcgagggggttgcggaggggga

SEQ ID NO: 12008 - DNA, 511 bp, Artificial Sequence
  chemically treated genomic DNA (Homo sapiens) CpG-island No: 12008
tccccctccgcaaccccctcgcctccactcgacgccgcgcctaaaacgtccgtcccgaaaacccgcacaaaaaaaaaaaaaaaaaaataaacctatttctcgaataaccaatccaccgaacccgcgataccccaaaaaaaacgccaacgctaaaccaacgccaaaccgaactacctacttcccgcgacaaaatacaaatacgcccgaacgcgacgcctaaaacccttaacgaacacaaccgacccgcgctcaacctccctccgcgaccgccgcgccgccgccgctactaaaaccgccgccccgccgaaccccaaacccccgcgaaccgaccccgaacccaccgaacaaaaaacgcccgaccgcctctatcccgcgcgcccgcaacacccgctaataccgcgcgcctcgcccgacgctatacgctcgaaaaacaccgaacctctccctactttttcctcctcttcctctcaccttccccctttttttaatcgcctctcccttctaataaacc

SEQ ID NO: 12009 - DNA, 780 bp, Artificial Sequence
  chemically treated genomic DNA (Homo sapiens) CpG-island No: 12009
gttttcgcggttgcggcggttattgcggttggttgttgtttttttttcgcgttgttgttgttgttgttgttgtcgtcgtcgggtttcgggggtgacggttgttgtaatcgtttttgtttcgttttatatcgatattttgtttgttaattaaagggcgggggggagcgagggagcgtcggagagggatggagattaagcgagggatttgtaggggagcgggttggtggagaggcgtcgtgcgcgtagtcgttttagtcgggtttcggtttcggcgcgttagggattcgtcggaggaggcggaggaggagcgcgtagattcgcgtatttggtcggggggcgggatttttaggggttgcggagttcgcgtggtaaagtgaaattattatcgggagtgcgtgcgagcgagtaagcgagcgatcggcgggcgggggcgcggagatagcgcgcgtatcgggtttagtttgttttcgggggcggcgggggaggtcgggagtgtgttcgagtttggaggttgggcgagggggcggggagagggatttggtggcggggagcgggtgggggttattatttttgtatcgttttcgcgagatcgggtcggagtgttgtttagtaggtgcgtttcggttgggagtaggtgtgcgtttaattttaaaattttcggtgcgcgtcggagaggcgtcggcgtgaatttgggtatatttcgtttgtttttagttcgggggtggtgtgtgtgtgtgtgtgtgtttgttttttttgttcgtttgttttttgggtgtgtgt

SEQ ID NO: 12010 - DNA, 780 bp, Artificial Sequence
  chemically treated genomic DNA (Homo sapiens) CpG-island No: 12010
acacacacccaaaaaacaaacgaacaaaaaaaacaaacacacacacacacacacaccacccccgaactaaaaacaaacgaaatatacccaaattcacgccgacgcctctccgacgcgcaccgaaaattttaaaattaaacgcacacctactcccaaccgaaacgcacctactaaacaacactccgacccgatctcgcgaaaacgatacaaaaataataacccccacccgctccccgccaccaaatccctctccccgccccctcgcccaacctccaaactcgaacacactcccgacctcccccgccgcccccgaaaacaaactaaacccgatacgcgcgctatctccgcgcccccgcccgccgatcgctcgcttactcgctcgcacgcactcccgataataatttcactttaccacgcgaactccgcaacccctaaaaatcccgccccccgaccaaatacgcgaatctacgcgctcctcctccgcctcctccgacgaatccctaacgcgccgaaaccgaaacccgactaaaacgactacgcgcacgacgcctctccaccaacccgctcccctacaaatccctcgcttaatctccatccctctccgacgctccctcgctcccccccgccctttaattaacaaacaaaatatcgatataaaacgaaacaaaaacgattacaacaaccgtcacccccgaaacccgacgacgacaacaacaacaacaacaacaacgcgaaaaaaaaacaacaaccaaccgcaataaccgccgcaaccgcgaaaac

SEQ ID NO: 12011 - DNA, 780 bp, Artificial Sequence
  chemically treated genomic DNA (Homo sapiens) CpG-island No: 12011
atatatatttaaaggataaacgaataaaaaaggtaaatatatatatatatatatattattttcgagttaaagatagacgggatgtgtttaggtttacgtcgacgttttttcggcgcgtatcgagggttttaaagttgggcgtatatttgtttttagtcggagcgtatttgttgagtagtatttcggttcggtttcgcgagagcggtgtaggagtagtggtttttattcgtttttcgttattaaattttttttttcgttttttcgtttagtttttaggttcgggtatattttcggtttttttcgtcgttttcgggagtaggttgggttcgatgcgcgcgttgttttcgcgttttcgttcgtcgatcgttcgtttgttcgttcgtacgtattttcggtagtaattttattttgttacgcgagtttcgtagtttttagaaatttcgtttttcggttaggtgcgcgagtttgcgcgtttttttttcgtttttttcgacgggtttttggcgcgtcggggtcggggttcggttggggcggttgcgcgtacggcgtttttttattaattcgtttttttgtaggtttttcgtttggtttttattttttttcggcgttttttcgttttttttcgttttttgattgataggtaagatgtcggtgtggagcgaggtaggagcgattgtagtaatcgttattttcggagttcggcggcggtagtagtagtagtagtagtagcgcggggaggagatagtagttagtcgtagtagtcgtcgtagtcgcgggagt

SEQ ID NO: 12012 - DNA, 780 bp, Artificial Sequence
  chemically treated genomic DNA (Homo sapiens) CpG-island No: 12012
actcccgcgactacgacgactactacgactaactactatctcctccccgcgctactactactactactactaccgccgccgaactccgaaaataacgattactacaatcgctcctacctcgctccacaccgacatcttacctatcaatcaaaaaacgaaaaaaaacgaaaaaacgccgaaaaaaaataaaaaccaaacgaaaaacctacaaaaaaacgaattaataaaaaaacgccgtacgcgcaaccgccccaaccgaaccccgaccccgacgcgccaaaaacccgtcgaaaaaaacgaaaaaaaaacgcgcaaactcgcgcacctaaccgaaaaacgaaatttctaaaaactacgaaactcgcgtaacaaaataaaattactaccgaaaatacgtacgaacgaacaaacgaacgatcgacgaacgaaaacgcgaaaacaacgcgcgcatcgaacccaacctactcccgaaaacgacgaaaaaaaccgaaaatatacccgaacctaaaaactaaacgaaaaaacgaaaaaaaaaatttaataacgaaaaacgaataaaaaccactactcctacaccgctctcgcgaaaccgaaccgaaatactactcaacaaatacgctccgactaaaaacaaatatacgcccaactttaaaaccctcgatacgcgccgaaaaaacgtcgacgtaaacctaaacacatcccgtctatctttaactcgaaaataatatatatatatatatatatttaccttttttattcgtttatcctttaaatatatat

SEQ ID NO: 12013 - DNA, 778 bp, Artificial Sequence
  chemically treated genomic DNA (Homo sapiens) CpG-island No: 12013
gttcgttttcgggggcggttcgagttttagatatcggagatttttcgggatttcggggttggatcggttatagggttcgggttgcggggtcggttcgcgtttgtttggttttcgggttttttagttcgcgtcgggagtatttacgtatttgtgtacgagcgttcgtacgaggttgtagtttatggttttttcggtcgttttcgtttcgtcgtttagcgttttcgcgttcggttcggcgcgtttatgggtttcggggtattagtgcggtcgcgtttttcgtttcggttacggtttcggcgcgtcgggcggtgtagggggcggtcgcggttttttcgcgtttatgttcggttcggtcggcgaatgttgggttcgcggtttcgcgcgtcggtagttgttttattggcggtaaggttgttgttcggggtcgcgcgcgcgcgttttggcgtttttttttttttcgtcggttcgttcgttcggttgggttcggttggagtatttcggtcgcggcggagtttgcgttttgtttttttcgagttttttttttttttgttcgtcgttttttggagttttcgggtttcgttggtttttgtttttgtttcgggcgcgtacgttatcggcgtaagtgagtatgcgtttcgcggtcgtagttttcgtcggtttcgcgtttatattcgcgttcgtattcgcgcgtcggttttgttttttcgcgttttcgttcgggttttagattttgggggtagagggtagagggtagaggttagaggtcgcggggaggaat

SEQ ID NO: 12014 - DNA, 778 bp, Artificial Sequence
  chemically treated genomic DNA (Homo sapiens) CpG-island No: 12014
attcctccccgcgacctctaacctctaccctctaccctctacccccaaaatctaaaacccgaacgaaaacgcgaaaaaacaaaaccgacgcgcgaatacgaacgcgaatataaacgcgaaaccgacgaaaactacgaccgcgaaacgcatactcacttacgccgataacgtacgcgcccgaaacaaaaacaaaaaccaacgaaacccgaaaactccaaaaaacgacgaacaaaaaaaaaaaaaactcgaaaaaaacaaaacgcaaactccgccgcgaccgaaatactccaaccgaacccaaccgaacgaacgaaccgacgaaaaaaaaaaaaacgccaaaacgcgcgcgcgcgaccccgaacaacaaccttaccgccaataaaacaactaccgacgcgcgaaaccgcgaacccaacattcgccgaccgaaccgaacataaacgcgaaaaaaccgcgaccgccccctacaccgcccgacgcgccgaaaccgtaaccgaaacgaaaaacgcgaccgcactaataccccgaaacccataaacgcgccgaaccgaacgcgaaaacgctaaacgacgaaacgaaaacgaccgaaaaaaccataaactacaacctcgtacgaacgctcgtacacaaatacgtaaatactcccgacgcgaactaaaaaacccgaaaaccaaacaaacgcgaaccgaccccgcaacccgaaccctataaccgatccaaccccgaaatcccgaaaaatctccgatatctaaaactcgaaccgcccccgaaaacgaac

SEQ ID NO: 12015 - DNA, 778 bp, Artificial Sequence
  chemically treated genomic DNA (Homo sapiens) CpG-island No: 12015
gttttttttcgcggtttttgatttttgttttttgttttttgtttttagggtttggggttcgggcggaggcgcgagggggtagggtcggcgcgcgggtgcgagcgcgggtgtgggcgcggggtcggcgggggttgcggtcgcggggcgtatgtttatttgcgtcggtgacgtgcgcgttcggagtaggggtaggagttagcggggttcggaggttttagagggcggcgggtaggggaggaggagattcgggaggagtagagcgtaggtttcgtcgcggtcggggtgttttagtcgagtttaatcgagcgggcggatcgacggggagagagaaggcgttagagcgcgcgcgcgcggtttcgagtagtagttttgtcgttagtggagtagttgtcgacgcgcggggtcgcggatttagtattcgtcggtcgggtcgggtatgagcgcggaggggtcgcggtcgttttttgtatcgttcggcgcgtcgaggtcgtgatcggagcggggggcgcggtcgtattagtatttcggagtttatgggcgcgtcgagtcgggcgcgggggcgttgaacggcggagcgggagcggtcggaggagttatggattgtagtttcgtgcggacgttcgtgtatagatacgtgagtgttttcggcgcgggttgggggattcggggattagatagacgcgggtcggtttcgtagttcggattttgtggtcggtttagtttcggggtttcgggaggttttcgatgtttgggattcggatcgttttcggggacgagt

SEQ ID NO: 12016 - DNA, 778 bp, Artificial Sequence
  chemically treated genomic DNA (Homo sapiens) CpG-island No: 12016
actcgtccccgaaaacgatccgaatcccaaacatcgaaaacctcccgaaaccccgaaactaaaccgaccacaaaatccgaactacgaaaccgacccgcgtctatctaatccccgaatcccccaacccgcgccgaaaacactcacgtatctatacacgaacgtccgcacgaaactacaatccataactcctccgaccgctcccgctccgccgttcaacgcccccgcgcccgactcgacgcgcccataaactccgaaatactaatacgaccgcgccccccgctccgatcacgacctcgacgcgccgaacgatacaaaaaacgaccgcgacccctccgcgctcatacccgacccgaccgacgaatactaaatccgcgaccccgcgcgtcgacaactactccactaacgacaaaactactactcgaaaccgcgcgcgcgcgctctaacgccttctctctccccgtcgatccgcccgctcgattaaactcgactaaaacaccccgaccgcgacgaaacctacgctctactcctcccgaatctcctcctcccctacccgccgccctctaaaacctccgaaccccgctaactcctacccctactccgaacgcgcacgtcaccgacgcaaataaacatacgccccgcgaccgcaacccccgccgaccccgcgcccacacccgcgctcgcacccgcgcgccgaccctaccccctcgcgcctccgcccgaaccccaaaccctaaaaacaaaaaacaaaaaacaaaaatcaaaaaccgcgaaaaaaaac

SEQ ID NO: 12017 - DNA, 644 bp, Artificial Sequence
  chemically treated genomic DNA (Homo sapiens) CpG-island No: 12017
gttacgattgtagtcggttcggcgggggtttcgtcgttcgttttagtttggatttttgtaaaatgggggtaatagcgtcgatttggggggttcgtttcggggatgaacggtcgtttagagcgattcgggattttacgttattagtaggttggtacgattagtaggttacggttcgttaggcggtcggggttgcgattgatttggcgttttcgtttagttttttatgcgtgttgtaatttattgttatgatttttacggagtttttgaatattacgtttttttggtttagatattgtagggtgcggcggatggggaagcggttttttatgggtatggcggtaacggtggcggggtcgattttacgggtcgcgagtcgagtagcgacgagaaaggattagttagtattcgcgcggattttacgcggtttttttttagagttaggttttatttttcgcgtagacgtataggagacgtttttcggcgggtagcgtacgaagcggagtattttgggatttgtaggcggttttcgattcggcgcggcgagaatcggtgtgtgtagtttcgttttaggacgttttttttttggaaggtttaggttgtcgcgttttgtaaattagttatttttttatttatttacgggaaaa

SEQ ID NO: 12018 - DNA, 644 bp, Artificial Sequence
  chemically treated genomic DNA (Homo sapiens) CpG-island No: 12018
ttttcccgtaaataaataaaaaaataactaatttacaaaacgcgacaacctaaaccttccaaaaaaaaaacgtcctaaaacgaaactacacacaccgattctcgccgcgccgaatcgaaaaccgcctacaaatcccaaaatactccgcttcgtacgctacccgccgaaaaacgtctcctatacgtctacgcgaaaaataaaacctaactctaaaaaaaaaccgcgtaaaatccgcgcgaatactaactaatcctttctcgtcgctactcgactcgcgacccgtaaaatcgaccccgccaccgttaccgccatacccataaaaaaccgcttccccatccgccgcaccctacaatatctaaaccaaaaaaacgtaatattcaaaaactccgtaaaaatcataacaataaattacaacacgcataaaaaactaaacgaaaacgccaaatcaatcgcaaccccgaccgcctaacgaaccgtaacctactaatcgtaccaacctactaataacgtaaaatcccgaatcgctctaaacgaccgttcatccccgaaacgaaccccccaaatcgacgctattacccccattttacaaaaatccaaactaaaacgaacgacgaaacccccgccgaaccgactacaatcgtaac

SEQ ID NO: 12019 - DNA, 644 bp, Artificial Sequence
  chemically treated genomic DNA (Homo sapiens) CpG-island No: 12019
ttttttcgtgggtggatggggaaatgattaatttataggacgcgataatttaaattttttaaggggaaggcgttttaaagcgaagttgtatatatcggttttcgtcgcgtcgggtcgaaggtcgtttataagttttagagtgtttcgtttcgtgcgttgttcgtcgggaagcgttttttgtgcgtttgcgcgggaagtggaatttggttttggggagaagtcgcgtgagattcgcgcgggtgttagttagttttttttcgtcgttgttcggttcgcggttcgtggggtcggtttcgttatcgttgtcgttatgtttatgaagggtcgtttttttattcgtcgtattttgtaatatttgagttaggggaacgtggtgtttaaggatttcgtgaaggttatgatagtgaattataatacgtatggggagttgggcgagggcgttaggttagtcgtagtttcggtcgtttggcgagtcgtaatttgttagtcgtgttagtttgttggtaacgtgaggtttcgagtcgttttgggcggtcgtttattttcggggcgggttttttaggtcggcgttgttatttttattttatagaggtttagattgaggcggacggcggggttttcgtcgggtcggttgtagtcgtgat

SEQ ID NO: 12020 - DNA, 644 bp, Artificial Sequence
  chemically treated genomic DNA (Homo sapiens) CpG-island No: 12020
atcacgactacaaccgacccgacgaaaaccccgccgtccgcctcaatctaaacctctataaaataaaaataacaacgccgacctaaaaaacccgccccgaaaataaacgaccgcccaaaacgactcgaaacctcacgttaccaacaaactaacacgactaacaaattacgactcgccaaacgaccgaaactacgactaacctaacgccctcgcccaactccccatacgtattataattcactatcataaccttcacgaaatccttaaacaccacgttcccctaactcaaatattacaaaatacgacgaataaaaaaacgacccttcataaacataacgacaacgataacgaaaccgaccccacgaaccgcgaaccgaacaacgacgaaaaaaaactaactaacacccgcgcgaatctcacgcgacttctccccaaaaccaaattccacttcccgcgcaaacgcacaaaaaacgcttcccgacgaacaacgcacgaaacgaaacactctaaaacttataaacgaccttcgacccgacgcgacgaaaaccgatatatacaacttcgctttaaaacgccttccccttaaaaaatttaaattatcgcgtcctataaattaatcatttccccatccacccacgaaaaaa

SEQ ID NO: 12021 - DNA, 579 bp, Artificial Sequence
  chemically treated genomic DNA (Homo sapiens) CpG-island No: 12021
gtttttttttttttttttttttttttttgttcgtttttttttttttttttttcgttttcgttttttgttttttttgttttttcgttgttttttttttttttttttttttttttttttttttttttttttcgcgtttcgtttttttttttttttttttcgttttttttttttttttttttcggttgttgtgcgtttttttttttcgtgggttttacgttgtcgtatttgtttttttttcgttcgtttttcgtttttttttttcgtttttttttttttttgttgtttttcggtgtcgtcgtttttttttttttcgagttttgttttcgtcgtttcgttcgttttgtgttttttttttttatttggtgttgtgttatttttgtggttttcgggtcgcgcgtgttcgcgtttttttttttttcgggttttttatttttttttcgtttgtttacgtttttttttgttttttcgttttcgttttatattatttgttcgttcgttttcgtgtttgtgtatttttttttttttttttttttttgcgttttttcgtcgtcgttttttttattatattatatttttatt

SEQ ID NO: 12022 - DNA, 579 bp, Artificial Sequence
  chemically treated genomic DNA (Homo sapiens) CpG-island No: 12022
aataaaaatataatataataaaaaaaacgacgacgaaaaaacgcaaaaaaaaaaaaaaaaaaaaaaatacacaaacacgaaaacgaacgaacaaataatataaaacgaaaacgaaaaaacaaaaaaaaacgtaaacaaacgaaaaaaaaataaaaaacccgaaaaaaaaaaaaacgcgaacacgcgcgacccgaaaaccacaaaaataacacaacaccaaataaaaaaaaaaaacacaaaacgaacgaaacgacgaaaacaaaactcgaaaaaaaaaaaaacgacgacaccgaaaaacaacaaaaaaaaaaaaaaacgaaaaaaaaaaacgaaaaacgaacgaaaaaaaaacaaatacgacaacgtaaaacccacgaaaaaaaaaaacgcacaacaaccgaaaaaaaaaaaaaaaaaaaacgaaaaaaaaaaaaaaaaaaacgaaacgcgaaaaaaaaaaaaaaaaaaaaaaaaaaaaaaaaaaaaaaaaaacaacgaaaaaacaaaaaaaacaaaaaacgaaaacgaaaaaaaaaaaaaaaaaaacgaacaaaaaaaaaaaaaaaaaaaaaaaaaaac

SEQ ID NO: 12023 - DNA, 579 bp, Artificial Sequence
  chemically treated genomic DNA (Homo sapiens) CpG-island No: 12023
ggtagaagtataatatggtggggggggcggcggcggggagacgtaaaaagagggggaaaagaaggaatatataagtacgggggcgaacgagtaagtaatgtgaggcgggggcggggggataaaaggaagcgtgggtaaacgaaaaagaaataaaggattcgagagagggagaggcgcgggtacgcgcgattcgagggttataaaggtgatataatattaagtgggggggagaaatataaggcgggcggggcggcgggggtaaaattcgaaaaagaggaaggcggcgatatcggggaataataaagggggggggggacggggaaagggggcgggaaacgggcggaaaggagataagtgcgatagcgtggagtttacggggaaagggagcgtataataatcgaggggggagaaaaggggggacgggaaaaaaaggggaggaagcggggcgcggggagggaaagggggaaaaaaaaaggggaaaaagggggggaatagcggggaggtaaaagggataaaaaacgggagcgggggagaggaaagggaaggcggatagggggaaagggaaaggggggggggggt

SEQ ID NO: 12024 - DNA, 579 bp, Artificial Sequence
  chemically treated genomic DNA (Homo sapiens) CpG-island No: 12024
acccccccccccctttccctttccccctatccgccttccctttcctctcccccgctcccgttttttatcccttttacctccccgctattccccccctttttcccctttttttttccccctttccctccccgcgccccgcttcctcccctttttttcccgtccccccttttctcccccctcgattattatacgctccctttccccgtaaactccacgctatcgcacttatctcctttccgcccgtttcccgccccctttccccgtccccccccccctttattattccccgatatcgccgccttcctctttttcgaattttacccccgccgccccgcccgccttatatttctcccccccacttaatattatatcacctttataaccctcgaatcgcgcgtacccgcgcctctccctctctcgaatcctttatttctttttcgtttacccacgcttccttttatccccccgcccccgcctcacattacttactcgttcgcccccgtacttatatattccttcttttccccctctttttacgtctccccgccgccgccccccccaccatattatacttctacc

SEQ ID NO: 12025 - DNA, 1170 bp, Artificial Sequence
  chemically treated genomic DNA (Homo sapiens) CpG-island No: 12025
  unsure (414, 670)
tttttttttagcgttttgtagtcgttattttttagtatttttttagtataagaggggtcgtcgtttggttcggttttttcgtttttagtcgcgcgggtcgggggtagtagtagtagtttcgcgtcgttttcgttttagcggtttttacggtcgtttgttcggagcgcgtagaggaggttaatacgtaggaggtagagcggcggcggcggttttgggtttcggtagagggatagtcgcgttttgatgcgttataaggtttcggagtttcgagttgtcgggtttttgtcgtttttttgcgagcgtttattgaagggtattggtcgggttttttcgcggcgtttttgaatgggttattttttttattttcgagtgatatttagcggaaaaggcggtttttggcgttcgtatcgcggnggaaagtttagttttaagaggcgttcggtagtcggcgtacgttttattaatttggggtttttttaaagttcgttgcgtttacgttttttagcgttttttgtttcgtttttcgtcgttatttgtttcgcgttcgttttttggaaggcgattcgattcgagtttcgggaatttttttttttttatttagggcgatcgtttaaggagttttggttgtttgattattgtcgacgtttatagggcgttgcgaggttatttntcgcgtttcgttttttttcggttcgcgggattttttgttaatagttttagaaagtgaggacgggggcgcggaggcgggggtagtttttaggtagtgttgtttttcggtttttgggaattagttcgggggattcgcgttgggtttcgagagttcgtagaattagcgtcgtgttttgggcgagttgggaggtcggggtcgagtttcgcgagtttcgcgagtgtgttttttttagaacgtttaggtaaataattgagcgtatagaggtcgagaggatatcgtgtttttttacgtatattcgtttacggttattaagtagttttttttggaaagagggcgattgttaaagtaatagtgcgattgtcgggtttgttacgggtggagagaggcggatttacgttaggtcgtatttcgtttgtttttttcgatttcgatcgtaggcgttaattcgtttttttttttttttttgattcgtacggtttgtaacgttttttataatagta

SEQ ID NO: 12026 - DNA, 1170 bp, Artificial Sequence
  chemically treated genomic DNA (Homo sapiens) CpG-island No: 12026
  unsure (501, 757)
tactattataaaaaacgttacaaaccgtacgaatcaaaaaaaaaaaaaaaaacgaattaacgcctacgatcgaaatcgaaaaaaacaaacgaaatacgacctaacgtaaatccgcctctctccacccgtaacaaacccgacaatcgcactattactttaacaatcgccctctttccaaaaaaaactacttaataaccgtaaacgaatatacgtaaaaaaacacgatatcctctcgacctctatacgctcaattatttacctaaacgttctaaaaaaaacacactcgcgaaactcgcgaaactcgaccccgacctcccaactcgcccaaaacacgacgctaattctacgaactctcgaaacccaacgcgaatcccccgaactaattcccaaaaaccgaaaaacaacactacctaaaaactacccccgcctccgcgcccccgtcctcactttctaaaactattaacaaaaaatcccgcgaaccgaaaaaaaacgaaacgcganaaataacctcgcaacgccctataaacgtcgacaataatcaaacaaccaaaactccttaaacgatcgccctaaataaaaaaaaaaaaattcccgaaactcgaatcgaatcgccttccaaaaaacgaacgcgaaacaaataacgacgaaaaacgaaacaaaaaacgctaaaaaacgtaaacgcaacgaactttaaaaaaaccccaaattaataaaacgtacgccgactaccgaacgcctcttaaaactaaactttccnccgcgatacgaacgccaaaaaccgccttttccgctaaatatcactcgaaaataaaaaaaataacccattcaaaaacgccgcgaaaaaacccgaccaatacccttcaataaacgctcgcaaaaaaacgacaaaaacccgacaactcgaaactccgaaaccttataacgcatcaaaacgcgactatccctctaccgaaacccaaaaccgccgccgccgctctacctcctacgtattaacctcctctacgcgctccgaacaaacgaccgtaaaaaccgctaaaacgaaaacgacgcgaaactactactactacccccgacccgcgcgactaaaaacgaaaaaaccgaaccaaacgacgacccctcttatactaaaaaaatactaaaaaataacgactacaaaacgctaaaaaaaaa

SEQ ID NO: 12027 - DNA, 1170 bp, Artificial Sequence
  chemically treated genomic DNA (Homo sapiens) CpG-island No: 12027
  unsure (501, 757)
tattgttataagagacgttgtaaatcgtacgggttaagaagaaaaaaaaagacgggttagcgtttgcggtcggggtcgagaaaagtaggcgagatgcgatttgacgtgggttcgtttttttttattcgtggtaagttcgatagtcgtattattgttttaataatcgttttttttttaagaagagttatttagtgatcgtgagcgaatatgcgtgggaagatacgatgttttttcggtttttgtgcgtttagttgtttatttaggcgttttgggggaggtatattcgcgggattcgcgggattcggtttcggttttttagttcgtttaggatacgacgttggttttgcgggttttcggagtttagcgcgaatttttcgggttaatttttaagaatcgagaggtagtattgtttggaggttgttttcgttttcgcgttttcgtttttattttttgaggttgttagtagagagtttcgcgggtcggggagaagcgggacgcggnggatggtttcgtagcgttttgtgagcgtcggtagtagttaggtagttagggttttttgggcgatcgttttgggtagaggagagggagttttcggggttcgggtcgggtcgttttttaggggacgagcgcgaagtaagtggcggcgagaggcggagtaagagacgttggagggcgtggacgtagcgggttttggaaaggttttaagttaatgaggcgtgcgtcggttgtcgagcgttttttggagttgggttttttntcgcggtgcgggcgttaggagtcgtttttttcgttgggtgttattcgggggtggggaagatggtttatttaaaagcgtcgcgagggggttcggttagtgttttttagtgagcgttcgtaagaggacggtagaggttcggtagttcggagtttcgggattttgtggcgtattaggacgcggttgtttttttgtcgggatttagagtcgtcgtcgtcgttttgttttttgcgtgttagttttttttgcgcgtttcgggtaggcggtcgtgggagtcgttgagacgaggacggcgcgaggttgttgttgttgttttcggttcgcgcggttggaaacggagaggtcgagttaagcggcggttttttttatgttgggaggatgttggagagtagcggttgtaaagcgttgaaggaggg

SEQ ID NO: 12028 - DNA, 1170 bp, Artificial Sequence
  chemically treated genomic DNA (Homo sapiens) CpG-island No: 12028
  unsure (414, 670)
ccctccttcaacgctttacaaccgctactctccaacatcctcccaacataaaaaaaaccgccgcttaactcgacctctccgtttccaaccgcgcgaaccgaaaacaacaacaacaacctcgcgccgtcctcgtctcaacgactcccacgaccgcctacccgaaacgcgcaaaaaaaactaacacgcaaaaaacaaaacgacgacgacgactctaaatcccgacaaaaaaacaaccgcgtcctaatacgccacaaaatcccgaaactccgaactaccgaacctctaccgtcctcttacgaacgctcactaaaaaacactaaccgaaccccctcgcgacgcttttaaataaaccatcttccccacccccgaataacacccaacgaaaaaaacgactcctaacgcccgcaccgcganaaaaaacccaactccaaaaaacgctcgacaaccgacgcacgcctcattaacttaaaacctttccaaaacccgctacgtccacgccctccaacgtctcttactccgcctctcgccgccacttacttcgcgctcgtcccctaaaaaacgacccgacccgaaccccgaaaactccctctcctctacccaaaacgatcgcccaaaaaaccctaactacctaactactaccgacgctcacaaaacgctacgaaaccatccnccgcgtcccgcttctccccgacccgcgaaactctctactaacaacctcaaaaaataaaaacgaaaacgcgaaaacgaaaacaacctccaaacaatactacctctcgattcttaaaaattaacccgaaaaattcgcgctaaactccgaaaacccgcaaaaccaacgtcgtatcctaaacgaactaaaaaaccgaaaccgaatcccgcgaatcccgcgaatatacctcccccaaaacgcctaaataaacaactaaacgcacaaaaaccgaaaaaacatcgtatcttcccacgcatattcgctcacgatcactaaataactcttcttaaaaaaaaaacgattattaaaacaataatacgactatcgaacttaccacgaataaaaaaaaacgaacccacgtcaaatcgcatctcgcctacttttctcgaccccgaccgcaaacgctaacccgtctttttttttcttcttaacccgtacgatttacaacgtctcttataacaata

SEQ ID NO: 12029 - DNA, 687 bp, Artificial Sequence
  chemically treated genomic DNA (Homo sapiens) CpG-island No: 12029
  unsure (654)
gaggcgtaggcgttgatcgttatttacggtcgtgatcgtgattttggtcggtcgttgtggttggggtcggttaagtcgaatatcggttatacgtaagcggcggcgggtgtggttggtgtgattaagatggtgatggcgatgcggtacgggtagttgttacgtacgttgtacgtggaatcgtcgtcgtcggaggtggattggtcggcggggacggtttaattttttacggagaatacgttttggtttaggagtggtcgtgttcgtcgggtgggggtgtcgtcgttcgggattagtggtattaacgcgtacgttattttcgaatagttttcgggagtgtcgagttagtttgcggggtcgggttcgggttttgtcgtggatgtttcggtggtgtcgtggatggtgtcgggtaaaatattcgaagcgttattcgcgtaggtaacggcgttgatgatttatttggacgagcgatttgatgttttttcgttggatgttgggtattcgttggcgttgatacggtcggcgttggatgagcgagtcgtggtgttggggttcgatcgtgaaacggtgttgtgcggtgtgaaagcgttgtttgtcggttatgagggttttgggtttgtgatcggatttgtgggggttgggggtcgtaatcgggtntgtgtttttttcggttagggtggttaatggttt

SEQ ID NO: 12030 - DNA, 687 bp, Artificial Sequence
  chemically treated genomic DNA (Homo sapiens) CpG-island No: 12030
  unsure (34)
aaaccattaaccaccctaaccgaaaaaaacacanacccgattacgacccccaacccccacaaatccgatcacaaacccaaaaccctcataaccgacaaacaacgctttcacaccgcacaacaccgtttcacgatcgaaccccaacaccacgactcgctcatccaacgccgaccgtatcaacgccaacgaatacccaacatccaacgaaaaaacatcaaatcgctcgtccaaataaatcatcaacgccgttacctacgcgaataacgcttcgaatattttacccgacaccatccacgacaccaccgaaacatccacgacaaaacccgaacccgaccccgcaaactaactcgacactcccgaaaactattcgaaaataacgtacgcgttaataccactaatcccgaacgacgacacccccacccgacgaacacgaccactcctaaaccaaaacgtattctccgtaaaaaattaaaccgtccccgccgaccaatccacctccgacgacgacgattccacgtacaacgtacgtaacaactacccgtaccgcatcgccatcaccatcttaatcacaccaaccacacccgccgccgcttacgtataaccgatattcgacttaaccgaccccaaccacaacgaccgaccaaaatcacgatcacgaccgtaaataacgatcaacgcctacgcctc

SEQ ID NO: 12031 - DNA, 687 bp, Artificial Sequence
  chemically treated genomic DNA (Homo sapiens) CpG-island No: 12031
  unsure (34)
aggttattgattattttggtcgggaaaaatatanattcgattgcggtttttagtttttatagattcggttataaatttaaaatttttatgatcggtagatagcgtttttatatcgtataatatcgttttacggtcggattttagtattacggttcgtttatttagcgtcgatcgtgttaacgttagcgagtatttaatatttagcgaggagatattaggtcgttcgtttagataggttattaacgtcgttgtttgcgcggatagcgtttcgggtgttttgttcgatattatttacggtattatcggaatatttacgatagaattcgaattcggtttcgtagattgattcggtattttcgggggttgttcgaggatgacgtgcgcgttagtattattgatttcgaacgacgatatttttattcgacgaatacgattatttttgggttagggcgtgtttttcgtaaggagttgaatcgttttcgtcgattaatttattttcggcgacggcgattttacgtgtaacgtgcgtggtagttgttcgtgtcgtatcgttattattattttgattatattagttatattcgtcgtcgtttgcgtatgatcgatgttcgatttgatcgattttaattataacggtcggttaggattacgattacggtcgtaggtggcgattagcgtttgcgtttt

SEQ ID NO: 12032 - DNA, 687 bp, Artificial Sequence
  chemically treated genomic DNA (Homo sapiens) CpG-island No: 12032
  unsure (654)
aaaacgcaaacgctaatcgccacctacgaccgtaatcgtaatcctaaccgaccgttataattaaaatcgatcaaatcgaacatcgatcatacgcaaacgacgacgaatataactaatataatcaaaataataataacgatacgacacgaacaactaccacgcacgttacacgtaaaatcgccgtcgccgaaaataaattaatcgacgaaaacgattcaactccttacgaaaaacacgccctaacccaaaaataatcgtattcgtcgaataaaaatatcgtcgttcgaaatcaataatactaacgcgcacgtcatcctcgaacaacccccgaaaataccgaatcaatctacgaaaccgaattcgaattctatcgtaaatattccgataataccgtaaataatatcgaacaaaacacccgaaacgctatccgcgcaaacaacgacgttaataacctatctaaacgaacgacctaatatctcctcgctaaatattaaatactcgctaacgttaacacgatcgacgctaaataaacgaaccgtaatactaaaatccgaccgtaaaacgatattatacgatataaaaacgctatctaccgatcataaaaattttaaatttataaccgaatctataaaaactaaaaaccgcaatcgaatntatatttttcccgaccaaaataatcaataacct

SEQ ID NO: 12033 - DNA, 603 bp, Artificial Sequence
  chemically treated genomic DNA (Homo sapiens) CpG-island No: 12033
  unsure (297, 372)
tttgtcgttttttatttattattttttgcgtcgcgtttttcgcgttttttcgcggtcgtcggttttttgtaggtttttttggtagagattcgggttcgttcgttttttcggcgtcgcgttcgggggttcgttttttttcgttcggcgcgtgcgtgttttttttttcgcgtgcggtattgtttcgtcgtttatattttttttacgtttttttttttttttatttttttttttttttatttatttgtggtttcgtttttgtcggtcgtcgaatcgtttttcgtcgttgttttatttttnatttttattcgttattattataacgcgttcgcgcgtatttttttgcgttgtttgttttgttttttttcgtttatnttttttcgttatttcgtttatttagattcgcgttgtttttaaatagtcgaaacgtatcgttacgtttttttttttttatttttttcgtgatatagtatttcgataaagtatattttttaaattgtttcgcgtttttaattcgaatttgtatttttcgcgatcgcgtttttttttgcgtttgttcgtttgttttattttttatgttttatttaggtaaatcgatatatataa

SEQ ID NO: 12034 - DNA, 603 bp, Artificial Sequence
  chemically treated genomic DNA (Homo sapiens) CpG-island No: 12034
  unsure (232, 307)
ttatatatatcgatttacctaaataaaacataaaaaataaaacaaacgaacaaacgcaaaaaaaaacgcgatcgcgaaaaatacaaattcgaattaaaaacgcgaaacaatttaaaaaatatactttatcgaaatactatatcacgaaaaaaataaaaaaaaaaaaacgtaacgatacgtttcgactatttaaaaacaacgcgaatctaaataaacgaaataacgaaaaaanataaacgaaaaaaaacaaaacaaacaacgcaaaaaaatacgcgcgaacgcgttataataataacgaataaaaatnaaaaataaaacaacgacgaaaaacgattcgacgaccgacaaaaacgaaaccacaaataaataaaaaaaaaaaaaaataaaaaaaaaaaaaaacgtaaaaaaaatataaacgacgaaacaataccgcacgcgaaaaaaaaaacacgcacgcgccgaacgaaaaaaaacgaacccccgaacgcgacgccgaaaaaacgaacgaacccgaatctctaccaaaaaaacctacaaaaaaccgacgaccgcgaaaaaacgcgaaaaacgcgacgcaaaaaataataaataaaaaacgacaaa

SEQ ID NO: 12035 - DNA, 603 bp, Artificial Sequence
  chemically treated genomic DNA (Homo sapiens) CpG-island No: 12035
  unsure (232, 307)
ttgtgtatatcggtttgtttgggtggggtatagggggtagagtaagcgagtagacgtagaaggggacgcggtcgcgggaagtgtaggttcgggttagaggcgcggggtaatttaagaagtgtgttttgtcggggtgttgtattacgaaagaaataggaaggagagagcgtggcggtacgtttcggttgtttgggggtagcgcgggtttgggtgaacgggatagcgaggaaangtgagcgagaggaggtagggtaggtagcgtaagagagtgcgcgcgaacgcgttataatgataacgggtagagatnaaggataggatagcgacgagggacggttcggcggtcggtagagacgaagttataggtgggtaaaaaaggggggaggtggggaggagggggggcgtgggggagatgtggacgacggggtagtatcgtacgcggaggaagggatacgtacgcgtcgggcgggggggggcgggttttcgagcgcggcgtcggggaggcgggcgggttcgggtttttattaggagggtttataaagggtcggcgatcgcggggaggcgcggaggacgcggcgtaggaagtgatgaatggagggcggtagg

SEQ ID NO: 12036 - DNA, 603 bp, Artificial Sequence
  chemically treated genomic DNA (Homo sapiens) CpG-island No: 12036
  unsure (297, 372)
cctaccgccctccattcatcacttcctacgccgcgtcctccgcgcctccccgcgatcgccgaccctttataaaccctcctaataaaaacccgaacccgcccgcctccccgacgccgcgctcgaaaacccgcccccccccgcccgacgcgtacgtatcccttcctccgcgtacgatactaccccgtcgtccacatctcccccacgccccccctcctccccacctccccccttttttacccacctataacttcgtctctaccgaccgccgaaccgtccctcgtcgctatcctatccttnatctctacccgttatcattataacgcgttcgcgcgcactctcttacgctacctaccctacctcctctcgctcacntttcctcgctatcccgttcacccaaacccgcgctacccccaaacaaccgaaacgtaccgccacgctctctccttcctatttctttcgtaatacaacaccccgacaaaacacacttcttaaattaccccgcgcctctaacccgaacctacacttcccgcgaccgcgtccccttctacgtctactcgcttactctaccccctataccccacccaaacaaaccgatatacacaa

SEQ ID NO: 12037 - DNA, 675 bp, Artificial Sequence
  chemically treated genomic DNA (Homo sapiens) CpG-island No: 12037
  unsure (28, 39, 352, 403, 436, 636)
cggggtttcgcggacgtaacggtgggtnacgatgcggtnaattcgtcgttcggttggtgcgtttgggtcgggtgtcgtacgtcgagttattggggttgtaggatcgttggttgcggcggttgtaggtcgagttaggtattgaggtttcgtcggggattgaggcgggcgcgtttttgttttgcgagttcgcggggttcgtgtatacggtcgggttgcgcggcggtttgacgttcgaggaaattgcgcggttacgggttttgggcgtcgaggtgcgcgttataggtcgcggtggtttggttattttttacggttcgggttagttgttttgttattcggtattcgatttgcggtngtttcggtttgcgtttgcgtatgtacgtagcgtcgttggaggcgtgcgttngtgcgtttgtgcgagttttagggtttgtaggancgttcgcgcgcggttttcgttttatattggcgtttggttagacgatcgtaagatttgcgcgatcggtgagcgtcgcggcgtagggcggtatttgagagtcgaggtcggagtttgaggtttgggggcggggtttgacggggttggattaatggaggtaaggttcggaaggaggcgtatttagcgcgggttttgaattatangttattcgttgcgtttgagtttttaaatttttttttaga

SEQ ID NO: 12038 - DNA, 675 bp, Artificial Sequence
  chemically treated genomic DNA (Homo sapiens) CpG-island No: 12038
  unsure (40, 240, 273, 324, 637, 648)
tctaaaaaaaaatttaaaaactcaaacgcaacgaataacntataattcaaaacccgcgctaaatacgcctccttccgaaccttacctccattaatccaaccccgtcaaaccccgcccccaaacctcaaactccgacctcgactctcaaataccgccctacgccgcgacgctcaccgatcgcgcaaatcttacgatcgtctaaccaaacgccaatataaaacgaaaaccgcgcgcgaacgntcctacaaaccctaaaactcgcacaaacgcacnaacgcacgcctccaacgacgctacgtacatacgcaaacgcaaaccgaaacnaccgcaaatcgaataccgaataacaaaacaactaacccgaaccgtaaaaaataaccaaaccaccgcgacctataacgcgcacctcgacgcccaaaacccgtaaccgcgcaatttcctcgaacgtcaaaccgccgcgcaacccgaccgtatacacgaaccccgcgaactcgcaaaacaaaaacgcgcccgcctcaatccccgacgaaacctcaatacctaactcgacctacaaccgccgcaaccaacgatcctacaaccccaataactcgacgtacgacacccgacccaaacgcaccaaccgaacgacgaattnaccgcatcgtnacccaccgttacgtccgcgaaaccccg

SEQ ID NO: 12039 - DNA, 675 bp, Artificial Sequence
  chemically treated genomic DNA (Homo sapiens) CpG-island No: 12039
  unsure (40, 240, 273, 324, 637, 648)
tttgaaaaggggtttaaaaatttaaacgtagcgggtagtntgtgatttaaaattcgcgttagatacgttttttttcgggttttatttttattggtttagtttcgttagatttcgtttttaggttttaagtttcgatttcggtttttaggtatcgttttgcgtcgcggcgtttatcgatcgcgtagattttgcgatcgtttagttagacgttagtgtagggcgggggtcgcgcgcgggcgnttttgtaggttttggagttcgtataggcgtatnggcgtacgtttttagcgacgttacgtgtatgcgtaagcgtaggtcgagatngtcgtaggtcgagtatcgggtggtaaagtagttggttcgggtcgtggaaggtggttaggttatcgcggtttgtgacgcgtatttcggcgtttaaggttcgtagtcgcgtagttttttcgggcgttaggtcgtcgcgtagttcggtcgtatatacgggtttcgcgggttcgtagagtaggagcgcgttcgttttagttttcgacggggttttaatgtttggttcggtttgtagtcgtcgtagttagcggttttgtagttttagtagttcggcgtacggtattcgatttaggcgtattagtcgaacggcgggttngtcgtatcgtngtttatcgttgcgttcgcggggtttcg

SEQ ID NO: 12040 - DNA, 675 bp, Artificial Sequence
  chemically treated genomic DNA (Homo sapiens) CpG-island No: 12040
  unsure (28, 39, 352, 403, 436, 636)
cgaaaccccgcgaacgcaacgataaacnacgatacgacnaacccgccgttcgactaatacgcctaaatcgaataccgtacgccgaactactaaaactacaaaaccgctaactacgacgactacaaaccgaaccaaacattaaaaccccgtcgaaaactaaaacgaacgcgctcctactctacgaacccgcgaaacccgtatatacgaccgaactacgcgacgacctaacgcccgaaaaaactacgcgactacgaaccttaaacgccgaaatacgcgtcacaaaccgcgataacctaaccaccttccacgacccgaaccaactactttaccacccgatactcgacctacgacnatctcgacctacgcttacgcatacacgtaacgtcgctaaaaacgtacgccnatacgcctatacgaactccaaaacctacaaaancgcccgcgcgcgacccccgccctacactaacgtctaactaaacgatcgcaaaatctacgcgatcgataaacgccgcgacgcaaaacgatacctaaaaaccgaaatcgaaacttaaaacctaaaaacgaaatctaacgaaactaaaccaataaaaataaaacccgaaaaaaaacgtatctaacgcgaattttaaatcacanactacccgctacgtttaaatttttaaaccccttttcaaa

SEQ ID NO: 12041 - DNA, 917 bp, Artificial Sequence
  chemically treated genomic DNA (Homo sapiens) CpG-island No: 12041
aaaacgcgcgggcgttttagtttttcgttttgcggtattttatttgttttcgaggattatcgttaagaagaggtttcgtcgtgttattgatattttatttcgttttttttcgcgaggtgttttcgagttttcgaggacgcggaacgtcggggtttttcgtcgggtaagtattagtatttagatttcgtacgtagttttgtatttttacgttttttagggaacgtcggttcgttcgttttcgggatttttcgttttttaagttaaggttttttaagtttagtgttcgcgcgttattttttttttcgattttgcggcgggatttttattttcgtattttttcgcggggttggttaagtttttagattttttgcgttgtagtcggttcggaaagttatttttaggttattttttcgcgcgcgcgcggcggcggttacggtggcggcggttgcgattcgaacgggtttttttatgtatcgcgtagggtagaggagggagcggcgtttcgtacgtcggggttggggcgttgggtagggcgggcgggcgtggggtttcgggttttttcgtatttagtcgcgcgagtcgggttttcgggtttaggggaggggagttgaggggcggagttatcggggcgcgttttcgcggttgcgttttttttcgtcggggagcgcgggtacgtaattcggagggtgttgggtcggttcggagtacgcgagtagcgggaggagggatcggggaatgattgacggaggcgggtcgtagaggtcgttgtgtttcgtcggttcgtattcggtcggagtgtgcgcgcgtagtttgttagattagcggcgggggtacgggtcgtattaagtgacggaggggggtacgttttgggtaggatttttttttcgttattgatttgtttattttgtaagagagat

SEQ ID NO: 12042 - DNA, 917 bp, Artificial Sequence
  chemically treated genomic DNA (Homo sapiens) CpG-island No: 12042
atctctcttacaaaataaacaaatcaataacgaaaaaaaaatcctacccaaaacgtacccccctccgtcacttaatacgacccgtacccccgccgctaatctaacaaactacgcgcgcacactccgaccgaatacgaaccgacgaaacacaacgacctctacgacccgcctccgtcaatcattccccgatccctcctcccgctactcgcgtactccgaaccgacccaacaccctccgaattacgtacccgcgctccccgacgaaaaaaaacgcaaccgcgaaaacgcgccccgataactccgcccctcaactcccctcccctaaacccgaaaacccgactcgcgcgactaaatacgaaaaaacccgaaaccccacgcccgcccgccctacccaacgccccaaccccgacgtacgaaacgccgctccctcctctaccctacgcgatacataaaaaaacccgttcgaatcgcaaccgccgccaccgtaaccgccgccgcgcgcgcgcgaaaaaataacctaaaaataactttccgaaccgactacaacgcaaaaaatctaaaaacttaaccaaccccgcgaaaaaatacgaaaataaaaatcccgccgcaaaatcgaaaaaaaaaataacgcgcgaacactaaacttaaaaaaccttaacttaaaaaacgaaaaatcccgaaaacgaacgaaccgacgttccctaaaaaacgtaaaaatacaaaactacgtacgaaatctaaatactaatacttacccgacgaaaaaccccgacgttccgcgtcctcgaaaactcgaaaacacctcgcgaaaaaaaacgaaataaaatatcaataacacgacgaaacctcttcttaacgataatcctcgaaaacaaataaaataccgcaaaacgaaaaactaaaacgcccgcgcgtttt

SEQ ID NO: 12043 - DNA, 917 bp, Artificial Sequence
  chemically treated genomic DNA (Homo sapiens) CpG-island No: 12043
attttttttgtagagtaggtaggttaatgacgaggagagggttttgtttagagcgtgttttttttcgttatttggtacggttcgtgttttcgtcgttgatttggtaggttgcgcgcgtatatttcggtcgggtgcgggtcggcggggtatagcggtttttacggttcgttttcgttagttatttttcggttttttttttcgttgttcgcgtgtttcgggtcggtttagtatttttcgagttacgtgttcgcgtttttcggcggggaggagcgtagtcgcgggggcgcgtttcggtgatttcgttttttagttttttttttttgagttcgggagttcggttcgcgcggttaggtgcgaggagattcgggattttacgttcgttcgttttgtttagcgttttagtttcggcgtgcgaggcgtcgtttttttttttgttttgcgcggtgtatggaggggttcgttcggatcgtagtcgtcgttatcgtagtcgtcgtcgcgcgcgcgcggggggatgatttgggggtggtttttcgagtcggttgtagcgtaggaggtttggaggtttagttagtttcgcggagaggtgcgggggtgggggtttcgtcgtagggtcggagggaggggtggcgcgcgggtattgggtttggggggttttggtttaggggacgggaggtttcggggacgggcgggtcggcgttttttggagggcgtgggggtgtagggttgcgtgcggggtttggatgttgatgtttgttcggcggggagtttcggcgtttcgcgttttcgggggttcggaggtatttcgcgggaggaggcggggtgaggtgttagtgatacgacgaaatttttttttgacgatggttttcgggggtaggtgagatgtcgtagagcggggagttagggcgttcgcgcgtttt

SEQ ID NO: 12044 - DNA, 917 bp, Artificial Sequence
  chemically treated genomic DNA (Homo sapiens) CpG-island No: 12044
aaaacgcgcgaacgccctaactccccgctctacgacatctcacctacccccgaaaaccatcgtcaaaaaaaaatttcgtcgtatcactaacacctcaccccgcctcctcccgcgaaatacctccgaacccccgaaaacgcgaaacgccgaaactccccgccgaacaaacatcaacatccaaaccccgcacgcaaccctacacccccacgccctccaaaaaacgccgacccgcccgtccccgaaacctcccgtcccctaaaccaaaaccccccaaacccaatacccgcgcgccacccctccctccgaccctacgacgaaacccccacccccgcacctctccgcgaaactaactaaacctccaaacctcctacgctacaaccgactcgaaaaaccacccccaaatcatccccccgcgcgcgcgcgacgacgactacgataacgacgactacgatccgaacgaacccctccatacaccgcgcaaaacaaaaaaaaaaacgacgcctcgcacgccgaaactaaaacgctaaacaaaacgaacgaacgtaaaatcccgaatctcctcgcacctaaccgcgcgaaccgaactcccgaactcaaaaaaaaaaaactaaaaaacgaaatcaccgaaacgcgcccccgcgactacgctcctccccgccgaaaaacgcgaacacgtaactcgaaaaatactaaaccgacccgaaacacgcgaacaacgaaaaaaaaaaccgaaaaataactaacgaaaacgaaccgtaaaaaccgctataccccgccgacccgcacccgaccgaaatatacgcgcgcaacctaccaaatcaacgacgaaaacacgaaccgtaccaaataacgaaaaaaaacacgctctaaacaaaaccctctcctcgtcattaacctacctactctacaaaaaaaat

SEQ ID NO: 12045 - DNA, 585 bp, Artificial Sequence
  chemically treated genomic DNA (Homo sapiens) CpG-island No: 12045
ggtgtaggaatgtggagtataggtagtatttcggtatcgtggtgaggttaatcggtataggaacgtggagtataggtagtattttagtatcgtggtgaggttaatcggtgtaggaacgtggagtataggtagtattcgggtatcgcggtgaggttaattggtgtaggaatacggagtagaagtagtattcgggtatcgcggtgaggttaataggtataggaacgtggagtagaggtagaattcgggtatcgcggtgaggttaatcggtgtaggaacgtggagtagaattagtatttgggtatcgcggtgaggttaatcggtgtaggaacgtggagtagaggtagtatttgggtattatagtgaggttaatcggtgtaggaacgtggagtagaattagtatttgggtatcgcggtgaggttaatcggtgtaggaacgtggagtagaggtagtatttgggtattatagtgaggttaattggtgcgggaacgtggagtagaagtagtattcgggtatcgtaggaggttaatcggtgtaggaatttgtagtggtcgttttttttgtatagtttttagagtcggtgttta

SEQ ID NO: 12046 - DNA, 585 bp, Artificial Sequence
  chemically treated genomic DNA (Homo sapiens) CpG-island No: 12046
taaacaccgactctaaaaactatacaaaaaaaacgaccactacaaattcctacaccgattaacctcctacgatacccgaatactacttctactccacgttcccgcaccaattaacctcactataatacccaaatactacctctactccacgttcctacaccgattaacctcaccgcgatacccaaatactaattctactccacgttcctacaccgattaacctcactataatacccaaatactacctctactccacgttcctacaccgattaacctcaccgcgatacccaaatactaattctactccacgttcctacaccgattaacctcaccgcgatacccgaattctacctctactccacgttcctatacctattaacctcaccgcgatacccgaatactacttctactccgtattcctacaccaattaacctcaccgcgatacccgaatactacctatactccacgttcctacaccgattaacctcaccacgatactaaaatactacctatactccacgttcctataccgattaacctcaccacgataccgaaatactacctatactccacattcctacacc

SEQ ID NO: 12047 - DNA, 585 bp, Artificial Sequence
  chemically treated genomic DNA (Homo sapiens) CpG-island No: 12047
taagtatcggttttgggggttgtgtaagaagggcgattattgtaagtttttgtatcggttgattttttgcgatgttcgaatgttatttttattttacgttttcgtattagttgattttattgtgatgtttaaatgttgtttttattttacgtttttatatcggttgattttatcgcgatgtttaagtgttaattttattttacgtttttgtatcggttgattttattgtgatgtttaaatgttgtttttattttacgtttttatatcggttgattttatcgcgatgtttaagtgttaattttattttacgtttttgtatcggttgattttatcgcgatgttcgaattttatttttattttacgtttttgtatttgttgattttatcgcgatgttcgaatgttatttttatttcgtgtttttgtattagttgattttatcgcgatgttcgaatgttatttgtattttacgtttttatatcggttgattttattacgatgttggaatgttatttgtattttacgtttttgtatcggttgattttattacgatgtcggaatgttatttgtattttatatttttgtatt

SEQ ID NO: 12048 - DNA, 585 bp, Artificial Sequence
  chemically treated genomic DNA (Homo sapiens) CpG-island No: 12048
aatacaaaaatataaaatacaaataacattccgacatcgtaataaaatcaaccgatacaaaaacgtaaaatacaaataacattccaacatcgtaataaaatcaaccgatataaaaacgtaaaatacaaataacattcgaacatcgcgataaaatcaactaatacaaaaacacgaaataaaaataacattcgaacatcgcgataaaatcaacaaatacaaaaacgtaaaataaaaataaaattcgaacatcgcgataaaatcaaccgatacaaaaacgtaaaataaaattaacacttaaacatcgcgataaaatcaaccgatataaaaacgtaaaataaaaacaacatttaaacatcacaataaaatcaaccgatacaaaaacgtaaaataaaattaacacttaaacatcgcgataaaatcaaccgatataaaaacgtaaaataaaaacaacatttaaacatcacaataaaatcaactaatacgaaaacgtaaaataaaaataacattcgaacatcgcaaaaaatcaaccgatacaaaaacttacaataatcgcccttcttacacaacccccaaaaccgatactta

SEQ ID NO: 12049 - DNA, 754 bp, Artificial Sequence
  chemically treated genomic DNA (Homo sapiens) CpG-island No: 12049
ggtgagatcggtttgcgggggcgcgggtttttttttagtagttttacgttcgtttggttcggcgtttgaggggtagcgacgtagtttacgtcgtttttagagtttgtcgggaggggcgttacgtgatttcgggtgcggttttcgcgttgaagttttggagcgaattcgaattttttttttaggttcgttttttgcggttcgtagcgggtaggttggtttggatgtcggcgatagagagattggggcggcgttcggggttttagagagttaagacggcgtttatcggatagaggtagagtacggtttttattaacgttagtaagaaggtaacggcgaagatcgcgaagtttaatatggttttgtcgtttagggagttacgtttcggatcggtcgttttagtagtagcgttttagtttggtttaatttaaggtatagcgtgtgggcgggggtatttcgcgggattcggaaattaacgggtcgttgggggcgtgatcgaggtttgcggtcggcgttagaggaaagagtaatggatcgtcgaggagtcggggcgcgggtttttgagcgtagtaggtcgaggttgaggtcgtttagcgttagtttttatcgtaaggcggggatttcggtgtatacgattttagatagaatatgttcgcgatttcggatcgggttgttggcgaaagtagagtttagttttttgagaaaagttaggagttagtagtgttttgttcgtttaatagttttcgtaatggattta

SEQ ID NO: 12050 - DNA, 754 bp, Artificial Sequence
  chemically treated genomic DNA (Homo sapiens) CpG-island No: 12050
taaatccattacgaaaactattaaacgaacaaaacactactaactcctaacttttctcaaaaaactaaactctactttcgccaacaacccgatccgaaatcgcgaacatattctatctaaaatcgtatacaccgaaatccccgccttacgataaaaactaacgctaaacgacctcaacctcgacctactacgctcaaaaacccgcgccccgactcctcgacgatccattactctttcctctaacgccgaccgcaaacctcgatcacgcccccaacgacccgttaatttccgaatcccgcgaaatacccccgcccacacgctataccttaaattaaaccaaactaaaacgctactactaaaacgaccgatccgaaacgtaactccctaaacgacaaaaccatattaaacttcgcgatcttcgccgttaccttcttactaacgttaataaaaaccgtactctacctctatccgataaacgccgtcttaactctctaaaaccccgaacgccgccccaatctctctatcgccgacatccaaaccaacctacccgctacgaaccgcaaaaaacgaacctaaaaaaaaaattcgaattcgctccaaaacttcaacgcgaaaaccgcacccgaaatcacgtaacgcccctcccgacaaactctaaaaacgacgtaaactacgtcgctacccctcaaacgccgaaccaaacgaacgtaaaactactaaaaaaaaacccgcgcccccgcaaaccgatctcacc

SEQ ID NO: 12051 - DNA, 754 bp, Artificial Sequence
  chemically treated genomic DNA (Homo sapiens) CpG-island No: 12051
tgaatttattgcgaaaattgttgggcggatagagtattattaatttttaattttttttagaaagttgggttttgttttcgttagtaattcggttcgaagtcgcgggtatattttgtttgaaatcgtgtgtatcgaaattttcgttttgcggtggaggttggcgttaggcggttttagtttcggtttgttgcgtttaggaattcgcgtttcggtttttcggcgatttattgtttttttttttggcgtcggtcgtaggtttcggttacgtttttagcggttcgttggttttcgggtttcgcggggtgttttcgtttatacgttatgttttaaattgggttaggttgaggcgttgttgttggagcggtcgattcgagacgtggttttttgggcggtagaattatgttggatttcgcgattttcgtcgttatttttttgttggcgttggtgggagtcgtgttttatttttattcggtgagcgtcgttttggttttttggggtttcgggcgtcgttttagtttttttgtcgtcggtatttaggttaatttgttcgttgcgggtcgtagggggcgggtttgagaggagggttcgggttcgttttagagttttagcgcggggatcgtattcggagttacgtgacgtttttttcggtaagttttgagagcgacgtgggttgcgtcgttattttttaggcgtcgggttaggcgggcgtagagttgttgaggaaaagttcgcgttttcgtaggtcggttttatt

SEQ ID NO: 12052 - DNA, 754 bp, Artificial Sequence
  chemically treated genomic DNA (Homo sapiens) CpG-island No: 12052
aataaaaccgacctacgaaaacgcgaacttttcctcaacaactctacgcccgcctaacccgacgcctaaaaaataacgacgcaacccacgtcgctctcaaaacttaccgaaaaaaacgtcacgtaactccgaatacgatccccgcgctaaaactctaaaacgaacccgaaccctcctctcaaacccgccccctacgacccgcaacgaacaaattaacctaaataccgacgacaaaaaaactaaaacgacgcccgaaaccccaaaaaaccaaaacgacgctcaccgaataaaaataaaacacgactcccaccaacgccaacaaaaaaataacgacgaaaatcgcgaaatccaacataattctaccgcccaaaaaaccacgtctcgaatcgaccgctccaacaacaacgcctcaacctaacccaatttaaaacataacgtataaacgaaaacaccccgcgaaacccgaaaaccaacgaaccgctaaaaacgtaaccgaaacctacgaccgacgccaaaaaaaaaaacaataaatcgccgaaaaaccgaaacgcgaattcctaaacgcaacaaaccgaaactaaaaccgcctaacgccaacctccaccgcaaaacgaaaatttcgatacacacgatttcaaacaaaatatacccgcgacttcgaaccgaattactaacgaaaacaaaacccaactttctaaaaaaaattaaaaattaataatactctatccgcccaacaattttcgcaataaattca

SEQ ID NO: 12053 - DNA, 534 bp, Artificial Sequence
  chemically treated genomic DNA (Homo sapiens) CpG-island No: 12053
gtcgtgtcggtcgtcgtcgtcgttttaggttcgcgggttgttgatagagatacgcgtcgtggtgcgtatcgagtttttttaggacggttatagtttgtgttcgggtcgggagttgggtaggtgaggacgggcggggttcggcggaattttttcggacgcgcggggcgggacgtgggcgtcgataagtgtcggcgcgcggcggcgaggttgaagtggcgttgttgttgtcgataacgcgcgttgtgatttggtataaatttgggtgtcgacggtaagtagggtagtcgagtcgtattagcgttttttttacgcgtcgcgtttagtaagcgagtggtggtaattcgatggcggtttcggaggcgcggatattttttttagttttttcgttttttgtggcgtttcgaatggttatttaacgagagaaggtgcgggtcgcgttttgttttttatttcgagtagcgggtttgaaaattagaggtttgtggagtcgattttgtattttttttttaatttttgcgatttttttggtttgtt

SEQ ID NO: 12054 - DNA, 534 bp, Artificial Sequence
  chemically treated genomic DNA (Homo sapiens) CpG-island No: 12054
aacaaaccaaaaaaatcgcaaaaattaaaaaaaaaatacaaaatcgactccacaaacctctaattttcaaacccgctactcgaaataaaaaacaaaacgcgacccgcaccttctctcgttaaataaccattcgaaacgccacaaaaaacgaaaaaactaaaaaaaatatccgcgcctccgaaaccgccatcgaattaccaccactcgcttactaaacgcgacgcgtaaaaaaaacgctaatacgactcgactaccctacttaccgtcgacacccaaatttataccaaatcacaacgcgcgttatcgacaacaacaacgccacttcaacctcgccgccgcgcgccgacacttatcgacgcccacgtcccgccccgcgcgtccgaaaaaattccgccgaaccccgcccgtcctcacctacccaactcccgacccgaacacaaactataaccgtcctaaaaaaactcgatacgcaccacgacgcgtatctctatcaacaacccgcgaacctaaaacgacgacgacgaccgacacgac

SEQ ID NO: 12055 - DNA, 534 bp, Artificial Sequence
  chemically treated genomic DNA (Homo sapiens) CpG-island No: 12055
ggtagattaagaaagtcgtaagagttgaaggaaaaatgtaaagtcggttttatagatttttggtttttagattcgttgttcggggtgaaaggtagagcgcggttcgtattttttttcgttaaatagttattcgaaacgttatagagaacgaaagggttgaggaaagtgttcgcgttttcgggatcgttatcgagttattattattcgtttgttgggcgcggcgcgtggagggggcgttggtgcgattcggttgttttatttgtcgtcggtatttaagtttgtgttaagttataacgcgcgttatcggtagtagtaacgttattttagtttcgtcgtcgcgcgtcggtatttatcggcgtttacgtttcgtttcgcgcgttcgggaaggtttcgtcgggtttcgttcgtttttatttgtttagttttcggttcgggtataggttgtagtcgttttggaagggttcggtgcgtattacggcgcgtatttttgttagtagttcgcgggtttggggcggcggcggcggtcggtacggt

SEQ ID NO: 12056 - DNA, 534 bp, Artificial Sequence
  chemically treated genomic DNA (Homo sapiens) CpG-island No: 12056
accgtaccgaccgccgccgccgccccaaacccgcgaactactaacaaaaatacgcgccgtaatacgcaccgaacccttccaaaacgactacaacctatacccgaaccgaaaactaaacaaataaaaacgaacgaaacccgacgaaaccttcccgaacgcgcgaaacgaaacgtaaacgccgataaataccgacgcgcgacgacgaaactaaaataacgttactactaccgataacgcgcgttataacttaacacaaacttaaataccgacgacaaataaaacaaccgaatcgcaccaacgccccctccacgcgccgcgcccaacaaacgaataataataactcgataacgatcccgaaaacgcgaacactttcctcaaccctttcgttctctataacgtttcgaataactatttaacgaaaaaaaatacgaaccgcgctctacctttcaccccgaacaacgaatctaaaaaccaaaaatctataaaaccgactttacatttttccttcaactcttacgactttcttaatctacc

SEQ ID NO: 12057 - DNA, 673 bp, Artificial Sequence
  chemically treated genomic DNA (Homo sapiens) CpG-island No: 12057
aataagaagacggcgttaggagttaagtggttaagtcggttttttttcgttttcggaatcgtttgttttagtttttcgtagggttggtatcgttcgtgttcggagcggatgtcggacggcggaatcgcgttgttttttaatagggaagtgttacgggatcgggattcgggagattcgggtttcgtttgcgagtttcggttttttttttttcgagatggggtcgcggtcggttatttaaggaggggtttcgtcgggaggggtcgggggtcggggtcgggttcgggttgcgttttttcggggtttcgggttttcggtttcggcggcgcgggtttatgatacgtcgtagagggtgttggcgttcggttttacggtttttgttcgggttgtcgggttcgggagcgaaaggttggtttttggggagtttagagaacgttgtgtcgcgagttttatatgagtcggtgtttggtagaagttcgcgtcgttcgcgtttaaatcgttcgtttcgtttattttacggtcggcgttttttaaaattcgaatttagcgatttttagtggttgattttggaacgttttttacgtagagcgattgtaggtagggttaatgagagtatgtatcgagatataaatatagcggcgatgataggaggataggggagattgatggtaaaatt

SEQ ID NO: 12058 - DNA, 673 bp, Artificial Sequence
  chemically treated genomic DNA (Homo sapiens) CpG-island No: 12058
aattttaccatcaatctcccctatcctcctatcatcgccgctatatttatatctcgatacatactctcattaaccctacctacaatcgctctacgtaaaaaacgttccaaaatcaaccactaaaaatcgctaaattcgaattttaaaaaacgccgaccgtaaaataaacgaaacgaacgatttaaacgcgaacgacgcgaacttctaccaaacaccgactcatataaaactcgcgacacaacgttctctaaactccccaaaaaccaacctttcgctcccgaacccgacaacccgaacaaaaaccgtaaaaccgaacgccaacaccctctacgacgtatcataaacccgcgccgccgaaaccgaaaacccgaaaccccgaaaaaacgcaacccgaacccgaccccgacccccgacccctcccgacgaaacccctccttaaataaccgaccgcgaccccatctcgaaaaaaaaaaaaccgaaactcgcaaacgaaacccgaatctcccgaatcccgatcccgtaacacttccctattaaaaaacaacgcgattccgccgtccgacatccgctccgaacacgaacgataccaaccctacgaaaaactaaaacaaacgattccgaaaacgaaaaaaaaccgacttaaccacttaactcctaacgccgtcttcttatt

SEQ ID NO: 12059 - DNA, 673 bp, Artificial Sequence
  chemically treated genomic DNA (Homo sapiens) CpG-island No: 12059
gattttattattagttttttttgtttttttattatcgtcgttatatttgtgtttcggtgtatatttttattggttttatttgtagtcgttttacgtaaggggcgttttagagttagttattgggagtcgttggattcgggttttaaaaaacgtcggtcgtgaagtgggcggagcgagcgatttgaacgcgagcggcgcggatttttgttaagtatcggtttatgtgaggttcgcggtatagcgttttttgggttttttagaagttagtttttcgttttcggattcggtagttcgagtaggagtcgtgggatcgggcgttagtattttttgcggcgtgttatgggttcgcgtcgtcggagtcgaaagttcgaggtttcgaggaggcgtagttcgagttcgatttcgattttcggtttttttcggcggggtttttttttaggtaatcggtcgcggttttatttcgaagaggagaaaatcgaggttcgtaggcggagttcggatttttcgagtttcgatttcgtggtatttttttgttgggggataacgcggtttcgtcgttcggtattcgtttcgggtacgggcggtgttagttttgcgaggggttggagtaggcggtttcgaaagcgggaagggatcggtttagttatttggtttttaacgtcgtttttttgtt

SEQ ID NO: 12060 - DNA, 673 bp, Artificial Sequence
  chemically treated genomic DNA (Homo sapiens) CpG-island No: 12060
aacaaaaaaacgacgttaaaaaccaaataactaaaccgatcccttcccgctttcgaaaccgcctactccaacccctcgcaaaactaacaccgcccgtacccgaaacgaataccgaacgacgaaaccgcgttatcccccaacaaaaaaataccacgaaatcgaaactcgaaaaatccgaactccgcctacgaacctcgattttctcctcttcgaaataaaaccgcgaccgattacctaaaaaaaaaccccgccgaaaaaaaccgaaaatcgaaatcgaactcgaactacgcctcctcgaaacctcgaactttcgactccgacgacgcgaacccataacacgccgcaaaaaatactaacgcccgatcccacgactcctactcgaactaccgaatccgaaaacgaaaaactaacttctaaaaaacccaaaaaacgctataccgcgaacctcacataaaccgatacttaacaaaaatccgcgccgctcgcgttcaaatcgctcgctccgcccacttcacgaccgacgttttttaaaacccgaatccaacgactcccaataactaactctaaaacgccccttacgtaaaacgactacaaataaaaccaataaaaatatacaccgaaacacaaatataacgacgataataaaaaaacaaaaaaaactaataataaaatc

SEQ ID NO: 12061 - DNA, 686 bp, Artificial Sequence
  chemically treated genomic DNA (Homo sapiens) CpG-island No: 12061
tttattgggggtttattcgttttggtaagttcgcgtcgggttttcggaagttacggtgggcggtttttttcgtaggggggtcgatttcggttttcgttcgtcggtttttcgttttttttttttcggaattcgggtttttttttttttcggtattttcgttttttgtttttgttcgtttcgattcggattcgtcgtcggatttattttcggattttcgtttttagttttgttcgttttgtttcgtttcggtttttttttttcggatttcgttttcgcgtttttttttgggatttcgggtttttagtttcgcgtttcgttcgttcgtttttgttttcgtttttcggtttttattcgtcgttgtcgttaagtttcgttttttttttcgttagttttttcgcgtttaggtgacggcgggtgatggaggattttagggcgggcgtttggagggataacgaagtttcgagcggtatttgcggagtcggcgcggggtcggttttttttttttggttgggtgtgttcgggtttcgtcgttttttttcgtgttggtttttcggaggtcgcgtttattcgcgttttgttttgtttcgtcgtttaaagttcgggttttgaattttgtttttttaggatttttattattttcggtttcgtggagttgggcgaggtagtttttttaattttattttatt

SEQ ID NO: 12062 - DNA, 686 bp, Artificial Sequence
  chemically treated genomic DNA (Homo sapiens) CpG-island No: 12062
aataaaataaaattaaaaaaactacctcgcccaactccacgaaaccgaaaataataaaaatcctaaaaaaacaaaattcaaaacccgaactttaaacgacgaaacaaaacaaaacgcgaataaacgcgacctccgaaaaaccaacacgaaaaaaaacgacgaaacccgaacacacccaaccaaaaaaaaaaaaccgaccccgcgccgactccgcaaataccgctcgaaacttcgttatccctccaaacgcccgccctaaaatcctccatcacccgccgtcacctaaacgcgaaaaaactaacgaaaaaaaaaacgaaacttaacgacaacgacgaataaaaaccgaaaaacgaaaacaaaaacgaacgaacgaaacgcgaaactaaaaacccgaaatcccaaaaaaaaacgcgaaaacgaaatccgaaaaaaaaaaaccgaaacgaaacaaaacgaacaaaactaaaaacgaaaatccgaaaataaatccgacgacgaatccgaatcgaaacgaacaaaaacaaaaaacgaaaataccgaaaaaaaaaaaaacccgaattccgaaaaaaaaaaaacgaaaaaccgacgaacgaaaaccgaaatcgacccccctacgaaaaaaaccgcccaccgtaacttccgaaaacccgacgcgaacttaccaaaacgaataaacccccaataaa

SEQ ID NO: 12063 - DNA, 686 bp, Artificial Sequence
  chemically treated genomic DNA (Homo sapiens) CpG-island No: 12063
agtaaaatggggttaaggaggttgtttcgtttagttttacggagtcggaggtgatgaaggttttggaagagtagaatttagaattcgagttttgggcggcggagtaggatagggcgcgggtgggcgcggttttcgggaggttagtacgagggggagcggcggggttcggatatatttagttagaaggaggaggtcgatttcgcgtcgatttcgtagatgtcgttcgggatttcgttgtttttttaggcgttcgttttggggttttttattattcgtcgttatttgggcgcggggaagttggcgggaggggaggcggggtttggcggtagcggcgggtgggggtcggggagcgggggtaggggcgggcggacggagcgcggggttggggattcggggttttagaagggggcgcggggacggggttcgaggagagggggtcggggcggggtagggcggatagggttgggggcggaggttcgggggtgggttcggcggcgagttcgggtcggggcggataggagtagggggcgggggtgtcggggaggaagggggttcgggtttcgggagggagggggcgggggatcggcgggcggggatcggggtcggtttttttgcggggagggtcgtttatcgtgattttcgggggttcggcgcgggtttgttagggcgggtgaatttttaatgga

SEQ ID NO: 12064 - DNA, 686 bp, Artificial Sequence
  chemically treated genomic DNA (Homo sapiens) CpG-island No: 12064
tccattaaaaattcacccgccctaacaaacccgcgccgaacccccgaaaatcacgataaacgaccctccccgcaaaaaaaccgaccccgatccccgcccgccgatcccccgccccctccctcccgaaacccgaacccccttcctccccgacacccccgccccctactcctatccgccccgacccgaactcgccgccgaacccacccccgaacctccgcccccaaccctatccgccctaccccgccccgaccccctctcctcgaaccccgtccccgcgcccccttctaaaaccccgaatccccaaccccgcgctccgtccgcccgcccctacccccgctccccgacccccacccgccgctaccgccaaaccccgcctcccctcccgccaacttccccgcgcccaaataacgacgaataataaaaaaccccaaaacgaacgcctaaaaaaacaacgaaatcccgaacgacatctacgaaatcgacgcgaaatcgacctcctccttctaactaaatatatccgaaccccgccgctccccctcgtactaacctcccgaaaaccgcgcccacccgcgccctatcctactccgccgcccaaaactcgaattctaaattctactcttccaaaaccttcatcacctccgactccgtaaaactaaacgaaacaacctccttaaccccattttact

SEQ ID NO: 12065 - DNA, 785 bp, Artificial Sequence
  chemically treated genomic DNA (Homo sapiens) CpG-island No: 12065
gagtatacggtgcgcgttattatcgagcgcgtgaggttgtcggtgaacgtgttggtgtttagtcggtcgtcgcgtaatttttacgatttgtattcggtgcgggagggttattgttataagttggttagtattatttttaagacggtggtgttggggttggcgttgcgtcgcgagggttcggcgtcgttgtattttttgttgtttacggatacgtcgcgtttcgcgttgtcgtagggtttgttggtcggggattcgcgcgtcgagcgtttggtgcgcgatagcgttttttattgtcgcgagcgtttcgatttcgacgagtattttacggtcgtgcgcgaggcgttagcggagttcgtcgaagattgcgttattcgcgtcgcgcgcgtttttgtttgttcgcgtcggcgtttcgggttcgttcgcgttttcggttacgttagtttttcgtcggcgagggcgattaggagtacgtgagtttcgattgggtagtcgcgttcgagttcgtcgcgtcgttcgtcgagattttttacgaggagttgtgggcgtattaggggttcgaggtttcgttcggttcgtttttagggttcgattttatttttttcggggtcgcgggatcgtcgcgtcgggagtcggaagcgtcgtcgtttttagttttttttaaattcgaggcggtgagtgagcgcgttgggggtcgagtttcgggtttagttagggtttaaagttcgtttttttgggtttcggtttcggagtatgtggtagacgaggtgtttttttcggcggggtgg

SEQ ID NO: 12066 - DNA, 785 bp, Artificial Sequence
  chemically treated genomic DNA (Homo sapiens) CpG-island No: 12066
ccaccccgccgaaaaaaacacctcgtctaccacatactccgaaaccgaaacccaaaaaaacgaactttaaaccctaactaaacccgaaactcgacccccaacgcgctcactcaccgcctcgaatttaaaaaaaactaaaaacgacgacgcttccgactcccgacgcgacgatcccgcgaccccgaaaaaaataaaatcgaaccctaaaaacgaaccgaacgaaacctcgaacccctaatacgcccacaactcctcgtaaaaaatctcgacgaacgacgcgacgaactcgaacgcgactacccaatcgaaactcacgtactcctaatcgccctcgccgacgaaaaactaacgtaaccgaaaacgcgaacgaacccgaaacgccgacgcgaacaaacaaaaacgcgcgcgacgcgaataacgcaatcttcgacgaactccgctaacgcctcgcgcacgaccgtaaaatactcgtcgaaatcgaaacgctcgcgacaataaaaaacgctatcgcgcaccaaacgctcgacgcgcgaatccccgaccaacaaaccctacgacaacgcgaaacgcgacgtatccgtaaacaacaaaaaatacaacgacgccgaaccctcgcgacgcaacgccaaccccaacaccaccgtcttaaaaataatactaaccaacttataacaataaccctcccgcaccgaatacaaatcgtaaaaattacgcgacgaccgactaaacaccaacacgttcaccgacaacctcacgcgctcgataataacgcgcaccgtatactc

SEQ ID NO: 12067 - DNA, 785 bp, Artificial Sequence
  chemically treated genomic DNA (Homo sapiens) CpG-island No: 12067
ttatttcgtcgaggaagatatttcgtttgttatatatttcggggtcggggtttaggagaacgggttttgggttttggttggattcgggattcggtttttagcgcgtttatttatcgtttcggatttgggagggattggaggcggcggcgttttcggttttcgacgcggcggtttcgcggtttcgaaggagatgagatcgagttttgggggcgggtcggacgaggtttcgggtttttggtgcgtttataatttttcgtaggggatttcggcgggcggcgcggcgggttcgggcgcggttgtttagtcggggtttacgtatttttggtcgttttcgtcggcgggaggttagcgtggtcgggggcgcgggcgagttcggggcgtcggcgcgggtaggtagaggcgcgcgcggcgcgggtggcgtagttttcggcgagtttcgttggcgtttcgcgtacggtcgtggagtattcgtcggggtcgaagcgttcgcggtagtaggaggcgttgtcgcgtattaggcgttcgacgcgcgggttttcggttagtaggttttgcggtagcgcgaagcgcggcgtgttcgtgagtagtaggaagtgtagcggcgtcgggttttcgcggcgtagcgttagttttagtattatcgttttggagatgatgttaattagtttgtagtaatgattttttcgtatcgggtgtaggtcgtaggggttgcgcggcggtcggttgggtattagtacgtttatcggtagttttacgcgttcgatgatggcgcgtatcgtgtgttt

SEQ ID NO: 12068 - DNA, 785 bp, Artificial Sequence
  chemically treated genomic DNA (Homo sapiens) CpG-island No: 12068
aaacacacgatacgcgccatcatcgaacgcgtaaaactaccgataaacgtactaatacccaaccgaccgccgcgcaacccctacgacctacacccgatacgaaaaaatcattactacaaactaattaacatcatctccaaaacgataatactaaaactaacgctacgccgcgaaaacccgacgccgctacacttcctactactcacgaacacgccgcgcttcgcgctaccgcaaaacctactaaccgaaaacccgcgcgtcgaacgcctaatacgcgacaacgcctcctactaccgcgaacgcttcgaccccgacgaatactccacgaccgtacgcgaaacgccaacgaaactcgccgaaaactacgccacccgcgccgcgcgcgcctctacctacccgcgccgacgccccgaactcgcccgcgcccccgaccacgctaacctcccgccgacgaaaacgaccaaaaatacgtaaaccccgactaaacaaccgcgcccgaacccgccgcgccgcccgccgaaatcccctacgaaaaattataaacgcaccaaaaacccgaaacctcgtccgacccgcccccaaaactcgatctcatctccttcgaaaccgcgaaaccgccgcgtcgaaaaccgaaaacgccgccgcctccaatccctcccaaatccgaaacgataaataaacgcgctaaaaaccgaatcccgaatccaaccaaaacccaaaacccgttctcctaaaccccgaccccgaaatatataacaaacgaaatatcttcctcgacgaaataa

SEQ ID NO: 12069 - DNA, 548 bp, Artificial Sequence
  chemically treated genomic DNA (Homo sapiens) CpG-island No: 12069
gttgattttcgtaggagtcgttaatttttcgggtattttcgagtgtttagagacgggaaggagcggtgggtttatgtttttttgggttattttcgggcgttcggtttttttttttttcgggttatttttattagcgttagtttcgtacgttttcgtaaggtcggttattttattttcggaggtcgttttttgtttcgtcgtttattttttatttgtagtagttgtttttaaggttattcgtagcgatgttggtcgcggaattattacgataacgtttttttggtttgtcggaatcgtttttttgttttcgttggcgttatttttattggggggggcgtggtcgcggcgtaggcgcgttgggtggtttagaagcgaattttgtatcgcgaagtttgagaggtaggtagttgcggcgttgggttggcggcggcgagtttacgtgtttttcgcggtcggttgaaatcgttggcgggcgttggttgagaggtgaggggtggtggtttagaggttcgatttgggaggttggggtttagagagtgagtagggga

SEQ ID NO: 12070 - DNA, 548 bp, Artificial Sequence
  chemically treated genomic DNA (Homo sapiens) CpG-island No: 12070
tcccctactcactctctaaaccccaacctcccaaatcgaacctctaaaccaccacccctcacctctcaaccaacgcccgccaacgatttcaaccgaccgcgaaaaacacgtaaactcgccgccgccaacccaacgccgcaactacctacctctcaaacttcgcgatacaaaattcgcttctaaaccacccaacgcgcctacgccgcgaccacgccccccccaataaaaataacgccaacgaaaacaaaaaaacgattccgacaaaccaaaaaaacgttatcgtaataattccgcgaccaacatcgctacgaataaccttaaaaacaactactacaaataaaaaataaacgacgaaacaaaaaacgacctccgaaaataaaataaccgaccttacgaaaacgtacgaaactaacgctaataaaaataacccgaaaaaaaaaaaaaccgaacgcccgaaaataacccaaaaaaacataaacccaccgctccttcccgtctctaaacactcgaaaatacccgaaaaattaacgactcctacgaaaatcaac

SEQ ID NO: 12071 - DNA, 548 bp, Artificial Sequence
  chemically treated genomic DNA (Homo sapiens) CpG-island No: 12071
ttttttatttattttttgagttttagttttttaggtcggatttttgggttattattttttattttttagttagcgttcgttaacggttttaatcggtcgcggggagtacgtggattcgtcgtcgttagtttagcgtcgtagttatttgttttttaggtttcgcggtgtagaattcgtttttgaattatttagcgcgtttgcgtcgcggttacgttttttttagtggaagtgacgttaacggaagtaggaaggcggtttcggtaagttaagggggcgttgtcgtgatgatttcgcggttagtatcgttgcgagtggttttgaaggtagttgttgtaggtgaagagtaggcggcggggtagagagcggttttcgagggtaaggtggtcggttttgcgaaggcgtgcggggttggcgttggtgggaatggttcggaaggaagggaggtcgggcgttcgaaggtggtttagaagggtatggatttatcgttttttttcgtttttgggtattcgaggatattcggggggttggcggtttttgcgagagttagt

SEQ ID NO: 12072 - DNA, 548 bp, Artificial Sequence
  chemically treated genomic DNA (Homo sapiens) CpG-island No: 12072
actaactctcgcaaaaaccgccaaccccccgaatatcctcgaatacccaaaaacgaaaaaaaacgataaatccatacccttctaaaccaccttcgaacgcccgacctcccttccttccgaaccattcccaccaacgccaaccccgcacgccttcgcaaaaccgaccaccttaccctcgaaaaccgctctctaccccgccgcctactcttcacctacaacaactaccttcaaaaccactcgcaacgatactaaccgcgaaatcatcacgacaacgcccccttaacttaccgaaaccgccttcctacttccgttaacgtcacttccactaaaaaaaacgtaaccgcgacgcaaacgcgctaaataattcaaaaacgaattctacaccgcgaaacctaaaaaacaaataactacgacgctaaactaacgacgacgaatccacgtactccccgcgaccgattaaaaccgttaacgaacgctaactaaaaaataaaaaataataacccaaaaatccgacctaaaaaactaaaactcaaaaaataaataaaaaa

SEQ ID NO: 12073 - DNA, 827 bp, Artificial Sequence
  chemically treated genomic DNA (Homo sapiens) CpG-island No: 12073
ttttattcgtttattttttttttttttcgagtttttttttttttttttcggttttttttttttttttaaattattcgaaatttaagacgtgtagcgtttgtaggtgcgcgcgggtcggcgcgggttttgggcgagtttgggattgtcgggtttcgtaggtattgattagttgggcgcgcgcgtgagtgacggcgcggttgttatggtagtcgttgagcgtcgtcgaggataaggttgtagggcggcgtgaatgggcggcgttacgcgttggcgttagagagtttgtttcggggtttcggtttcgtttcgtcgcggtttggttcgtcgtcgtcgtcgtcgttatcgtcgtcgttaatttattatttgttagggattattcgcggggttacggacggaatggatatagttgtgagaataaaattcgggaaagaaaggcgaacgttttttattgcgttagatgtgtagggaggattttgagacgcgtttttcgttttcgtaggtttttttcgtttttcggcgtattacgcgggggtggtaaaggcggtttggttagcgcggagttttcggttcggagttgtttttgattatcgcgaggggttcggacgcgagagtcgtcgcggggtttgttttagaggcggagtgagtgagttttggagttaggttgggggattttacgggtcggtttgtcgttgttacggggtgggggcgtttcggtggggagtcgaggggaatcgtattaatatttattagcggaagttttgtatatttttttatcgttcgcggatttagttttttttttagttggggtcgtttgaattttggaggtt

SEQ ID NO: 12074 - DNA, 827 bp, Artificial Sequence
  chemically treated genomic DNA (Homo sapiens) CpG-island No: 12074
aacctccaaaattcaaacgaccccaactaaaaaaaaaactaaatccgcgaacgataaaaaaatatacaaaacttccgctaataaatattaatacgattcccctcgactccccaccgaaacgcccccaccccgtaacaacgacaaaccgacccgtaaaatcccccaacctaactccaaaactcactcactccgcctctaaaacaaaccccgcgacgactctcgcgtccgaacccctcgcgataatcaaaaacaactccgaaccgaaaactccgcgctaaccaaaccgcctttaccacccccgcgtaatacgccgaaaaacgaaaaaaacctacgaaaacgaaaaacgcgtctcaaaatcctccctacacatctaacgcaataaaaaacgttcgcctttctttcccgaattttattctcacaactatatccattccgtccgtaaccccgcgaataatccctaacaaataataaattaacgacgacgataacgacgacgacgacgacgaaccaaaccgcgacgaaacgaaaccgaaaccccgaaacaaactctctaacgccaacgcgtaacgccgcccattcacgccgccctacaaccttatcctcgacgacgctcaacgactaccataacaaccgcgccgtcactcacgcgcgcgcccaactaatcaatacctacgaaacccgacaatcccaaactcgcccaaaacccgcgccgacccgcgcgcacctacaaacgctacacgtcttaaatttcgaataatttaaaaaaaaaaaaaaaaccgaaaaaaaaaaaaaaaaactcgaaaaaaaaaaaaaataaacgaataaaa

SEQ ID NO: 12075 - DNA, 827 bp, Artificial Sequence
  chemically treated genomic DNA (Homo sapiens) CpG-island No: 12075
ggtttttaaagtttaaacggttttagttagagggagggttagattcgcgggcggtgggaaggtgtgtagggttttcgttggtgggtgttggtgcggtttttttcgattttttatcgggacgtttttatttcgtggtagcgatagatcggttcgtaaggttttttagtttggttttaggatttatttatttcgtttttagggtaggtttcgcggcggttttcgcgttcgggtttttcgcggtaattagaagtagtttcgggtcgggagtttcgcgttggttaggtcgtttttgttattttcgcgtgatgcgtcggggggcgggaggagtttgcgggggcggggggcgcgttttaaggttttttttgtatatttggcgtaatggggagcgttcgtttttttttttcgggttttgtttttatagttgtgtttatttcgttcgtgatttcgcgagtgatttttgataggtgatgaattggcggcggcggtggcggcggcggcggcggcgggttaggtcgcggcggggcggagtcggagtttcggagtagattttttggcgttagcgcgtgacgtcgtttatttacgtcgttttgtagttttgttttcgacggcgtttagcggttgttatggtaatcgcgtcgttatttacgcgcgcgtttagttgattaatgtttgcgaggttcggtagttttaggttcgtttagagttcgcgtcggttcgcgcgtatttgtagacgttgtacgttttaagtttcgagtgatttggggaaggaaagaggatcgagaagaaaagaaaagggttcgggggggggggggggtgggcgggtgagg

SEQ ID NO: 12076 - DNA, 827 bp, Artificial Sequence
  chemically treated genomic DNA (Homo sapiens) CpG-island No: 12076
cctcacccgcccacccccccccccccccgaacccttttcttttcttctcgatcctctttccttccccaaatcactcgaaacttaaaacgtacaacgtctacaaatacgcgcgaaccgacgcgaactctaaacgaacctaaaactaccgaacctcgcaaacattaatcaactaaacgcgcgcgtaaataacgacgcgattaccataacaaccgctaaacgccgtcgaaaacaaaactacaaaacgacgtaaataaacgacgtcacgcgctaacgccaaaaaatctactccgaaactccgactccgccccgccgcgacctaacccgccgccgccgccgccgccaccgccgccgccaattcatcacctatcaaaaatcactcgcgaaatcacgaacgaaataaacacaactataaaaacaaaacccgaaaaaaaaaaacgaacgctccccattacgccaaatatacaaaaaaaaccttaaaacgcgccccccgcccccgcaaactcctcccgccccccgacgcatcacgcgaaaataacaaaaacgacctaaccaacgcgaaactcccgacccgaaactacttctaattaccgcgaaaaacccgaacgcgaaaaccgccgcgaaacctaccctaaaaacgaaataaataaatcctaaaaccaaactaaaaaaccttacgaaccgatctatcgctaccacgaaataaaaacgtcccgataaaaaatcgaaaaaaaccgcaccaacacccaccaacgaaaaccctacacaccttcccaccgcccgcgaatctaaccctccctctaactaaaaccgtttaaactttaaaaacc

SEQ ID NO: 12077 - DNA, 626 bp, Artificial Sequence
  chemically treated genomic DNA (Homo sapiens) CpG-island No: 12077
tttttcgtaaattttttttttattattcgcgttttttttttttattttttttttttttttttttttttttttttatttttcgtttcgtatttttattttacgtttttcgttcgtcgtttttcgtttttcgtttttcgttagtttcgtatttattgtattgtattttatttattattttagtatgtcgcgtttcgtttatttcgcggggattggttgcgaacgcggaagaattaagtttacgtttacgttcgcgtttattaatggaagcgttcgttcgttttgatagacgtgttatttttcgttaatggggacgaagggaagttttagcgtgtggtttcggcgagtgcggataaaagtcgtttcgtcgggttcgggttttattttgagtcgagttcggtgttaagcgtagttagtttagtaggcggtagcggcggtttgagttttagggtagttagtttttttcggtttcgttttttttcgcggttagtatgaaagtttttagtttcgtgaggttcgttaggaaaaatagttgtcggattatagtttgggtatttttcggagtaaaatttttgtggacgattcgatgagtttgttatataatatgaacgattgttattttaagttta

SEQ ID NO: 12078 - DNA, 626 bp, Artificial Sequence
  chemically treated genomic DNA (Homo sapiens) CpG-island No: 12078
taaacttaaaataacaatcgttcatattatataacaaactcatcgaatcgtccacaaaaattttactccgaaaaatacccaaactataatccgacaactatttttcctaacgaacctcacgaaactaaaaactttcatactaaccgcgaaaaaaaacgaaaccgaaaaaaactaactaccctaaaactcaaaccgccgctaccgcctactaaactaactacgcttaacaccgaactcgactcaaaataaaacccgaacccgacgaaacgacttttatccgcactcgccgaaaccacacgctaaaacttcccttcgtccccattaacgaaaaataacacgtctatcaaaacgaacgaacgcttccattaataaacgcgaacgtaaacgtaaacttaattcttccgcgttcgcaaccaatccccgcgaaataaacgaaacgcgacatactaaaataataaataaaatacaatacaataaatacgaaactaacgaaaaacgaaaaacgaaaaacgacgaacgaaaaacgtaaaataaaaatacgaaacgaaaaataaaaaaaaaaaaaaaaaaaaaaaaaaaaaataaaaaaaaaaaacgcgaataataaaaaaaaaatttacgaaaaa

SEQ ID NO: 12079 - DNA, 626 bp, Artificial Sequence
  chemically treated genomic DNA (Homo sapiens) CpG-island No: 12079
tgagtttggagtagtagtcgtttatgttgtatagtaggtttatcgggtcgtttataggggttttgtttcgggagatgtttaggttgtggttcgatagttgttttttttaacggattttacgggattgaaggtttttatgttgatcgcgagggaaggcgagatcgggaggagttggttgttttgaagtttaggtcgtcgttgtcgtttgttgagttagttgcgtttggtatcgggttcggtttagaatgaagttcgagttcggcggaacggtttttattcgtattcgtcggggttatacgttggagttttttttcgtttttattggcggaaggtggtacgtttattaagacgagcgggcgtttttattggtgggcgcgggcgtgggcgtgggtttggttttttcgcgttcgtagttaattttcgcggggtgggcggggcgcgatatgttggggtggtaaatagagtatagtatagtaagtgcggggttggcggggggcggggggcggggagcggcgggcggggggcgtggagtagggatgcgggacgagggataggaggagggaggaggaagagaagggaagatgggggaggggaacgcggatggtaagggggaggtttacgaggag

SEQ ID NO: 12080 - DNA, 626 bp, Artificial Sequence
  chemically treated genomic DNA (Homo sapiens) CpG-island No: 12080
ctcctcgtaaacctcccccttaccatccgcgttcccctcccccatcttcccttctcttcctcctccctcctcctatccctcgtcccgcatccctactccacgccccccgcccgccgctccccgccccccgccccccgccaaccccgcacttactatactatactctatttaccaccccaacatatcgcgccccgcccaccccgcgaaaattaactacgaacgcgaaaaaaccaaacccacgcccacgcccgcgcccaccaataaaaacgcccgctcgtcttaataaacgtaccaccttccgccaataaaaacgaaaaaaaactccaacgtataaccccgacgaatacgaataaaaaccgttccgccgaactcgaacttcattctaaaccgaacccgataccaaacgcaactaactcaacaaacgacaacgacgacctaaacttcaaaacaaccaactcctcccgatctcgccttccctcgcgatcaacataaaaaccttcaatcccgtaaaatccgttaaaaaaaacaactatcgaaccacaacctaaacatctcccgaaacaaaacccctataaacgacccgataaacctactatacaacataaacgactactactccaaactca

SEQ ID NO: 12081 - DNA, 886 bp, Artificial Sequence
  chemically treated genomic DNA (Homo sapiens) CpG-island No: 12081
gtttttagtttcggggcgcgaggtgggttgggaggttttggaaggcgggttttaggtggacgcgaatcgggggaggaagggattcgggcggggtagtagtttatttggggcggaataggtgttcgggcggcgttatcgaggagttcgcgcgttttttcgttttgattttcgatcgttttcgcgggcgttggcgttggaggagggcgggggtcgtggagtcgcggtcgttcggatcgttttgcggattcgcgtcggggattgggttttgtcggggttagcgcggggcggtcgtgtggttgattattatattcggagagagttttgaggcgcgtagggcgtttttttcgtcgtaggttattcgcggatttggtttttagtttcgttatttgtcgttagtcgcggtttcggcgtatttttgcgcggcggggagggaagcgcgttttggttttaattcgattttcgtttcgttttcgggagaggttagacgtcggcgcgtacgttcgttttttagttacggggattcgcgcgtagttcgttcggacggttttggggagcgttttcggacggaagtagtgcgggcgggattgtggggcggttcgggtttttcgagcgtttgtcgggtatcgttggcgacgttggtttcgggatttttggagtcgtagtcgagggtatagtttttttcggaggcgatttttcgcggcgttagttgcgtcgatttcggtcgtggagttcgggcgttatttgttggtcgatacgaggacggcggttttcgcgcggggtttggtgggttggggcgggtattgggaattcgaggagtaattcgtggggtggaggaggtttcgggagaaaacgttagggagtgcggtttttttaaatgagtgttgtt

SEQ ID NO: 12082 - DNA, 886 bp, Artificial Sequence
  chemically treated genomic DNA (Homo sapiens) CpG-island No: 12082
aacaacactcatttaaaaaaaccgcactccctaacgttttctcccgaaacctcctccaccccacgaattactcctcgaattcccaatacccgccccaacccaccaaaccccgcgcgaaaaccgccgtcctcgtatcgaccaacaaataacgcccgaactccacgaccgaaatcgacgcaactaacgccgcgaaaaatcgcctccgaaaaaaactataccctcgactacgactccaaaaatcccgaaaccaacgtcgccaacgatacccgacaaacgctcgaaaaacccgaaccgccccacaatcccgcccgcactacttccgtccgaaaacgctccccaaaaccgtccgaacgaactacgcgcgaatccccgtaactaaaaaacgaacgtacgcgccgacgtctaacctctcccgaaaacgaaacgaaaatcgaattaaaaccaaaacgcgcttccctccccgccgcgcaaaaatacgccgaaaccgcgactaacgacaaataacgaaactaaaaaccaaatccgcgaataacctacgacgaaaaaaacgccctacgcgcctcaaaactctctccgaatataataatcaaccacacgaccgccccgcgctaaccccgacaaaacccaatccccgacgcgaatccgcaaaacgatccgaacgaccgcgactccacgacccccgccctcctccaacgccaacgcccgcgaaaacgatcgaaaatcaaaacgaaaaaacgcgcgaactcctcgataacgccgcccgaacacctattccgccccaaataaactactaccccgcccgaatcccttcctcccccgattcgcgtccacctaaaacccgccttccaaaacctcccaacccacctcgcgccccgaaactaaaaac

SEQ ID NO: 12083 - DNA, 886 bp, Artificial Sequence
  chemically treated genomic DNA (Homo sapiens) CpG-island No: 12083
agtagtatttatttggaaaggtcgtattttttggcgttttttttcgggattttttttattttacggattgtttttcgggtttttagtgttcgttttagtttattaggtttcgcgcgagagtcgtcgttttcgtgtcggttagtaggtggcgttcgggttttacggtcggagtcggcgtagttggcgtcgcgggaagtcgttttcgagaggggttgtgttttcggttgcggttttaggggtttcggggttaacgtcgttagcggtgttcggtaggcgttcgaaaggttcgggtcgttttatagtttcgttcgtattgttttcgttcggggacgttttttagggtcgttcgagcggattacgcgcgggttttcgtggttggggggcgagcgtgcgcgtcggcgtttggtttttttcggaggcgaggcgggggtcgggttgggattagagcgcgttttttttttcgtcgcgtagaggtgcgtcggggtcgcggttggcgataggtggcgggattgggggttaggttcgcgggtagtttgcgacggggaagacgttttacgcgttttagggtttttttcgggtatgatgattaattatacgatcgtttcgcgttggtttcggtagagtttagttttcggcgcgggttcgtagggcgattcgggcggtcgcggttttacggttttcgtttttttttagcgttagcgttcgcgggagcgatcgggggttagggcggggagacgcgcggatttttcggtggcgtcgttcgaatatttgtttcgttttaggtgagttgttgtttcgttcggatttttttttttttcggttcgcgtttatttgggattcgttttttagagttttttagtttatttcgcgtttcgggattgaaaat

SEQ ID NO: 12084 - DNA, 886 bp, Artificial Sequence
  chemically treated genomic DNA (Homo sapiens) CpG-island No: 12084
attttcaatcccgaaacgcgaaataaactaaaaaactctaaaaaacgaatcccaaataaacgcgaaccgaaaaaaaaaaaaatccgaacgaaacaacaactcacctaaaacgaaacaaatattcgaacgacgccaccgaaaaatccgcgcgtctccccgccctaacccccgatcgctcccgcgaacgctaacgctaaaaaaaaacgaaaaccgtaaaaccgcgaccgcccgaatcgccctacgaacccgcgccgaaaactaaactctaccgaaaccaacgcgaaacgatcgtataattaatcatcatacccgaaaaaaaccctaaaacgcgtaaaacgtcttccccgtcgcaaactacccgcgaacctaacccccaatcccgccacctatcgccaaccgcgaccccgacgcacctctacgcgacgaaaaaaaaaacgcgctctaatcccaacccgacccccgcctcgcctccgaaaaaaaccaaacgccgacgcgcacgctcgccccccaaccacgaaaacccgcgcgtaatccgctcgaacgaccctaaaaaacgtccccgaacgaaaacaatacgaacgaaactataaaacgacccgaacctttcgaacgcctaccgaacaccgctaacgacgttaaccccgaaacccctaaaaccgcaaccgaaaacacaacccctctcgaaaacgacttcccgcgacgccaactacgccgactccgaccgtaaaacccgaacgccacctactaaccgacacgaaaacgacgactctcgcgcgaaacctaataaactaaaacgaacactaaaaacccgaaaaacaatccgtaaaataaaaaaaatcccgaaaaaaaacgccaaaaaatacgacctttccaaataaatactact

SEQ ID NO: 12085 - DNA, 586 bp, Artificial Sequence
  chemically treated genomic DNA (Homo sapiens) CpG-island No: 12085
atcgggaagtcgtttaagaatttttttatcgtttcgacgttggcgtcgcgtttcgcgaatcggggttcggtcgcgtttaggtttcgtagaggtttttttttcgttttagggtttcggtcgtttgcggaagtcggtggagtattgggcgggcggggtcggagggggcgcgggttataatttcgggtcggattagggggcggtgggtcgagggcgggaagttttcgggggtcggggagcgcggggttggggatcgtcggcgggatttattaggtgtcgcgttatttcggaggaggttatggtcgcgggtaggggtacggtgaagcggttgtattagtcggtttcgagcggttggtttcggcgacggcggcgggaaggcggaggtagaagtaacgggcggggtcgaggttaggttgttttcgcgacggggaagggataggggcggggcgagttggagttttcgggggcggggttggggcggatttgtggtgcgcgttgagtttttgtttgcgttaacgagttttttataggagttattttcgacgtttgaggattgagcgttatttggggtagttgaaagagagttggg

SEQ ID NO: 12086 - DNA, 586 bp, Artificial Sequence
  chemically treated genomic DNA (Homo sapiens) CpG-island No: 12086
cccaactctctttcaactaccccaaataacgctcaatcctcaaacgtcgaaaataactcctataaaaaactcgttaacgcaaacaaaaactcaacgcgcaccacaaatccgccccaaccccgcccccgaaaactccaactcgccccgcccctatcccttccccgtcgcgaaaacaacctaacctcgaccccgcccgttacttctacctccgccttcccgccgccgtcgccgaaaccaaccgctcgaaaccgactaatacaaccgcttcaccgtacccctacccgcgaccataacctcctccgaaataacgcgacacctaataaatcccgccgacgatccccaaccccgcgctccccgacccccgaaaacttcccgccctcgacccaccgccccctaatccgacccgaaattataacccgcgccccctccgaccccgcccgcccaatactccaccgacttccgcaaacgaccgaaaccctaaaacgaaaaaaaaacctctacgaaacctaaacgcgaccgaaccccgattcgcgaaacgcgacgccaacgtcgaaacgataaaaaaattcttaaacgacttcccgat

SEQ ID NO: 12087 - DNA, 586 bp, Artificial Sequence
  chemically treated genomic DNA (Homo sapiens) CpG-island No: 12087
tttagtttttttttagttgttttaaatgacgtttagtttttaggcgtcgagggtagtttttgtgaggggttcgttggcgtaggtaaaagtttagcgcgtattataggttcgttttaatttcgttttcggaggttttagttcgtttcgtttttgtttttttttcgtcgcggaggtagtttagtttcggtttcgttcgttgtttttgttttcgttttttcgtcgtcgtcgtcgggattagtcgttcggggtcggttgatatagtcgttttatcgtgtttttgttcgcgattatggtttttttcgaggtggcgcggtatttggtgagtttcgtcgacggtttttagtttcgcgtttttcggttttcggggatttttcgttttcgatttatcgttttttggttcggttcgggattgtgattcgcgtttttttcggtttcgttcgtttagtgttttatcggttttcgtaggcggtcggagttttggggcgggagaggagtttttgcggagtttgggcgcggtcggatttcggttcgcggggcgcggcgttagcgtcgggacggtgggagagtttttgaacgatttttcggt

SEQ ID NO: 12088 - DNA, 586 bp, Artificial Sequence
  chemically treated genomic DNA (Homo sapiens) CpG-island No: 12088
accgaaaaatcgttcaaaaactctcccaccgtcccgacgctaacgccgcgccccgcgaaccgaaatccgaccgcgcccaaactccgcaaaaactcctctcccgccccaaaactccgaccgcctacgaaaaccgataaaacactaaacgaacgaaaccgaaaaaaacgcgaatcacaatcccgaaccgaaccaaaaaacgataaatcgaaaacgaaaaatccccgaaaaccgaaaaacgcgaaactaaaaaccgtcgacgaaactcaccaaataccgcgccacctcgaaaaaaaccataatcgcgaacaaaaacacgataaaacgactatatcaaccgaccccgaacgactaatcccgacgacgacgacgaaaaaacgaaaacaaaaacaacgaacgaaaccgaaactaaactacctccgcgacgaaaaaaaaacaaaaacgaaacgaactaaaacctccgaaaacgaaattaaaacgaacctataatacgcgctaaacttttacctacgccaacgaacccctcacaaaaactaccctcgacgcctaaaaactaaacgtcatttaaaacaactaaaaaaaaactaaa

SEQ ID NO: 12089 - DNA, 585 bp, Artificial Sequence
  chemically treated genomic DNA (Homo sapiens) CpG-island No: 12089
  unsure (43, 242, 408)
cgtttcgagggagggagggaggaggttgattcgggcgtttcgnaaggattcgttcggtttcggatttcgggcggtagtcggtttcgcgtttcgttttcgtttcgggagtttcgtttagtttcgtcgcgtcgcgtcgttttatcgttcgggttggttgttttggaggttacgcgcggcgatttgttacgcgtcgcgttatcgggtcgttttcggtttgggttttcgggggttggttagggagngtggcggcggttgagcggcggagcgggggcggtaaggcgcgacgtcgtcgggtcgtttcgttttgggaggcgttcgggtttttattaagtgattagtattttttttaggggaatacggttttttagaggaaagcgagttttaattcgcgggtacggcgttaagttngtcgttattttttttttgtgttaggtgatcgtttttttatttattcggaaaaatatagttcgtttttacgtttttgtggaatagcgttcgtttttaagtatcgtgattttttttgttttatttttgttttttttattttaattattttagaatttatcgagaggataatttagtttt

SEQ ID NO: 12090 - DNA, 585 bp, Artificial Sequence
  chemically treated genomic DNA (Homo sapiens) CpG-island No: 12090
  unsure (178, 344, 543)
aaaactaaattatcctctcgataaattctaaaataattaaaataaaaaaaacaaaaataaaacaaaaaaaatcacgatacttaaaaacgaacgctattccacaaaaacgtaaaaacgaactatatttttccgaataaataaaaaaacgatcacctaacacaaaaaaaaaataacgacnaacttaacgccgtacccgcgaattaaaactcgctttcctctaaaaaaccgtattcccctaaaaaaaatactaatcacttaataaaaacccgaacgcctcccaaaacgaaacgacccgacgacgtcgcgccttaccgcccccgctccgccgctcaaccgccgccacnctccctaaccaacccccgaaaacccaaaccgaaaacgacccgataacgcgacgcgtaacaaatcgccgcgcgtaacctccaaaacaaccaacccgaacgataaaacgacgcgacgcgacgaaactaaacgaaactcccgaaacgaaaacgaaacgcgaaaccgactaccgcccgaaatccgaaaccgaacgaatccttncgaaacgcccgaatcaacctcctccctccctccctcgaaacg

SEQ ID NO: 12091 - DNA, 585 bp, Artificial Sequence
  chemically treated genomic DNA (Homo sapiens) CpG-island No: 12091
  unsure (178, 344, 543)
aggattgaattattttttcggtgggttttagagtaattggaatgggaaagataagggtagggtaaagagagttacggtgtttggaagcgggcgttattttataaggacgtgggggcggattatgttttttcgggtgggtgaggagacgattatttggtataggaagaagatgacggtnggtttggcgtcgtgttcgcgggttggagttcgtttttttttgaaggatcgtgtttttttggaagggatattggttatttgatgagggttcgggcgttttttagggcggggcggttcggcggcgtcgcgttttgtcgttttcgtttcgtcgtttagtcgtcgttatnttttttgattagttttcgggagtttaggtcgggagcggttcggtgacgcggcgcgtggtaaatcgtcgcgcgtggtttttagggtagttaattcgggcggtggggcggcgcggcgcgacgggattgggcggggttttcggggcgggggcggggcgcgaggtcggttgtcgttcggagttcggggtcgggcgggtttttncgggacgttcgggttagttttttttttttttttttcgaggcg

SEQ ID NO: 12092 - DNA, 585 bp, Artificial Sequence
  chemically treated genomic DNA (Homo sapiens) CpG-island No: 12092
  unsure (43, 242, 408)
cgcctcgaaaaaaaaaaaaaaaaaactaacccgaacgtcccgnaaaaacccgcccgaccccgaactccgaacgacaaccgacctcgcgccccgcccccgccccgaaaaccccgcccaatcccgtcgcgccgcgccgccccaccgcccgaattaactaccctaaaaaccacgcgcgacgatttaccacgcgccgcgtcaccgaaccgctcccgacctaaactcccgaaaactaatcaaaaaanataacgacgactaaacgacgaaacgaaaacgacaaaacgcgacgccgccgaaccgccccgccctaaaaaacgcccgaaccctcatcaaataaccaatatcccttccaaaaaaacacgatccttcaaaaaaaaacgaactccaacccgcgaacacgacgccaaaccnaccgtcatcttcttcctataccaaataatcgtctcctcacccacccgaaaaaacataatccgcccccacgtccttataaaataacgcccgcttccaaacaccgtaactctctttaccctacccttatctttcccattccaattactctaaaacccaccgaaaaaataattcaatcct

SEQ ID NO: 12093 - DNA, 754 bp, Artificial Sequence
  chemically treated genomic DNA (Homo sapiens) CpG-island No: 12093
  unsure (352, 361, 500, 536)
gaggcggcggaggtagtgcgtacgcgtagtatagaacgagtttcggtttggtcgaggtttgttttttaaaaatagtttcggtgtggggattcgtgcgcggatgtttcggcgagtttcgggttgaaagaggcggtttcgggcggcgcgaagcgttggtggcgggttcgggttgcggcgtgtgcgcgttcgttagttgtttcggagatacggtgagggtcgcgggtagcggggtttagttcgcgacgtcggtagtgttggaggggggcggcgtttcgtttaggggatcgagtaggggttggggtggaggtgttggggcgggggacggcgcggtcgagagggtcgttcggggggntttcggggnatttttggacgaggtcgtgttcggtttggagggggttagggtcgcgttcgcgtattggcggggcgggtagggtgttgggaggcgggtagggtgttggaaggcggcgaggggtggtcgggtcggggtcggcgttgaggangttaggcgttcggggaggtggggtcggggtgttttngagggcgggtcgggggggttggatggggttcggttgggcgggtcgaggggagtttagtcgcgcgggttggtggcgagtagttttttcgggcgcgtatcgtttggggtcggggggcggtggtggacgtcgtttttttgaaagttgaaggagttttcgggagatttcggagaaggtgcgttttgagggttttttttttttttttttttttttaagttcgg

SEQ ID NO: 12094 - DNA, 754 bp, Artificial Sequence
  chemically treated genomic DNA (Homo sapiens) CpG-island No: 12094
  unsure (219, 255, 394, 403)
ccgaacttaaaaaaaaaaaaaaaaaaaaaaaaccctcaaaacgcaccttctccgaaatctcccgaaaactccttcaactttcaaaaaaacgacgtccaccaccgccccccgaccccaaacgatacgcgcccgaaaaaactactcgccaccaacccgcgcgactaaactcccctcgacccgcccaaccgaaccccatccaacccccccgacccgccctcnaaaacaccccgaccccacctccccgaacgcctaacntcctcaacgccgaccccgacccgaccacccctcgccgccttccaacaccctacccgcctcccaacaccctacccgccccgccaatacgcgaacgcgaccctaaccccctccaaaccgaacacgacctcgtccaaaaatnccccgaaanccccccgaacgaccctctcgaccgcgccgtcccccgccccaacacctccaccccaacccctactcgatcccctaaacgaaacgccgcccccctccaacactaccgacgtcgcgaactaaaccccgctacccgcgaccctcaccgtatctccgaaacaactaacgaacgcgcacacgccgcaacccgaacccgccaccaacgcttcgcgccgcccgaaaccgcctctttcaacccgaaactcgccgaaacatccgcgcacgaatccccacaccgaaactatttttaaaaaacaaacctcgaccaaaccgaaactcgttctatactacgcgtacgcactacctccgccgcctc

SEQ ID NO: 12095 - DNA, 754 bp, Artificial Sequence
  chemically treated genomic DNA (Homo sapiens) CpG-island No: 12095
  unsure (219, 255, 394, 403)
tcgggtttggagggaaaaggggaaggaaagggtttttagagcgtatttttttcggggtttttcgagaatttttttaatttttaaggaggcgacgtttattatcgtttttcggttttaagcggtgcgcgttcggggaggttgttcgttattagttcgcgcgattgagtttttttcggttcgtttagtcgagttttatttagttttttcggttcgtttttnggggtatttcggttttattttttcgggcgtttagtntttttagcgtcgatttcgattcgattatttttcgtcgttttttagtattttattcgttttttagtattttattcgtttcgttaatgcgcgaacgcgattttggttttttttaagtcggatacggtttcgtttaggggtntttcggagntttttcgggcgattttttcggtcgcgtcgtttttcgttttagtatttttattttaatttttattcggttttttaagcgagacgtcgtttttttttagtattatcggcgtcgcggattgagtttcgttgttcgcggtttttatcgtattttcggagtagttggcgggcgcgtatacgtcgtagttcgggttcgttattagcgtttcgcgtcgttcggagtcgttttttttagttcgggattcgtcgggatattcgcgtacggatttttatatcggggttatttttaggagataagtttcggttagatcggaattcgttttgtgttgcgcgtgcgtattattttcgtcgtttt

SEQ ID NO: 12096 - DNA, 754 bp, Artificial Sequence
  chemically treated genomic DNA (Homo sapiens) CpG-island No: 12096
  unsure (352, 361, 500, 536)
aaaacgacgaaaataatacgcacgcgcaacacaaaacgaattccgatctaaccgaaacttatctcctaaaaataaccccgatataaaaatccgtacgcgaatatcccgacgaatcccgaactaaaaaaaacgactccgaacgacgcgaaacgctaataacgaacccgaactacgacgtatacgcgcccgccaactactccgaaaatacgataaaaaccgcgaacaacgaaactcaatccgcgacgccgataatactaaaaaaaaacgacgtctcgcttaaaaaaccgaataaaaattaaaataaaaatactaaaacgaaaaacgacgcgaccgaaaaaatcgcccgaaaaanctccgaaanacccctaaacgaaaccgtatccgacttaaaaaaaaccaaaatcgcgttcgcgcattaacgaaacgaataaaatactaaaaaacgaataaaatactaaaaaacgacgaaaaataatcgaatcgaaatcgacgctaaaaanactaaacgcccgaaaaaataaaaccgaaataccccnaaaaacgaaccgaaaaaactaaataaaactcgactaaacgaaccgaaaaaaactcaatcgcgcgaactaataacgaacaacctccccgaacgcgcaccgcttaaaaccgaaaaacgataataaacgtcgcctccttaaaaattaaaaaaattctcgaaaaaccccgaaaaaaatacgctctaaaaaccctttccttccccttttccctccaaacccga

SEQ ID NO: 12097 - DNA, 1195 bp, Artificial Sequence
  chemically treated genomic DNA (Homo sapiens) CpG-island No: 12097
  unsure (36, 190, 397, 464, 905, 1060, 1076)
gagcgtattttaggagcgggtcgcgtatcggttganagcggcgtttttaggcgggcgttgggttcgagtattttagtatcgcgttcgtaggaggttttcggtcgcgggttgcgggttacggcgagggttgtcgggcggcgcggggtaggttttggatcgagggaaaaagttagtcggggaagttcgtatnattaaagtaagtcgttttagtcgttgagaacggagaaaagtcgtggcgtcggcgaagcgtcggacgtttaggacgtatttgtgatttttgggtcgttttcgggttcgagcgttaggacgcggcggtagtttgggtacgtcgcggggagtattcgttcgcgtagtttttttttaatttgggttcgggtttcgatttcgttttttgttntcgattcgggcgtttttatttgcgatcgtttttttcgtcgttcgttttttttattcgttcgtcgttntgtcgtttgtcgttcgttttatttcgtcgtttggtacgtacgatgttttttttttgtagtacgaacgtggattcgtttattaggttcgatacgacggttacgtttaggtcgagcgatacggcggcggggttcgggttacgcgtttttttttcggtcgtcgtcgtcgtcgtcgtcgtcgttgtcgtagttgtagtttttatttcgttcgcgttcgtttttcgagtttgcgtttgcgcgtcgcgtttcgcggggcgggatggggggtgatcgggaggcgcgggcgggggaggggagggggacgggtgggggaggagtaggaagaggggcgggggcgggacgggggtgttagggatcggcgttttaggttgcggggatagtagtggcgtcggacgcggcggtagtgaggggtcggtgaggcgttgggtggggcgggggtttttnggatttcgtaaatggaaatgtaggatttttggttaagtttttagcgcggagaaatacgtatattttttgagtggtgttttttgtaatattcgggtagcggagcgcggtaggacgtatcggcgggtagcggttttcgaagagtttttagcggaggntcggtttaatttattnggagcgcgaagttcggcgcgtcgttgtagagatcgaaggagagttttggcgttgggcgtttttttttcgtttttggcgttagagttagttatatggggttttgggtttgtgattttata

SEQ ID NO: 12098 - DNA, 1195 bp, Artificial Sequence
  chemically treated genomic DNA (Homo sapiens) CpG-island No: 12098
  unsure (120, 136, 291, 732, 799, 1006, 1160)
tataaaatcacaaacccaaaaccccatataactaactctaacgccaaaaacgaaaaaaaaacgcccaacgccaaaactctccttcgatctctacaacgacgcgccgaacttcgcgctccnaataaattaaaccgancctccgctaaaaactcttcgaaaaccgctacccgccgatacgtcctaccgcgctccgctacccgaatattacaaaaaacaccactcaaaaaatatacgtatttctccgcgctaaaaacttaaccaaaaatcctacatttccatttacgaaatccnaaaaacccccgccccacccaacgcctcaccgacccctcactaccgccgcgtccgacgccactactatccccgcaacctaaaacgccgatccctaacacccccgtcccgcccccgcccctcttcctactcctcccccacccgtccccctcccctcccccgcccgcgcctcccgatcaccccccatcccgccccgcgaaacgcgacgcgcaaacgcaaactcgaaaaacgaacgcgaacgaaataaaaactacaactacgacaacgacgacgacgacgacgacgacgaccgaaaaaaaaacgcgtaacccgaaccccgccgccgtatcgctcgacctaaacgtaaccgtcgtatcgaacctaataaacgaatccacgttcgtactacaaaaaaaaaacatcgtacgtaccaaacgacgaaataaaacgaacgacaaacgacanaacgacgaacgaataaaaaaaacgaacgacgaaaaaaacgatcgcaaataaaaacgcccgaatcganaacaaaaaacgaaatcgaaacccgaacccaaattaaaaaaaaactacgcgaacgaatactccccgcgacgtacccaaactaccgccgcgtcctaacgctcgaacccgaaaacgacccaaaaatcacaaatacgtcctaaacgtccgacgcttcgccgacgccacgacttttctccgttctcaacgactaaaacgacttactttaatnatacgaacttccccgactaactttttccctcgatccaaaacctaccccgcgccgcccgacaaccctcgccgtaacccgcaacccgcgaccgaaaacctcctacgaacgcgatactaaaatactcgaacccaacgcccgcctaaaaacgccgctntcaaccgatacgcgacccgctcctaaaatacgctc

SEQ ID NO: 12099 - DNA, 1195 bp, Artificial Sequence
  chemically treated genomic DNA (Homo sapiens) CpG-island No: 12099
  unsure (120, 136, 291, 732, 799, 1006, 1160)
tatgggattataagtttagagttttatgtagttgattttagcgttaagggcggaagagaaacgtttagcgttagggttttttttcgatttttgtagcggcgcgtcgggtttcgcgttttnggtgagttgggtcggnttttcgttggaggtttttcggggatcgttgttcgtcggtgcgttttgtcgcgtttcgttgttcggatattgtagaggatattatttagaaagtatgcgtgttttttcgcgttggaaatttaattaggagttttgtatttttatttgcgaaatttngggaattttcgttttatttagcgttttatcggttttttattgtcgtcgcgttcggcgttattgttgttttcgtagtttaaggcgtcggtttttggtattttcgtttcgttttcgtttttttttttgttttttttttattcgttttttttttttttttcgttcgcgtttttcggttattttttatttcgtttcgcggggcgcggcgcgtaggcgtaggttcggagggcgggcgcgggcggaatggggattgtagttgcggtagcggcggcggcggcggcggcggcggtcggggagggggcgcgtagttcgagtttcgtcgtcgtgtcgttcggtttgggcgtggtcgtcgtgtcgagtttggtgaacgggtttacgttcgtgttatagaagaagggtatcgtgcgtgttaagcggcgaggtagggcgggcggtaggcggtanggcggcgggcgggtgggggaggcgggcggcggagaaggcggtcgtaggtgggggcgttcgggtcggnggtaggggacggggtcggggttcgggtttaggttgggggaaggttgcgcgggcgggtgtttttcgcggcgtgtttaggttgtcgtcgcgttttggcgttcgggttcgggagcggtttaggaattataggtgcgttttgagcgttcggcgtttcgtcgacgttacggttttttttcgtttttagcggttggagcggtttgttttggtngtgcgggttttttcggttgattttttttttcggtttaagatttgtttcgcgtcgttcggtagttttcgtcgtggttcgtaattcgcggtcgggagttttttgcggacgcggtgttggggtgttcgagtttagcgttcgtttggaagcgtcgttnttagtcgatgcgcggttcgtttttagggtacgttt

SEQ ID NO: 12100 - DNA, 1195 bp, Artificial Sequence
  chemically treated genomic DNA (Homo sapiens) CpG-island No: 12100
  unsure (36, 190, 397, 464, 905, 1060, 1076)
aaacgtaccctaaaaacgaaccgcgcatcgactaanaacgacgcttccaaacgaacgctaaactcgaacaccccaacaccgcgtccgcaaaaaactcccgaccgcgaattacgaaccacgacgaaaactaccgaacgacgcgaaacaaatcttaaaccgaaaaaaaaaatcaaccgaaaaaacccgcacnaccaaaacaaaccgctccaaccgctaaaaacgaaaaaaaaccgtaacgtcgacgaaacgccgaacgctcaaaacgcacctataattcctaaaccgctcccgaacccgaacgccaaaacgcgacgacaacctaaacacgccgcgaaaaacacccgcccgcgcaaccttcccccaacctaaacccgaaccccgaccccgtcccctaccnccgacccgaacgcccccacctacgaccgccttctccgccgcccgcctcccccacccgcccgccgccntaccgcctaccgcccgccctacctcgccgcttaacacgcacgatacccttcttctataacacgaacgtaaacccgttcaccaaactcgacacgacgaccacgcccaaaccgaacgacacgacgacgaaactcgaactacgcgccccctccccgaccgccgccgccgccgccgccgccgctaccgcaactacaatccccattccgcccgcgcccgccctccgaacctacgcctacgcgccgcgccccgcgaaacgaaataaaaaataaccgaaaaacgcgaacgaaaaaaaaaaaaaaaacgaataaaaaaaaaacaaaaaaaaaaacgaaaacgaaacgaaaataccaaaaaccgacgccttaaactacgaaaacaacaataacgccgaacgcgacgacaataaaaaaccgataaaacgctaaataaaacgaaaattcccnaaatttcgcaaataaaaatacaaaactcctaattaaatttccaacgcgaaaaaacacgcatactttctaaataatatcctctacaatatccgaacaacgaaacgcgacaaaacgcaccgacgaacaacgatccccgaaaaacctccaacgaaaanccgacccaactcaccnaaaacgcgaaacccgacgcgccgctacaaaaatcgaaaaaaaaccctaacgctaaacgtttctcttccgcccttaacgctaaaatcaactacataaaactctaaacttataatcccata

SEQ ID NO: 12101 - DNA, 705 bp, Artificial Sequence
  chemically treated genomic DNA (Homo sapiens) CpG-island No: 12101
  unsure (60, 80, 225, 391, 400)
ttttattgaggattataggaaaatcgttttagaatattcggaaaggaaagttgttcgaangaattttttttcgatataanggcgggttggttcgttattaagttagttttttcgcgtttgtttgaaaggaaggagtggcgattttattttagtcggtcggtcggtcgcgcggttttttttcgtcggcgtagttttgggtatcgcggtttatatttttatataggntcgtttagttttgcgttcgtacggttatcgttttcgtcgtcgtttagtgggagatgcgagtattcggggttgaagtcgttcgtatcgttttttttatggagaagcgtcgaggaaaatttgttaaggataattttcggtatcgtcgttattatcgttgtcgggattntagggtcgngcgtcggaaaatttaggcgcggttaaatgacgtaagaggtttcgcgcgtacgcgtagtgtcgtattacgtatatttcgttttcggggttttttttcgtcgggtttcggtttttttataaggttttagtcggttgagcgcggagggcggggcgcgtagagtgtggggacgggggcggggcgtaggatttaggcgggatttggcgagggacgaagttggaagcgtagttaagtagtatagtatgttgttaggtggcgttggtcgattagtttaaaattaaatttcggcgtggtttttatttaaaacg

SEQ ID NO: 12102 - DNA, 705 bp, Artificial Sequence
  chemically treated genomic DNA (Homo sapiens) CpG-island No: 12102
  unsure (306, 315, 481, 626, 646)
cgttttaaataaaaaccacgccgaaatttaattttaaactaatcgaccaacgccacctaacaacatactatactacttaactacgcttccaacttcgtccctcgccaaatcccgcctaaatcctacgccccgcccccgtccccacactctacgcgccccgccctccgcgctcaaccgactaaaaccttataaaaaaaccgaaacccgacgaaaaaaaaccccgaaaacgaaatatacgtaatacgacactacgcgtacgcgcgaaacctcttacgtcatttaaccgcgcctaaattttccgacgcncgaccctanaatcccgacaacgataataacgacgataccgaaaattatccttaacaaattttcctcgacgcttctccataaaaaaaacgatacgaacgacttcaaccccgaatactcgcatctcccactaaacgacgacgaaaacgataaccgtacgaacgcaaaactaaacgancctatataaaaatataaaccgcgatacccaaaactacgccgacgaaaaaaaaccgcgcgaccgaccgaccgactaaaataaaatcgccactccttcctttcaaacaaacgcgaaaaaactaacttaataacgaaccaacccgccnttatatcgaaaaaaaattcnttcgaacaactttcctttccgaatattctaaaacgattttcctataatcctcaataaaa

SEQ ID NO: 12103 - DNA, 705 bp, Artificial Sequence
  chemically treated genomic DNA (Homo sapiens) CpG-island No: 12103
  unsure (306, 315, 481, 626, 646)
cgttttaaataagggttacgtcggagtttgattttgaattgatcggttaacgttatttggtagtatattgtattgtttaattacgtttttagtttcgtttttcgttaggtttcgtttggattttgcgtttcgttttcgtttttatattttacgcgtttcgtttttcgcgtttagtcgattggggttttgtaaaggaatcggaattcggcgggagagagtttcgggggcggggtgtacgtggtgcggtattgcgcgtgcgcgcgaggttttttgcgttatttagtcgcgtttaggtttttcggcgtncggttttanggtttcggtagcggtggtgacggcggtgtcggaggttgtttttggtaggtttttttcggcgtttttttatggaggaggcggtgcgaacggttttagtttcgaatgttcgtattttttattggacggcgacgaaggcggtggtcgtgcgagcgtaggattgggcggntttgtgtgggggtgtgagtcgcggtgtttaaggttgcgtcggcgaggggaagtcgcgcggtcggtcggtcgattagggtgaggtcgttattttttttttttaggtaagcgcgaaggggttgatttggtggcgagttagttcgttnttgtgtcggagaagggtttnttcgggtaattttttttttcgggtgttttgaagcggtttttttgtaatttttagtgagg

SEQ ID NO: 12104 - DNA, 705 bp, Artificial Sequence
  chemically treated genomic DNA (Homo sapiens) CpG-island No: 12104
  unsure (60, 80, 225, 391, 400)
cctcactaaaaattacaaaaaaaccgcttcaaaacacccgaaaaaaaaaattacccgaanaaacccttctccgacacaanaacgaactaactcgccaccaaatcaaccccttcgcgcttacctaaaaaaaaaaaataacgacctcaccctaatcgaccgaccgaccgcgcgacttcccctcgccgacgcaaccttaaacaccgcgactcacacccccacacaaanccgcccaatcctacgctcgcacgaccaccgccttcgtcgccgtccaataaaaaatacgaacattcgaaactaaaaccgttcgcaccgcctcctccataaaaaaacgccgaaaaaaacctaccaaaaacaacctccgacaccgccgtcaccaccgctaccgaaaccntaaaaccgnacgccgaaaaacctaaacgcgactaaataacgcaaaaaacctcgcgcgcacgcgcaataccgcaccacgtacaccccgcccccgaaactctctcccgccgaattccgattcctttacaaaaccccaatcgactaaacgcgaaaaacgaaacgcgtaaaatataaaaacgaaaacgaaacgcaaaatccaaacgaaacctaacgaaaaacgaaactaaaaacgtaattaaacaatacaatatactaccaaataacgttaaccgatcaattcaaaatcaaactccgacgtaacccttatttaaaacg

SEQ ID NO: 12105 - DNA, 715 bp, Artificial Sequence
  chemically treated genomic DNA (Homo sapiens) CpG-island No: 12105
ggttcggatagcggcggtttgtggagaggggacgatgacgatgaggtcgcggttgttgaaatgtagcgtttttttgatttgttgtaaaggttgttaaacggtatcggaggttgtagtagtagtagtgatagtggtagcgtcgaaaagaggcggagaaagtttttaggaggaggcggcggtggcggtagcggtaacgataataattaggcggcgataaagagttttcggaaggcggcggcggtcgttgttcgttttaatcgattgaagaagaaggagtacgtgatggggttggagagtcgagttcggggtttggtagtcgagaattaggagttgcgggtcgagaatcgggagttgggtaaacgcgtataggtattgtaggaggagagtcgttatttacgggtagttttagttaacgagattggattggttcgtttgttgagtcggttgagcggcgtgggattgcggttgattatttcgttttttagagattcgttcgtcggtgattacgattacgttttgtcggtgggaaagtagaagtaggatttgttggaagaggacgattcggcgggaggagtttgtttttatgtggataaggataaggtgtcggtggagttttgttcggcgtgcgttcggaaggcgtcgtttttttttaaaatgtagggttaagtaatttgttttttattcgcgtttattttttttaatttttttatattat

SEQ ID NO: 12106 - DNA, 715 bp, Artificial Sequence
  chemically treated genomic DNA (Homo sapiens) CpG-island No: 12106
ataatataaaaaaattaaaaaaaataaacgcgaataaaaaacaaattacttaaccctacattttaaaaaaaaacgacgccttccgaacgcacgccgaacaaaactccaccgacaccttatccttatccacataaaaacaaactcctcccgccgaatcgtcctcttccaacaaatcctacttctactttcccaccgacaaaacgtaatcgtaatcaccgacgaacgaatctctaaaaaacgaaataatcaaccgcaatcccacgccgctcaaccgactcaacaaacgaaccaatccaatctcgttaactaaaactacccgtaaataacgactctcctcctacaatacctatacgcgtttacccaactcccgattctcgacccgcaactcctaattctcgactaccaaaccccgaactcgactctccaaccccatcacgtactccttcttcttcaatcgattaaaacgaacaacgaccgccgccgccttccgaaaactctttatcgccgcctaattattatcgttaccgctaccgccaccgccgcctcctcctaaaaactttctccgcctcttttcgacgctaccactatcactactactactacaacctccgataccgtttaacaacctttacaacaaatcaaaaaaacgctacatttcaacaaccgcgacctcatcgtcatcgtcccctctccacaaaccgccgctatccgaacc

SEQ ID NO: 12107 - DNA, 715 bp, Artificial Sequence
  chemically treated genomic DNA (Homo sapiens) CpG-island No: 12107
atggtgtaagggagttgaaaggggtaaacgcggataaagagtagattatttgattttatattttaagagaagacgacgtttttcgggcgtacgtcgagtagaattttatcgatattttatttttgtttatatggagatagatttttttcgtcgagtcgtttttttttagtaggttttgtttttgtttttttatcggtagagcgtagtcgtggttatcggcgggcgagtttttgaagagcgaggtggttagtcgtagttttacgtcgtttagtcggtttagtaagcgagttagtttagtttcgttggttaagattgttcgtaggtagcgattttttttttgtagtgtttgtacgcgtttgtttagttttcgattttcggttcgtagtttttggttttcggttgttagatttcggattcgattttttagttttattacgtatttttttttttttagtcgattaaggcgggtagcggtcgtcgtcgtttttcggggattttttgtcgtcgtttggttgttgtcgttatcgttgtcgttatcgtcgtttttttttggggatttttttcgttttttttcggcgttgttattgttattgttgttgttgtagttttcgatatcgtttaatagtttttgtagtaggttagagaagcgttgtattttagtagtcgcggttttatcgttatcgttttttttttataggtcgtcgttattcgagtt

SEQ ID NO: 12108 - DNA, 715 bp, Artificial Sequence
  chemically treated genomic DNA (Homo sapiens) CpG-island No: 12108
aactcgaataacgacgacctataaaaaaaaaacgataacgataaaaccgcgactactaaaatacaacgcttctctaacctactacaaaaactattaaacgatatcgaaaactacaacaacaacaataacaataacaacgccgaaaaaaaacgaaaaaaatccccaaaaaaaaacgacgataacgacaacgataacgacaacaaccaaacgacgacaaaaaatccccgaaaaacgacgacgaccgctacccgccttaatcgactaaaaaaaaaaaaatacgtaataaaactaaaaaatcgaatccgaaatctaacaaccgaaaaccaaaaactacgaaccgaaaatcgaaaactaaacaaacgcgtacaaacactacaaaaaaaaaatcgctacctacgaacaatcttaaccaacgaaactaaactaactcgcttactaaaccgactaaacgacgtaaaactacgactaaccacctcgctcttcaaaaactcgcccgccgataaccacgactacgctctaccgataaaaaaacaaaaacaaaacctactaaaaaaaaacgactcgacgaaaaaaatctatctccatataaacaaaaataaaatatcgataaaattctactcgacgtacgcccgaaaaacgtcgtcttctcttaaaatataaaatcaaataatctactctttatccgcgtttacccctttcaactcccttacaccat

SEQ ID NO: 12109 - DNA, 571 bp, Artificial Sequence
  chemically treated genomic DNA (Homo sapiens) CpG-island No: 12109
cgtttcgtattcgtcgtagtattgttttcgtggtaggcggggtgggcgggacggtaaattcgcggtttttgcgtttattgggttgttcggggtagcgtagtttcgtattggttaggttttcgtttcgttcggttttcgcgagtttattggtcgtaggcgttcgatcgggtcgcggtcgcgcgtttcgttcgtcgttgcgtttttattatggcggcgtttatgtagtttagcgcgttgtgggttttcgtcggggtttttcgcggttgtcgtcgtcgtttacgtcgttgttttcgtttttttgtttcgcgtcgggtcgggcgttattttttttttgttttttttttcgttgtggtaagggtttgtttagtgcgtttcggggcgcgatggttgatcgcgaataacggtcgtcgtttcgtttcgtttttttttcgtcggtcgcgggtttcgggttgggcggggcgcggagttcgcgcgttagtgttcgggaaggcggggtcggggtacggtttagtcgtttttcgggttgggggtttagtatttggatgattttttttgggtgggggtcgtcgag

SEQ ID NO: 12110 - DNA, 571 bp, Artificial Sequence
  chemically treated genomic DNA (Homo sapiens) CpG-island No: 12110
ctcgacgacccccacccaaaaaaaatcatccaaatactaaacccccaacccgaaaaacgactaaaccgtaccccgaccccgccttcccgaacactaacgcgcgaactccgcgccccgcccaacccgaaacccgcgaccgacgaaaaaaaaacgaaacgaaacgacgaccgttattcgcgatcaaccatcgcgccccgaaacgcactaaacaaacccttaccacaacgaaaaaaaaaacaaaaaaaaaataacgcccgacccgacgcgaaacaaaaaaacgaaaacaacgacgtaaacgacgacgacaaccgcgaaaaaccccgacgaaaacccacaacgcgctaaactacataaacgccgccataataaaaacgcaacgacgaacgaaacgcgcgaccgcgacccgatcgaacgcctacgaccaataaactcgcgaaaaccgaacgaaacgaaaacctaaccaatacgaaactacgctaccccgaacaacccaataaacgcaaaaaccgcgaatttaccgtcccgcccaccccgcctaccacgaaaacaatactacgacgaatacgaaacg

SEQ ID NO: 12111 - DNA, 571 bp, Artificial Sequence
  chemically treated genomic DNA (Homo sapiens) CpG-island No: 12111
ttcggcggtttttatttaggagaggttatttaggtattgggtttttagttcgaaggacgattgggtcgtgtttcgatttcgttttttcgggtattagcgcgcgggtttcgcgtttcgtttagttcgggattcgcggtcggcgggggaggggcggggcggagcggcgatcgttattcgcggttagttatcgcgtttcgaagcgtattgggtaggtttttattatagcggagagggaggtaggggggaggtggcgttcggttcgacgcggggtaggaaggcggaggtagcggcgtaggcggcggcgatagtcgcgggggatttcggcgggagtttataacgcgttgggttgtatgggcgtcgttatagtggggacgtagcggcgggcggagcgcgcggtcgcgattcggtcgggcgtttgcgattaatgggttcgcggaagtcgggcggagcgagggtttggttaatgcggagttgcgttgtttcgagtagtttaatagacgtaggagtcgcggatttgtcgtttcgtttatttcgtttattacgagagtagtgttgcggcgagtgcggggcg

SEQ ID NO: 12112 - DNA, 571 bp, Artificial Sequence
  chemically treated genomic DNA (Homo sapiens) CpG-island No: 12112
cgccccgcactcgccgcaacactactctcgtaataaacgaaataaacgaaacgacaaatccgcgactcctacgtctattaaactactcgaaacaacgcaactccgcattaaccaaaccctcgctccgcccgacttccgcgaacccattaatcgcaaacgcccgaccgaatcgcgaccgcgcgctccgcccgccgctacgtccccactataacgacgcccatacaacccaacgcgttataaactcccgccgaaatcccccgcgactatcgccgccgcctacgccgctacctccgccttcctaccccgcgtcgaaccgaacgccacctcccccctacctccctctccgctataataaaaacctacccaatacgcttcgaaacgcgataactaaccgcgaataacgatcgccgctccgccccgcccctcccccgccgaccgcgaatcccgaactaaacgaaacgcgaaacccgcgcgctaatacccgaaaaaacgaaatcgaaacacgacccaatcgtccttcgaactaaaaacccaatacctaaataacctctcctaaataaaaaccgccgaa

SEQ ID NO: 12113 - DNA, 879 bp, Artificial Sequence
  chemically treated genomic DNA (Homo sapiens) CpG-island No: 12113
  unsure (8, 24, 69, 100, 136, 206, 231, 368)
agtttttngttataggtggacgtnagagtaatagatattcggttatttttaggtttttgcgttcggagnatagaagttacgcgggcgcgttcgaggtttntgggttttttgtcgagagtttagcgtggcgtcgggnttttattggttacgcgttcgttcggtgttattttggtttttcgttttttttttatttcggcgtttacganttcgggcgtaggttatatggttttncggattgttcggtttcgggttttcgtaaggcgcgtttatattacgtcgttagatttacgcggcgaggggttgggttttttcgggggttacgggtttcgaagttcgttttcgttttcgttttcggagtttatcgtttntgagatttagaacgtcgtttttggttttttgtagtagcgatacgaatttggtagtgagtagttttaggtttttttcgtgtttgttgttgtcgttttcggcgttttcgagttgcggcggcgggggcggttgcggggtttgcgtttgcggaggttgcggcggcggtcgttggttttgtttttgttttgtcggcgtttgttggttcgagttcgcgggttttgtcgtcgttatcgcgtttcggtttcgcggtggtcgggttttcgcgtattttcgttcgtcggtttcgttcgcggttatttgtcgggtcggtttcgttgcggtcgttttttcgttcgtcgagagcggtagtgcgggtcgttggttgttgtaaataataggtgtgcggcgtttacgggagtttgggtcgtttgttacgtcgggttttcgttttttttttaagttcggggaagcgtgaatgaggtttacgatcgaggggggaggggtggaaacgaggagaaggggttgcgaggggtg

SEQ ID NO: 12114 - DNA, 879 bp, Artificial Sequence
  chemically treated genomic DNA (Homo sapiens) CpG-island No: 12114
  unsure (512, 649, 674, 744, 780, 811, 856, 872)
cacccctcgcaaccccttctcctcgtttccacccctcccccctcgatcgtaaacctcattcacgcttccccgaacttaaaaaaaaaacgaaaacccgacgtaacaaacgacccaaactcccgtaaacgccgcacacctattatttacaacaaccaacgacccgcactaccgctctcgacgaacgaaaaaacgaccgcaacgaaaccgacccgacaaataaccgcgaacgaaaccgacgaacgaaaatacgcgaaaacccgaccaccgcgaaaccgaaacgcgataacgacgacaaaacccgcgaactcgaaccaacaaacgccgacaaaacaaaaacaaaaccaacgaccgccgccgcaacctccgcaaacgcaaaccccgcaaccgcccccgccgccgcaactcgaaaacgccgaaaacgacaacaacaaacacgaaaaaaacctaaaactactcactaccaaattcgtatcgctactacaaaaaaccaaaaacgacgttctaaatctcanaaacgataaactccgaaaacgaaaacgaaaacgaacttcgaaacccgtaacccccgaaaaaacccaacccctcgccgcgtaaatctaacgacgtaatataaacgcgccttacgaaaacccgaaaccgaacaatccgnaaaaccatataacctacgcccgaantcgtaaacgccgaaataaaaaaaaaacgaaaaaccaaaataacaccgaacgaacgcgtaaccaataaaancccgacgccacgctaaactctcgacaaaaaacccanaaacctcgaacgcgcccgcgtaacttctatnctccgaacgcaaaaacctaaaaataaccgaatatctattactctnacgtccacctataacnaaaaact

SEQ ID NO: 12115 - DNA, 879 bp, Artificial Sequence
  chemically treated genomic DNA (Homo sapiens) CpG-island No: 12115
  unsure (512, 649, 674, 744, 780, 811, 856, 872)
tatttttcgtagtttttttttttcgtttttattttttttttttcggtcgtgggttttatttacgttttttcgggtttggggagggggcggaggttcggcgtgataagcggtttagattttcgtgggcgtcgtatatttgttgtttgtagtagttagcgattcgtattatcgttttcggcgggcggggaagcggtcgtagcggagtcgattcggtaggtggtcgcgggcggggtcggcgagcgaaagtgcgcgggggttcgattatcgcggggtcgggacgcgatggcggcggtagagttcgcgagttcgggttagtaggcgtcggtagggtaggggtagggttagcggtcgtcgtcgtagttttcgtaggcgtaagtttcgtagtcgttttcgtcgtcgtagttcgggggcgtcgggggcggtagtagtaggtacgagaagagtttggggttgtttattattaagttcgtgtcgttgttgtaggaggttaaggacggcgttttggattttanaagcggtgagtttcggaggcggggacgggggcggatttcggaattcgtggttttcggggaagtttagtttttcgtcgcgtgggtttagcggcgtggtgtagacgcgttttgcggggattcgggatcgggtaattcgnaggattatgtggtttgcgttcgggntcgtggacgtcgggatgggggagggacgagggattaggatggtatcgagcggacgcgtaattaatggggnttcggcgttacgttgggttttcgataaagagtttanggatttcgagcgcgttcgcgtggtttttgtntttcgggcgtagggatttgagggtaatcgagtgtttgttgttttngcgtttatttgtggtnagaggtt

SEQ ID NO: 12116 - DNA, 879 bp, Artificial Sequence
  chemically treated genomic DNA (Homo sapiens) CpG-island No: 12116
  unsure (8, 24, 69, 100, 136, 206, 231, 368)
aacctctnaccacaaataaacgcnaaaacaacaaacactcgattaccctcaaatccctacgcccgaaanacaaaaaccacgcgaacgcgctcgaaatccntaaactctttatcgaaaacccaacgtaacgccgaanccccattaattacgcgtccgctcgataccatcctaatccctcgtccctcccccatcccgacgtccacgancccgaacgcaaaccacataatcctncgaattacccgatcccgaatccccgcaaaacgcgtctacaccacgccgctaaacccacgcgacgaaaaactaaacttccccgaaaaccacgaattccgaaatccgcccccgtccccgcctccgaaactcaccgcttntaaaatccaaaacgccgtccttaacctcctacaacaacgacacgaacttaataataaacaaccccaaactcttctcgtacctactactaccgcccccgacgcccccgaactacgacgacgaaaacgactacgaaacttacgcctacgaaaactacgacgacgaccgctaaccctacccctaccctaccgacgcctactaacccgaactcgcgaactctaccgccgccatcgcgtcccgaccccgcgataatcgaacccccgcgcactttcgctcgccgaccccgcccgcgaccacctaccgaatcgactccgctacgaccgcttccccgcccgccgaaaacgataatacgaatcgctaactactacaaacaacaaatatacgacgcccacgaaaatctaaaccgcttatcacgccgaacctccgccccctccccaaacccgaaaaaacgtaaataaaacccacgaccgaaaaaaaaaaaataaaaacgaaaaaaaaaaactacgaaaaata

SEQ ID NO: 12117 - DNA, 520 bp, Artificial Sequence
  chemically treated genomic DNA (Homo sapiens) CpG-island No: 12117
  unsure (145, 501)
ggtatttcggtaggtaagttttggaggagcggggaggtcgaaagttagattgcgtttatttatggttttggtaaagtagtgtcgcgtttttattttggtgtcgtcgttagttattcgtggtttcggttttggggagtgcgcgggntcgtttttggttgcggagcgttttttatttttgtaagtttttgtttatgaagtatatattttcgtagttgttgtcgtcgttttcgttttttattttcgtttttgtcgttattatcgtcgtcgtcgtttttatagtattggcgacggggagcggggttttaatcggtatttagcgaggggttcgtgagtttgggataagtttttcggaagcgcggaagggcggttcgagggggcggggcggggcgaggatttattttttaatcgatagtcgggaattttttcgttttgacggtgacgtaaaattggaattttcgttttaattgtgggtttttttcgtttttatagtatttgcggtgncgatttttgaatttgttgt

SEQ ID NO: 12118 - DNA, 520 bp, Artificial Sequence
  chemically treated genomic DNA (Homo sapiens) CpG-island No: 12118
  unsure (20, 376)
acaacaaattcaaaaatcgncaccgcaaatactataaaaacgaaaaaaacccacaattaaaacgaaaattccaattttacgtcaccgtcaaaacgaaaaaattcccgactatcgattaaaaaataaatcctcgccccgccccgccccctcgaaccgcccttccgcgcttccgaaaaacttatcccaaactcacgaacccctcgctaaataccgattaaaaccccgctccccgtcgccaatactataaaaacgacgacgacgataataacgacaaaaacgaaaataaaaaacgaaaacgacgacaacaactacgaaaatatatacttcataaacaaaaacttacaaaaataaaaaacgctccgcaaccaaaaacgancccgcgcactccccaaaaccgaaaccacgaataactaacgacgacaccaaaataaaaacgcgacactactttaccaaaaccataaataaacgcaatctaactttcgacctccccgctcctccaaaacttacctaccgaaatacc

SEQ ID NO: 12119 - DNA, 520 bp, Artificial Sequence
  chemically treated genomic DNA (Homo sapiens) CpG-island No: 12119
  unsure (20, 376)
atagtaagtttaagagtcgntatcgtagatgttgtaaaaacgaaagaagtttatagttgggacgaggattttagttttgcgttatcgttaaggcgggaaagttttcggttgtcggttggagggtgggttttcgtttcgtttcgttttttcgggtcgttttttcgcgttttcgggaggtttgttttaagtttacggatttttcgttgggtgtcggttaagatttcgtttttcgtcgttagtgttatggaggcggcggcggcggtggtggcggtagaggcggaagtggaaaacgaagacggcgatagtagttgcggggatgtatgttttatggataaaggtttgtagaggtaaagggcgtttcgtagttaggagcganttcgcgtattttttagagtcggggttacgagtggttggcggcgatattagagtggaggcgcggtattgttttattaagattataagtgaacgtagtttggttttcggttttttcgtttttttaaaatttatttgtcgaagtgtt

SEQ ID NO: 12120 - DNA, 520 bp, Artificial Sequence
  chemically treated genomic DNA (Homo sapiens) CpG-island No: 12120
  unsure (145, 501)
aacacttcgacaaataaattttaaaaaaacgaaaaaaccgaaaaccaaactacgttcacttataatcttaataaaacaataccgcgcctccactctaatatcgccgccaaccactcgtaaccccgactctaaaaaatacgcgaantcgctcctaactacgaaacgccctttacctctacaaacctttatccataaaacatacatccccgcaactactatcgccgtcttcgttttccacttccgcctctaccgccaccaccgccgccgccgcctccataacactaacgacgaaaaacgaaatcttaaccgacacccaacgaaaaatccgtaaacttaaaacaaacctcccgaaaacgcgaaaaaacgacccgaaaaaacgaaacgaaacgaaaacccaccctccaaccgacaaccgaaaactttcccgccttaacgataacgcaaaactaaaatcctcgtcccaactataaacttctttcgtttttacaacatctacgatancgactcttaaacttactat

SEQ ID NO: 12121 - DNA, 637 bp, Artificial Sequence
  chemically treated genomic DNA (Homo sapiens) CpG-island No: 12121
cgtggggcggagtgtcgggcgtagtttatttcgtaagcgcgggtttagggtttcgacgtgttagcgtagtttcgaagagtgcgggttcggggttttcgcggcgtttttttttttttttagtttttcgggggcgatcgcgtttttcgtcgaggttcgttttcgtcgtatttttattattttcgttgggaggatttcggcgtacgttttcgttttcgtatttcggggcgacggcgtatttatttttcgtatggtgtttgggtcgttcgggcggggttcggcgatttgggcgcgagaagggttgggtcggcggcgacgttcggtcggtcgggagtttcgcgttgtttttttttgtatacgtttgcgtcgcggtcgttaagtcggcgggggcggggcggggtagcgttggtcgcggggttttcggggttttttcgggttgcggcggaggcgcggagtcggttaagggcgtattgagttcgcggagtttcggggtttcggggtttttttgtcgtcgtcgtagcgttttcgttttttcgggtcgtttcgttttttttttttttttcgagttttggttttattaggagcggagcgagttttcgatgtttgtttcgcggtttttagaattgagttggagaagttt

SEQ ID NO: 12122 - DNA, 637 bp, Artificial Sequence
  chemically treated genomic DNA (Homo sapiens) CpG-island No: 12122
aaacttctccaactcaattctaaaaaccgcgaaacaaacatcgaaaactcgctccgctcctaataaaaccaaaactcgaaaaaaaaaaaaaaaacgaaacgacccgaaaaaacgaaaacgctacgacgacgacaaaaaaaccccgaaaccccgaaactccgcgaactcaatacgcccttaaccgactccgcgcctccgccgcaacccgaaaaaaccccgaaaaccccgcgaccaacgctaccccgccccgcccccgccgacttaacgaccgcgacgcaaacgtatacaaaaaaaaacaacgcgaaactcccgaccgaccgaacgtcgccgccgacccaacccttctcgcgcccaaatcgccgaaccccgcccgaacgacccaaacaccatacgaaaaataaatacgccgtcgccccgaaatacgaaaacgaaaacgtacgccgaaatcctcccaacgaaaataataaaaatacgacgaaaacgaacctcgacgaaaaacgcgatcgcccccgaaaaactaaaaaaaaaaaaaaacgccgcgaaaaccccgaacccgcactcttcgaaactacgctaacacgtcgaaaccctaaacccgcgcttacgaaataaactacgcccgacactccgccccacg

SEQ ID NO: 12123 - DNA, 637 bp, Artificial Sequence
  chemically treated genomic DNA (Homo sapiens) CpG-island No: 12123
aagtttttttagtttagttttgggggtcgcggggtaggtatcggagattcgtttcgtttttggtggggttagaattcgaggaagaggagaggggcgaagcggttcgaggaggcggggacgttgcgacggcggtagaaaggtttcggggtttcggagtttcgcgagtttagtgcgtttttggtcggtttcgcgttttcgtcgtagttcgggagagtttcggggatttcgcggttagcgttatttcgtttcgttttcgtcggtttggcggtcgcggcgtaggcgtgtgtaggagggggtagcgcggagttttcggtcggtcgagcgtcgtcgtcggtttagtttttttcgcgtttaagtcgtcgagtttcgttcggacggtttagatattatgcggagggtgagtgcgtcgtcgtttcggggtgcgggggcgggggcgtgcgtcggggtttttttagcgggaatagtgagggtgcggcggggacggatttcggcggggagcgcggtcgttttcgggggattgaggaggggaaggggcgtcgcggggatttcgggttcgtatttttcggggttgcgttggtacgtcggagttttgggttcgcgtttgcgaggtgggttgcgttcggtatttcgttttacg

SEQ ID NO: 12124 - DNA, 637 bp, Artificial Sequence
  chemically treated genomic DNA (Homo sapiens) CpG-island No: 12124
cgtaaaacgaaataccgaacgcaacccacctcgcaaacgcgaacccaaaactccgacgtaccaacgcaaccccgaaaaatacgaacccgaaatccccgcgacgccccttcccctcctcaatcccccgaaaacgaccgcgctccccgccgaaatccgtccccgccgcaccctcactattcccgctaaaaaaaccccgacgcacgcccccgcccccgcaccccgaaacgacgacgcactcaccctccgcataatatctaaaccgtccgaacgaaactcgacgacttaaacgcgaaaaaaactaaaccgacgacgacgctcgaccgaccgaaaactccgcgctaccccctcctacacacgcctacgccgcgaccgccaaaccgacgaaaacgaaacgaaataacgctaaccgcgaaatccccgaaactctcccgaactacgacgaaaacgcgaaaccgaccaaaaacgcactaaactcgcgaaactccgaaaccccgaaacctttctaccgccgtcgcaacgtccccgcctcctcgaaccgcttcgcccctctcctcttcctcgaattctaaccccaccaaaaacgaaacgaatctccgatacctaccccgcgacccccaaaactaaactaaaaaaactt

SEQ ID NO: 12125 - DNA, 563 bp, Artificial Sequence
  chemically treated genomic DNA (Homo sapiens) CpG-island No: 12125
attcgtcgtttaatttagtcgttagtttttcgtgattttcgttttcggttttaatttttttttttgaggagagtggtttaaacggtgaaggttgcggggcgtcgtcggaagtgtcgtaaacgtcggatattcggtttttttgggcgttaagggagttgacggagagggttatcgtttagtaatagacggtgttttagtttgttgagttcgtagttttcgtggtgtgagtgagttcgggttcgtgttttttttttcgtcgtcgttatgggttgtacgttgagcgtcgaagataaggcggtagtggagcgaagtaagatgatcgatcgtaatttacgggaggacggggaaaaagcggttaaagaagtgaagttgttgttattcggtgaggggttggaggcggggattgagtggtggtcgggagagtttaggcgtttggaaggtttgaacggggtttggtcgggtcgacggaaaggattttaaagggatttggagggcgtgtcgggcgtggggcggggtgttggggtttttagttgaggttttagagggcgtgatgaggggggtgg

SEQ ID NO: 12126 - DNA, 563 bp, Artificial Sequence
  chemically treated genomic DNA (Homo sapiens) CpG-island No: 12126
ccacccccctcatcacgccctctaaaacctcaactaaaaaccccaacaccccgccccacgcccgacacgccctccaaatccctttaaaatcctttccgtcgacccgaccaaaccccgttcaaaccttccaaacgcctaaactctcccgaccaccactcaatccccgcctccaacccctcaccgaataacaacaacttcacttctttaaccgctttttccccgtcctcccgtaaattacgatcgatcatcttacttcgctccactaccgccttatcttcgacgctcaacgtacaacccataacgacgacgaaaaaaaaaacacgaacccgaactcactcacaccacgaaaactacgaactcaacaaactaaaacaccgtctattactaaacgataaccctctccgtcaactcccttaacgcccaaaaaaaccgaatatccgacgtttacgacacttccgacgacgccccgcaaccttcaccgtttaaaccactctcctcaaaaaaaaaaattaaaaccgaaaacgaaaatcacgaaaaactaacgactaaattaaacgacgaat

SEQ ID NO: 12127 - DNA, 563 bp, Artificial Sequence
  chemically treated genomic DNA (Homo sapiens) CpG-island No: 12127
ttattttttttattacgttttttggggttttagttaggaattttaatatttcgttttacgttcggtacgttttttagatttttttagggtttttttcgtcggttcgattagatttcgtttaggttttttaagcgtttaggttttttcgattattatttagttttcgtttttagttttttatcgagtagtagtagttttatttttttggtcgtttttttttcgttttttcgtaagttgcggtcgattattttgtttcgttttattgtcgttttgttttcggcgtttaacgtgtagtttatggcggcggcgggagaggggatacgggttcggatttatttatattacggaaattgcgggtttagtaggttgaggtatcgtttattgttgggcggtggtttttttcgttagtttttttagcgtttagaagaatcggatattcgacgtttacgatattttcggcgacgtttcgtagtttttatcgtttaaattattttttttagggagaggagttgagatcgaaagcggaagttacggggagttggcggttgggttgggcggcggat

SEQ ID NO: 12128 - DNA, 563 bp, Artificial Sequence
  chemically treated genomic DNA (Homo sapiens) CpG-island No: 12128
atccgccgcccaacccaaccgccaactccccgtaacttccgctttcgatctcaactcctctccctaaaaaaaataatttaaacgataaaaactacgaaacgtcgccgaaaatatcgtaaacgtcgaatatccgattcttctaaacgctaaaaaaactaacgaaaaaaaccaccgcccaacaataaacgatacctcaacctactaaacccgcaatttccgtaatataaataaatccgaacccgtatcccctctcccgccgccgccataaactacacgttaaacgccgaaaacaaaacgacaataaaacgaaacaaaataatcgaccgcaacttacgaaaaaacgaaaaaaaaacgaccaaaaaaataaaactactactactcgataaaaaactaaaaacgaaaactaaataataatcgaaaaaacctaaacgcttaaaaaacctaaacgaaatctaatcgaaccgacgaaaaaaaccctaaaaaaatctaaaaaacgtaccgaacgtaaaacgaaatattaaaattcctaactaaaaccccaaaaaacgtaataaaaaaaataa

SEQ ID NO: 12129 - DNA, 1517 bp, Artificial Sequence
  chemically treated genomic DNA (Homo sapiens) CpG-island No: 12129
gatgaagaatgttatttgcgcgtttggatagcgtagaatcgtaattagtttgttttaaaattagatgttatagtttggttttggggacgtttttttttttaaggtataagtgcgagcgttcgttgttgtgcgtggaattgcggtcgggagggagtggcggcgtgaacgtcggcggttgtagagatatatcggtcgcggtttttattattttgtaggggtttgcggtcgttatttcggtttgttttcgattagttgtgcgatttcgaatacgtcgtgagtcggtttttcggttcgggatcgaattcgaggagtgttgtttggggtcgtagtgaggttaagggaggtcgtaggtgttaagcgtttcgtttgtcgggcgagggttaattcgaggttacgcgcgaggagcggtcgtagcgattggataaaataaagataaagataaagacggttttttttttgttcgcgttttagtcgcgacggtagttttcgcggtcgttaaacgggcgtgattttcgaggcgttttcgtcggggcgttgtttgcgatcgtgggtttaggtcgttcgtcgagtttagcgttttggtcgaaatttcgatttcgatttcgatttggatttattagtcgtttcgtttttttcgcggtttcgttcgtttcggcgtttttattagtttcgggaggtttttgcgcggcggttatcgggatgagtagtaggagtagcgcggcgttatcgaggcgtaatttttagtacggcgtcggttcgcgggttatttcgggcgttatggtcggtcggtcgttttattagttagtggagcgttataatttcgattttagtataagcggttttcgttcggaatagtcgcggcgtcggaagtggatttgcgaggtggggttatgcgagtgcgtagttttaaaaagtagttcgtttcgttttttcgttattcgtttcgttttttcgttaacgggttcgtttttcggcgcggttgaggtttagtgcgtttgcgcgatagaggaaaggagtttggtagcgaggagagcggttgaggtttagtgcgtttgcgcggcgcggatgggcgaggcgtgatcgaggggcgaggcgtgatcgaggggcgaggcgtgatcgaggggcgaggcgtgatcgaggggcgaggcgtgatcgaggggcgaggcgtgatcgaggggttcgtcgcggtttttgcgtttgcgcggcggggaacggcgatcggttgaggggattaggggagcgcggtgtttcggtggcggaggttacggtggtttttattttaaagggttgcgggcgtttcggacggcggttttaagcgttgtttacgttgtttttaagtgagttttggacgaggcgcggtgggtttttatagttcgcgtcggcgttttcgttttatatcgcggcgttcggttttgggttttcgtcgatgttcgcgtgggatttttaggggatttgtttatttttgtacgttaattatattagaaacggttttagaatgggttgaaacgtgtgttgtt

SEQ ID NO: 12130 - DNA, 1517 bp, Artificial Sequence
  chemically treated genomic DNA (Homo sapiens) CpG-island No: 12130
aacaacacacgtttcaacccattctaaaaccgtttctaatataattaacgtacaaaaataaacaaatcccctaaaaatcccacgcgaacatcgacgaaaacccaaaaccgaacgccgcgatataaaacgaaaacgccgacgcgaactataaaaacccaccgcgcctcgtccaaaactcacttaaaaacaacgtaaacaacgcttaaaaccgccgtccgaaacgcccgcaaccctttaaaataaaaaccaccgtaacctccgccaccgaaacaccgcgctcccctaatcccctcaaccgatcgccgttccccgccgcgcaaacgcaaaaaccgcgacgaacccctcgatcacgcctcgcccctcgatcacgcctcgcccctcgatcacgcctcgcccctcgatcacgcctcgcccctcgatcacgcctcgcccctcgatcacgcctcgcccatccgcgccgcgcaaacgcactaaacctcaaccgctctcctcgctaccaaactcctttcctctatcgcgcaaacgcactaaacctcaaccgcgccgaaaaacgaacccgttaacgaaaaaacgaaacgaataacgaaaaaacgaaacgaactactttttaaaactacgcactcgcataaccccacctcgcaaatccacttccgacgccgcgactattccgaacgaaaaccgcttatactaaaatcgaaattataacgctccactaactaataaaacgaccgaccgaccataacgcccgaaataacccgcgaaccgacgccgtactaaaaattacgcctcgataacgccgcgctactcctactactcatcccgataaccgccgcgcaaaaacctcccgaaactaataaaaacgccgaaacgaacgaaaccgcgaaaaaaacgaaacgactaataaatccaaatcgaaatcgaaatcgaaatttcgaccaaaacgctaaactcgacgaacgacctaaacccacgatcgcaaacaacgccccgacgaaaacgcctcgaaaatcacgcccgtttaacgaccgcgaaaactaccgtcgcgactaaaacgcgaacaaaaaaaaaaccgtctttatctttatctttattttatccaatcgctacgaccgctcctcgcgcgtaacctcgaattaaccctcgcccgacaaacgaaacgcttaacacctacgacctcccttaacctcactacgaccccaaacaacactcctcgaattcgatcccgaaccgaaaaaccgactcacgacgtattcgaaatcgcacaactaatcgaaaacaaaccgaaataacgaccgcaaacccctacaaaataataaaaaccgcgaccgatatatctctacaaccgccgacgttcacgccgccactccctcccgaccgcaattccacgcacaacaacgaacgctcgcacttataccttaaaaaaaaaaacgtccccaaaaccaaactataacatctaattttaaaacaaactaattacgattctacgctatccaaacgcgcaaataacattcttcatc

SEQ ID NO: 12131 - DNA, 1517 bp, Artificial Sequence
  chemically treated genomic DNA (Homo sapiens) CpG-island No: 12131
agtagtatacgttttagtttattttggggtcgtttttagtgtggttaacgtataaaaataaataaattttttaaaagttttacgcggatatcggcgggagtttagggtcggacgtcgcggtgtggagcgagggcgtcggcgcggattatgagggtttatcgcgtttcgtttagggtttatttaagagtagcgtgagtagcgtttgggatcgtcgttcgggacgttcgtagttttttaggatggaggttatcgtgattttcgttatcgaagtatcgcgtttttttagtttttttagtcggtcgtcgtttttcgtcgcgtaggcgtaggagtcgcggcgagtttttcggttacgtttcgtttttcggttacgtttcgtttttcggttacgtttcgtttttcggttacgtttcgtttttcggttacgtttcgtttttcggttacgtttcgtttattcgcgtcgcgtaggcgtattgagttttagtcgtttttttcgttattaggttttttttttttatcgcgtaggcgtattgaattttagtcgcgtcgggaggcgagttcgttggcgagggggcggggcggatggcgagggagcggggcgagttgttttttgaggttgcgtattcgtatggttttatttcgtaggtttattttcggcgtcgcggttgtttcgggcggagatcgtttgtgttggagtcggagttgtaacgttttattgattgatagagcgatcggtcgattatggcgttcggagtggttcgcgggtcgacgtcgtattggaggttgcgtttcggtggcgtcgcgttgtttttgttgtttatttcggtggtcgtcgcgtaggagtttttcggagttggtgagggcgtcggggcgggcggggtcgcgaagggggcggggcggttggtgggtttaggtcggggtcggggtcggggtttcggttagggcgttgggttcggcgggcggtttgggtttacggtcgtaggtagcgtttcgacggaggcgtttcgagggttacgttcgtttggcggtcgcgggagttgtcgtcgcggttggggcgcgggtaggggaagagtcgtttttgtttttgtttttgttttgtttagtcgttgcggtcgtttttcgcgcgtggtttcgggttggttttcgttcggtaggcgggacgtttggtatttgcggttttttttagttttattgcgattttaaatagtatttttcgggttcgatttcgagtcgggaagtcggtttacgacgtgttcgaggtcgtatagttggtcgggggtaggtcgggatggcggtcgtaggtttttgtagggtgatgggggtcgcggtcggtgtgtttttatagtcgtcggcgtttacgtcgttattttttttcggtcgtagttttacgtatagtagcgaacgttcgtatttatgttttagaaaggaaggcgtttttaaagttaggttgtagtatttgattttgaagtaagttgattgcggttttacgttgtttagacgcgtaggtggtattttttatt

SEQ ID NO: 12132 - DNA, 1517 bp, Artificial Sequence
  chemically treated genomic DNA (Homo sapiens) CpG-island No: 12132
aataaaaaataccacctacgcgtctaaacaacgtaaaaccgcaatcaacttacttcaaaatcaaatactacaacctaactttaaaaacgccttcctttctaaaacataaatacgaacgttcgctactatacgtaaaactacgaccgaaaaaaaataacgacgtaaacgccgacgactataaaaacacaccgaccgcgacccccatcaccctacaaaaacctacgaccgccatcccgacctacccccgaccaactatacgacctcgaacacgtcgtaaaccgacttcccgactcgaaatcgaacccgaaaaatactatttaaaatcgcaataaaactaaaaaaaaccgcaaataccaaacgtcccgcctaccgaacgaaaaccaacccgaaaccacgcgcgaaaaacgaccgcaacgactaaacaaaacaaaaacaaaaacaaaaacgactcttcccctacccgcgccccaaccgcgacgacaactcccgcgaccgccaaacgaacgtaaccctcgaaacgcctccgtcgaaacgctacctacgaccgtaaacccaaaccgcccgccgaacccaacgccctaaccgaaaccccgaccccgaccccgacctaaacccaccaaccgccccgcccccttcgcgaccccgcccgccccgacgccctcaccaactccgaaaaactcctacgcgacgaccaccgaaataaacaacaaaaacaacgcgacgccaccgaaacgcaacctccaatacgacgtcgacccgcgaaccactccgaacgccataatcgaccgatcgctctatcaatcaataaaacgttacaactccgactccaacacaaacgatctccgcccgaaacaaccgcgacgccgaaaataaacctacgaaataaaaccatacgaatacgcaacctcaaaaaacaactcgccccgctccctcgccatccgccccgccccctcgccaacgaactcgcctcccgacgcgactaaaattcaatacgcctacgcgataaaaaaaaaaaacctaataacgaaaaaaacgactaaaactcaatacgcctacgcgacgcgaataaacgaaacgtaaccgaaaaacgaaacgtaaccgaaaaacgaaacgtaaccgaaaaacgaaacgtaaccgaaaaacgaaacgtaaccgaaaaacgaaacgtaaccgaaaaactcgccgcgactcctacgcctacgcgacgaaaaacgacgaccgactaaaaaaactaaaaaaacgcgatacttcgataacgaaaatcacgataacctccatcctaaaaaactacgaacgtcccgaacgacgatcccaaacgctactcacgctactcttaaataaaccctaaacgaaacgcgataaaccctcataatccgcgccgacgccctcgctccacaccgcgacgtccgaccctaaactcccgccgatatccgcgtaaaacttttaaaaaatttatttatttttatacgttaaccacactaaaaacgaccccaaaataaactaaaacgtatactact

SEQ ID NO: 12133 - DNA, 1370 bp, Artificial Sequence
  chemically treated genomic DNA (Homo sapiens) CpG-island No: 12133
aatcgcggcggtagggaggcgggtggcgtttttaatcgtttagggtgttggttcgattcgcgcggttttcgcggacgggatttcgcgggtcgtttttttcgttttgttcgcggtttttgagagggaacgttatttttagcgttttttttttttcgttttaggtttttgcggttatgggcggcggtttcggttttatttttcggcgttttaggaacgcggtttttaggaaaggagtcggggttcgggcgacgcggggaggcgggtaagggtttttagggttcgggtttttcgtaaacgtttttggttcgcgttttatagcgttttagggttttcgcgttcgtcggggtcgcgcgggattcgttttcgtgacgtatttttaatcgtttagagtcgcggttcggtttgcgcgcgttcgacgtttcggggagcgcgtttcgtgaacgcgcgtagttacgtgattttcgtgtcggttaacgggtgcgtcgggatttgggggataaagcgcggtttcgcgtatagttgcggcgggagagcggcggggtcgagagcgtgattcgttcgtttcgcgttgtttttttcgcgtcgttttttcgcgtcgttcgcgtagttatgttcgaggagaagtttaaggtaagcgcggcgatttcgtttgtacgcgcgtttatcgcgggcgtttcgggcgttttcgtcgtcgcgcgtcgtttttgcggtttttggagacggcggcgtttacggggattcgcgtttaggtttgcggcgtcgttcgcgttttcgtttttttttcgttttcgttcggtcgcgtcgtttttttttttcgttcggttgcgttcggcggcgcgtttcgtttttagttcggtttcgtttttatttcgatttcgtttcgcgtttcgtttttgataggtttcgttttttttcgttttttagagtttcgtttttaagtgggttcgtttaaggtgcgttttttttgttttcgcgaagcgcgttgtgtcgcgagtttcgtttttttcgggtttggttacgttttcgttttacgttcgttttttttttagttgggaaggcgcgcgtttagcgtttttttgagcgttcggtgtcgggtttcgcgttgttgtttttgtagagcgcggcgttttcggatttcgttttagtagtgttttcgaagcgtttttgcgtgttttttttttgagttattgttggttggggtcgttttttttttcggtatcgttttgggtgcgggattttgtgtcgagtgtacggagtcggttcgggaataagcgtttggggttatttttaaggggcgcgttttgaggggtttggtttttgtgagtagtattgtcgtttttttagggcgtttatcgcgatttcggtattta

SEQ ID NO: 12134 - DNA, 1370 bp, Artificial Sequence
  chemically treated genomic DNA (Homo sapiens) CpG-island No: 12134
taaataccgaaatcgcgataaacgccctaaaaaaacgacaatactactcacaaaaaccaaacccctcaaaacgcgccccttaaaaataaccccaaacgcttattcccgaaccgactccgtacactcgacacaaaatcccgcacccaaaacgataccgaaaaaaaaaacgaccccaaccaacaataactcaaaaaaaaaacacgcaaaaacgcttcgaaaacactactaaaacgaaatccgaaaacgccgcgctctacaaaaacaacaacgcgaaacccgacaccgaacgctcaaaaaaacgctaaacgcgcgccttcccaactaaaaaaaaaacgaacgtaaaacgaaaacgtaaccaaacccgaaaaaaacgaaactcgcgacacaacgcgcttcgcgaaaacaaaaaaaacgcaccttaaacgaacccacttaaaaacgaaactctaaaaaacgaaaaaaaacgaaacctatcaaaaacgaaacgcgaaacgaaatcgaaataaaaacgaaaccgaactaaaaacgaaacgcgccgccgaacgcaaccgaacgaaaaaaaaaaacgacgcgaccgaacgaaaacgaaaaaaaaacgaaaacgcgaacgacgccgcaaacctaaacgcgaatccccgtaaacgccgccgtctccaaaaaccgcaaaaacgacgcgcgacgacgaaaacgcccgaaacgcccgcgataaacgcgcgtacaaacgaaatcgccgcgcttaccttaaacttctcctcgaacataactacgcgaacgacgcgaaaaaacgacgcgaaaaaaacaacgcgaaacgaacgaatcacgctctcgaccccgccgctctcccgccgcaactatacgcgaaaccgcgctttatcccccaaatcccgacgcacccgttaaccgacacgaaaatcacgtaactacgcgcgttcacgaaacgcgctccccgaaacgtcgaacgcgcgcaaaccgaaccgcgactctaaacgattaaaaatacgtcacgaaaacgaatcccgcgcgaccccgacgaacgcgaaaaccctaaaacgctataaaacgcgaaccaaaaacgtttacgaaaaacccgaaccctaaaaacccttacccgcctccccgcgtcgcccgaaccccgactcctttcctaaaaaccgcgttcctaaaacgccgaaaaataaaaccgaaaccgccgcccataaccgcaaaaacctaaaacgaaaaaaaaaaaacgctaaaaataacgttccctctcaaaaaccgcgaacaaaacgaaaaaaacgacccgcgaaatcccgtccgcgaaaaccgcgcgaatcgaaccaacaccctaaacgattaaaaacgccacccgcctccctaccgccgcgatt

SEQ ID NO: 12135 - DNA, 1370 bp, Artificial Sequence
  chemically treated genomic DNA (Homo sapiens) CpG-island No: 12135
tgaatatcggggtcgcgatgggcgttttggaaggacggtagtgttgtttataggggttaggttttttagagcgcgttttttgggggtaattttagacgtttgttttcgagtcgatttcgtgtattcgatataggatttcgtatttagggcgatgtcgggggagagggcgattttaattagtaatgatttaggagaggagtacgtaaagacgtttcggggatattgttggggcgggattcgagggcgtcgcgttttgtaggagtagtagcgcggggttcgatatcgggcgtttaaggaggcgttgggcgcgcgtttttttagttggggaggagacgggcgtggagcggaggcgtggttaggttcggagggggcggagttcgcggtatagcgcgtttcgcgggggtagagggggcgtattttgggcgggtttatttaggggcggggttttagagggcggggaggggcggagtttgttaggggcgggacgcggggcggagtcggggtgggggcggagtcgggttgggggcggggcgcgtcgtcgagcgtagtcgggcgggggaggggagcggcgcggtcggacgggagcgggggaggggcgggggcgcgggcggcgtcgtaggtttgggcgcgggttttcgtgggcgtcgtcgtttttaagggtcgtaggagcggcgcgcggcggcggaggcgttcgggacgttcgcgatagacgcgcgtgtaggcggggtcgtcgcgtttattttgggttttttttcggatatggttgcgcgagcggcgcggggaggcggcgcgggggaagtagcgcggagcgggcgagttacgttttcggtttcgtcgttttttcgtcgtaattgtgcgcggggtcgcgttttattttttaaatttcggcgtattcgttggtcggtacgggggttacgtggttgcgcgcgtttacgaggcgcgtttttcggggcgtcgggcgcgcgtaggtcgggtcgcggttttgggcggttggagatgcgttacgggggcgggtttcgcgcgatttcggcgggcgcggaagttttagggcgttgtggggcgcgggttaggagcgtttacggggagttcgggttttggggatttttgttcgttttttcgcgtcgttcgggtttcgattttttttttgggggtcgcgtttttggggcgtcgggaagtgaggtcggggtcgtcgtttatggtcgtagggatttggggcggaggagggaggacgttgggggtgacgtttttttttaggagtcgcggatagagcggagaaggcggttcgcggggtttcgttcgcgggggtcgcgcgaatcgggttagtattttagacgattgggggcgttattcgtttttttgtcgtcgcggtt

SEQ ID NO: 12136 - DNA, 1370 bp, Artificial Sequence
  chemically treated genomic DNA (Homo sapiens) CpG-island No: 12136
aaccgcgacgacaaaaaaacgaataacgcccccaatcgtctaaaatactaacccgattcgcgcgacccccgcgaacgaaaccccgcgaaccgccttctccgctctatccgcgactcctaaaaaaaaacgtcacccccaacgtcctccctcctccgccccaaatccctacgaccataaacgacgaccccgacctcacttcccgacgccccaaaaacgcgacccccaaaaaaaaaatcgaaacccgaacgacgcgaaaaaacgaacaaaaatccccaaaacccgaactccccgtaaacgctcctaacccgcgccccacaacgccctaaaacttccgcgcccgccgaaatcgcgcgaaacccgcccccgtaacgcatctccaaccgcccaaaaccgcgacccgacctacgcgcgcccgacgccccgaaaaacgcgcctcgtaaacgcgcgcaaccacgtaacccccgtaccgaccaacgaatacgccgaaatttaaaaaataaaacgcgaccccgcgcacaattacgacgaaaaaacgacgaaaccgaaaacgtaactcgcccgctccgcgctacttcccccgcgccgcctccccgcgccgctcgcgcaaccatatccgaaaaaaaacccaaaataaacgcgacgaccccgcctacacgcgcgtctatcgcgaacgtcccgaacgcctccgccgccgcgcgccgctcctacgacccttaaaaacgacgacgcccacgaaaacccgcgcccaaacctacgacgccgcccgcgcccccgcccctcccccgctcccgtccgaccgcgccgctcccctcccccgcccgactacgctcgacgacgcgccccgcccccaacccgactccgcccccaccccgactccgccccgcgtcccgcccctaacaaactccgcccctccccgccctctaaaaccccgcccctaaataaacccgcccaaaatacgccccctctacccccgcgaaacgcgctataccgcgaactccgccccctccgaacctaaccacgcctccgctccacgcccgtctcctccccaactaaaaaaacgcgcgcccaacgcctccttaaacgcccgatatcgaaccccgcgctactactcctacaaaacgcgacgccctcgaatcccgccccaacaatatccccgaaacgtctttacgtactcctctcctaaatcattactaattaaaatcgccctctcccccgacatcgccctaaatacgaaatcctatatcgaatacacgaaatcgactcgaaaacaaacgtctaaaattacccccaaaaaacgcgctctaaaaaacctaacccctataaacaacactaccgtccttccaaaacgcccatcgcgaccccgatattca

SEQ ID NO: 12137 - DNA, 760 bp, Artificial Sequence
  chemically treated genomic DNA (Homo sapiens) CpG-island No: 12137
ttcgcgttcggcgttggtttcgttttcgcggttcgtatttgatttacgttttcgttcgtttttagttgtacgttgtcgcggtttcggtttttattgtcgtttagtaggtcgtttttcgagttttcgagtagcgacgaggagttagtggaggagatcgacgaggtggaaaggcggcgcggttgttgtaggtgcgaagagttcgttgtcgggaggtagtttttttttcgtttcggcggtttagggttggtcgggggtacgtcgggtttttcggttgttacggttagttgagggattatcggggtcgggggagttcgcggaagttcgttggggatttgttttttacgtcgtttggtttcgcgggttcggggttttttcgcggcggcggtcgtagcgatcgtcgtatagcgcgtttcgaagagtaggcgtagtttttcgatatttcggcgcggggttcgttttagtttcgggttgtagggtttcgcgtttttcggtcgcgttatgttcgttgggttttcgggtagggttattttttagtgtcggcgtcgtcgttgagtttattagttcgcggcgcgtcggggattggagcggttcggcgttttcggttggagacggtttcggggcggagtttgcgtcgttgtacgttcgcgtttcgtttcggtcgcgtttttcgtttattttttttatttttagagaaagcgcgggttttttagggtttttgcgagggagagaaggttttcggtgatttttcggggtggcgggg

SEQ ID NO: 12138 - DNA, 760 bp, Artificial Sequence
  chemically treated genomic DNA (Homo sapiens) CpG-island No: 12138
ccccgccaccccgaaaaatcaccgaaaaccttctctccctcgcaaaaaccctaaaaaacccgcgctttctctaaaaataaaaaaaataaacgaaaaacgcgaccgaaacgaaacgcgaacgtacaacgacgcaaactccgccccgaaaccgtctccaaccgaaaacgccgaaccgctccaatccccgacgcgccgcgaactaataaactcaacgacgacgccgacactaaaaaataaccctacccgaaaacccaacgaacataacgcgaccgaaaaacgcgaaaccctacaacccgaaactaaaacgaaccccgcgccgaaatatcgaaaaactacgcctactcttcgaaacgcgctatacgacgatcgctacgaccgccgccgcgaaaaaaccccgaacccgcgaaaccaaacgacgtaaaaaacaaatccccaacgaacttccgcgaactcccccgaccccgataatccctcaactaaccgtaacaaccgaaaaacccgacgtacccccgaccaaccctaaaccgccgaaacgaaaaaaaaactacctcccgacaacgaactcttcgcacctacaacaaccgcgccgcctttccacctcgtcgatctcctccactaactcctcgtcgctactcgaaaactcgaaaaacgacctactaaacgacaataaaaaccgaaaccgcgacaacgtacaactaaaaacgaacgaaaacgtaaatcaaatacgaaccgcgaaaacgaaaccaacgccgaacgcgaa

SEQ ID NO: 12139 - DNA, 760 bp, Artificial Sequence
  chemically treated genomic DNA (Homo sapiens) CpG-island No: 12139
tttcgttatttcgaggagttatcgagagttttttttttttcgtaggggttttgggaggttcgcgttttttttgaaagtggaaggagtgggcggggggcgcggtcgaggcggggcgcgggcgtgtagcggcgtaggtttcgtttcggggtcgtttttagtcgggggcgtcgagtcgttttagttttcggcgcgtcgcgggttggtgggtttagcggcggcgtcggtattgggaaatgattttgttcgggggtttaacgggtatggcgcggtcggggggcgcgaggttttgtagttcggggttggagcgggtttcgcgtcggagtgtcggggagttgcgtttgtttttcgaggcgcgttgtgcggcggtcgttgcggtcgtcgtcgcgggggagtttcgggttcgcggggttaagcggcgtgggggataggtttttaacgggttttcgcgggttttttcggtttcggtgattttttagttgatcgtgatagtcgaggagttcgacgtgttttcgattagttttgggtcgtcggagcgggagagggattgtttttcggtagcgggtttttcgtatttgtagtagtcgcgtcgtttttttatttcgtcggttttttttattggtttttcgtcgttgttcgaggattcggaggacgatttgttgagcgatagtgagagtcggagtcgcggtaacgtgtagttggaagcgggcgaggacgtgggttaggtacgggtcgcgggggcggggttagcgtcgggcgcggg

SEQ ID NO: 12140 - DNA, 760 bp, Artificial Sequence
  chemically treated genomic DNA (Homo sapiens) CpG-island No: 12140
cccgcgcccgacgctaaccccgcccccgcgacccgtacctaacccacgtcctcgcccgcttccaactacacgttaccgcgactccgactctcactatcgctcaacaaatcgtcctccgaatcctcgaacaacgacgaaaaaccaataaaaaaaaccgacgaaataaaaaaacgacgcgactactacaaatacgaaaaacccgctaccgaaaaacaatccctctcccgctccgacgacccaaaactaatcgaaaacacgtcgaactcctcgactatcacgatcaactaaaaaatcaccgaaaccgaaaaaacccgcgaaaacccgttaaaaacctatcccccacgccgcttaaccccgcgaacccgaaactcccccgcgacgacgaccgcaacgaccgccgcacaacgcgcctcgaaaaacaaacgcaactccccgacactccgacgcgaaacccgctccaaccccgaactacaaaacctcgcgccccccgaccgcgccatacccgttaaacccccgaacaaaatcatttcccaataccgacgccgccgctaaacccaccaacccgcgacgcgccgaaaactaaaacgactcgacgcccccgactaaaaacgaccccgaaacgaaacctacgccgctacacgcccgcgccccgcctcgaccgcgccccccgcccactccttccactttcaaaaaaaacgcgaacctcccaaaacccctacgaaaaaaaaaaaactctcgataactcctcgaaataacgaaa

SEQ ID NO: 12141 - DNA, 895 bp, Artificial Sequence
  chemically treated genomic DNA (Homo sapiens) CpG-island No: 12141
agcgggaaagttttgggggtcgttttgcgttttaagatagacgtttataattttttttacgtcgtgtaatatttaagtaggcggtttttttttcgcgttttcgcgtttataggttgggttaattatagtgtcgtattttttatattgttcgataggcggtgggcgggtcgttggtgattgttatttaataggcgtcgcggttgtttcggtggcgttattgattcggaggcggttgcggagagcggggcgttggttcgtggaggcggtagcggcggcggttttttagcggattcgaggtgcgacggatagagacgcggggcggtaggtcgggcggcgaagtcggcgagggcgaggttatgggtttgagcggtcggggttggcgaatttcgcgtgtggtcggtttcggcggcgaggttcgtttcgttgaagtacgcggggatttcgaacggcggtgtaggcgaggttagcgaggcgggcgggggattggcgcgttttttgggcggtattggagtttcggcgtttttatagcgggcgtcgatatcgtaaaagtcgttttcgaacgaagtcgcggggtcggttttttaaatttggttatgttttcggggaaagttagaaattcgtatatatgtttttttttgtcgtggagattgatggagtttttgttgcggggcggggattttagcgagagggggacgtgaagttcgtttcgtatttaggcgtgtgtgtttttgatcgacgcgtaggacgttttggaggacggcgttagtttttgatttagtgtgaggtgttcggacggtttttttaagaagcgcgtatttaagatgagatttgaagttgagcgtgaatttaaggtggggtagggggtgggtaggcgagagaacgtatagggtttgat

SEQ ID NO: 12142 - DNA, 895 bp, Artificial Sequence
  chemically treated genomic DNA (Homo sapiens) CpG-island No: 12142
atcaaaccctatacgttctctcgcctacccaccccctaccccaccttaaattcacgctcaacttcaaatctcatcttaaatacgcgcttcttaaaaaaaccgtccgaacacctcacactaaatcaaaaactaacgccgtcctccaaaacgtcctacgcgtcgatcaaaaacacacacgcctaaatacgaaacgaacttcacgtccccctctcgctaaaatccccgccccgcaacaaaaactccatcaatctccacgacaaaaaaaaacatatatacgaatttctaactttccccgaaaacataaccaaatttaaaaaaccgaccccgcgacttcgttcgaaaacgacttttacgatatcgacgcccgctataaaaacgccgaaactccaataccgcccaaaaaacgcgccaatcccccgcccgcctcgctaacctcgcctacaccgccgttcgaaatccccgcgtacttcaacgaaacgaacctcgccgccgaaaccgaccacacgcgaaattcgccaaccccgaccgctcaaacccataacctcgccctcgccgacttcgccgcccgacctaccgccccgcgtctctatccgtcgcacctcgaatccgctaaaaaaccgccgccgctaccgcctccacgaaccaacgccccgctctccgcaaccgcctccgaatcaataacgccaccgaaacaaccgcgacgcctattaaataacaatcaccaacgacccgcccaccgcctatcgaacaatataaaaaatacgacactataattaacccaacctataaacgcgaaaacgcgaaaaaaaaaccgcctacttaaatattacacgacgtaaaaaaaattataaacgtctatcttaaaacgcaaaacgacccccaaaactttcccgct

SEQ ID NO: 12143 - DNA, 895 bp, Artificial Sequence
  chemically treated genomic DNA (Homo sapiens) CpG-island No: 12143
gttaggttttgtgcgttttttcgtttgtttattttttattttattttgagtttacgtttaattttagattttattttaaatacgcgttttttagggaaatcgttcgggtattttatattaggttaggagttggcgtcgttttttagggcgttttacgcgtcggttaggggtatatacgtttgagtacggaacgaattttacgtttttttttcgttagagttttcgtttcgtagtagaggttttattagtttttacggtaagaagaagtatatgtgcgaatttttagtttttttcggggatataattaagtttgggagatcggtttcgcgatttcgttcgagaacgatttttgcggtgtcggcgttcgttatgagggcgtcggaattttagtgtcgtttaaggaacgcgttagtttttcgttcgtttcgttggtttcgtttatatcgtcgttcggagttttcgcgtgttttagcgggacgggtttcgtcgtcgggatcggttatacgcggggttcgttaatttcgatcgtttaagtttatggtttcgttttcgtcggtttcgtcgttcgatttgtcgtttcgcgtttttgttcgtcgtatttcggattcgttagaaagtcgtcgtcgttgtcgtttttacgggttagcgtttcgtttttcgtagtcgttttcgagttagtggcgttatcggagtagtcgcggcgtttgttgggtaatagttattagcggttcgtttatcgtttgtcgggtagtatgaaaagtgcggtattgtgattggtttagtttgtgggcgcgaaagcgcgggaaggaggtcgtttgtttgaatgttgtacgacgtagaagagattgtgggcgtttgttttggagcgtagagcggtttttaagattttttcgtt

SEQ ID NO: 12144 - DNA, 895 bp, Artificial Sequence
  chemically treated genomic DNA (Homo sapiens) CpG-island No: 12144
aacgaaaaaatcttaaaaaccgctctacgctccaaaacaaacgcccacaatctcttctacgtcgtacaacattcaaacaaacgacctccttcccgcgctttcgcgcccacaaactaaaccaatcacaataccgcacttttcatactacccgacaaacgataaacgaaccgctaataactattacccaacaaacgccgcgactactccgataacgccactaactcgaaaacgactacgaaaaacgaaacgctaacccgtaaaaacgacaacgacgacgactttctaacgaatccgaaatacgacgaacaaaaacgcgaaacgacaaatcgaacgacgaaaccgacgaaaacgaaaccataaacttaaacgatcgaaattaacgaaccccgcgtataaccgatcccgacgacgaaacccgtcccgctaaaacacgcgaaaactccgaacgacgatataaacgaaaccaacgaaacgaacgaaaaactaacgcgttccttaaacgacactaaaattccgacgccctcataacgaacgccgacaccgcaaaaatcgttctcgaacgaaatcgcgaaaccgatctcccaaacttaattatatccccgaaaaaaactaaaaattcgcacatatacttcttcttaccgtaaaaactaataaaacctctactacgaaacgaaaactctaacgaaaaaaaaacgtaaaattcgttccgtactcaaacgtatatacccctaaccgacgcgtaaaacgccctaaaaaacgacgccaactcctaacctaatataaaatacccgaacgatttccctaaaaaacgcgtatttaaaataaaatctaaaattaaacgtaaactcaaaataaaataaaaaataaacaaacgaaaaaacgcacaaaacctaac

SEQ ID NO: 12145 - DNA, 664 bp, Artificial Sequence
  chemically treated genomic DNA (Homo sapiens) CpG-island No: 12145
  unsure (230, 237)
ttttcgtcggtcggtcgggttcggagtttttaagatttcgttttattcggtgcggcgggcgttgatgtatcggggtatttatatcgtgtttaatttgttgtcgaagtagcgttcggtggatatttcggaggacgagttggagggtgagtgttcgtcgggattttcgtttcggcggtttttttatttgtgcgtttaggtgaagcgcgggttaggggcgcgggggcgggggncgggggncggttcgtaggtgtcggttgttaggtgggcgttttagttagtagttgtgtttcgcggtaagatttgttcgtatttcggggcgtcgcggtgggggtcgtttaggcggagagcggtttagtttttgttcgcgtggtttttagcgttgcggaaatttgtcgggtttcgtagcggggttacggggtcgcgtagtcggcggtgacggtgcggtaacgcggcggattggggcgggggttcgcgttgagtttttagcgtcggttcggtcggagtattcgtattttgatttttttcgcggcgttcgttcgcggttttttgttcgtattgatatttcgttcgtgtcgttttaaaaatttaatttgttcgggtagtagtagtttagattcgtagggggatggtaggtcgttggttgggcgaggttagagtagagggt

SEQ ID NO: 12146 - DNA, 664 bp, Artificial Sequence
  chemically treated genomic DNA (Homo sapiens) CpG-island No: 12146
  unsure (428, 435)
accctctactctaacctcgcccaaccaacgacctaccatccccctacgaatctaaactactactacccgaacaaattaaatttttaaaacgacacgaacgaaatatcaatacgaacaaaaaaccgcgaacgaacgccgcgaaaaaaatcaaaatacgaatactccgaccgaaccgacgctaaaaactcaacgcgaacccccgccccaatccgccgcgttaccgcaccgtcaccgccgactacgcgaccccgtaaccccgctacgaaacccgacaaatttccgcaacgctaaaaaccacgcgaacaaaaactaaaccgctctccgcctaaacgacccccaccgcgacgccccgaaatacgaacaaatcttaccgcgaaacacaactactaactaaaacgcccacctaacaaccgacacctacgaaccgncccccgncccccgcccccgcgcccctaacccgcgcttcacctaaacgcacaaataaaaaaaccgccgaaacgaaaatcccgacgaacactcaccctccaactcgtcctccgaaatatccaccgaacgctacttcgacaacaaattaaacacgatataaataccccgatacatcaacgcccgccgcaccgaataaaacgaaatcttaaaaactccgaacccgaccgaccgacgaaaa

SEQ ID NO: 12147 - DNA, 664 bp, Artificial Sequence
  chemically treated genomic DNA (Homo sapiens) CpG-island No: 12147
  unsure (428, 435)
gttttttgttttgatttcgtttagttagcggtttgttatttttttgcgagtttgagttgttgttgttcgagtagattgaatttttaaagcgatacgagcggaatgttaatgcgagtagagagtcgcgggcgggcgtcgcggaggggattaggatgcgggtgtttcggtcgggtcggcgttgggggtttagcgcggattttcgttttagttcgtcgcgttgtcgtatcgttatcgtcgattgcgcggtttcgtgatttcgttgcggggttcggtaagttttcgtagcgttggggattacgcgggtaggggttgggtcgtttttcgtttgagcgatttttatcgcggcgtttcggggtgcggataggttttgtcgcggggtatagttgttagttggggcgtttatttggtaatcggtatttgcggatcgnttttcgnttttcgttttcgcgtttttggttcgcgttttatttgggcgtataggtaggagggtcgtcggggcggggatttcggcggatatttattttttagttcgtttttcgggatgtttatcgggcgttgtttcgatagtaggttgggtacggtgtagatgtttcggtatattaacgttcgtcgtatcgggtggaacgggattttggaggtttcgggttcggtcggtcggcgaaaa

SEQ ID NO: 12148 - DNA, 664 bp, Artificial Sequence
  chemically treated genomic DNA (Homo sapiens) CpG-island No: 12148
  unsure (230, 237)
ttttcgccgaccgaccgaacccgaaacctccaaaatcccgttccacccgatacgacgaacgttaatataccgaaacatctacaccgtacccaacctactatcgaaacaacgcccgataaacatcccgaaaaacgaactaaaaaataaatatccgccgaaatccccgccccgacgaccctcctacctatacgcccaaataaaacgcgaaccaaaaacgcgaaaacgaaaancgaaaancgatccgcaaataccgattaccaaataaacgccccaactaacaactataccccgcgacaaaacctatccgcaccccgaaacgccgcgataaaaatcgctcaaacgaaaaacgacccaacccctacccgcgtaatccccaacgctacgaaaacttaccgaaccccgcaacgaaatcacgaaaccgcgcaatcgacgataacgatacgacaacgcgacgaactaaaacgaaaatccgcgctaaacccccaacgccgacccgaccgaaacacccgcatcctaatcccctccgcgacgcccgcccgcgactctctactcgcattaacattccgctcgtatcgctttaaaaattcaatctactcgaacaacaacaactcaaactcgcaaaaaaataacaaaccgctaactaaacgaaatcaaaacaaaaaac

SEQ ID NO: 12149 - DNA, 504 bp, Artificial Sequence
  chemically treated genomic DNA (Homo sapiens) CpG-island No: 12149
ttcgttcggtcgggtggacgagtttcggatatttacgtttattagtttgtttttaagtgtaaagagttcgtttttcgagtcgtttagaaaggcggtaggttatgttttaaaaataaataaggtaaagagagaggggtttgcgttcggggagagttttataggcgcgttagtttggaaggttcgcgaggtcgtatcgtttcggttaggataggtatttaaaaaagttaaagtatatcgattttttaaattcgatcgttgtttttagaggtcgtaaatcgttgtttggcggtgttttaggtcggggtttgtcgtcggagttattaattttcggttttttcgcggcggttagggatttcgatagtatttcgggggtgggatttcgttcgggatttaaaaggtagcgcggtttcgggcgttcgggaattttttttatacgatacggttattaatattaatagaggttcggcgttcgggtttgcgggaatttttcggtcgttgttcggt

SEQ ID NO: 12150 - DNA, 504 bp, Artificial Sequence
  chemically treated genomic DNA (Homo sapiens) CpG-island No: 12150
accgaacaacgaccgaaaaattcccgcaaacccgaacgccgaacctctattaatattaataaccgtatcgtataaaaaaaattcccgaacgcccgaaaccgcgctaccttttaaatcccgaacgaaatcccacccccgaaatactatcgaaatccctaaccgccgcgaaaaaaccgaaaattaataactccgacgacaaaccccgacctaaaacaccgccaaacaacgatttacgacctctaaaaacaacgatcgaatttaaaaaatcgatatactttaacttttttaaatacctatcctaaccgaaacgatacgacctcgcgaaccttccaaactaacgcgcctataaaactctccccgaacgcaaacccctctctctttaccttatttatttttaaaacataacctaccgcctttctaaacgactcgaaaaacgaactctttacacttaaaaacaaactaataaacgtaaatatccgaaactcgtccacccgaccgaacgaa

SEQ ID NO: 12151 - DNA, 504 bp, Artificial Sequence
  chemically treated genomic DNA (Homo sapiens) CpG-island No: 12151
gtcggatagcggtcgaggggttttcgtaggttcggacgtcggatttttgttggtattggtggtcgtgtcgtgtggaaaaagttttcgggcgttcggggtcgcgttgttttttggatttcgggcggagttttattttcgaggtgttgtcgggatttttagtcgtcgcggggaggtcgggagttggtggtttcggcggtaggtttcggtttggggtatcgttaagtagcggtttgcggtttttaggaatagcggtcggatttggggggtcggtgtgttttggtttttttagatatttgttttggtcggggcggtgcggtttcgcgggttttttaggttggcgcgtttgtggggtttttttcgagcgtaggtttttttttttttgttttatttatttttggaatataatttgtcgtttttttagacggttcgaggggcgggttttttgtatttggaagtaggttgatgggcgtgagtgttcggggttcgtttattcggtcggacggg

SEQ ID NO: 12152 - DNA, 504 bp, Artificial Sequence
  chemically treated genomic DNA (Homo sapiens) CpG-island No: 12152
cccgtccgaccgaataaacgaaccccgaacactcacgcccatcaacctacttccaaatacaaaaaacccgcccctcgaaccgtctaaaaaaacgacaaattatattccaaaaataaataaaacaaaaaaaaaaaaacctacgctcgaaaaaaaccccacaaacgcgccaacctaaaaaacccgcgaaaccgcaccgccccgaccaaaacaaatatctaaaaaaaccaaaacacaccgaccccccaaatccgaccgctattcctaaaaaccgcaaaccgctacttaacgataccccaaaccgaaacctaccgccgaaaccaccaactcccgacctccccgcgacgactaaaaatcccgacaacacctcgaaaataaaactccgcccgaaatccaaaaaacaacgcgaccccgaacgcccgaaaactttttccacacgacacgaccaccaataccaacaaaaatccgacgtccgaacctacgaaaacccctcgaccgctatccgac

SEQ ID NO: 12153 - DNA, 706 bp, Artificial Sequence
  chemically treated genomic DNA (Homo sapiens) CpG-island No: 12153
aatttcgtttttttcgtttggtacggtttttttgtatcgttgtgtttcgtttttaggtttttgttcgttaagaatgtttgtttcgggggcgcgttcgttggttaggattttgtcggtagttttcggggaatttttgaggatgcggaggtgggttcgagaattgcggtttcgatgcggggtggagttagttaggtcgcgcgttttcgtagttttgtcgtagcgcgtgttttggttttttcggatcgaaaaggtcgaagtcgtttttcgcgatcgatttcgcgtaattggttcgggtttgtatttagatggttgtgggttttatagggatggtcgggcgggttcgttcggtcgttattttagggtcgttagttttcgcgcgcggtcgtttttcgttaggaagggtggcgggttcggaaggttagagatgttttagtgtttttcgcgtcgttacgtatttagttgttcgcgggttttatatggttgcggtcggagggttcgtattaggatcgtcgtcgtttggggaagcgtttttttgtgggtagggcgcggcgggtagtgcggaagttcgaaagttatcggagttcggggtaggggcggcgcgatgtagaggcggcgttcgggggtttttagttgtttgcggttcggttatttagtcgcgattagagggggcgggggacgtaggaatttcggcgttcgggcggtgtgt

SEQ ID NO: 12154 - DNA, 706 bp, Artificial Sequence
  chemically treated genomic DNA (Homo sapiens) CpG-island No: 12154
acacaccgcccgaacgccgaaattcctacgtcccccgccccctctaatcgcgactaaataaccgaaccgcaaacaactaaaaacccccgaacgccgcctctacatcgcgccgcccctaccccgaactccgataactttcgaacttccgcactacccgccgcgccctacccacaaaaaaacgcttccccaaacgacgacgatcctaatacgaaccctccgaccgcaaccatataaaacccgcgaacaactaaatacgtaacgacgcgaaaaacactaaaacatctctaaccttccgaacccgccacccttcctaacgaaaaacgaccgcgcgcgaaaactaacgaccctaaaataacgaccgaacgaacccgcccgaccatccctataaaacccacaaccatctaaatacaaacccgaaccaattacgcgaaatcgatcgcgaaaaacgacttcgaccttttcgatccgaaaaaaccaaaacacgcgctacgacaaaactacgaaaacgcgcgacctaactaactccaccccgcatcgaaaccgcaattctcgaacccacctccgcatcctcaaaaattccccgaaaactaccgacaaaatcctaaccaacgaacgcgcccccgaaacaaacattcttaacgaacaaaaacctaaaaacgaaacacaacgatacaaaaaaaccgtaccaaacgaaaaaaacgaaatt

SEQ ID NO: 12155 - DNA, 706 bp, Artificial Sequence
  chemically treated genomic DNA (Homo sapiens) CpG-island No: 12155
gtatatcgttcggacgtcggggtttttgcgtttttcgttttttttgatcgcggttgggtagtcgagtcgtaggtagttgggggttttcgaacgtcgtttttgtatcgcgtcgtttttgtttcgggtttcggtagttttcgggttttcgtattgttcgtcgcgttttgtttatagggaagcgtttttttaggcggcggcggttttggtgcggatttttcggtcgtagttatgtgggattcgcgggtagttaggtgcgtagcggcgcgggaagtattggggtatttttggtttttcgggttcgttattttttttggcgggaggcggtcgcgcgcggggattggcgattttgaggtagcggtcgaacgggttcgttcggttatttttgtggggtttatagttatttaggtgtagattcgagttagttgcgcggggtcggtcgcgggggacggtttcggttttttcggttcggagggattagggtacgcgttgcgataggattgcggaggcgcgcggtttggttagttttatttcgtatcgaaatcgtagttttcgggtttattttcgtatttttaggggtttttcgggggttgtcgatagggttttgattagcgagcgcgttttcggggtaagtatttttggcgggtagaaatttgggagcggagtatagcggtgtaagggaatcgtgttaggcggaaagggcggaatt

SEQ ID NO: 12156 - DNA, 706 bp, Artificial Sequence
  chemically treated genomic DNA (Homo sapiens) CpG-island No: 12156
aattccgccctttccgcctaacacgattcccttacaccgctatactccgctcccaaatttctacccgccaaaaatacttaccccgaaaacgcgctcgctaatcaaaaccctatcgacaacccccgaaaaacccctaaaaatacgaaaataaacccgaaaactacgatttcgatacgaaataaaactaaccaaaccgcgcgcctccgcaatcctatcgcaacgcgtaccctaatccctccgaaccgaaaaaaccgaaaccgtcccccgcgaccgaccccgcgcaactaactcgaatctacacctaaataactataaaccccacaaaaataaccgaacgaacccgttcgaccgctacctcaaaatcgccaatccccgcgcgcgaccgcctcccgccaaaaaaaataacgaacccgaaaaaccaaaaataccccaatacttcccgcgccgctacgcacctaactacccgcgaatcccacataactacgaccgaaaaatccgcaccaaaaccgccgccgcctaaaaaaacgcttccctataaacaaaacgcgacgaacaatacgaaaacccgaaaactaccgaaacccgaaacaaaaacgacgcgatacaaaaacgacgttcgaaaacccccaactacctacgactcgactacccaaccgcgatcaaaaaaaacgaaaaacgcaaaaaccccgacgtccgaacgatatac

SEQ ID NO: 12157 - DNA, 726 bp, Artificial Sequence
  chemically treated genomic DNA (Homo sapiens) CpG-island No: 12157
  unsure (91, 105)
agttcggaaagttttcgcgtagtaggcgtaaggcgcgttttttttttttattcgtaggcgtcgggttcgcgaacgttttatttcggttcgntttcgttcgtcgtntggtgttcgtttaaggttattgttgataaggcgtttgttttcgcggggcgaagggattaagatacgtttcggtttacgttttcgttttggttcggcgggggttttcggggtcgagcgttcgcggaagggaagttagtagggaaagtgataagagatcgagcgagaggggaagaggtttagagttcgggttcggtcgtttttgttttatttgcgtcggtttcgagagcgagatgttgtcgtcgtcgttgtcgtcgtcgttgtcgttggtgcgcgttcggttcggttcggtttcgttgcggttgcggtttttttgtcgcggttgtttcgcgttcgtttgtttcgcggtttcgtcgtcgttcgttcgttttttttttttcgtcgtcgtttttgttatcgttgtattgcgttttgttcgtttttttttttcgttttttttgtttattttttttcgcgcgttttttttcggttttttttaaattttttacggagagcgtttcgcgggatcggagcgcgcggtttcgttcgcgttttttttcgcgcgtattagtggggttgcggggaagggtatttagttttgtttcggggcgtgtttttaggtatttttattagtataggtttttg

SEQ ID NO: 12158 - DNA, 726 bp, Artificial Sequence
  chemically treated genomic DNA (Homo sapiens) CpG-island No: 12158
  unsure (622, 636)
caaaaacctatactaataaaaatacctaaaaacacgccccgaaacaaaactaaatacccttccccgcaaccccactaatacgcgcgaaaaaaaacgcgaacgaaaccgcgcgctccgatcccgcgaaacgctctccgtaaaaaatttaaaaaaaaccgaaaaaaaacgcgcgaaaaaaaataaacaaaaaaaacgaaaaaaaaaaacgaacaaaacgcaatacaacgataacaaaaacgacgacgaaaaaaaaaaaacgaacgaacgacgacgaaaccgcgaaacaaacgaacgcgaaacaaccgcgacaaaaaaaccgcaaccgcaacgaaaccgaaccgaaccgaacgcgcaccaacgacaacgacgacgacaacgacgacgacaacatctcgctctcgaaaccgacgcaaataaaacaaaaacgaccgaacccgaactctaaacctcttcccctctcgctcgatctcttatcactttccctactaacttcccttccgcgaacgctcgaccccgaaaacccccgccgaaccaaaacgaaaacgtaaaccgaaacgtatcttaatcccttcgccccgcgaaaacaaacgccttatcaacaataaccttaaacgaacaccanacgacgaacgaaancgaaccgaaataaaacgttcgcgaacccgacgcctacgaataaaaaaaaaaaacgcgccttacgcctactacgcgaaaactttccgaact

SEQ ID NO: 12159 - DNA, 726 bp, Artificial Sequence
  chemically treated genomic DNA (Homo sapiens) CpG-island No: 12159
  unsure (622, 636)
taggggtttgtgttgatggaggtatttggagatacgtttcggggtaagattggatattttttttcgtagttttattggtgcgcgcggaggaggacgcgggcgggatcgcgcgtttcggtttcgcggggcgtttttcgtgaggagtttggggagggtcgagggggagcgcgcggggaggagtgagtagggagggcgggagggggaggcgggtagagcgtagtgtagcggtggtagaggcggcggcggagggagggaggcgggcgggcggcggcggggtcgcggggtaggcgagcgcggggtagtcgcggtagaggagtcgtagtcgtagcggggtcgggtcgggtcgggcgcgtattagcggtagcggcggcggtagcggcggcggtagtatttcgttttcggagtcggcgtaggtgaggtaggggcggtcgggttcgggttttgggtttttttttttttcgttcggttttttgttattttttttgttggtttttttttcgcgggcgttcggtttcggagattttcgtcgggttagggcgggagcgtgagtcggagcgtgttttggttttttcgtttcgcggaggtaggcgttttgttagtagtgattttgagcgggtattangcggcgggcggggncgggtcggggtggggcgttcgcggattcggcgtttgcgggtgagggaagggggcgcgttttgcgtttgttgcgcgaaaatttttcgggtt

SEQ ID NO: 12160 - DNA, 726 bp, Artificial Sequence
  chemically treated genomic DNA (Homo sapiens) CpG-island No: 12160
  unsure (91, 105)
aacccgaaaaattttcgcgcaacaaacgcaaaacgcgcccccttccctcacccgcaaacgccgaatccgcgaacgccccaccccgacccgnccccgcccgccgcntaatacccgctcaaaatcactactaacaaaacgcctacctccgcgaaacgaaaaaaccaaaacacgctccgactcacgctcccgccctaacccgacgaaaatctccgaaaccgaacgcccgcgaaaaaaaaaccaacaaaaaaaataacaaaaaaccgaacgaaaaaaaaaaaaacccaaaacccgaacccgaccgcccctacctcacctacgccgactccgaaaacgaaatactaccgccgccgctaccgccgccgctaccgctaatacgcgcccgacccgacccgaccccgctacgactacgactcctctaccgcgactaccccgcgctcgcctaccccgcgaccccgccgccgcccgcccgcctccctccctccgccgccgcctctaccaccgctacactacgctctacccgcctccccctcccgccctccctactcactcctccccgcgcgctccccctcgaccctccccaaactcctcacgaaaaacgccccgcgaaaccgaaacgcgcgatcccgcccgcgtcctcctccgcgcgcaccaataaaactacgaaaaaaaatatccaatcttaccccgaaacgtatctccaaatacctccatcaacacaaaccccta

SEQ ID NO: 12161 - DNA, 647 bp, Artificial Sequence
  chemically treated genomic DNA (Homo sapiens) CpG-island No: 12161
  unsure (148, 211)
ggtcgtcgcggtgcggtagtagtagtcgggttgcgggcgtcggagtttcgttatgttgttgttcgcgttttttttcgttgttcgtcgcgttcgtcgttagttcgttggcgttttagttgtttcgtttcgggttcggttttcgtgtcgnttcggtttcgtttcgtttcgtttcgtttcggttcgggttcggttttttttcgtcgttgtcgtngttgttgtagttttagattcgggcgcgtcgtttgttttgtgcgcgtgtgcgtcgtagaaagggagggacggaattcggcggggtgcgggggaaagtgggtaatgcgaattcgcgggtgtttcgtttcggcgcggagtatatggtcgcgggttcgtttcgtagcgcgcgttttgcggggttcgggcgtttttttcggttgggacggggtcgtttagagttgttcgcggggattagcggtttatttttgttaagtgtatttttatgaatttttgggtggttgtcgttttgtcgaggcgtttgggttacggtcgagagattattttcgagggaagaggtggcggtggaggtgggaaaaaggagtcgttaagcgagaggttttggatataggatattagtggaaataatgtagtggttgttatgaaattgcgagtgtagt

SEQ ID NO: 12162 - DNA, 647 bp, Artificial Sequence
  chemically treated genomic DNA (Homo sapiens) CpG-island No: 12162
  unsure (437, 500)
actacactcgcaatttcataacaaccactacattatttccactaatatcctatatccaaaacctctcgcttaacgactcctttttcccacctccaccgccacctcttccctcgaaaataatctctcgaccgtaacccaaacgcctcgacaaaacgacaaccacccaaaaattcataaaaatacacttaacaaaaataaaccgctaatccccgcgaacaactctaaacgaccccgtcccaaccgaaaaaaacgcccgaaccccgcaaaacgcgcgctacgaaacgaacccgcgaccatatactccgcgccgaaacgaaacacccgcgaattcgcattacccactttcccccgcaccccgccgaattccgtccctccctttctacgacgcacacgcgcacaaaacaaacgacgcgcccgaatctaaaactacaacaacnacgacaacgacgaaaaaaaaccgaacccgaaccgaaacgaaacgaaacgaaacgaaaccgaancgacacgaaaaccgaacccgaaacgaaacaactaaaacgccaacgaactaacgacgaacgcgacgaacaacgaaaaaaaacgcgaacaacaacataacgaaactccgacgcccgcaacccgactactactaccgcaccgcgacgacc

SEQ ID NO: 12163 - DNA, 647 bp, Artificial Sequence
  chemically treated genomic DNA (Homo sapiens) CpG-island No: 12163
  unsure (437, 500)
gttgtattcgtagttttatgataattattgtattatttttattaatattttgtgtttaaggtttttcgtttggcgattttttttttttatttttatcgttattttttttttcgagggtaatttttcgatcgtggtttaagcgtttcgataaagcggtaattatttaaaagtttatgaaaatgtatttggtaaaagtgggtcgttagttttcgcggatagttttaagcgatttcgttttagtcgaggaaagcgttcgggtttcgtaaagcgcgcgttgcggggcgggttcgcggttatgtgtttcgcgtcggggcggggtattcgcgggttcgtattgtttattttttttcgtatttcgtcgggtttcgtttttttttttttgcggcgtatacgcgtatagagtaagcggcgcgttcgggtttggagttgtagtagtngcggtaacggcgggggggggtcgggttcgggtcggggcggggcggggcggggcggggtcgggncggtacgggggtcgggttcggggcgaggtagttggggcgttagcgagttagcggcgagcgcggcgagtaacggagaggagcgcgagtagtagtatggcggggtttcgacgttcgtagttcggttgttattgtcgtatcgcggcggtt

SEQ ID NO: 12164 - DNA, 647 bp, Artificial Sequence
  chemically treated genomic DNA (Homo sapiens) CpG-island No: 12164
  unsure (148, 211)
aaccgccgcgatacgacaataacaaccgaactacgaacgtcgaaaccccgccatactactactcgcgctcctctccgttactcgccgcgctcgccgctaactcgctaacgccccaactacctcgccccgaacccgacccccgtaccgncccgaccccgccccgccccgccccgccccgacccgaacccgacccccccccgccgttaccgcnactactacaactccaaacccgaacgcgccgcttactctatacgcgtatacgccgcaaaaaaaaaaaaacgaaacccgacgaaatacgaaaaaaaataaacaatacgaacccgcgaataccccgccccgacgcgaaacacataaccgcgaacccgccccgcaacgcgcgctttacgaaacccgaacgctttcctcgactaaaacgaaatcgcttaaaactatccgcgaaaactaacgacccacttttaccaaatacattttcataaacttttaaataattaccgctttatcgaaacgcttaaaccacgatcgaaaaattaccctcgaaaaaaaaaataacgataaaaataaaaaaaaaaaatcgccaaacgaaaaaccttaaacacaaaatattaataaaaataatacaataattatcataaaactacgaatacaac

SEQ ID NO: 12165 - DNA, 892 bp, Artificial Sequence
  chemically treated genomic DNA (Homo sapiens) CpG-island No: 12165
ttcgcggcgattcggagagggcgaggtatcgggatatagattcgggtcgagaggagttttcgcgaggcgtagggtcgtggcgcgcgggcgtagggttttcggcggggttagggtggttatattcgtcgggcgttttttttcgggtcgttcgtttaagatggcgatggaggggcgggtgaggcggtagcggttttggttttcgcgtcggttttagttcgggttcgggttttcgaggtcgcgttttcgttcgcggcgtcgcgttttttcgggttattgacgttcggcgcgtttttttttcgcggcggcggtcgaagtacggggaggcggcggcggcggcggcggttcgagtttagttttatggcgcggggggacgtcggtcgcggtcgcgggtttttcgcgttgattttttgtttgttggtcgcgcgcggtaagggcgggcgttcggagaggtaggagcgattgcggagtgttggtgcgttcgcgttttggtttgtatcgggttgcggggttggtttaagtcggagtttcgagtaagtgcgggggttgcgcgtttaggtgttcgcgatgtttgcgcgggggtttgcgagttgcggtcggggggcgtttgtggggcgtgtttgttcgtagtgggtgtgtgtttttggttcgtagagtttggagtcgtgtgtgtgtgtgtgtgtgtgtgtgtgtgtgtgtgtgtgtgttgggagtgtttttgtcgtgttcgtagtgcgtgttatggtcgcggcgtggtatcggcggggcgggtagttgcggtgtcggtggttttcgcggggcgggttttgttttgtttgcgcgtgttttgggttgagagtgtgtgtaaaagaggagggaattggggttgtgtttgtatttttatttgggtcgggtg

SEQ ID NO: 12166 - DNA, 892 bp, Artificial Sequence
  chemically treated genomic DNA (Homo sapiens) CpG-island No: 12166
cacccgacccaaataaaaatacaaacacaaccccaattccctcctcttttacacacactctcaacccaaaacacgcgcaaacaaaacaaaacccgccccgcgaaaaccaccgacaccgcaactacccgccccgccgataccacgccgcgaccataacacgcactacgaacacgacaaaaacactcccaacacacacacacacacacacacacacacacacacacacacacgactccaaactctacgaaccaaaaacacacacccactacgaacaaacacgccccacaaacgccccccgaccgcaactcgcaaacccccgcgcaaacatcgcgaacacctaaacgcgcaacccccgcacttactcgaaactccgacttaaaccaaccccgcaacccgatacaaaccaaaacgcgaacgcaccaacactccgcaatcgctcctacctctccgaacgcccgcccttaccgcgcgcgaccaacaaacaaaaaatcaacgcgaaaaacccgcgaccgcgaccgacgtccccccgcgccataaaactaaactcgaaccgccgccgccgccgccgcctccccgtacttcgaccgccgccgcgaaaaaaaaacgcgccgaacgtcaataacccgaaaaaacgcgacgccgcgaacgaaaacgcgacctcgaaaacccgaacccgaactaaaaccgacgcgaaaaccaaaaccgctaccgcctcacccgcccctccatcgccatcttaaacgaacgacccgaaaaaaaacgcccgacgaatataaccaccctaaccccgccgaaaaccctacgcccgcgcgccacgaccctacgcctcgcgaaaactcctctcgacccgaatctatatcccgatacctcgccctctccgaatcgccgcgaa

SEQ ID NO: 12167 - DNA, 892 bp, Artificial Sequence
  chemically treated genomic DNA (Homo sapiens) CpG-island No: 12167
tattcgatttaaatggaggtgtagatataattttagttttttttttttttatatatatttttaatttaagatacgcgtaggtaaggtagagttcgtttcgcgaaagttatcgatatcgtagttattcgtttcgtcgatgttacgtcgcgattatggtacgtattgcggatacgataggagtatttttaatatatatatatatatatatatatatatatatatatatatacgattttagattttgcgaattaaaggtatatatttattgcggataagtacgttttataaacgtttttcggtcgtagttcgtagattttcgcgtaggtatcgcgggtatttggacgcgtagttttcgtatttgttcgggatttcggtttgagttagtttcgtagttcgatgtagattagggcgcgggcgtattagtatttcgtagtcgtttttgttttttcgggcgttcgtttttatcgcgcgcggttaataggtagaaggttaacgcgaggagttcgcggtcgcggtcggcgttttttcgcgttatggggttgggttcgggtcgtcgtcgtcgtcgtcgttttttcgtgtttcggtcgtcgtcgcggggggagagcgcgtcgggcgttagtggttcggggaggcgcggcgtcgcgggcgggggcgcggtttcgggggttcgggttcgagttggggtcggcgcgggggttagggtcgttgtcgttttattcgtttttttatcgttattttgggcgagcggttcgggagggggcgttcggcgagtgtggttattttggtttcgtcggggattttgcgttcgcgcgttacggttttgcgtttcgcgggggtttttttcggttcgggtttgtgtttcggtgtttcgtttttttcgggtcgtcgcggg

SEQ ID NO: 12168 - DNA, 892 bp, Artificial Sequence
  chemically treated genomic DNA (Homo sapiens) CpG-island No: 12168
cccgcgacgacccgaaaaaaacgaaacaccgaaacacaaacccgaaccgaaaaaaacccccgcgaaacgcaaaaccgtaacgcgcgaacgcaaaatccccgacgaaaccaaaataaccacactcgccgaacgccccctcccgaaccgctcgcccaaaataacgataaaaaaacgaataaaacgacaacgaccctaacccccgcgccgaccccaactcgaacccgaacccccgaaaccgcgcccccgcccgcgacgccgcgcctccccgaaccactaacgcccgacgcgctctccccccgcgacgacgaccgaaacacgaaaaaacgacgacgacgacgacgacccgaacccaaccccataacgcgaaaaaacgccgaccgcgaccgcgaactcctcgcgttaaccttctacctattaaccgcgcgcgataaaaacgaacgcccgaaaaaacaaaaacgactacgaaatactaatacgcccgcgccctaatctacatcgaactacgaaactaactcaaaccgaaatcccgaacaaatacgaaaactacgcgtccaaatacccgcgatacctacgcgaaaatctacgaactacgaccgaaaaacgtttataaaacgtacttatccgcaataaatatatacctttaattcgcaaaatctaaaatcgtatatatatatatatatatatatatatatatatatatatattaaaaatactcctatcgtatccgcaatacgtaccataatcgcgacgtaacatcgacgaaacgaataactacgatatcgataactttcgcgaaacgaactctaccttacctacgcgtatcttaaattaaaaatatatataaaaaaaaaaaaaactaaaattatatctacacctccatttaaatcgaata

SEQ ID NO: 12169 - DNA, 563 bp, Artificial Sequence
  chemically treated genomic DNA (Homo sapiens) CpG-island No: 12169
tttcgcgtttagcgtcgtttttcgcgtttttagcggttttcgttattatttaggcgttcgaggcgttgtcgcggacgcgggcgagtatagcgcgtttcgtgtgtcgcgcgtcgggggagtcgcggttagcgttgcgttggttgtataacggggcgtcgttgcggtttaacgggcgcgttaaggtttagggcggcggtggtagtttggttattatatagatcggtttgtaggacgtcggttattattagtgcgtggttgagaatagcgcgggaatggcgtgcgttgtcgcgtcgttggtcgtggtggtgcgcgaggggttgtttagcgtttttacgcgggttattgttacgttattgagtagtttcgttgtgttggtggtttgggagcggttcgagatgtatagcgagtagattatcggtttttttttttattattagaaggtacggggtacgtcggtttggggcgggatgtattagcgtaggttcgggcggggcgtagttagaaggggtttaggtcggatgattgaagggttgtttgatgggtatttttgcggtaaggatgga

SEQ ID NO: 12170 - DNA, 563 bp, Artificial Sequence
  chemically treated genomic DNA (Homo sapiens) CpG-island No: 12170
tccatccttaccgcaaaaatacccatcaaacaacccttcaatcatccgacctaaaccccttctaactacgccccgcccgaacctacgctaatacatcccgccccaaaccgacgtaccccgtaccttctaataataaaaaaaaaaaccgataatctactcgctatacatctcgaaccgctcccaaaccaccaacacaacgaaactactcaataacgtaacaataacccgcgtaaaaacgctaaacaacccctcgcgcaccaccacgaccaacgacgcgacaacgcacgccattcccgcgctattctcaaccacgcactaataataaccgacgtcctacaaaccgatctatataataaccaaactaccaccgccgccctaaaccttaacgcgcccgttaaaccgcaacgacgccccgttatacaaccaacgcaacgctaaccgcgactcccccgacgcgcgacacacgaaacgcgctatactcgcccgcgtccgcgacaacgcctcgaacgcctaaataataacgaaaaccgctaaaaacgcgaaaaacgacgctaaacgcgaaa

SEQ ID NO: 12171 - DNA, 563 bp, Artificial Sequence
  chemically treated genomic DNA (Homo sapiens) CpG-island No: 12171
tttatttttgtcgtagaggtatttattaggtaattttttagttattcgatttgaattttttttggttgcgtttcgttcgggtttgcgttggtgtatttcgttttaggtcgacgtatttcgtgttttttggtagtggagagagaagtcgatgatttgttcgttgtgtatttcgggtcgtttttaggttattaatatagcggagttgtttagtggcgtagtagtgattcgcgtgggggcgttgggtagtttttcgcgtattattacggttagcgacgcggtagcgtacgttattttcgcgttgtttttagttacgtattggtagtagtcggcgttttgtaggtcgatttgtgtgatgattaggttgttatcgtcgttttggattttgacgcgttcgttgggtcgtagcggcgtttcgttgtgtagttagcgtagcgttggtcgcggttttttcgacgcgcggtatacgaagcgcgttgtgttcgttcgcgttcgcgatagcgtttcgggcgtttgagtgatggcgggagtcgttaggggcgcgaggggcgacgttgagcgcggga

SEQ ID NO: 12172 - DNA, 563 bp, Artificial Sequence
  chemically treated genomic DNA (Homo sapiens) CpG-island No: 12172
tcccgcgctcaacgtcgcccctcgcgcccctaacgactcccgccatcactcaaacgcccgaaacgctatcgcgaacgcgaacgaacacaacgcgcttcgtataccgcgcgtcgaaaaaaccgcgaccaacgctacgctaactacacaacgaaacgccgctacgacccaacgaacgcgtcaaaatccaaaacgacgataacaacctaatcatcacacaaatcgacctacaaaacgccgactactaccaatacgtaactaaaaacaacgcgaaaataacgtacgctaccgcgtcgctaaccgtaataatacgcgaaaaactacccaacgcccccacgcgaatcactactacgccactaaacaactccgctatattaataacctaaaaacgacccgaaatacacaacgaacaaatcatcgacttctctctccactaccaaaaaacacgaaatacgtcgacctaaaacgaaatacaccaacgcaaacccgaacgaaacgcaaccaaaaaaaattcaaatcgaataactaaaaaattacctaataaatacctctacgacaaaaataaa

SEQ ID NO: 12173 - DNA, 605 bp, Artificial Sequence
  chemically treated genomic DNA (Homo sapiens) CpG-island No: 12173
gttagtacgtcgtaagcgtatcgcgtcgtcgattttgttggcgtattgtaggtttttcggcgcgtacgcggataaagggggtaggggttttggcgggtattcggagtcgcgatttcgcgcgtttttcgtcgttcgattcggtttttatttgtacgttatttagttttacgcgtagatatagttcgcggtgtcgttgagtttagtagatatgcggcgttaatatttgattttttatggttatattgtttagggcgcggggaggttaggttcgttgcgtttcgttgttttaggtagtgttttgttggcgcgagtagaaagtaggttttaaattttagcgtttttgagcgtttgtaattcggtatttcgagatattttacgttcgcgggtcgcgtttgcgtagtgacgcgtcgggatggcggcggcgttagtagcgggttttggcgcgagtcgggcgggggcggggcgtaggcgggataggggtaggtcggggtatagagacgtcgtagttcgtcgcggtcgtttagggaattggaattagcgggtggtttgttttttttattcgtttttagggatatgttttaaaataagttttaaaataaaaaagg

SEQ ID NO: 12174 - DNA, 605 bp, Artificial Sequence
  chemically treated genomic DNA (Homo sapiens) CpG-island No: 12174
ccttttttattttaaaacttattttaaaacatatccctaaaaacgaataaaaaaaacaaaccacccgctaattccaattccctaaacgaccgcgacgaactacgacgtctctataccccgacctacccctatcccgcctacgccccgcccccgcccgactcgcgccaaaacccgctactaacgccgccgccatcccgacgcgtcactacgcaaacgcgacccgcgaacgtaaaatatctcgaaataccgaattacaaacgctcaaaaacgctaaaatttaaaacctactttctactcgcgccaacaaaacactacctaaaacaacgaaacgcaacgaacctaacctccccgcgccctaaacaatataaccataaaaaatcaaatattaacgccgcatatctactaaactcaacgacaccgcgaactatatctacgcgtaaaactaaataacgtacaaataaaaaccgaatcgaacgacgaaaaacgcgcgaaatcgcgactccgaatacccgccaaaacccctaccccctttatccgcgtacgcgccgaaaaacctacaatacgccaacaaaatcgacgacgcgatacgcttacgacgtactaac

SEQ ID NO: 12175 - DNA, 605 bp, Artificial Sequence
  chemically treated genomic DNA (Homo sapiens) CpG-island No: 12175
ttttttttattttaaagtttattttaaagtatgtttttgaagacgagtggggagagtagattattcgttgattttaattttttaggcggtcgcggcgagttgcggcgtttttgtgtttcggtttgtttttatttcgtttgcgtttcgttttcgttcggttcgcgttaaggttcgttgttggcgtcgtcgttatttcggcgcgttattgcgtaggcgcggttcgcgagcgtggggtatttcgaggtgtcgggttgtaggcgtttaggagcgttagggtttgaggtttgttttttgttcgcgttagtagagtattatttgaggtagcgaggcgtagcgagtttagttttttcgcgttttgggtagtgtggttatggagaattaggtgttgacgtcgtatgtttattgggtttagcgatatcgcgagttatatttgcgcgtggagttgagtgacgtataggtaaaggtcgggtcgggcggcgggaagcgcgcgggatcgcggtttcgggtattcgttaggatttttgttttttttgttcgcgtgcgcgtcggagagtttgtagtgcgttaataaggtcggcgacgcggtgcgtttacggcgtgttggt

SEQ ID NO: 12176 - DNA, 605 bp, Artificial Sequence
  chemically treated genomic DNA (Homo sapiens) CpG-island No: 12176
accaacacgccgtaaacgcaccgcgtcgccgaccttattaacgcactacaaactctccgacgcgcacgcgaacaaaaaaaacaaaaatcctaacgaatacccgaaaccgcgatcccgcgcgcttcccgccgcccgacccgacctttacctatacgtcactcaactccacgcgcaaatataactcgcgatatcgctaaacccaataaacatacgacgtcaacacctaattctccataaccacactacccaaaacgcgaaaaaactaaactcgctacgcctcgctacctcaaataatactctactaacgcgaacaaaaaacaaacctcaaaccctaacgctcctaaacgcctacaacccgacacctcgaaataccccacgctcgcgaaccgcgcctacgcaataacgcgccgaaataacgacgacgccaacaacgaaccttaacgcgaaccgaacgaaaacgaaacgcaaacgaaataaaaacaaaccgaaacacaaaaacgccgcaactcgccgcgaccgcctaaaaaattaaaatcaacgaataatctactctccccactcgtcttcaaaaacatactttaaaataaactttaaaataaaaaaaa

SEQ ID NO: 12177 - DNA, 668 bp, Artificial Sequence
  chemically treated genomic DNA (Homo sapiens) CpG-island No: 12177
agagagtcggttggggtcgagttttcgtggttattatcgcggttttggttttttttttcggggttttttcgcgttttacgtagttcgtggtgtagggttcgttggttttggcggggtggaaggtttcgtgtcgtcgtcgtcgcgcgtcgtgggtagtgtgggtttgttgggggtgtaggtaggtaagtaggaagggtttgtcggggagatggtgggggagcgcgtttcgatcgtcgtggttcgttttcgtttttggtggttgttcggtaatcggtatatcgttgttttagcgttttttttttttaatatttttttaagttatagtttttttttttcgttcgtttttcgtttgtcgggcgcgtatcgcggttgtgttcggggacggaagttcgttacgcggttcgtttggtagggtttgtggtcgaggttttggggttcgcgtgtttttggcggtgattcgttggatgttgcggtgttgttcgttatcgtgcgttcgttttcgtttttcggtcgcgtagtgtttggggttcggtttgtagtttttacgttaggttagggcggtatcgttgcgttttcggattagttttttatttttatttagtacgtaggaaattttatgtaatttagtaaagttaggaagtttttaaatttcgcgtagttattgtagg

SEQ ID NO: 12178 - DNA, 668 bp, Artificial Sequence
  chemically treated genomic DNA (Homo sapiens) CpG-island No: 12178
cctacaataactacgcgaaatttaaaaacttcctaactttactaaattacataaaatttcctacgtactaaataaaaataaaaaactaatccgaaaacgcaacgataccgccctaacctaacgtaaaaactacaaaccgaaccccaaacactacgcgaccgaaaaacgaaaacgaacgcacgataacgaacaacaccgcaacatccaacgaatcaccgccaaaaacacgcgaaccccaaaacctcgaccacaaaccctaccaaacgaaccgcgtaacgaacttccgtccccgaacacaaccgcgatacgcgcccgacaaacgaaaaacgaacgaaaaaaaaaaactataacttaaaaaaatattaaaaaaaaaaaacgctaaaacaacgatataccgattaccgaacaaccaccaaaaacgaaaacgaaccacgacgatcgaaacgcgctcccccaccatctccccgacaaacccttcctacttacctacctacacccccaacaaacccacactacccacgacgcgcgacgacgacgacacgaaaccttccaccccgccaaaaccaacgaaccctacaccacgaactacgtaaaacgcgaaaaaaccccgaaaaaaaaaaccaaaaccgcgataataaccacgaaaactcgaccccaaccgactctct

SEQ ID NO: 12179 - DNA, 668 bp, Artificial Sequence
  chemically treated genomic DNA (Homo sapiens) CpG-island No: 12179
tttatagtggttgcgcggagtttagggattttttagttttgttaagttatatgggattttttacgtattaaatggaggtgggggattggttcgaggacgtagcggtgtcgttttggtttgacgtggaagttatagatcgggttttaggtattgcgcggtcgagagacggaggcgggcgtacgatggcggataatatcgtagtatttagcgagttatcgttaggggtacgcgaattttaggatttcggttataagttttgttagacgggtcgcgtggcgggttttcgttttcggatataatcgcgatgcgcgttcggtaggcggggggcgggcgggagaggaggattgtggtttggaggggtgttggggaggaggggcgttggagtagcggtgtgtcggttgtcgggtagttattaggggcggaggcgaattacggcgatcgggacgcgtttttttattattttttcggtagattttttttatttgtttgtttgtatttttaataaatttatattatttacgacgcgcgacgacgacggtacgagattttttatttcgttagggttaacgaattttgtattacgagttgcgtgaggcgcgagggagtttcggagggaggaattaggatcgcggtggtggttacgggaattcggttttagtcggtttttt

SEQ ID NO: 12180 - DNA, 668 bp, Artificial Sequence
  chemically treated genomic DNA (Homo sapiens) CpG-island No: 12180
aaaaaaccgactaaaaccgaattcccgtaaccaccaccgcgatcctaattcctccctccgaaactccctcgcgcctcacgcaactcgtaatacaaaattcgttaaccctaacgaaataaaaaatctcgtaccgtcgtcgtcgcgcgtcgtaaataatataaatttattaaaaatacaaacaaacaaataaaaaaaatctaccgaaaaaataataaaaaaacgcgtcccgatcgccgtaattcgcctccgcccctaataactacccgacaaccgacacaccgctactccaacgcccctcctccccaacacccctccaaaccacaatcctcctctcccgcccgccccccgcctaccgaacgcgcatcgcgattatatccgaaaacgaaaacccgccacgcgacccgtctaacaaaacttataaccgaaatcctaaaattcgcgtacccctaacgataactcgctaaatactacgatattatccgccatcgtacgcccgcctccgtctctcgaccgcgcaatacctaaaacccgatctataacttccacgtcaaaccaaaacgacaccgctacgtcctcgaaccaatcccccacctccatttaatacgtaaaaaatcccatataacttaacaaaactaaaaaatccctaaactccgcgcaaccactataaa

SEQ ID NO: 12181 - DNA, 937 bp, Artificial Sequence
  chemically treated genomic DNA (Homo sapiens) CpG-island No: 12181
agtgttcgcgtcggttttttcgttgattcgtagtattcgaaagtcgtagggcgcgggggtttgtggggtcgggttcgggagttgcgagattaggggtcggtgatttttcgcgggggatcgagcgaggatggggaagttagcggttttatttgcgatggattaggtttagcggtagaattttatcgtgtcgttgagtgtcgtggatattacgtttaggatattattcggtttcgagtttaggagttttatcgcggcgatgagcgggcgttggcggtaggagaaagcggagatttagagagagggttgatttcggaggcggtggcggtcgacggggcgagcggcggtcgggaatttttttaacggcggcggttcggttgcgtttttttttgttttttaaggcgtcgcggcggcggggatgcggtagaaggtagggttaagcggaaggcgtcgttaaggttttcgggagaaagacgaggaggtggagaaggtttagtcgttagtatagtgcgttgtattagtttgtagtttcgcgtagtcgtttttttaatttttttagtcggcgttacgtggtcgcgcgcgggggcggggggtcggtcgttttttttttttttttttttttttagtattgggattcgttggcgtagggatgttgcgtttaagggtgcgacgttaattgggttcgcgtaggcgcgcgtcgtcgagcgggagcgggatatttgggtttttttttggttttttttcgtataagtcgttttattagtttttttcgtttttgtttcgggtatcggtttttgcggaggagtttatcgtttttttacgggtgattttttattcgtttcggatacgttttgggaaataggatacgggaagaatgggtgttttgtgggtaaagatgaggtaggcgtggtgttttggtttttatttgatatttatttcg

SEQ ID NO: 12182 - DNA, 937 bp, Artificial Sequence
  chemically treated genomic DNA (Homo sapiens) CpG-island No: 12182
cgaaataaatatcaaataaaaaccaaaacaccacgcctacctcatctttacccacaaaacacccattcttcccgtatcctatttcccaaaacgtatccgaaacgaataaaaaatcacccgtaaaaaaacgataaactcctccgcaaaaaccgatacccgaaacaaaaacgaaaaaaactaataaaacgacttatacgaaaaaaaaccaaaaaaaaacccaaatatcccgctcccgctcgacgacgcgcgcctacgcgaacccaattaacgtcgcacccttaaacgcaacatccctacgccaacgaatcccaatactaaaaaaaaaaaaaaaaaaaaaaaacgaccgaccccccgcccccgcgcgcgaccacgtaacgccgactaaaaaaattaaaaaaacgactacgcgaaactacaaactaatacaacgcactatactaacgactaaaccttctccacctcctcgtctttctcccgaaaaccttaacgacgccttccgcttaaccctaccttctaccgcatccccgccgccgcgacgccttaaaaaacaaaaaaaaacgcaaccgaaccgccgccgttaaaaaaattcccgaccgccgctcgccccgtcgaccgccaccgcctccgaaatcaaccctctctctaaatctccgctttctcctaccgccaacgcccgctcatcgccgcgataaaactcctaaactcgaaaccgaataatatcctaaacgtaatatccacgacactcaacgacacgataaaattctaccgctaaacctaatccatcgcaaataaaaccgctaacttccccatcctcgctcgatcccccgcgaaaaatcaccgacccctaatctcgcaactcccgaacccgaccccacaaacccccgcgccctacgactttcgaatactacgaatcaacgaaaaaaccgacgcgaacact

SEQ ID NO: 12183 - DNA, 937 bp, Artificial Sequence
  chemically treated genomic DNA (Homo sapiens) CpG-island No: 12183
cgaggtgagtgttaggtaaggattaaagtattacgtttattttatttttgtttatagaatatttatttttttcgtgttttgttttttaggacgtattcggggcggataagaaattattcgtggggaggcggtgaattttttcgtaggggtcgatgttcgggataggggcggggaaggttaatgaggcgatttgtgcggggaggggttaaggaggagtttaggtgtttcgttttcgttcgacggcgcgcgtttgcgcgagtttagttggcgtcgtatttttgagcgtagtatttttacgttagcgagttttaatattagggagggagggagggaggaggggcggtcggtttttcgttttcgcgcgcggttacgtgacgtcggttgaggagattggaggggcggttgcgcgaggttgtagattggtgtagcgtattgtgttggcggttgggttttttttattttttcgtttttttttcgggaattttgacgacgtttttcgtttggttttgttttttgtcgtattttcgtcgtcgcggcgttttgaggagtaggagaagacgtagtcgggtcgtcgtcgttagaggggttttcggtcgtcgttcgtttcgtcggtcgttatcgttttcggggttagttttttttttgggttttcgtttttttttgtcgttagcgttcgtttatcgtcgcgatggggtttttggattcggagtcgggtagtgttttaaacgtagtgtttacggtatttaacgatacggtagagttttatcgttggatttggtttatcgtaggtaaagtcgttgatttttttattttcgttcggtttttcgcggggggttatcggtttttggtttcgtagttttcgggttcggttttataggttttcgcgttttgcggttttcggatgttgcggattagcggaggggtcggcgcgggtatt

SEQ ID NO: 12184 - DNA, 937 bp, Artificial Sequence
  chemically treated genomic DNA (Homo sapiens) CpG-island No: 12184
aatacccgcgccgacccctccgctaatccgcaacatccgaaaaccgcaaaacgcgaaaacctataaaaccgaacccgaaaactacgaaaccaaaaaccgataaccccccgcgaaaaaccgaacgaaaataaaaaaatcaacgactttacctacgataaaccaaatccaacgataaaactctaccgtatcgttaaataccgtaaacactacgtttaaaacactacccgactccgaatccaaaaaccccatcgcgacgataaacgaacgctaacgacaaaaaaaaacgaaaacccaaaaaaaaaactaaccccgaaaacgataacgaccgacgaaacgaacgacgaccgaaaacccctctaacgacgacgacccgactacgtcttctcctactcctcaaaacgccgcgacgacgaaaatacgacaaaaaacaaaaccaaacgaaaaacgtcgtcaaaattcccgaaaaaaaaacgaaaaaataaaaaaaacccaaccgccaacacaatacgctacaccaatctacaacctcgcgcaaccgcccctccaatctcctcaaccgacgtcacgtaaccgcgcgcgaaaacgaaaaaccgaccgcccctcctccctccctccctccctaatattaaaactcgctaacgtaaaaatactacgctcaaaaatacgacgccaactaaactcgcgcaaacgcgcgccgtcgaacgaaaacgaaacacctaaactcctccttaacccctccccgcacaaatcgcctcattaaccttccccgcccctatcccgaacatcgacccctacgaaaaaattcaccgcctccccacgaataatttcttatccgccccgaatacgtcctaaaaaacaaaacacgaaaaaaataaatattctataaacaaaaataaaataaacgtaatactttaatccttacctaacactcacctcg

SEQ ID NO: 12185 - DNA, 852 bp, Artificial Sequence
  chemically treated genomic DNA (Homo sapiens) CpG-island No: 12185
  unsure (148, 435, 499, 619, 808)
tttttttatattcgtgtttcggttcggtcgcggggagtttcgttttatcgtcgtgggttacgtggacgatacgtagttcgtgcggttcgatagcgacgtcgcgagttagaagatggagtcgcgggcgtcgtggatagagtaggagggngtcggagtattgggattaggagatacggaatatgaaggtttatttatagattgatcgagcgaatttggggattttgcgcggttattataattagagcgaggacggtgagtgatttcggttcggggcgtaggttacgattttttattttttacggacgggttaggtcgtttatagttttcgggttcgagatttatttcgaagtcgcgggatttcgagatttttgtttcgggagaggtttaggcgtttttattcggttttatttttagtttaggttaaaaatttttttngggttggtcggggcggggcggggttcgggggattgggttgatcgcggggtcggggttaggtttnttatattatttagataatgtatggttgcgacgtggggtcggacgggcgtttttttcgcgggtatcggtaggacgtttacgacggtaaggattatatcgttttgaacgaggatttgcgttntttggatcgcggcggatatggtagtttagattattaagcgtaagtgggaggcggtttatgcggcggagtagcggagagtttatttggagggtacgtgcgtggagtggtttcgtagatatttggagaacgggaaggagacgttgtagcgtacgggtattaggggttacggggcgtttttttgatcgtttnatagatttttcgggttggttttttataaggaggggagataattg

SEQ ID NO: 12186 - DNA, 852 bp, Artificial Sequence
  chemically treated genomic DNA (Homo sapiens) CpG-island No: 12186
  unsure (45, 234, 354, 418, 705)
caattatctcccctccttataaaaaaccaacccgaaaaatctatnaaacgatcaaaaaaacgccccgtaacccctaatacccgtacgctacaacgtctccttcccgttctccaaatatctacgaaaccactccacgcacgtaccctccaaataaactctccgctactccgccgcataaaccgcctcccacttacgcttaataatctaaactaccatatccgccgcgatccaaanaacgcaaatcctcgttcaaaacgatataatccttaccgtcgtaaacgtcctaccgatacccgcgaaaaaaacgcccgtccgaccccacgtcgcaaccatacattatctaaataatataanaaacctaaccccgaccccgcgatcaacccaatcccccgaaccccgccccgccccgaccaacccnaaaaaaatttttaacctaaactaaaaataaaaccgaataaaaacgcctaaacctctcccgaaacaaaaatctcgaaatcccgcgacttcgaaataaatctcgaacccgaaaactataaacgacctaacccgtccgtaaaaaataaaaaatcgtaacctacgccccgaaccgaaatcactcaccgtcctcgctctaattataataaccgcgcaaaatccccaaattcgctcgatcaatctataaataaaccttcatattccgtatctcctaatcccaatactccgacnccctcctactctatccacgacgcccgcgactccatcttctaactcgcgacgtcgctatcgaaccgcacgaactacgtatcgtccacgtaacccacgacgataaaacgaaactccccgcgaccgaaccgaaacacgaatataaaaaaa

SEQ ID NO: 12187 - DNA, 852 bp, Artificial Sequence
  chemically treated genomic DNA (Homo sapiens) CpG-island No: 12187
  unsure (45, 234, 354, 418, 705)
taattgttttttttttttgtgggaggttagttcgggagatttatnaggcgattagggaggcgtttcgtggtttttggtattcgtgcgttgtagcgtttttttttcgttttttaggtatttgcggagttattttacgtacgtgttttttaggtagatttttcgttgtttcgtcgtatggatcgttttttatttgcgtttggtgatttgagttgttatgttcgtcgcggtttaagnagcgtaggttttcgtttagggcgatgtaatttttgtcgtcgtaggcgttttgtcggtattcgcggaggaagcgttcgttcggttttacgtcgtagttatatattatttggatggtgtgangaatttggtttcgatttcgcggttagtttagtttttcgagtttcgtttcgtttcgattaatttnggggggatttttggtttaaattgaaaatgaaatcgggtaaaggcgtttgggtttttttcgggataagggtttcggagtttcgcggtttcggggtggatttcggattcggagattgtgggcgatttggttcgttcgtgggggatgaggggtcgtgatttgcgtttcgggtcggggttatttatcgttttcgttttggttgtagtagtcgcgtagggtttttaggttcgttcggttagtttgtgagtgggtttttatatttcgtgttttttggttttaatatttcggtntttttttgttttatttacggcgttcgcggttttattttttggttcgcggcgtcgttgtcgaatcgtacgaattgcgtgtcgtttacgtagtttacggcgatgaagcggggtttttcgcggtcgggtcgggatacggatgtgaagaaa

SEQ ID NO: 12188 - DNA, 852 bp, Artificial Sequence
  chemically treated genomic DNA (Homo sapiens) CpG-island No: 12188
  unsure (148, 435, 499, 619, 808)
tttcttcacatccgtatcccgacccgaccgcgaaaaaccccgcttcatcgccgtaaactacgtaaacgacacgcaattcgtacgattcgacaacgacgccgcgaaccaaaaaataaaaccgcgaacgccgtaaataaaacaaaaaaanaccgaaatattaaaaccaaaaaacacgaaatataaaaacccactcacaaactaaccgaacgaacctaaaaaccctacgcgactactacaaccaaaacgaaaacgataaataaccccgacccgaaacgcaaatcacgacccctcatcccccacgaacgaaccaaatcgcccacaatctccgaatccgaaatccaccccgaaaccgcgaaactccgaaacccttatcccgaaaaaaacccaaacgcctttacccgatttcattttcaatttaaaccaaaaatccccccnaaattaatcgaaacgaaacgaaactcgaaaaactaaactaaccgcgaaatcgaaaccaaattcntcacaccatccaaataatatataactacgacgtaaaaccgaacgaacgcttcctccgcgaataccgacaaaacgcctacgacgacaaaaattacatcgccctaaacgaaaacctacgctncttaaaccgcgacgaacataacaactcaaatcaccaaacgcaaataaaaaacgatccatacgacgaaacaacgaaaaatctacctaaaaaacacgtacgtaaaataactccgcaaatacctaaaaaacgaaaaaaaaacgctacaacgcacgaataccaaaaaccacgaaacgcctccctaatcgcctnataaatctcccgaactaacctcccacaaaaaaaaaaaacaatta

SEQ ID NO: 12189 - DNA, 770 bp, Artificial Sequence
  chemically treated genomic DNA (Homo sapiens) CpG-island No: 12189
tcggcggcgtcggtagagtcgtttagggcgtcgggtagggaggcgttgtaggacgcggcgggcgcggcggcggggggcgcgttttcggcggtcgcgcggttttcgttgattaggtcggtgagcgcgcggtattagtttttttgtttttgttcgttttcggcggttacggcgaagtattcgtttttggtgtagagggcgattaggtatttgtgtttggcgtcggcgcgtttgttgatgtttaggtagtagtcgagagcgattattcgtttcggcgcgtttgttttgtttcgttattttttttcgttttcgtagtattcgagtcgcggcggttgcggcgtcgatttttcgttcgtcgtcgtttcgtcgtcgttcgcgtcgggttcgcgtagtacgaagaagcgtttgtggttatgtttttgtttgcgtaggtagtcgtatttgcgtacgttgtggttgttgttgttgttgttgttgttaaggttggggtcgttttcgttcgtcggttcgggtcggttcgtatcgcggcgggttcgttatcgcgggcgttttagttcgcgcggttcgggttcggcgtttaggggttggggtgaggggcgtagggggcgcgggcggggacggtttttttttatttttgcgttcggtcgttcgttcgattacgcgtttttcgggtttaggcggtggggaaggttcggggaggttcgcgggggttagtatcgttcggcggcgtcgcgtttttcgcgttttggggtttttgaggatgttcggcgcgg

SEQ ID NO: 12190 - DNA, 770 bp, Artificial Sequence
  chemically treated genomic DNA (Homo sapiens) CpG-island No: 12190
ccgcgccgaacatcctcaaaaaccccaaaacgcgaaaaacgcgacgccgccgaacgatactaacccccgcgaacctccccgaaccttccccaccgcctaaacccgaaaaacgcgtaatcgaacgaacgaccgaacgcaaaaataaaaaaaaaccgtccccgcccgcgccccctacgcccctcaccccaacccctaaacgccgaacccgaaccgcgcgaactaaaacgcccgcgataacgaacccgccgcgatacgaaccgacccgaaccgacgaacgaaaacgaccccaaccttaacaacaacaacaacaacaacaaccacaacgtacgcaaatacgactacctacgcaaacaaaaacataaccacaaacgcttcttcgtactacgcgaacccgacgcgaacgacgacgaaacgacgacgaacgaaaaatcgacgccgcaaccgccgcgactcgaatactacgaaaacgaaaaaaaataacgaaacaaaacaaacgcgccgaaacgaataatcgctctcgactactacctaaacatcaacaaacgcgccgacgccaaacacaaatacctaatcgccctctacaccaaaaacgaatacttcgccgtaaccgccgaaaacgaacaaaaacaaaaaaactaataccgcgcgctcaccgacctaatcaacgaaaaccgcgcgaccgccgaaaacgcgccccccgccgccgcgcccgccgcgtcctacaacgcctccctacccgacgccctaaacgactctaccgacgccgccga

SEQ ID NO: 12191 - DNA, 770 bp, Artificial Sequence
  chemically treated genomic DNA (Homo sapiens) CpG-island No: 12191
tcgcgtcgggtatttttaggagttttagagcgcggagggcgcggcgtcgtcgagcggtgttggttttcgcgggttttttcggattttttttatcgtttgggttcgagggacgcgtgatcgggcgggcggtcgggcgtaagggtgggagggagtcgttttcgttcgcgttttttacgttttttattttaatttttgggcgtcgggttcgggtcgcgcggattgaagcgttcgcgatggcgagttcgtcgcggtacgggtcggttcgggtcggcgagcggagacggttttaattttaataataataataataataataattatagcgtgcgtaagtgcggttatttgcgtaagtagaagtatggttataagcgttttttcgtgttgcgcggattcggcgcgggcggcgacgaggcgacggcgggcggggggtcggcgtcgtaatcgtcgcggttcgagtattacgagagcgagaaaaagtggcggagtaaggtaggcgcgtcgaaacgggtgatcgttttcgattgttgtttgaatattaataagcgcgtcgacgttaagtataagtatttgatcgttttttatattaaggacgagtatttcgtcgtggtcgtcgagaacgagtaggagtaggagggttggtatcgcgcgtttatcgatttggttagcgagggtcgcgcggtcgtcggagacgcgtttttcgtcgtcgcgttcgtcgcgttttgtagcgtttttttgttcggcgttttgggcggttttgtcggcgtcgtcgg

SEQ ID NO: 12192 - DNA, 770 bp, Artificial Sequence
  chemically treated genomic DNA (Homo sapiens) CpG-island No: 12192
ccgacgacgccgacaaaaccgcccaaaacgccgaacaaaaaaacgctacaaaacgcgacgaacgcgacgacgaaaaacgcgtctccgacgaccgcgcgaccctcgctaaccaaatcgataaacgcgcgataccaaccctcctactcctactcgttctcgacgaccacgacgaaatactcgtccttaatataaaaaacgatcaaatacttatacttaacgtcgacgcgcttattaatattcaaacaacaatcgaaaacgatcacccgtttcgacgcgcctaccttactccgccactttttctcgctctcgtaatactcgaaccgcgacgattacgacgccgaccccccgcccgccgtcgcctcgtcgccgcccgcgccgaatccgcgcaacacgaaaaaacgcttataaccatacttctacttacgcaaataaccgcacttacgcacgctataattattattattattattattattaaaattaaaaccgtctccgctcgccgacccgaaccgacccgtaccgcgacgaactcgccatcgcgaacgcttcaatccgcgcgacccgaacccgacgcccaaaaattaaaataaaaaacgtaaaaaacgcgaacgaaaacgactccctcccacccttacgcccgaccgcccgcccgatcacgcgtccctcgaacccaaacgataaaaaaaatccgaaaaaacccgcgaaaaccaacaccgctcgacgacgccgcgccctccgcgctctaaaactcctaaaaatacccgacgcga

SEQ ID NO: 12193 - DNA, 534 bp, Artificial Sequence
  chemically treated genomic DNA (Homo sapiens) CpG-island No: 12193
ggcgtcgcgtgaagagtgggagagaagtattgcgggggcgggggcgggggcgggggcgggggcgggggtagtcgggagtttggagttagatcggggcggggtcgggatcggggttagggattagtggtgggaggaggttgcggcgttagatgcggatatttggatcgtcgcgtcgaggttttcggcgttcgttgttttcgcggttcgcgttatgtttttttatacggttatcgtggttattggtagttagtggttcgtcggtattgacgattatatttattttagtttcgtgggttcggcgggttgtagcgagaagtatttgttggataagtttttttataacgatttcgagcgtggcgcggtgagcgcgggcggggtacgggtggagcgcgggttgaggtgcgttcgggattcggtttggacggtagaggtttgggcgggggcgtcgagggttcgtcggggcggttcggataggattgggggtgtttaggattttgttagggagggtagaattgcggtggggcgtgttttggg

SEQ ID NO: 12194 - DNA, 534 bp, Artificial Sequence
  chemically treated genomic DNA (Homo sapiens) CpG-island No: 12194
cccaaaacacgccccaccgcaattctaccctccctaacaaaatcctaaacacccccaatcctatccgaaccgccccgacgaaccctcgacgcccccgcccaaacctctaccgtccaaaccgaatcccgaacgcacctcaacccgcgctccacccgtaccccgcccgcgctcaccgcgccacgctcgaaatcgttataaaaaaacttatccaacaaatacttctcgctacaacccgccgaacccacgaaactaaaataaatataatcgtcaataccgacgaaccactaactaccaataaccacgataaccgtataaaaaaacataacgcgaaccgcgaaaacaacgaacgccgaaaacctcgacgcgacgatccaaatatccgcatctaacgccgcaacctcctcccaccactaatccctaaccccgatcccgaccccgccccgatctaactccaaactcccgactacccccgcccccgcccccgcccccgcccccgcccccgcaatacttctctcccactcttcacgcgacgcc

SEQ ID NO: 12195 - DNA, 534 bp, Artificial Sequence
  chemically treated genomic DNA (Homo sapiens) CpG-island No: 12195
tttagggtacgttttatcgtagttttgttttttttgatagggttttggatatttttagttttgttcgggtcgtttcgacgggttttcggcgttttcgtttaggtttttgtcgtttaaatcgggtttcggacgtattttagttcgcgttttattcgtgtttcgttcgcgtttatcgcgttacgttcgaagtcgttgtagaagggtttgtttagtaggtgtttttcgttgtagttcgtcgagtttacgaggttgaggtagatgtagtcgttagtgtcggcgaattattggttgttagtggttacggtgatcgtgtaggagggtatggcgcgggtcgcgggagtagcgagcgtcgggagtttcggcgcggcggtttaggtgttcgtatttagcgtcgtagtttttttttattattggtttttggtttcggtttcggtttcgtttcggtttggttttaggttttcggttgttttcgttttcgttttcgttttcgttttcgttttcgtagtattttttttttattttttacgcggcgtt

SEQ ID NO: 12196 - DNA, 534 bp, Artificial Sequence
  chemically treated genomic DNA (Homo sapiens) CpG-island No: 12196
aacgccgcgtaaaaaataaaaaaaaaatactacgaaaacgaaaacgaaaacgaaaacgaaaacgaaaacaaccgaaaacctaaaaccaaaccgaaacgaaaccgaaaccgaaaccaaaaaccaataataaaaaaaaactacgacgctaaatacgaacacctaaaccgccgcgccgaaactcccgacgctcgctactcccgcgacccgcgccataccctcctacacgatcaccgtaaccactaacaaccaataattcgccgacactaacgactacatctacctcaacctcgtaaactcgacgaactacaacgaaaaacacctactaaacaaacccttctacaacgacttcgaacgtaacgcgataaacgcgaacgaaacacgaataaaacgcgaactaaaatacgtccgaaacccgatttaaacgacaaaaacctaaacgaaaacgccgaaaacccgtcgaaacgacccgaacaaaactaaaaatatccaaaaccctatcaaaaaaaacaaaactacgataaaacgtaccctaaa

SEQ ID NO: 12197 - DNA, 748 bp, Artificial Sequence
  chemically treated genomic DNA (Homo sapiens) CpG-island No: 12197
ggttcgtattaagcgtatttttttgggggcggggtttgcgcgagttgggcgtgtcgggggcggggtttgcgcgtttgttttcggcgtgtcgcgagaggcggggcgtgtggggaggcgcggtcgttacgcgacgtttggttgggttcgtatcggagaggcgtttcggtatttggtaggcggtttgttattcggagttcgttgcggggcggcggcggcggggatatgtacgtgtgagatgcggtagcgggcggcgcggacgcgaatagtagcggcggcggcgggcgcggttttttgggcgcggggcgcgcggtgtttgagggcgggcgcgcgggcgttgggtaattgtcggtcgcgtcgtttgcgtaggcgttggtttaggatttatacgtcgcgttgaggttcgcgggttcgttatggaggcgtttatcgtggagacgtttttcgatttttcgtttttttcggtttcggtttttgtttcggtttcgttgcgcgtttcggatgtggcgcggttgcgcgaggagtaggaaaaggtaattagtagtttcgcgtcgttttcgttttcgttcgtcgggttgtttttgtttgtgttttgggtcgtcgtttcgcgtggtttaggtttagttgttcgggttttcggagggaacggggataaatttttgttacgtgtttttgttgtttttgtttgtagttttttgatttcgtagcggagtgaggggtgtgtagttcgttcgtttgtttaggaaagggg

SEQ ID NO: 12198 - DNA, 748 bp, Artificial Sequence
  chemically treated genomic DNA (Homo sapiens) CpG-island No: 12198
cccctttcctaaacaaacgaacgaactacacacccctcactccgctacgaaatcaaaaaactacaaacaaaaacaacaaaaacacgtaacaaaaatttatccccgttccctccgaaaacccgaacaactaaacctaaaccacgcgaaacgacgacccaaaacacaaacaaaaacaacccgacgaacgaaaacgaaaacgacgcgaaactactaattaccttttcctactcctcgcgcaaccgcgccacatccgaaacgcgcaacgaaaccgaaacaaaaaccgaaaccgaaaaaaacgaaaaatcgaaaaacgtctccacgataaacgcctccataacgaacccgcgaacctcaacgcgacgtataaatcctaaaccaacgcctacgcaaacgacgcgaccgacaattacccaacgcccgcgcgcccgccctcaaacaccgcgcgccccgcgcccaaaaaaccgcgcccgccgccgccgctactattcgcgtccgcgccgcccgctaccgcatctcacacgtacatatccccgccgccgccgccccgcaacgaactccgaataacaaaccgcctaccaaataccgaaacgcctctccgatacgaacccaaccaaacgtcgcgtaacgaccgcgcctccccacacgccccgcctctcgcgacacgccgaaaacaaacgcgcaaaccccgcccccgacacgcccaactcgcgcaaaccccgcccccaaaaaaatacgcttaatacgaacc

SEQ ID NO: 12199 - DNA, 748 bp, Artificial Sequence
  chemically treated genomic DNA (Homo sapiens) CpG-island No: 12199
ttttttttttgggtaggcgaacgggttgtatattttttatttcgttgcgaagttaaagggttgtagataaagataatagaagtacgtgataaaagtttattttcgtttttttcgggggttcgggtagttgggtttaggttacgcggggcggcggtttagagtataggtaggggtagttcggcgggcggaggcggaagcggcgcggggttgttagttatttttttttgtttttcgcgtagtcgcgttatattcggggcgcgtaacggaatcggggtaggggtcggggtcgaagggggcgaggggtcggggggcgtttttacggtgggcgtttttatgacgggttcgcgggttttagcgcggcgtgtgagttttgaattagcgtttgcgtaggcggcgcggtcggtagttgtttagcgttcgcgcgttcgtttttaggtatcgcgcgtttcgcgtttaggaggtcgcgttcgtcgtcgtcgttgttgttcgcgttcgcgtcgttcgttgtcgtattttatacgtgtatgttttcgtcgtcgtcgtttcgtagcgggtttcgagtagtaggtcgtttgttaggtatcgagacgttttttcggtgcgggtttagttaggcgtcgcgtggcggtcgcgtttttttatacgtttcgtttttcgcggtacgtcggaagtaagcgcgtaggtttcgttttcgatacgtttagttcgcgtaggtttcgtttttaggggagtgcgtttgatgcgaatt

SEQ ID NO: 12200 - DNA, 748 bp, Artificial Sequence
  chemically treated genomic DNA (Homo sapiens) CpG-island No: 12200
aattcgcatcaaacgcactcccctaaaaacgaaacctacgcgaactaaacgtatcgaaaacgaaacctacgcgcttacttccgacgtaccgcgaaaaacgaaacgtataaaaaaacgcgaccgccacgcgacgcctaactaaacccgcaccgaaaaaacgtctcgatacctaacaaacgacctactactcgaaacccgctacgaaacgacgacgacgaaaacatacacgtataaaatacgacaacgaacgacgcgaacgcgaacaacaacgacgacgacgaacgcgacctcctaaacgcgaaacgcgcgatacctaaaaacgaacgcgcgaacgctaaacaactaccgaccgcgccgcctacgcaaacgctaattcaaaactcacacgccgcgctaaaacccgcgaacccgtcataaaaacgcccaccgtaaaaacgccccccgacccctcgcccccttcgaccccgacccctaccccgattccgttacgcgccccgaatataacgcgactacgcgaaaaacaaaaaaaaataactaacaaccccgcgccgcttccgcctccgcccgccgaactacccctacctatactctaaaccgccgccccgcgtaacctaaacccaactacccgaacccccgaaaaaaacgaaaataaacttttatcacgtacttctattatctttatctacaaccctttaacttcgcaacgaaataaaaaatatacaacccgttcgcctacccaaaaaaaaaa

SEQ ID NO: 12201 - DNA, 566 bp, Artificial Sequence
  chemically treated genomic DNA (Homo sapiens) CpG-island No: 12201
tcgtttatcgcgcggaggataatttttagtcggtagtttagattagcgcggtatttgttttcggagtttttatcgtttttttcgatttattttagggaaatttttaagaatacgttttataaatttacgtgcgtattatttttatttcgcgtcgcgttcgggaggaaggaacgaggtaaggagttaaagtagcgtgcgtttagttttggggtaagttcgtcgggtggggaagtcggtttcgtaggattttgggatgggaattttgtttttttttgcgattttagggcgtgaagaaggcgtttttttcgttgtcggcggagttgatcggttggttagttaatttttttttagtacgtttcgtgcgtttattttcgtttagttcggggttttttcgtcgtttttcggaaggggtttgcggtttttggttaggacgttcggaaggcgagcgggggaaggtagggttgtcgcgggaattcggtttgtgagagcgatttcgttatgtttgtgttgttaagagtatttttttttttttgttgtggtttgatgttatatggttttttcggagt

SEQ ID NO: 12202 - DNA, 566 bp, Artificial Sequence
  chemically treated genomic DNA (Homo sapiens) CpG-island No: 12202
actccgaaaaaaccatataacatcaaaccacaacaaaaaaaaaaaaatactcttaacaacacaaacataacgaaatcgctctcacaaaccgaattcccgcgacaaccctaccttcccccgctcgccttccgaacgtcctaaccaaaaaccgcaaaccccttccgaaaaacgacgaaaaaaccccgaactaaacgaaaataaacgcacgaaacgtactaaaaaaaaattaactaaccaaccgatcaactccgccgacaacgaaaaaaacgccttcttcacgccctaaaatcgcaaaaaaaaacaaaattcccatcccaaaatcctacgaaaccgacttccccacccgacgaacttaccccaaaactaaacgcacgctactttaactccttacctcgttccttcctcccgaacgcgacgcgaaataaaaataatacgcacgtaaatttataaaacgtattcttaaaaatttccctaaaataaatcgaaaaaaacgataaaaactccgaaaacaaataccgcgctaatctaaactaccgactaaaaattatcctccgcgcgataaacga

SEQ ID NO: 12203 - DNA, 566 bp, Artificial Sequence
  chemically treated genomic DNA (Homo sapiens) CpG-island No: 12203
gtttcggaggagttatgtggtattaagttatagtaaaggggaaaaagtgtttttagtaatataaatatggcgaaatcgtttttataagtcgggttttcgcgatagttttattttttttcgttcgtttttcgaacgttttggttaggaatcgtagatttttttcgggggacggcgagggggtttcgggttgagcgagggtgggcgtacggggcgtgttaaggggaaattgattagttagtcgattagtttcgtcggtagcggaggggacgttttttttacgttttgagatcgtaaaggagagtaaaatttttattttaaagttttgcgggatcggtttttttattcgacgaatttattttagggttgaacgtacgttgttttagttttttgtttcgtttttttttttcgggcgcgacgcgaggtgaaaatgatgcgtacgtagatttgtagagcgtatttttgagaatttttttgggatgaatcgggaggagcggtggagatttcggagataggtgtcgcgttggtttgggttgtcggttaaaagttgtttttcgcgcggtgggcgg

SEQ ID NO: 12204 - DNA, 566 bp, Artificial Sequence
  chemically treated genomic DNA (Homo sapiens) CpG-island No: 12204
ccgcccaccgcgcgaaaaacaacttttaaccgacaacccaaaccaacgcgacacctatctccgaaatctccaccgctcctcccgattcatcccaaaaaaattctcaaaaatacgctctacaaatctacgtacgcatcattttcacctcgcgtcgcgcccgaaaaaaaaaaacgaaacaaaaaactaaaacaacgtacgttcaaccctaaaataaattcgtcgaataaaaaaaccgatcccgcaaaactttaaaataaaaattttactctcctttacgatctcaaaacgtaaaaaaaacgtcccctccgctaccgacgaaactaatcgactaactaatcaatttccccttaacacgccccgtacgcccaccctcgctcaacccgaaaccccctcgccgtcccccgaaaaaaatctacgattcctaaccaaaacgttcgaaaaacgaacgaaaaaaaataaaactatcgcgaaaacccgacttataaaaacgatttcgccatatttatattactaaaaacactttttcccctttactataacttaataccacataactcctccgaaac

SEQ ID NO: 12205 - DNA, 803 bp, Artificial Sequence
  chemically treated genomic DNA (Homo sapiens) CpG-island No: 12205
tataggttcgggatttttcgtagcgttaggggtcgtagtttcggtcgtcggggagtgttatggtagggaggcggtagttacgtgaggggtttgcggaagcgtcggagttgaaagttgggggcgaagtgcgtagtagagtcgtgacgggggtgatacgtagtagtcgggggcggcgggtcgtcggagtcgggcgttttttacgtagggtcggcgtttttcgtcgcgggtgggtgcgtattcgtcggttttttttcgggagatcgttttcgggagcgggcgttggcggggcggggtcgtggcggtaaatagggtggtgttttttgttttttcgttttcggtttgtcggggcgcgcggtcggcggcgttcggggcggtggaggcgcggtcgcggcgtcgggtagcgggggcgcgttcgttttttgtcgttttcgcgcgcgttcgtcgtcgttcggtcggttttttttgtttttgttttgatggagttcgcgtgtagttggcgcgtgtcgagttacgtgtcgtgggcgggagggggtcggggcgcgggaggcgagggcgcggtgatacgggtcggaggggtttgcgttcgcggagggcgcgcgagggggcgtgtggttttcgatggagttttgtcgcgcgggtgtttcggcgttggttgaggggtttggcgtttttcggcgagtagtgttaggtttgtcgtcgtagcgtttcggggagtttagtttaggagagaggatttgtttgcgttgttcggtttagaattcggattttataggtggtgtgtatatttcggtggacgggtagat

SEQ ID NO: 12206 - DNA, 803 bp, Artificial Sequence
  chemically treated genomic DNA (Homo sapiens) CpG-island No: 12206
atctacccgtccaccgaaatatacacaccacctataaaatccgaattctaaaccgaacaacgcaaacaaatcctctctcctaaactaaactccccgaaacgctacgacgacaaacctaacactactcgccgaaaaacgccaaacccctcaaccaacgccgaaacacccgcgcgacaaaactccatcgaaaaccacacgccccctcgcgcgccctccgcgaacgcaaacccctccgacccgtatcaccgcgccctcgcctcccgcgccccgaccccctcccgcccacgacacgtaactcgacacgcgccaactacacgcgaactccatcaaaacaaaaacaaaaaaaaccgaccgaacgacgacgaacgcgcgcgaaaacgacaaaaaacgaacgcgcccccgctacccgacgccgcgaccgcgcctccaccgccccgaacgccgccgaccgcgcgccccgacaaaccgaaaacgaaaaaacaaaaaacaccaccctatttaccgccacgaccccgccccgccaacgcccgctcccgaaaacgatctcccgaaaaaaaaccgacgaatacgcacccacccgcgacgaaaaacgccgaccctacgtaaaaaacgcccgactccgacgacccgccgcccccgactactacgtatcacccccgtcacgactctactacgcacttcgcccccaactttcaactccgacgcttccgcaaacccctcacgtaactaccgcctccctaccataacactccccgacgaccgaaactacgacccctaacgctacgaaaaatcccgaacctata

SEQ ID NO: 12207 - DNA, 803 bp, Artificial Sequence
  chemically treated genomic DNA (Homo sapiens) CpG-island No: 12207
gtttattcgtttatcgggatgtatatattatttgtaaggttcgagttttgagtcgagtagcgtaggtaggtttttttttttggattaggtttttcgaagcgttgcgacgataaatttagtattgttcgtcgagaagcgttaagttttttagttagcgtcggggtattcgcgcggtagggttttatcgggggttatacgttttttcgcgcgtttttcgcgggcgtaggttttttcggttcgtgttatcgcgttttcgtttttcgcgtttcggttttttttcgtttacggtacgtgattcgatacgcgttagttgtacgcgggttttattaaaataaaaatagaggaggtcggtcgggcggcggcgggcgcgcgcgggggcggtagagagcgggcgcgttttcgttgttcggcgtcgcgatcgcgtttttatcgtttcgggcgtcgtcggtcgcgcgtttcggtaggtcgggggcgggagggtagagggtattattttgtttatcgttacggtttcgtttcgttagcgttcgttttcggaaacggtttttcgggagagggtcggcgagtgcgtatttattcgcggcggggaacgtcggttttgcgtgggaggcgttcggtttcggcggttcgtcgttttcggttgttgcgtgttattttcgttacgattttgttacgtatttcgtttttagtttttagtttcggcgttttcgtagattttttacgtggttgtcgtttttttgttatggtatttttcggcgatcggggttgcggtttttagcgttgcgagggatttcgagtttgtg

SEQ ID NO: 12208 - DNA, 803 bp, Artificial Sequence
  chemically treated genomic DNA (Homo sapiens) CpG-island No: 12208
cacaaactcgaaatccctcgcaacgctaaaaaccgcaaccccgatcgccgaaaaataccataacaaaaaaacgacaaccacgtaaaaaatctacgaaaacgccgaaactaaaaactaaaaacgaaatacgtaacaaaatcgtaacgaaaataacacgcaacaaccgaaaacgacgaaccgccgaaaccgaacgcctcccacgcaaaaccgacgttccccgccgcgaataaatacgcactcgccgaccctctcccgaaaaaccgtttccgaaaacgaacgctaacgaaacgaaaccgtaacgataaacaaaataataccctctaccctcccgcccccgacctaccgaaacgcgcgaccgacgacgcccgaaacgataaaaacgcgatcgcgacgccgaacaacgaaaacgcgcccgctctctaccgcccccgcgcgcgcccgccgccgcccgaccgacctcctctatttttattttaataaaacccgcgtacaactaacgcgtatcgaatcacgtaccgtaaacgaaaaaaaaccgaaacgcgaaaaacgaaaacgcgataacacgaaccgaaaaaacctacgcccgcgaaaaacgcgcgaaaaaacgtataacccccgataaaaccctaccgcgcgaataccccgacgctaactaaaaaacttaacgcttctcgacgaacaatactaaatttatcgtcgcaacgcttcgaaaaacctaatccaaaaaaaaaaacctacctacgctactcgactcaaaactcgaaccttacaaataatatatacatcccgataaacgaataaac

SEQ ID NO: 12209 - DNA, 1016 bp, Artificial Sequence
  chemically treated genomic DNA (Homo sapiens) CpG-island No: 12209
tttagcgcggcggagttgagttttttttcggtttatcggtattatttgttgtttttaagttagaaaaggcggcgtttttagagggagtcgagtagtcgttgtaggtgaaggggagtttcgggcggttaggtcgtcgttacgtgtcggtttcgttcggttcggcgtatttgtagcgtagttagggcgttaagtaaggtttttatattcggggttcgtagttattgttaacgcgttaattttttgttcgcgggttcgagggtgtcggttgttgcgcgcgggtttttgaggcgttagagattttatttggcgcgttcgcgggattaagtttatttttttcgaagtgggatttttttattttgttttttcgtatacgatcggtttttttttttcggtagggcgtggcgttcggcgttttatttcgtcgcggtttatttgattaatcgttttttttttttttttatttagcgttttttttagtcgttggggaggcgcgttgatatttgtttattggtattagagaggcgtgggcgatggtagaggattgggcgtttggggcgtcgtttaggttgattttaaacggtgttcgttcggtagttttacgcgatagttttcgttttttgttcgcgcgtcgttcggtcggattttgtagggggcgcgtaggagtcgcgtttttttaagtaacgttaaaataaggtcgagttcgaatcggtttagcgttggttgttcgcgaggtcggatgggattttcggttttatttttgaacggttgtttcgggtagttttgtttgcggcggttcgttagtttggtataggcgtcgttcggtatcgtttttttttacgtcgtttagggcgttcgcggggtagtagttacgtgattcgcggttagggattttatagtttacgggttacggtatatacgcgttacgtatatatcgaggtgacgtggaagttttttagtagttgattttaaatagtttgggttgattggtttggtaattgcgtttttattcgtttttt

SEQ ID NO: 12210 - DNA, 1016 bp, Artificial Sequence
  chemically treated genomic DNA (Homo sapiens) CpG-island No: 12210
aaaaaacgaataaaaacgcaattaccaaaccaatcaacccaaactatttaaaatcaactactaaaaaacttccacgtcacctcgatatatacgtaacgcgtatataccgtaacccgtaaactataaaatccctaaccgcgaatcacgtaactactaccccgcgaacgccctaaacgacgtaaaaaaaaacgataccgaacgacgcctataccaaactaacgaaccgccgcaaacaaaactacccgaaacaaccgttcaaaaataaaaccgaaaatcccatccgacctcgcgaacaaccaacgctaaaccgattcgaactcgaccttattttaacgttacttaaaaaaacgcgactcctacgcgccccctacaaaatccgaccgaacgacgcgcgaacaaaaaacgaaaactatcgcgtaaaactaccgaacgaacaccgtttaaaatcaacctaaacgacgccccaaacgcccaatcctctaccatcgcccacgcctctctaataccaataaacaaatatcaacgcgcctccccaacgactaaaaaaaacgctaaataaaaaaaaaaaaaaaacgattaatcaaataaaccgcgacgaaataaaacgccgaacgccacgccctaccgaaaaaaaaaaaccgatcgtatacgaaaaaacaaaataaaaaaatcccacttcgaaaaaaataaacttaatcccgcgaacgcgccaaataaaatctctaacgcctcaaaaacccgcgcgcaacaaccgacaccctcgaacccgcgaacaaaaaattaacgcgttaacaataactacgaaccccgaatataaaaaccttacttaacgccctaactacgctacaaatacgccgaaccgaacgaaaccgacacgtaacgacgacctaaccgcccgaaactccccttcacctacaacgactactcgactccctctaaaaacgccgccttttctaacttaaaaacaacaaataataccgataaaccgaaaaaaaactcaactccgccgcgctaaa

SEQ ID NO: 12211 - DNA, 1016 bp, Artificial Sequence
  chemically treated genomic DNA (Homo sapiens) CpG-island No: 12211
aaaaagcgaatgaaggcgtagttattaggttagttaatttaggttgtttaaggttaattattgggggatttttacgttatttcgatatatacgtaacgcgtgtgtgtcgtaattcgtgaattatggaatttttaatcgcgaattacgtggttgttgtttcgcggacgttttagacgacgtgagggaaggcggtgtcgggcggcgtttgtgttaggttggcgggtcgtcgtagatagagttattcggagtaatcgtttaggggtgaggtcggaagttttattcgatttcgcgggtagttagcgttaggtcgattcgaattcgattttgttttggcgttgtttaggagaacgcggtttttgcgcgttttttatagagttcggtcgggcggcgcgcgggtagggggcggggattgtcgcgtggagttgtcgggcgagtatcgtttaggattaatttggacggcgttttaggcgtttagttttttgttatcgtttacgtttttttggtgttagtgaataggtattagcgcgtttttttagcggttgggagagacgttgaatgaagaagagggaaggacggttagttaggtgagtcgcggcggggtggagcgtcgggcgttacgttttgtcgagggagaagagtcggtcgtgtgcggagggatagggtgaagggattttatttcggggaggatgggtttaatttcgcgggcgcgttaggtgggatttttagcgttttaggggttcgcgcgtaatagtcggtattttcgggttcgcggataaagggttaacgcgttggtagtgattgcgggtttcggatgtgagagttttgtttgacgttttggttgcgttgtaggtgcgtcgggtcgaacggagtcggtacgtggcggcgatttgatcgttcgaggtttttttttatttgtagcggttgttcggttttttttgggaacgtcgttttttttaatttaagggtaataggtggtgtcggtggatcgagagagagtttagtttcgtcgcgttggg

SEQ ID NO: 12212 - DNA, 1016 bp, Artificial Sequence
  chemically treated genomic DNA (Homo sapiens) CpG-island No: 12212
cccaacgcgacgaaactaaactctctctcgatccaccgacaccacctattacccttaaattaaaaaaaacgacgttcccaaaaaaaaccgaacaaccgctacaaataaaaaaaaacctcgaacgatcaaatcgccgccacgtaccgactccgttcgacccgacgcacctacaacgcaaccaaaacgtcaaacaaaactctcacatccgaaacccgcaatcactaccaacgcgttaaccctttatccgcgaacccgaaaataccgactattacgcgcgaacccctaaaacgctaaaaatcccacctaacgcgcccgcgaaattaaacccatcctccccgaaataaaatcccttcaccctatccctccgcacacgaccgactcttctccctcgacaaaacgtaacgcccgacgctccaccccgccgcgactcacctaactaaccgtccttccctcttcttcattcaacgtctctcccaaccgctaaaaaaacgcgctaatacctattcactaacaccaaaaaaacgtaaacgataacaaaaaactaaacgcctaaaacgccgtccaaattaatcctaaacgatactcgcccgacaactccacgcgacaatccccgccccctacccgcgcgccgcccgaccgaactctataaaaaacgcgcaaaaaccgcgttctcctaaacaacgccaaaacaaaatcgaattcgaatcgacctaacgctaactacccgcgaaatcgaataaaacttccgacctcacccctaaacgattactccgaataactctatctacgacgacccgccaacctaacacaaacgccgcccgacaccgccttccctcacgtcgtctaaaacgtccgcgaaacaacaaccacgtaattcgcgattaaaaattccataattcacgaattacgacacacacgcgttacgtatatatcgaaataacgtaaaaatcccccaataattaaccttaaacaacctaaattaactaacctaataactacgccttcattcgcttttt

SEQ ID NO: 12213 - DNA, 631 bp, Artificial Sequence
  chemically treated genomic DNA (Homo sapiens) CpG-island No: 12213
ggacggagtggaagaagaggggtcgagatttgtttgggggcgtttaggtggagcgtacggggttcggggtttttttacggtttggttttagcgcgcggatgttaaagtggaaggagtttttgtaggtgtagggcgtgggtaggtcgatgttgttttgtttggatagttcggtttttcggggtcgtacgttgtttagttgggtatcgtttattatcgtttggttgtgggagatgagttgggcgatgcgtttttttagtcgttttttttttagttttaggtcggtttttcgcgtttcgggttcggtttttgcgatttttggtttcgggttcgggtcgttttttttttcggattcggcgttgtgtttcgaaaggttgtgtagggggttgtagggcgtatgcggttgtttcgcgttgtcggagcgcgataggtatttcgagtcggtgtttttatattttcgtagtcggttttcgggggttttggtattttagggtttttcggttgtcgtcgtttgttgtcgttgtagggcgtacggtttttcggcggtcggcgatttttgttttggtaatttacgttagggttgtgtgttggtcgttgggagtttaggtgacgttatgggggtagagttttaagg

SEQ ID NO: 12214 - DNA, 631 bp, Artificial Sequence
  chemically treated genomic DNA (Homo sapiens) CpG-island No: 12214
ccttaaaactctacccccataacgtcacctaaactcccaacgaccaacacacaaccctaacgtaaattaccaaaacaaaaatcgccgaccgccgaaaaaccgtacgccctacaacgacaacaaacgacgacaaccgaaaaaccctaaaataccaaaacccccgaaaaccgactacgaaaatataaaaacaccgactcgaaatacctatcgcgctccgacaacgcgaaacaaccgcatacgccctacaaccccctacacaacctttcgaaacacaacgccgaatccgaaaaaaaaaacgacccgaacccgaaaccaaaaatcgcaaaaaccgaacccgaaacgcgaaaaaccgacctaaaactaaaaaaaaaacgactaaaaaaacgcatcgcccaactcatctcccacaaccaaacgataataaacgatacccaactaaacaacgtacgaccccgaaaaaccgaactatccaaacaaaacaacatcgacctacccacgccctacacctacaaaaactccttccactttaacatccgcgcgctaaaaccaaaccgtaaaaaaaccccgaaccccgtacgctccacctaaacgcccccaaacaaatctcgacccctcttcttccactccgtcc

SEQ ID NO: 12215 - DNA, 631 bp, Artificial Sequence
  chemically treated genomic DNA (Homo sapiens) CpG-island No: 12215
ttttgggattttgtttttatggcgttatttgggtttttagcggttagtatataattttggcgtaagttgttagagtagaagtcgtcgatcgtcgggaagtcgtgcgttttgtagcggtagtaggcgacggtagtcgagaagttttgggatgttaaggttttcgagggtcggttgcggaagtgtgagagtatcgattcggggtatttgtcgcgtttcgatagcgcggagtagtcgtatgcgttttgtagttttttgtatagtttttcggagtatagcgtcgagttcgagggggagggcggttcgggttcggggttaggggtcgtaggggtcgagttcggggcgcgagaagtcggtttggagttggagaagaagcggttggaggagcgtatcgtttagtttattttttataattaggcggtggtggacgatgtttagttggataacgtgcggtttcggaagatcgggttgtttaaatagggtagtatcgatttgtttacgttttatatttataaggattttttttattttgatattcgcgcgttggagttaggtcgtaggagggtttcgggtttcgtgcgttttatttggacgtttttagataagtttcggtttttttttttttatttcgttt

SEQ ID NO: 12216 - DNA, 631 bp, Artificial Sequence
  chemically treated genomic DNA (Homo sapiens) CpG-island No: 12216
aaacgaaataaaaaaaaaaaaaccgaaacttatctaaaaacgtccaaataaaacgcacgaaacccgaaaccctcctacgacctaactccaacgcgcgaatatcaaaataaaaaaaatccttataaatataaaacgtaaacaaatcgatactaccctatttaaacaacccgatcttccgaaaccgcacgttatccaactaaacatcgtccaccaccgcctaattataaaaaataaactaaacgatacgctcctccaaccgcttcttctccaactccaaaccgacttctcgcgccccgaactcgacccctacgacccctaaccccgaacccgaaccgccctccccctcgaactcgacgctatactccgaaaaactatacaaaaaactacaaaacgcatacgactactccgcgctatcgaaacgcgacaaataccccgaatcgatactctcacacttccgcaaccgaccctcgaaaaccttaacatcccaaaacttctcgactaccgtcgcctactaccgctacaaaacgcacgacttcccgacgatcgacgacttctactctaacaacttacgccaaaattatatactaaccgctaaaaacccaaataacgccataaaaacaaaatcccaaaa

SEQ ID NO: 12217 - DNA, 666 bp, Artificial Sequence
  chemically treated genomic DNA (Homo sapiens) CpG-island No: 12217
ggggcgcggggtagtagtggtaattgtgcgagtcgataggagttcgcgtttcggggagggcgggtcggcggttgaggtatataagaggatgaaggtaggtcggaggggtgtttcggtcgtttttcgaatttttgttttttttatttgttacgaatattacgaagatcgcgtcgttttttttggtcgtcgcgatggcggtcggaatggcgttttggaattatagtatcgtttttttcgggtttaggcgttcgttcggtgtgtagttttcgtagtttcgaagtcggtttcgtttttcgttttcgttcggttttgcggttttcgtaattttggttggttcggtttttattttcggtttcgtataagcgcgtacgttcgttagcggtattcggagacgcgcgttagcgcgcgcgagaatattttacgttatagtcgtaattcgtcggtgttcgtgttttaggattttttttcgttggcgagtcgatggtgcgggcgcgcgttcgttaggttttcggtcgcgtagtttaggaagtggaggaaagcggtaagagggatgattaatcgttaagatacgtcggcggcgtttgtagtgaggtatgatgggaattgtagtttatttaggtttattcgtttttatattgtggagtatgtaattgtgggttttgaggt

SEQ ID NO: 12218 - DNA, 666 bp, Artificial Sequence
  chemically treated genomic DNA (Homo sapiens) CpG-island No: 12218
acctcaaaacccacaattacatactccacaatataaaaacgaataaacctaaataaactacaattcccatcatacctcactacaaacgccgccgacgtatcttaacgattaatcatccctcttaccgctttcctccacttcctaaactacgcgaccgaaaacctaacgaacgcgcgcccgcaccatcgactcgccaacgaaaaaaaatcctaaaacacgaacaccgacgaattacgactataacgtaaaatattctcgcgcgcgctaacgcgcgtctccgaataccgctaacgaacgtacgcgcttatacgaaaccgaaaataaaaaccgaaccaaccaaaattacgaaaaccgcaaaaccgaacgaaaacgaaaaacgaaaccgacttcgaaactacgaaaactacacaccgaacgaacgcctaaacccgaaaaaaacgatactataattccaaaacgccattccgaccgccatcgcgacgaccaaaaaaaacgacgcgatcttcgtaatattcgtaacaaataaaaaaaacaaaaattcgaaaaacgaccgaaacacccctccgacctaccttcatcctcttatatacctcaaccgccgacccgccctccccgaaacgcgaactcctatcgactcgcacaattaccactactaccccgcgcccc

SEQ ID NO: 12219 - DNA, 666 bp, Artificial Sequence
  chemically treated genomic DNA (Homo sapiens) CpG-island No: 12219
gttttagaatttatagttatatgttttataatatggaggcgaataagtttaagtggattataatttttattatgttttattgtaggcgtcgtcgacgtgttttagcggttagttattttttttatcgtttttttttattttttggattgcgcgatcggaggtttagcgggcgcgcgttcgtattatcgattcgttaacgagagaaggttttggggtacggatatcgacgggttgcgattgtgacgtgaggtgttttcgcgcgcgttagcgcgcgttttcgggtgtcgttgacgggcgtgcgcgtttgtgcggagtcggaggtgggggtcgaattagttaaggttgcgggggtcgtagagtcggacgaagacggagggcggagtcggtttcgggattgcggagattatatatcgagcgagcgtttgggttcgaagggagcgatgttgtggttttagggcgttatttcggtcgttatcgcgacggttaaaaggagcggcgcggttttcgtggtgttcgtggtaggtgaaggaggtaggggttcgagaggcggtcgggatattttttcggtttatttttatttttttgtatattttagtcgtcggttcgtttttttcgagacgcgggtttttgtcggttcgtataattgttattattatttcgcgtttt

SEQ ID NO: 12220 - DNA, 666 bp, Artificial Sequence
  chemically treated genomic DNA (Homo sapiens) CpG-island No: 12220
aaaacgcgaaataataataacaattatacgaaccgacaaaaacccgcgtctcgaaaaaaacgaaccgacgactaaaatatacaaaaaaataaaaataaaccgaaaaaatatcccgaccgcctctcgaacccctacctccttcacctaccacgaacaccacgaaaaccgcgccgctccttttaaccgtcgcgataacgaccgaaataacgccctaaaaccacaacatcgctcccttcgaacccaaacgctcgctcgatatataatctccgcaatcccgaaaccgactccgccctccgtcttcgtccgactctacgacccccgcaaccttaactaattcgacccccacctccgactccgcacaaacgcgcacgcccgtcaacgacacccgaaaacgcgcgctaacgcgcgcgaaaacacctcacgtcacaatcgcaacccgtcgatatccgtaccccaaaaccttctctcgttaacgaatcgataatacgaacgcgcgcccgctaaacctccgatcgcgcaatccaaaaaataaaaaaaaacgataaaaaaaataactaaccgctaaaacacgtcgacgacgcctacaataaaacataataaaaattataatccacttaaacttattcgcctccatattataaaacatataactataaattctaaaac

SEQ ID NO: 12221 - DNA, 553 bp, Artificial Sequence
  chemically treated genomic DNA (Homo sapiens) CpG-island No: 12221
taagcggcgtgaagagcgatggcgcgtttcgtagagttcgtaagtcggttttttagttttcgcgtgtatttgaaggagtcggggatcgaggtttatgtgttcgaagtttagtgttttagagttttttatggcgttgtttagtagcgtagtacgtacgcgttgtaggaaaaacgttatcgacgcgagcgggagtaaagtaataattaatcggtttcggagacgaagttatttttcggaagtgttggtttttaggttttcggtattcggacggagttttgcgattgcgtagtttttaggattgggtttagtaggaggcggtggagcggtcgtgttggggtcgacggggtattttggattatagagtcgttttattggttttttcggcgttttcggacgtcgttgacgtatttgattttcgcgatttgtaggagaagtttcggtcggggcgagggtcgaggtcgtgacgggtatgatcgtttttttgtttggttagggttagtgtttcgtcgggtatattattttatgaatggagttattgagatagattgggttg

SEQ ID NO: 12222 - DNA, 553 bp, Artificial Sequence
  chemically treated genomic DNA (Homo sapiens) CpG-island No: 12222
caacccaatctatctcaataactccattcataaaataatatacccgacgaaacactaaccctaaccaaacaaaaaaacgatcatacccgtcacgacctcgaccctcgccccgaccgaaacttctcctacaaatcgcgaaaatcaaatacgtcaacgacgtccgaaaacgccgaaaaaaccaataaaacgactctataatccaaaataccccgtcgaccccaacacgaccgctccaccgcctcctactaaacccaatcctaaaaactacgcaatcgcaaaactccgtccgaataccgaaaacctaaaaaccaacacttccgaaaaataacttcgtctccgaaaccgattaattattactttactcccgctcgcgtcgataacgtttttcctacaacgcgtacgtactacgctactaaacaacgccataaaaaactctaaaacactaaacttcgaacacataaacctcgatccccgactccttcaaatacacgcgaaaactaaaaaaccgacttacgaactctacgaaacgcgccatcgctcttcacgccgctta

SEQ ID NO: 12223 - DNA, 553 bp, Artificial Sequence
  chemically treated genomic DNA (Homo sapiens) CpG-island No: 12223
tagtttagtttattttagtggttttatttatagggtgatgtgttcggcgggatattaattttaattaagtagagagacggttatgttcgttacgatttcggttttcgtttcggtcgaggttttttttgtaggtcgcgagaattaggtgcgttagcggcgttcgggaacgtcggaagagttagtggagcggttttgtagtttaaagtatttcgtcgattttagtacggtcgttttatcgttttttattagatttagttttagggattgcgtagtcgtagagtttcgttcgagtatcggaagtttaggagttagtattttcgggaagtgatttcgttttcgaagtcgattggttgttgttttgttttcgttcgcgtcggtggcgttttttttgtagcgcgtgcgtgttgcgttattgagtagcgttatggaggattttgaagtattgggtttcgaatatatgggtttcgattttcggtttttttaggtatacgcgagggttggggagtcggtttacgggttttgcggggcgcgttatcgttttttacgtcgttta

SEQ ID NO: 12224 - DNA, 553 bp, Artificial Sequence
  chemically treated genomic DNA (Homo sapiens) CpG-island No: 12224
taaacgacgtaaaaaacgataacgcgccccgcaaaacccgtaaaccgactccccaaccctcgcgtatacctaaaaaaaccgaaaatcgaaacccatatattcgaaacccaatacttcaaaatcctccataacgctactcaataacgcaacacgcacgcgctacaaaaaaaacgccaccgacgcgaacgaaaacaaaacaacaaccaatcgacttcgaaaacgaaatcacttcccgaaaatactaactcctaaacttccgatactcgaacgaaactctacgactacgcaatccctaaaactaaatctaataaaaaacgataaaacgaccgtactaaaatcgacgaaatactttaaactacaaaaccgctccactaactcttccgacgttcccgaacgccgctaacgcacctaattctcgcgacctacaaaaaaaacctcgaccgaaacgaaaaccgaaatcgtaacgaacataaccgtctctctacttaattaaaattaatatcccgccgaacacatcaccctataaataaaaccactaaaataaactaaacta

SEQ ID NO: 12225 - DNA, 606 bp, Artificial Sequence
  chemically treated genomic DNA (Homo sapiens) CpG-island No: 12225
atgattatggtttcgtcggggattttttcgatgaaatagcgtttttcggtttcgtcgatgtggaagtagagtttttggcgtttgtgcgatagcgcgagaagtagtagggtttgtcgttttatcgttcgtagaggtttagtttcgatatttgttatcgcgttttagtttttaagcgtttgcgtatatttgcgtatcgttttggtttgcgcgttattttagcgattttgagagttaggggaagaggacgtttgcgtagtgatatgtattcgtcgttttttgtaattttattcgtatcgaatattgtcgcgtttcgtttttttatatagttcggcgttcgtttattttcgtaacgagagtagagggcgtatgcgtaatgacgttcgtttttaatttttcgttttttatttcgtagtttattttcggtatttcgtaggggaggtacgtttgcgtagttacgttcgttttcggttttagttagcgatttgggtttcggagtattaaggagacggtggacggaatttgattaggtttggtggttacgatggtttgaagcgtgttttttgggtttttagttcgggtttataagtgttttttgtgttaaatata

SEQ ID NO: 12226 - DNA, 606 bp, Artificial Sequence
  chemically treated genomic DNA (Homo sapiens) CpG-island No: 12226
tatatttaacacaaaaaacacttataaacccgaactaaaaacccaaaaaacacgcttcaaaccatcgtaaccaccaaacctaatcaaattccgtccaccgtctccttaatactccgaaacccaaatcgctaactaaaaccgaaaacgaacgtaactacgcaaacgtacctcccctacgaaataccgaaaataaactacgaaataaaaaacgaaaaattaaaaacgaacgtcattacgcatacgccctctactctcgttacgaaaataaacgaacgccgaactatataaaaaaacgaaacgcgacaatattcgatacgaataaaattacaaaaaacgacgaatacatatcactacgcaaacgtcctcttcccctaactctcaaaatcgctaaaataacgcgcaaaccaaaacgatacgcaaatatacgcaaacgcttaaaaactaaaacgcgataacaaatatcgaaactaaacctctacgaacgataaaacgacaaaccctactacttctcgcgctatcgcacaaacgccaaaaactctacttccacatcgacgaaaccgaaaaacgctatttcatcgaaaaaatccccgacgaaaccataatcat

SEQ ID NO: 12227 - DNA, 606 bp, Artificial Sequence
  chemically treated genomic DNA (Homo sapiens) CpG-island No: 12227
tgtatttagtatagaaaatatttgtgagttcgagttgagaatttaaaaggtacgttttaggttatcgtagttattaagtttggttagatttcgtttatcgtttttttggtgtttcgagatttaaatcgttgattggggtcgagggcgggcgtgattgcgtaggcgtgttttttttgcgagatgtcggaggtaagttgcggggtaaggggcgagaaattaagggcgaacgttattgcgtatgcgttttttattttcgttgcgggggtaggcgggcgtcgggttgtgtgagggggcggggcgcggtagtgttcggtacggatggagttgtaggagacggcgagtatatattattgcgtaggcgttttttttttttaatttttagggtcgttagggtggcgcgtaggttagagcgatgcgtaaatgtgcgtaggcgtttaggggttgaggcgcgatggtaggtgtcggggttgggtttttgcgggcgatggggcggtaggttttgttgtttttcgcgttgtcgtataggcgttaggggttttatttttatatcggcgagatcgagaagcgttgttttatcgaggaaattttcgacgagattatggttat

SEQ ID NO: 12228 - DNA, 606 bp, Artificial Sequence
  chemically treated genomic DNA (Homo sapiens) CpG-island No: 12228
ataaccataatctcgtcgaaaatttcctcgataaaacaacgcttctcgatctcgccgatataaaaataaaacccctaacgcctatacgacaacgcgaaaaacaacaaaacctaccgccccatcgcccgcaaaaacccaaccccgacacctaccatcgcgcctcaacccctaaacgcctacgcacatttacgcatcgctctaacctacgcgccaccctaacgaccctaaaaattaaaaaaaaaaaacgcctacgcaataatatatactcgccgtctcctacaactccatccgtaccgaacactaccgcgccccgccccctcacacaacccgacgcccgcctacccccgcaacgaaaataaaaaacgcatacgcaataacgttcgcccttaatttctcgccccttaccccgcaacttacctccgacatctcgcaaaaaaaacacgcctacgcaatcacgcccgccctcgaccccaatcaacgatttaaatctcgaaacaccaaaaaaacgataaacgaaatctaaccaaacttaataactacgataacctaaaacgtaccttttaaattctcaactcgaactcacaaatattttctatactaaataca

SEQ ID NO: 12229 - DNA, 926 bp, Artificial Sequence
  chemically treated genomic DNA (Homo sapiens) CpG-island No: 12229
ttcgatatatttggggtcgcgcgattttcgattttcgtttttttttcgcgtttagagggtttgttcgtttttcgaggtcgcgtttggtttagtcgaggtttcgtagtttttaacgttcgagtcgttatcgtttcgaaaagtcgcgcgagatttgcgagattttcgttttttttttattacgttttgtttttttcgtttttcgcgttcggtttgttagttttagtttcggtcgcgagggtggagttttgtgtttcggaggcgtgggtgacgtaggcgtagcgcgggttgcgcgcgttattgtttattttcggttgttttatttttgttcgttttttttcggttttttatttaagagtttcgttttcgtttcgtttttttcgaagttttcgtcgcgcgttcgcgatttaggtcgttttgaaatttagttcgttcgagcgcgagtttaacgtcgcggtcgtattaaggtgggggaggggaggagtttggggggtttcgttggggcgggagaggaatcggggtttacgggggcgggcgcggagaaattcggggcgagtggaggtgttggagtcgcgtttttaggtttaggatggtgggggtcgcggagggttggttttggcgggagggaagcgggcgagttgttcgcgagggacggttttttttttcgttcgtttttttgtattatttttatcgttttttttcggtttttaggtttttttagatcgtgttatgggtgatagtgatgacgagtacgatcgaaggcgtagggataagtttagaagagagcgtagcgattacgatcgttttcgcgagagagatgaaagacgtcgaggggacgattggaatgataggtgagtcgtttttaattttattttgttttcgttttatgtcgttttattttattcgcgtcgtttttttttttttttttt

SEQ ID NO: 12230 - DNA, 926 bp, Artificial Sequence
  chemically treated genomic DNA (Homo sapiens) CpG-island No: 12230
aaaaaaaaaaaaaaaaaacgacgcgaataaaataaaacgacataaaacgaaaacaaaataaaattaaaaacgactcacctatcattccaatcgtcccctcgacgtctttcatctctctcgcgaaaacgatcgtaatcgctacgctctcttctaaacttatccctacgccttcgatcgtactcgtcatcactatcacccataacacgatctaaaaaaacctaaaaaccgaaaaaaaacgataaaaataatacaaaaaaacgaacgaaaaaaaaaaccgtccctcgcgaacaactcgcccgcttccctcccgccaaaaccaaccctccgcgacccccaccatcctaaacctaaaaacgcgactccaacacctccactcgccccgaatttctccgcgcccgcccccgtaaaccccgattcctctcccgccccaacgaaaccccccaaactcctcccctcccccaccttaatacgaccgcgacgttaaactcgcgctcgaacgaactaaatttcaaaacgacctaaatcgcgaacgcgcgacgaaaacttcgaaaaaaacgaaacgaaaacgaaactcttaaataaaaaaccgaaaaaaaacgaacaaaaataaaacaaccgaaaataaacaataacgcgcgcaacccgcgctacgcctacgtcacccacgcctccgaaacacaaaactccaccctcgcgaccgaaactaaaactaacaaaccgaacgcgaaaaacgaaaaaaacaaaacgtaataaaaaaaaaacgaaaatctcgcaaatctcgcgcgacttttcgaaacgataacgactcgaacgttaaaaactacgaaacctcgactaaaccaaacgcgacctcgaaaaacgaacaaaccctctaaacgcgaaaaaaaaacgaaaatcgaaaatcgcgcgaccccaaatatatcgaa

SEQ ID NO: 12231 - DNA, 926 bp, Artificial Sequence
  chemically treated genomic DNA (Homo sapiens) CpG-island No: 12231
aagggggagaaagaaaagcgacgcgggtggagtgaaacggtatgaaacggggataagatgaagttaaaaacggtttatttgttattttaatcgttttttcgacgttttttatttttttcgcgggaacggtcgtagtcgttgcgtttttttttgaatttgtttttgcgttttcgatcgtattcgttattattgttatttatggtacggtttgagggggtttggggatcggggagaggcggtaggagtggtgtaaaaggacgagcggaggaagggatcgtttttcgcgggtagttcgttcgtttttttttcgttaaggttagtttttcgcggtttttattattttaggtttgagaacgcggttttaatatttttattcgtttcgagttttttcgcgttcgttttcgtggatttcggtttttttttcgttttagcggggttttttaggtttttttttttttttattttggtgcggtcgcggcgttggattcgcgttcggacgggttagattttagggcgatttgggtcgcgggcgcgcgacgaggatttcgaggagggcgagacggagacggagtttttgagtagagggtcgaagagaggcgaataaaagtgggataatcggggatgggtagtagcgcgcgtagttcgcgttgcgtttgcgttatttacgttttcgaggtataaagttttattttcgcggtcggaattggaattaataaatcgagcgcgaagggcggggagagtagggcgtgatgggaaaggggcggggatttcgtaagtttcgcgcggtttttcgagacgataacggttcgagcgttaggaattacgggatttcggttgggttaagcgcggtttcgggaggcgaataagttttttgggcgcgaagggagagcggaagtcgaggatcgcgcgattttagatgtgtcggg

SEQ ID NO: 12232 - DNA, 926 bp, Artificial Sequence
  chemically treated genomic DNA (Homo sapiens) CpG-island No: 12232
cccgacacatctaaaatcgcgcgatcctcgacttccgctctcccttcgcgcccaaaaaacttattcgcctcccgaaaccgcgcttaacccaaccgaaatcccgtaattcctaacgctcgaaccgttatcgtctcgaaaaaccgcgcgaaacttacgaaatccccgcccctttcccatcacgccctactctccccgcccttcgcgctcgatttattaattccaattccgaccgcgaaaataaaactttatacctcgaaaacgtaaataacgcaaacgcaacgcgaactacgcgcgctactacccatccccgattatcccacttttattcgcctctcttcgaccctctactcaaaaactccgtctccgtctcgccctcctcgaaatcctcgtcgcgcgcccgcgacccaaatcgccctaaaatctaacccgtccgaacgcgaatccaacgccgcgaccgcaccaaaataaaaaaaaaaaaaaacctaaaaaaccccgctaaaacgaaaaaaaaaccgaaatccacgaaaacgaacgcgaaaaaactcgaaacgaataaaaatattaaaaccgcgttctcaaacctaaaataataaaaaccgcgaaaaactaaccttaacgaaaaaaaaacgaacgaactacccgcgaaaaacgatcccttcctccgctcgtccttttacaccactcctaccgcctctccccgatccccaaaccccctcaaaccgtaccataaataacaataataacgaatacgatcgaaaacgcaaaaacaaattcaaaaaaaaacgcaacgactacgaccgttcccgcgaaaaaaataaaaaacgtcgaaaaaacgattaaaataacaaataaaccgtttttaacttcatcttatccccgtttcataccgtttcactccacccgcgtcgcttttctttctccccctt

SEQ ID NO: 12233 - DNA, 821 bp, Artificial Sequence
  chemically treated genomic DNA (Homo sapiens) CpG-island No: 12233
gatttagtttcgggagtttcggaagtcggggggtttgtcgtttatgttttttagggtcgtttgtacggcggttagtttaggtacgttcgcgggttggttttttggttacgagtatagcgtttgtagagtgcggtagtcgtagttttagtcgcggtcgtttaggtcgtcgtagtcgtagtggtagtagaggtagtggttcgagagtagcgttaggcggatagggtcgcggttcggcggggataggtttacgtggacgttttttagcggttttagggcggtgggcgggagcggaggttttaggttaggtatagcgtttttttagcggcgcggagcgattttaggttttaatattttttttcggtttcgggttttgggttagttgtcgtaggatcggcgcgtagattggggacgcgtttttcgggtttcgttgattatcgtaggtcgtaataggtagttatcgatcggtatcgatcgaggagtttttataatgtttcgtcgcgtttcgtttcgtttcgttttttttttttttttttttttttttttttttttttttttttttttcgtcgtgttagttagtttgtttgcgggttttattacgtaggcgcgagtttcgttcggtagggtagggttaggggttggtttttgttttgcgttcgtttcggagttcgtttgttttttgttttttagtttcgtttttgtatagattcggttttcgtgatttcggcgttttgtttttatttttggttttttagtcgcgtatattttcgtggttgtaatagtttattggtagtttagaggggcgaaggtatcgcgggggaggg

SEQ ID NO: 12234 - DNA, 821 bp, Artificial Sequence
  chemically treated genomic DNA (Homo sapiens) CpG-island No: 12234
ccctcccccgcgataccttcgcccctctaaactaccaataaactattacaaccacgaaaatatacgcgactaaaaaaccaaaaataaaaacaaaacgccgaaatcacgaaaaccgaatctatacaaaaacgaaactaaaaaacaaaaaacaaacgaactccgaaacgaacgcaaaacaaaaaccaacccctaaccctaccctaccgaacgaaactcgcgcctacgtaataaaacccgcaaacaaactaactaacacgacgaaaaaaaaaaaaaaaaaaaaaaaaaaaaaaaaaaaaaaaaaaaaaacgaaacgaaacgaaacgcgacgaaacattataaaaactcctcgatcgataccgatcgataactacctattacgacctacgataatcaacgaaacccgaaaaacgcgtccccaatctacgcgccgatcctacgacaactaacccaaaacccgaaaccgaaaaaaaatattaaaacctaaaatcgctccgcgccgctaaaaaaacgctatacctaacctaaaacctccgctcccgcccaccgccctaaaaccgctaaaaaacgtccacgtaaacctatccccgccgaaccgcgaccctatccgcctaacgctactctcgaaccactacctctactaccactacgactacgacgacctaaacgaccgcgactaaaactacgactaccgcactctacaaacgctatactcgtaaccaaaaaaccaacccgcgaacgtacctaaactaaccgccgtacaaacgaccctaaaaaacataaacgacaaaccccccgacttccgaaactcccgaaactaaatc

SEQ ID NO: 12235 - DNA, 821 bp, Artificial Sequence
  chemically treated genomic DNA (Homo sapiens) CpG-island No: 12235
ttttttttcgcggtgttttcgtttttttgggttgttaataaattgttatagttacgggagtgtgcgcgattagggagttaggggtagaggtagaacgtcggaattacgggggtcgagtttatgtaggagcggggttggagggtaagaaataggcgagtttcgaggcgggcgtaaggtaaaggttaatttttagttttgttttgtcgggcggagttcgcgtttgcgtaatgaggttcgtaggtaggttagttggtacggcggaggggaggagaggggaggggaggggaggggaggggaggggaggggcggggcggggcggggcgcggcggagtattgtgggagtttttcggtcggtgtcggtcggtggttgtttattgcggtttgcggtgattaacgaggttcggggagcgcgtttttagtttgcgcgtcggttttgcggtagttggtttaagattcggagtcgaaaggaagtgttggagtttgaggtcgtttcgcgtcgttaggaggacgttgtgtttggtttgggattttcgttttcgtttatcgttttggagtcgttgagggacgtttacgtgggtttgttttcgtcgagtcgcggttttgttcgtttggcgttgttttcgggttattatttttattattattacggttgcgacggtttggacgatcgcggttggggttgcggttatcgtattttgtagacgttgtgttcgtggttagagggttagttcgcgggcgtatttggattggtcgtcgtataggcggttttggaggatatgggcgataagtttttcggttttcggggttttcgggattggatt

SEQ ID NO: 12236 - DNA, 821 bp, Artificial Sequence
  chemically treated genomic DNA (Homo sapiens) CpG-island No: 12236
aatccaatcccgaaaaccccgaaaaccgaaaaacttatcgcccatatcctccaaaaccgcctatacgacgaccaatccaaatacgcccgcgaactaaccctctaaccacgaacacaacgtctacaaaatacgataaccgcaaccccaaccgcgatcgtccaaaccgtcgcaaccgtaataataataaaaataataacccgaaaacaacgccaaacgaacaaaaccgcgactcgacgaaaacaaacccacgtaaacgtccctcaacgactccaaaacgataaacgaaaacgaaaatcccaaaccaaacacaacgtcctcctaacgacgcgaaacgacctcaaactccaacacttcctttcgactccgaatcttaaaccaactaccgcaaaaccgacgcgcaaactaaaaacgcgctccccgaacctcgttaatcaccgcaaaccgcaataaacaaccaccgaccgacaccgaccgaaaaactcccacaatactccgccgcgccccgccccgccccgcccctcccctcccctcccctcccctcccctcccctctcctcccctccgccgtaccaactaacctacctacgaacctcattacgcaaacgcgaactccgcccgacaaaacaaaactaaaaattaacctttaccttacgcccgcctcgaaactcgcctatttcttaccctccaaccccgctcctacataaactcgacccccgtaattccgacgttctacctctacccctaactccctaatcgcgcacactcccgtaactataacaatttattaacaacccaaaaaaacgaaaacaccgcgaaaaaaaa

SEQ ID NO: 12237 - DNA, 532 bp, Artificial Sequence
  chemically treated genomic DNA (Homo sapiens) CpG-island No: 12237
gagcgatcggggaaggggtgttcgggggttttcgcgggaatcggagcgtagaggcggcggtcgttttcgcgggttcgggtttttgcgtgggcgtcggtgagtgtgaggcggtcggggaagagtttcggacgagtgcggggtagcggagggcggcgcggggtaggttcggggaagcgggagtcgtttcgttaggggggtttggatttttcggggagcgtacggtgtttcggattcgggttttaaggagagtttcgggcggggagggagatttatttgaggcggtcgagtcgggtcgggtcgggtcgcgtcgggagttggaggcggtcgatgtttttcggcgtaggttgagtcgattttgatagtcgcgtttttttttttcgtatatattttttcgggttttatagcgttttcgttcgttttcgtttattgttttcgttttcgttttttttcgttttttcgggtggttatttttttttttttttttttttttggagtcgagattcggagatttcggggtttagacgtattttag

SEQ ID NO: 12238 - DNA, 532 bp, Artificial Sequence
  chemically treated genomic DNA (Homo sapiens) CpG-island No: 12238
ctaaaatacgtctaaaccccgaaatctccgaatctcgactccaaaaaaaaaaaaaaaaaaaaaaataaccacccgaaaaaacgaaaaaaaacgaaaacgaaaacaataaacgaaaacgaacgaaaacgctataaaacccgaaaaaatatatacgaaaaaaaaaaacgcgactatcaaaatcgactcaacctacgccgaaaaacatcgaccgcctccaactcccgacgcgacccgacccgacccgactcgaccgcctcaaataaatctccctccccgcccgaaactctccttaaaacccgaatccgaaacaccgtacgctccccgaaaaatccaaacccccctaacgaaacgactcccgcttccccgaacctaccccgcgccgccctccgctaccccgcactcgtccgaaactcttccccgaccgcctcacactcaccgacgcccacgcaaaaacccgaacccgcgaaaacgaccgccgcctctacgctccgattcccgcgaaaacccccgaacaccccttccccgatcgctc

SEQ ID NO: 12239 - DNA, 532 bp, Artificial Sequence
  chemically treated genomic DNA (Homo sapiens) CpG-island No: 12239
ttggagtgcgtttgggtttcggggttttcgggtttcggttttaagggagggagagagaggggaggtggttattcgggagagcggggaggggcgggggcggagatagtgggcgggggcgggcgggggcgttgtgaggttcggaggagtgtgtgcggggggaggaggcgcggttgttagagtcggtttagtttgcgtcggggaatatcggtcgtttttagttttcggcgcggttcggttcggttcggttcggtcgttttaggtgagttttttttttcgttcgggattttttttaaggttcgggttcggggtatcgtgcgtttttcgaggggtttaggtttttttaacgggacggttttcgttttttcgggtttgtttcgcgtcgtttttcgttgtttcgtattcgttcggaattttttttcggtcgttttatatttatcgacgtttacgtaggagttcgagttcgcgggaacggtcgtcgtttttgcgtttcgattttcgcggggattttcgagtatttttttttcgatcgttt

SEQ ID NO: 12240 - DNA, 532 bp, Artificial Sequence
  chemically treated genomic DNA (Homo sapiens) CpG-island No: 12240
aaacgatcgaaaaaaaaatactcgaaaatccccgcgaaaatcgaaacgcaaaaacgacgaccgttcccgcgaactcgaactcctacgtaaacgtcgataaatataaaacgaccgaaaaaaaattccgaacgaatacgaaacaacgaaaaacgacgcgaaacaaacccgaaaaaacgaaaaccgtcccgttaaaaaaacctaaacccctcgaaaaacgcacgataccccgaacccgaaccttaaaaaaaatcccgaacgaaaaaaaaaactcacctaaaacgaccgaaccgaaccgaaccgaaccgcgccgaaaactaaaaacgaccgatattccccgacgcaaactaaaccgactctaacaaccgcgcctcctccccccgcacacactcctccgaacctcacaacgcccccgcccgcccccgcccactatctccgcccccgcccctccccgctctcccgaataaccacctcccctctctctccctcccttaaaaccgaaacccgaaaaccccgaaacccaaacgcactccaa

SEQ ID NO: 12241 - DNA, 521 bp, Artificial Sequence
  chemically treated genomic DNA (Homo sapiens) CpG-island No: 12241
cgtttttcgttatttttatacgttttttttagtggggtggttgtttatcgtatttcggagttcggattggggttcggtttttgcggcgacgattgtttgtatttaagtgaaggaggtttcgagattcgcggtttacgttttgtcggagacgtttgtttgtagggttgtattgtattttcgggcgtacgtggagttggagtagcgtaggttggggaagagtagagagggtcgggttttttcgggcgcgttatggggcggggtcgaggacggggattaatagcgcgcgcgtgttggtgggggtggggataggttttaggtttggtatttcggtagtcgtagttgtttttttcggttttcgtgtatttttcgttcgagcggagtttttcggttcgcggggatcgttttcgagcgttgcgttttgcgggtgggtgagtgagcgtttcgcggttttcgagttgtggggtgtatttggtcggggagaaggatattttggtttttttgtattttaacgggcgtaaagg

SEQ ID NO: 12242 - DNA, 521 bp, Artificial Sequence
  chemically treated genomic DNA (Homo sapiens) CpG-island No: 12242
cctttacgcccgttaaaatacaaaaaaaccaaaatatccttctccccgaccaaatacaccccacaactcgaaaaccgcgaaacgctcactcacccacccgcaaaacgcaacgctcgaaaacgatccccgcgaaccgaaaaactccgctcgaacgaaaaatacacgaaaaccgaaaaaaacaactacgactaccgaaataccaaacctaaaacctatccccacccccaccaacacgcgcgcgctattaatccccgtcctcgaccccgccccataacgcgcccgaaaaaacccgaccctctctactcttccccaacctacgctactccaactccacgtacgcccgaaaatacaatacaaccctacaaacaaacgtctccgacaaaacgtaaaccgcgaatctcgaaacctccttcacttaaatacaaacaatcgtcgccgcaaaaaccgaaccccaatccgaactccgaaatacgataaacaaccaccccactaaaaaaaacgtataaaaataacgaaaaacg

SEQ ID NO: 12243 - DNA, 521 bp, Artificial Sequence
  chemically treated genomic DNA (Homo sapiens) CpG-island No: 12243
tttttgcgttcgttggggtgtaagggagttaagatattttttttttcggttaggtgtattttatagttcgggggtcgcgaggcgtttatttatttattcgtaggacgtagcgttcgggggcgattttcgcgagtcggggggtttcgttcgggcggagagtgtacgggggtcggaaaagatagttgcggttatcgggatgttaggtttggagtttgtttttatttttattagtacgcgcgcgttattggttttcgttttcggtttcgttttatggcgcgttcggagaagttcgattttttttgtttttttttagtttgcgttgttttagttttacgtgcgttcggggatgtaatgtagttttgtagataagcgttttcggtaggacgtgggtcgcgggtttcggagttttttttatttaggtataaataatcgtcgtcgtaggggtcggattttagttcgagtttcgaggtgcggtgagtagttattttattaaagggggcgtgtgaggatggcggaaagcg

SEQ ID NO: 12244 - DNA, 521 bp, Artificial Sequence
  chemically treated genomic DNA (Homo sapiens) CpG-island No: 12244
cgctttccgccatcctcacacgccccctttaataaaataactactcaccgcacctcgaaactcgaactaaaatccgacccctacgacgacgattatttatacctaaataaaaaaaactccgaaacccgcgacccacgtcctaccgaaaacgcttatctacaaaactacattacatccccgaacgcacgtaaaactaaaacaacgcaaactaaaaaaaaacaaaaaaaatcgaacttctccgaacgcgccataaaacgaaaccgaaaacgaaaaccaataacgcgcgcgtactaataaaaataaaaacaaactccaaacctaacatcccgataaccgcaactatcttttccgacccccgtacactctccgcccgaacgaaaccccccgactcgcgaaaatcgcccccgaacgctacgtcctacgaataaataaataaacgcctcgcgacccccgaactataaaatacacctaaccgaaaaaaaaaatatcttaactcccttacaccccaacgaacgcaaaaa

SEQ ID NO: 12245 - DNA, 774 bp, Artificial Sequence
  chemically treated genomic DNA (Homo sapiens) CpG-island No: 12245
tttttcggagcggcggaaaggtaagtacgagggtcgtattcggtttgtttgtatatagttaagtcgtaagcggggttttagaattagttgaattttaatattaacggacgaaggttagtgggtttcggcggcgaagtttgcgggttgttttagaagtttcgaagtttagaacgaggacggcgcgggaagggaaaggcgtaggcgcgggatatattggaggggtttaggagtagagacggcgtaggcgttgggtttgtcggggtttgcggggacgttcgggcgcggttagttcgggcggcgttgaggcgataaattaattcgttagcgaatattgcgggaattcggttgttgttttttatcgttgtatcgtatcgttttttcgtaattttttggtttgggttgggcggtgagtttattcggtggtttagtcgagattcgttgagttcggttttaggaaagtagtttatttcgtagcgtcgtttgtcgggtcgttcggttattttcgcgggtttcgtttttggttagttttttcgcgtttagtagggttgcggtcgtttgcgtaggcgtcgtggaggtttcgtttatatttttttattgcgtaggcgtcgtcgttttttattattatttttttttttttttttattttcggttcgcgttcgtttcggtattgggtcgcgtagtcgttttgttatttggtcggttaagaaagtagtcggttagtcggtgcgtatgttttaggttttgggttggagtcgggtaaggcgggttttttta

SEQ ID NO: 12246 - DNA, 774 bp, Artificial Sequence
  chemically treated genomic DNA (Homo sapiens) CpG-island No: 12246
taaaaaaacccgccttacccgactccaacccaaaacctaaaacatacgcaccgactaaccgactactttcttaaccgaccaaataacaaaacgactacgcgacccaataccgaaacgaacgcgaaccgaaaataaaaaaaaaaaaaaaaataataataaaaaacgacgacgcctacgcaataaaaaaatataaacgaaacctccacgacgcctacgcaaacgaccgcaaccctactaaacgcgaaaaaactaaccaaaaacgaaacccgcgaaaataaccgaacgacccgacaaacgacgctacgaaataaactactttcctaaaaccgaactcaacgaatctcgactaaaccaccgaataaactcaccgcccaacccaaaccaaaaaattacgaaaaaacgatacgatacaacgataaaaaacaacaaccgaattcccgcaatattcgctaacgaattaatttatcgcctcaacgccgcccgaactaaccgcgcccgaacgtccccgcaaaccccgacaaacccaacgcctacgccgtctctactcctaaacccctccaatatatcccgcgcctacgcctttcccttcccgcgccgtcctcgttctaaacttcgaaacttctaaaacaacccgcaaacttcgccgccgaaacccactaaccttcgtccgttaatattaaaattcaactaattctaaaaccccgcttacgacttaactatatacaaacaaaccgaatacgaccctcgtacttacctttccgccgctccgaaaaa

SEQ ID NO: 12247 - DNA, 774 bp, Artificial Sequence
  chemically treated genomic DNA (Homo sapiens) CpG-island No: 12247
tgaagggattcgttttgttcggttttagtttaagatttgaggtatgcgtatcggttggtcggttatttttttgatcggttaagtggtagagcggttgcgcgatttagtgtcgagacggacgcgagtcggagatgggggaaggggagggggtggtggtgggggacggcggcgtttgcgtagtgaaggaatgtaggcggggtttttacgacgtttgcgtagacggtcgtagttttgttgggcgcgaaggggttggttaagggcggggttcgcgaggatggtcgggcggttcggtaagcggcgttgcggggtaggttgtttttttgaggtcggatttaacgggtttcggttgagttatcgggtgagtttatcgtttagtttaaattaggagattgcgagggagcgatgcgatgtagcgatgaagagtagtagtcgggttttcgtagtgttcgttggcgagttggtttatcgttttagcgtcgttcgggttgatcgcgttcgggcgttttcgtagatttcggtaggtttagcgtttgcgtcgtttttgtttttgggtttttttagtgtgtttcgcgtttgcgttttttttttttcgcgtcgttttcgttttgggtttcggggtttttggaataattcgtaggtttcgtcgtcgagatttattggttttcgttcgttggtgttggggtttagttggttttgggatttcgtttgcggtttgattgtgtgtagataggtcgggtgcgattttcgtgtttgttttttcgtcgtttcgggaga

SEQ ID NO: 12248 - DNA, 774 bp, Artificial Sequence
  chemically treated genomic DNA (Homo sapiens) CpG-island No: 12248
tctcccgaaacgacgaaaaaacaaacacgaaaatcgcacccgacctatctacacacaatcaaaccgcaaacgaaatcccaaaaccaactaaaccccaacaccaacgaacgaaaaccaataaatctcgacgacgaaacctacgaattattccaaaaaccccgaaacccaaaacgaaaacgacgcgaaaaaaaaaaaacgcaaacgcgaaacacactaaaaaaacccaaaaacaaaaacgacgcaaacgctaaacctaccgaaatctacgaaaacgcccgaacgcgatcaacccgaacgacgctaaaacgataaaccaactcgccaacgaacactacgaaaacccgactactactcttcatcgctacatcgcatcgctccctcgcaatctcctaatttaaactaaacgataaactcacccgataactcaaccgaaacccgttaaatccgacctcaaaaaaacaacctaccccgcaacgccgcttaccgaaccgcccgaccatcctcgcgaaccccgcccttaaccaaccccttcgcgcccaacaaaactacgaccgtctacgcaaacgtcgtaaaaaccccgcctacattccttcactacgcaaacgccgccgtcccccaccaccaccccctccccttcccccatctccgactcgcgtccgtctcgacactaaatcgcgcaaccgctctaccacttaaccgatcaaaaaaataaccgaccaaccgatacgcatacctcaaatcttaaactaaaaccgaacaaaacgaatcccttca

SEQ ID NO: 12249 - DNA, 517 bp, Artificial Sequence
  chemically treated genomic DNA (Homo sapiens) CpG-island No: 12249
ttgcgcgtggggttgcggtttcgttttatttcgagtcgaatcgtgcggtgcggcgttcgtgcgtttttaggtttgcgttggtcggggcgtttgtttttattggatagtttcggttcggttttgtttttttatcgtcgcgtcgacgattttaagtagtcggagtagtcggttttagggttcgttttaggacgcgtttattggttggggcgggtgttcgagttgtgttaattttcgtcggcgggggaggggagtagaggcgggttttttgtgcgttttgttttgtttcgtttcgtttcgtttcgtatttcgtatattcgatcgcgcgtcgtttcggggagcggaggtgtgcgtattcgcggggggcgcggcgttttttgttaggtgtcgatgttcgtttgttcgcgttttttagtttattcgagttgattgtgattgagaatatagttcgttcgcgtttcgtgttttaggaagatagattttagcggggaagttgagtttgggtatggagaagaatttt

SEQ ID NO: 12250 - DNA, 517 bp, Artificial Sequence
  chemically treated genomic DNA (Homo sapiens) CpG-island No: 12250
aaaattcttctccatacccaaactcaacttccccgctaaaatctatcttcctaaaacacgaaacgcgaacgaactatattctcaatcacaatcaactcgaataaactaaaaaacgcgaacaaacgaacatcgacacctaacaaaaaacgccgcgccccccgcgaatacgcacacctccgctccccgaaacgacgcgcgatcgaatatacgaaatacgaaacgaaacgaaacgaaacaaaacaaaacgcacaaaaaacccgcctctactcccctcccccgccgacgaaaattaacacaactcgaacacccgccccaaccaataaacgcgtcctaaaacgaaccctaaaaccgactactccgactacttaaaatcgtcgacgcgacgataaaaaaacaaaaccgaaccgaaactatccaataaaaacaaacgccccgaccaacgcaaacctaaaaacgcacgaacgccgcaccgcacgattcgactcgaaataaaacgaaaccgcaaccccacgcgcaa

SEQ ID NO: 12251 - DNA, 517 bp, Artificial Sequence
  chemically treated genomic DNA (Homo sapiens) CpG-island No: 12251
ggggtttttttttatatttagatttagttttttcgttggagtttgtttttttggaatacggaacgcgggcgggttgtgtttttagttataattagttcggatgagttggggggcgcgggtaagcgggtatcggtatttggtagaaagcgtcgcgtttttcgcgggtgcgtatattttcgtttttcggggcggcgcgcggtcgggtgtgcggggtacggggcggggcggagcggagtagagtaaagcgtataggaggttcgtttttgtttttttttttcgtcggcgaagattgatatagttcgagtattcgttttaattaatgagcgcgttttggggcgggttttgggatcggttgtttcggttatttagagtcgtcggcgcggcggtgggaaagtagagtcgagtcgggattgtttagtgggagtaggcgtttcggttagcgtagatttggaggcgtacgggcgtcgtatcgtacgattcggttcggggtagagcggagtcgtagttttacgcgtag

SEQ ID NO: 12252 - DNA, 517 bp, Artificial Sequence
  chemically treated genomic DNA (Homo sapiens) CpG-island No: 12252
ctacgcgtaaaactacgactccgctctaccccgaaccgaatcgtacgatacgacgcccgtacgcctccaaatctacgctaaccgaaacgcctactcccactaaacaatcccgactcgactctactttcccaccgccgcgccgacgactctaaataaccgaaacaaccgatcccaaaacccgccccaaaacgcgctcattaattaaaacgaatactcgaactatatcaatcttcgccgacgaaaaaaaaaaacaaaaacgaacctcctatacgctttactctactccgctccgccccgccccgtaccccgcacacccgaccgcgcgccgccccgaaaaacgaaaatatacgcacccgcgaaaaacgcgacgctttctaccaaataccgatacccgcttacccgcgccccccaactcatccgaactaattataactaaaaacacaacccgcccgcgttccgtattccaaaaaaacaaactccaacgaaaaaactaaatctaaatataaaaaaaaacccc

SEQ ID NO: 12253 - DNA, 812 bp, Artificial Sequence
  chemically treated genomic DNA (Homo sapiens) CpG-island No: 12253
tttggatatatggttattatagttttttttcgacgttttggatatacggttattatttcgttttcgacgttttggatatacggttattatttcgttttcgacgttttggatatacggttattatttcgttttcgacgttttggatatacggttattatttcgttttcgacgttttggatatacggttattatttcgttttcgacgttttggatatacggttattatttcgtttttgacgttttggatatacggttatttggatatacggttattatttcgtttttgacgttttggatatacggttattatttcgtttttgacgttttggatatacggttattatttcgtttttgacgttttggatatacggttattatttcgtttttgacgttttggatatacggttattatttcgtttttgacgttttggatatacggttattattttgtttttgacgttttggatatatggttatttggatatacggttattatttcgtttttgacgttttggatatacggttattatttcgtttttgacgttttggatatacggttattatttcgtttttgacgttttggatatacggttattatttcgtttttgacgttttggatatacggttattatttcgtttttgacgttttggatatacggttattattttgtttttgatattttggatatacggttattatttcgtttttgacgttttggatatacggttattattttgtttttgacgttttggatatacggttatttggatatacggttattatttcgtttttgacgttttggatatagggt

SEQ ID NO: 12254 - DNA, 812 bp, Artificial Sequence
  chemically treated genomic DNA (Homo sapiens) CpG-island No: 12254
accctatatccaaaacgtcaaaaacgaaataataaccgtatatccaaataaccgtatatccaaaacgtcaaaaacaaaataataaccgtatatccaaaacgtcaaaaacgaaataataaccgtatatccaaaatatcaaaaacaaaataataaccgtatatccaaaacgtcaaaaacgaaataataaccgtatatccaaaacgtcaaaaacgaaataataaccgtatatccaaaacgtcaaaaacgaaataataaccgtatatccaaaacgtcaaaaacgaaataataaccgtatatccaaaacgtcaaaaacgaaataataaccgtatatccaaataaccatatatccaaaacgtcaaaaacaaaataataaccgtatatccaaaacgtcaaaaacgaaataataaccgtatatccaaaacgtcaaaaacgaaataataaccgtatatccaaaacgtcaaaaacgaaataataaccgtatatccaaaacgtcaaaaacgaaataataaccgtatatccaaaacgtcaaaaacgaaataataaccgtatatccaaataaccgtatatccaaaacgtcaaaaacgaaataataaccgtatatccaaaacgtcgaaaacgaaataataaccgtatatccaaaacgtcgaaaacgaaataataaccgtatatccaaaacgtcgaaaacgaaataataaccgtatatccaaaacgtcgaaaacgaaataataaccgtatatccaaaacgtcgaaaacgaaataataaccgtatatccaaaacgtcgaaaaaaaactataataaccatatatccaaa

SEQ ID NO: 12255 - DNA, 812 bp, Artificial Sequence
  chemically treated genomic DNA (Homo sapiens) CpG-island No: 12255
gttttgtatttagagcgttaggggcggggtggtggtcgtgtatttaggtggtcgtgtatttagggcgttagggatagggtggtggtcgtgtatttagggcgttaggggcggggtggtggtcgtgtatttagggtgttagggatagggtggtggtcgtgtatttagggcgttagggacggggtggtggtcgtgtatttagggcgttagggacggggtggtggtcgtgtatttagggcgttagggacggggtggtggtcgtgtatttagggcgttaggggcggggtggtggtcgtgtatttagggcgttaggggcggggtggtggtcgtgtatttaggtggttatgtatttagggcgttagggatagggtggtggtcgtgtatttagggcgttaggggcggggtggtggtcgtgtatttagggcgttagggacggggtggtggtcgtgtatttagggcgttagggacggggtggtggtcgtgtatttagggcgttaggggcggggtggtggtcgtgtatttagggcgttaggggcggggtggtggtcgtgtatttaggtggtcgtgtatttagggcgttagggacggggtggtggtcgtgtatttagggcgtcggggacggggtggtggtcgtgtatttagggcgtcgggggcggggtggtggtcgtgtatttagggcgtcgggggcggggtggtggtcgtgtatttagggcgtcgggggcggggtggtggtcgtgtatttagggcgtcgggggcggggtggtggtcgtgtatttagggcgtcgggggggggttgtggtggttatgtatttagg

SEQ ID NO: 12256 - DNA, 812 bp, Artificial Sequence
  chemically treated genomic DNA (Homo sapiens) CpG-island No: 12256
cctaaatacataaccaccacaacccccccccgacgccctaaatacacgaccaccaccccgcccccgacgccctaaatacacgaccaccaccccgcccccgacgccctaaatacacgaccaccaccccgcccccgacgccctaaatacacgaccaccaccccgcccccgacgccctaaatacacgaccaccaccccgtccccgacgccctaaatacacgaccaccaccccgtccctaacgccctaaatacacgaccacctaaatacacgaccaccaccccgcccctaacgccctaaatacacgaccaccaccccgcccctaacgccctaaatacacgaccaccaccccgtccctaacgccctaaatacacgaccaccaccccgtccctaacgccctaaatacacgaccaccaccccgcccctaacgccctaaatacacgaccaccaccctatccctaacgccctaaatacataaccacctaaatacacgaccaccaccccgcccctaacgccctaaatacacgaccaccaccccgcccctaacgccctaaatacacgaccaccaccccgtccctaacgccctaaatacacgaccaccaccccgtccctaacgccctaaatacacgaccaccaccccgtccctaacgccctaaatacacgaccaccaccctatccctaacaccctaaatacacgaccaccaccccgcccctaacgccctaaatacacgaccaccaccctatccctaacgccctaaatacacgaccacctaaatacacgaccaccaccccgcccctaacgctctaaatacaaaac

SEQ ID NO: 12257 - DNA, 639 bp, Artificial Sequence
  chemically treated genomic DNA (Homo sapiens) CpG-island No: 12257
attttcgtcgttttcgttatcggttttatcgttagttttttcgttatcgttgttatttcggtcgttaggggtcgcggatagtgaggggtaggtattaagtttttcggttttggtaggtgtcgggggcgtaggtagttgtaaattcgcgggtcggcgttgtttatcgttgtgcgcggtatcggggtgtttcgggggtgcgtagttagtaggtggcgtaggcggtgacgtagttgtttaggtgcgagtggcgggggtataggggtgggtaggggcgcgggtgtagaggtgttcgcgggtgtagaggagcgcgtgcgataatttgcgtgtattcgtcgataattgtttatgcgaagtatcgacgtagttatgagtatttgcggggttttattttgtgttataacgagcgaatcgttgtataggagttcgattagttgtcgtatcgtttgtataggtattatcgaaggtatacggattttagaggggtcgagtagtagtttgttttggaaggagggcgagtcgattgttagttcgtagcggtgcgtacgtagcgaagttttatgaatgtatatagttacgtcgtagaagtgtttatttagtttttgtttattgagggttttaagtagagagcgtgagaagttt

SEQ ID NO: 12258 - DNA, 639 bp, Artificial Sequence
  chemically treated genomic DNA (Homo sapiens) CpG-island No: 12258
aaacttctcacgctctctacttaaaaccctcaataaacaaaaactaaataaacacttctacgacgtaactatatacattcataaaacttcgctacgtacgcaccgctacgaactaacaatcgactcgccctccttccaaaacaaactactactcgacccctctaaaatccgtataccttcgataatacctatacaaacgatacgacaactaatcgaactcctatacaacgattcgctcgttataacacaaaataaaaccccgcaaatactcataactacgtcgatacttcgcataaacaattatcgacgaatacacgcaaattatcgcacgcgctcctctacacccgcgaacacctctacacccgcgcccctacccacccctatacccccgccactcgcacctaaacaactacgtcaccgcctacgccacctactaactacgcacccccgaaacaccccgataccgcgcacaacgataaacaacgccgacccgcgaatttacaactacctacgcccccgacacctaccaaaaccgaaaaacttaatacctacccctcactatccgcgacccctaacgaccgaaataacaacgataacgaaaaaactaacgataaaaccgataacgaaaacgacgaaaat

SEQ ID NO: 12259 - DNA, 639 bp, Artificial Sequence
  chemically treated genomic DNA (Homo sapiens) CpG-island No: 12259
gaattttttacgttttttgtttgagatttttaatgggtagaagttgggtgggtatttttgcgacgtgattgtgtgtatttatgaagtttcgttgcgtgcgtatcgttgcgggttggtaatcggttcgttttttttttaagataagttgttgttcggtttttttgagattcgtgtgttttcggtggtgtttgtgtagacggtgcgatagttagtcgagtttttgtatagcggttcgttcgttgtggtatagagtgaagtttcgtaggtatttatggttgcgtcggtgtttcgtatagatagttatcgacgaatgtacgtagattatcgtacgcgtttttttgtattcgcgagtatttttgtattcgcgtttttgtttatttttgtgttttcgttattcgtatttgagtagttgcgttatcgtttgcgttatttgttggttgcgtattttcggggtatttcggtgtcgcgtatagcggtaagtagcgtcggttcgcgagtttgtagttgtttgcgttttcgatatttgttaaagtcgaggggtttggtgtttattttttattgttcgcggtttttgacgatcgaggtgataacgatgacgaggaaattgacgatgagatcgatggcgaggacggcgaaggt

SEQ ID NO: 12260 - DNA, 639 bp, Artificial Sequence
  chemically treated genomic DNA (Homo sapiens) CpG-island No: 12260
accttcgccgtcctcgccatcgatctcatcgtcaatttcctcgtcatcgttatcacctcgatcgtcaaaaaccgcgaacaataaaaaataaacaccaaacccctcgactttaacaaatatcgaaaacgcaaacaactacaaactcgcgaaccgacgctacttaccgctatacgcgacaccgaaataccccgaaaatacgcaaccaacaaataacgcaaacgataacgcaactactcaaatacgaataacgaaaacacaaaaataaacaaaaacgcgaatacaaaaatactcgcgaatacaaaaaaacgcgtacgataatctacgtacattcgtcgataactatctatacgaaacaccgacgcaaccataaatacctacgaaacttcactctataccacaacgaacgaaccgctatacaaaaactcgactaactatcgcaccgtctacacaaacaccaccgaaaacacacgaatctcaaaaaaaccgaacaacaacttatcttaaaaaaaaaacgaaccgattaccaacccgcaacgatacgcacgcaacgaaacttcataaatacacacaatcacgtcgcaaaaatacccacccaacttctacccattaaaaatctcaaacaaaaaacgtaaaaaattc

SEQ ID NO: 12261 - DNA, 914 bp, Artificial Sequence
  chemically treated genomic DNA (Homo sapiens) CpG-island No: 12261
gattcgcgtgtggttttacggtatttagggtatcgtcgagtatacggttcgggaagttttaatgaaacggaataaatcgcgagattaggggaggtaggaggtttattttacgttttgttttcgcggagtataagtttcgtttgcgtttcgagttttcgggttcgtaaagttgggttttaaagagttttaacgtcggaattaaggagtacggaatgtcgggaataagtttttttcgtgcgcgatgacgataaggtcgaggcgcgaagggtgggatcgtaggagtcgtgtagtcgcggattaatgagcgggcgtcggacgatttgtggtttaatggcggcggcgcgcgggtacgttgggggtcggttagacgggtcgatttttttagaagattcggatagtttttttcggttacgtcgcgtcggttttgggtatttagtatcgtttttttttttttcgttggagtagttatggcggcggtgaagattttgaattttaaggtcgaggtggttcgagcgtaggcggcgttggcggttaatattagcgtagcgcggggtttgtaggacgtgttaaggattaatttggggtttaagggtattatgaagatgtaaggcggggttgaatcggagggtcgggcgggtatcgcgcgtcgtcgcgtttttggcgggttcgggatcgcggattggagttcgtcgtttcggggttgcgtagtcgtttttttcggcgtttttcggggtcggttttgtgttttttttaagttttatcgtttcggttattttttttcgtatcgatgtagttttcgcggagaataaagcggttttagagcgcggcgtttttcgttttttggggtttttaggtattttgaggattcggtataatttttgcggggacggggtgggtattatatttgtttttta

SEQ ID NO: 12262 - DNA, 914 bp, Artificial Sequence
  chemically treated genomic DNA (Homo sapiens) CpG-island No: 12262
taaaaaacaaatataatacccaccccgtccccgcaaaaattataccgaatcctcaaaatacctaaaaaccccaaaaaacgaaaaacgccgcgctctaaaaccgctttattctccgcgaaaactacatcgatacgaaaaaaaataaccgaaacgataaaacttaaaaaaaacacaaaaccgaccccgaaaaacgccgaaaaaaacgactacgcaaccccgaaacgacgaactccaatccgcgatcccgaacccgccaaaaacgcgacgacgcgcgatacccgcccgaccctccgattcaaccccgccttacatcttcataatacccttaaaccccaaattaatccttaacacgtcctacaaaccccgcgctacgctaatattaaccgccaacgccgcctacgctcgaaccacctcgaccttaaaattcaaaatcttcaccgccgccataactactccaacgaaaaaaaaaaaaacgatactaaatacccaaaaccgacgcgacgtaaccgaaaaaaactatccgaatcttctaaaaaaatcgacccgtctaaccgacccccaacgtacccgcgcgccgccgccattaaaccacaaatcgtccgacgcccgctcattaatccgcgactacacgactcctacgatcccacccttcgcgcctcgaccttatcgtcatcgcgcacgaaaaaaacttattcccgacattccgtactccttaattccgacgttaaaactctttaaaacccaactttacgaacccgaaaactcgaaacgcaaacgaaacttatactccgcgaaaacaaaacgtaaaataaacctcctacctcccctaatctcgcgatttattccgtttcattaaaacttcccgaaccgtatactcgacgataccctaaataccgtaaaaccacacgcgaatc

SEQ ID NO: 12263 - DNA, 914 bp, Artificial Sequence
  chemically treated genomic DNA (Homo sapiens) CpG-island No: 12263
tggaggataggtgtagtgtttatttcgttttcgtagagattgtgtcgagtttttagggtgtttggaagttttagagggcggggaacgtcgcgttttagagtcgttttgtttttcgcggagattgtatcgatgcgggaagaaatggtcgggacggtggggtttaggagggatataggatcgatttcggaggacgtcgagaaggacggttgcgtagtttcgaggcggcgggttttagttcgcggtttcgggttcgttaggagcgcggcggcgcgcggtgttcgttcggtttttcggtttagtttcgttttatatttttatggtgtttttgggttttaggttggtttttagtacgttttgtagatttcgcgttgcgttgatgttgatcgttagcgtcgtttgcgttcgggttatttcggttttggggtttagggtttttatcgtcgttatagttgttttagcggaggaaaaggaaacgatgttgagtgtttagagtcggcgcggcgtggtcgggaggaattattcgggttttttggaaaagtcggttcgtttggtcggtttttagcgtgttcgcgcgtcgtcgttattgggttataggtcgttcggcgttcgtttattggttcgcggttgtacggtttttgcggttttatttttcgcgtttcggttttgtcgttatcgcgtacgggaggagtttgttttcggtatttcgtgttttttggtttcggcgttggagttttttggggtttagttttgcggattcgggagttcgggacgtaggcggggtttgtgtttcgcgggggtagggcgtagggtgggttttttattttttttgatttcgcggtttgtttcgttttattggagtttttcggatcgtgtgttcgacggtgttttaggtgtcgtggggttatacgcgagtt

SEQ ID NO: 12264 - DNA, 914 bp, Artificial Sequence
  chemically treated genomic DNA (Homo sapiens) CpG-island No: 12264
aactcgcgtataaccccacgacacctaaaacaccgtcgaacacacgatccgaaaaactccaataaaacgaaacaaaccgcgaaatcaaaaaaaataaaaaacccaccctacgccctacccccgcgaaacacaaaccccgcctacgtcccgaactcccgaatccgcaaaactaaaccccaaaaaactccaacgccgaaaccaaaaaacacgaaataccgaaaacaaactcctcccgtacgcgataacgacaaaaccgaaacgcgaaaaataaaaccgcaaaaaccgtacaaccgcgaaccaataaacgaacgccgaacgacctataacccaataacgacgacgcgcgaacacgctaaaaaccgaccaaacgaaccgacttttccaaaaaacccgaataattcctcccgaccacgccgcgccgactctaaacactcaacatcgtttccttttcctccgctaaaacaactataacgacgataaaaaccctaaaccccaaaaccgaaataacccgaacgcaaacgacgctaacgatcaacatcaacgcaacgcgaaatctacaaaacgtactaaaaaccaacctaaaacccaaaaacaccataaaaatataaaacgaaactaaaccgaaaaaccgaacgaacaccgcgcgccgccgcgctcctaacgaacccgaaaccgcgaactaaaacccgccgcctcgaaactacgcaaccgtccttctcgacgtcctccgaaatcgatcctatatccctcctaaaccccaccgtcccgaccatttcttcccgcatcgatacaatctccgcgaaaaacaaaacgactctaaaacgcgacgttccccgccctctaaaacttccaaacaccctaaaaactcgacacaatctctacgaaaacgaaataaacactacacctatcctcca

SEQ ID NO: 12265 - DNA, 853 bp, Artificial Sequence
  chemically treated genomic DNA (Homo sapiens) CpG-island No: 12265
  unsure (57, 77, 721)
gattgtacgtttcgtttacgttagtttggggttcgggattttttgattcgacggggnaattacggtgcgtttttttnaattatatcgtacgttacggattaaggcgatttagtttcgtttatttttatcgttttattattagtttggcgttaggattttacgatttttaattcggttttttttttttattcgggttagattcggttttcgattggtgttcgcgggcgtgattttcgttttcgtttttttcgttattgttaagatggcgtcggtcgcggtggtcgcggaggttagagtcggagaaagaggcggaggtagtggcggtcgcgaggggagggggagtttcgtttgattgagacggtaggtttgggcgggcgggcgggggtgtcgcgaagggcggagcgtcgggttggggatgagttaagcgggtttagagcgtcgcggtatttagtttttcgtgtttcgttatcgcgcgtgcgggatttcggcgtcgtttttcgagttcgattcgttgttcgtacgggagttagttgggtggtgagtgcgggggcggcgattcgggtagcggtggtaggtggagttgttacggttcggagaggtgatagtcgggggcgcgggagcggggcgggtgggttcggggaggaggaaaggatggtttagattttcgttcgagagtttttgagattcgggaggtgtttcgcggttcggttcgtttttggantggcgcggcggtgttgagagtagtattcgcgtttttgcgtcggacgcgtggggggtttttgtgtttttattttagattttttattttaggttggtttggggttgttgttatttgggagtgggggcggggagg

SEQ ID NO: 12266 - DNA, 853 bp, Artificial Sequence
  chemically treated genomic DNA (Homo sapiens) CpG-island No: 12266
  unsure (133, 777, 797)
cctccccgcccccactcccaaataacaacaaccccaaaccaacctaaaataaaaaatctaaaataaaaacacaaaaaccccccacgcgtccgacgcaaaaacgcgaatactactctcaacaccgccgcgccantccaaaaacgaaccgaaccgcgaaacacctcccgaatctcaaaaactctcgaacgaaaatctaaaccatcctttcctcctccccgaacccacccgccccgctcccgcgcccccgactatcacctctccgaaccgtaacaactccacctaccaccgctacccgaatcgccgcccccgcactcaccacccaactaactcccgtacgaacaacgaatcgaactcgaaaaacgacgccgaaatcccgcacgcgcgataacgaaacacgaaaaactaaataccgcgacgctctaaacccgcttaactcatccccaacccgacgctccgcccttcgcgacacccccgcccgcccgcccaaacctaccgtctcaatcaaacgaaactccccctcccctcgcgaccgccactacctccgcctctttctccgactctaacctccgcgaccaccgcgaccgacgccatcttaacaataacgaaaaaaacgaaaacgaaaatcacgcccgcgaacaccaatcgaaaaccgaatctaacccgaataaaaaaaaaaaaccgaattaaaaatcgtaaaatcctaacgccaaactaataataaaacgataaaaataaacgaaactaaatcgccttaatccgtaacgtacgatataattnaaaaaaacgcaccgtaattnccccgtcgaatcaaaaaatcccgaaccccaaactaacgtaaacgaaacgtacaatc

SEQ ID NO: 12267 - DNA, 853 bp, Artificial Sequence
  chemically treated genomic DNA (Homo sapiens) CpG-island No: 12267
  unsure (133, 777, 797)
ttttttcgtttttatttttaaataataatagttttaggttagtttggaatagaaaatttggaatgaaaatataggagttttttacgcgttcgacgtagaggcgcgggtgttatttttagtatcgtcgcgttantttaggggcggatcgagtcgcggagtatttttcggattttaggagttttcgggcggagatttgggttatttttttttttttttcgaatttattcgtttcgttttcgcgttttcggttgttattttttcgggtcgtgatagttttatttgttatcgttgttcgggtcgtcgttttcgtatttattatttagttggttttcgtgcgagtagcggatcgagttcggagagcggcgtcggaatttcgtacgcgcggtagcggaatacgaggggttgaatgtcgcggcgttttgagttcgtttagtttatttttagttcggcgtttcgtttttcgcggtattttcgttcgttcgtttaggtttgtcgttttagttagacgggatttttttttttttcgcggtcgttattgttttcgttttttttttcgattttagttttcgcggttatcgcgatcggcgttattttggtaatgacggaaggggcgggggcgggaattacgttcgcgagtattaatcgaaggtcggatttggttcgagtgggaggagagggtcgagttgagggtcgtggggttttagcgttaaattgataatggggcggtgaaggtgggcgggattaagtcgttttagttcgtgacgtgcggtgtagttnggggaaacgtatcgtggttntttcgtcgggttaggagatttcgagttttaggttggcgtgggcgaagcgtataatt

SEQ ID NO: 12268 - DNA, 853 bp, Artificial Sequence
  chemically treated genomic DNA (Homo sapiens) CpG-island No: 12268
  unsure (57, 77, 721)
aattatacgcttcgcccacgccaacctaaaactcgaaatctcctaacccgacgaaanaaccacgatacgtttccccnaactacaccgcacgtcacgaactaaaacgacttaatcccgcccaccttcaccgccccattatcaatttaacgctaaaaccccacgaccctcaactcgaccctctcctcccactcgaaccaaatccgaccttcgattaatactcgcgaacgtaattcccgcccccgccccttccgtcattaccaaaataacgccgatcgcgataaccgcgaaaactaaaatcgaaaaaaaaaacgaaaacaataacgaccgcgaaaaaaaaaaaaatcccgtctaactaaaacgacaaacctaaacgaacgaacgaaaataccgcgaaaaacgaaacgccgaactaaaaataaactaaacgaactcaaaacgccgcgacattcaacccctcgtattccgctaccgcgcgtacgaaattccgacgccgctctccgaactcgatccgctactcgcacgaaaaccaactaaataataaatacgaaaacgacgacccgaacaacgataacaaataaaactatcacgacccgaaaaaataacaaccgaaaacgcgaaaacgaaacgaataaattcgaaaaaaaaaaaaaaataacccaaatctccgcccgaaaactcctaaaatccgaaaaatactccgcgactcgatccgcccctaaantaacgcgacgatactaaaaataacacccgcgcctctacgtcgaacgcgtaaaaaactcctatattttcattccaaattttctattccaaactaacctaaaactattattatttaaaaataaaaacgaaaaaa

SEQ ID NO: 12269 - DNA, 577 bp, Artificial Sequence
  chemically treated genomic DNA (Homo sapiens) CpG-island No: 12269
tttttttttattttcgtaatagtttattttgcgtatgcgttttaatcgatggtattgttgcgtaggcgtaatgtttgcgttcggtttatttgcgtaggcgtagtgtttgacgtttagattcggcgtaggcgtattcgtttcgtttttatttttgtttttttagtttaggagttcggttggttttgggtgggtttagatagtcgcggcggttgcggcgtcgatagtgatagtgagtgcgtgagattcggagagaaatggcgatggcgatgtcggatagtggggcgagtcgtttgcgtcggtagttggagttagggggttttgaggcgcggttgtacgtgaagtagttttcgtagtagtcggatggggatcgggatttttaggagtatcggtagcgtatttaggcgttggcggaggagacggcgtagaatttgaagcgtaacgtttattagaattatcggtagtttatagagacggttcgcgagattttttatttggagagcgagatgtattagtttagttatttgttgatcgagtagaaaagtagtttggagagtatttcgtttacgttgttgtttgt

SEQ ID NO: 12270 - DNA, 577 bp, Artificial Sequence
  chemically treated genomic DNA (Homo sapiens) CpG-island No: 12270
acaaacaacaacgtaaacgaaatactctccaaactacttttctactcgatcaacaaataactaaactaatacatctcgctctccaaataaaaaatctcgcgaaccgtctctataaactaccgataattctaataaacgttacgcttcaaattctacgccgtctcctccgccaacgcctaaatacgctaccgatactcctaaaaatcccgatccccatccgactactacgaaaactacttcacgtacaaccgcgcctcaaaaccccctaactccaactaccgacgcaaacgactcgccccactatccgacatcgccatcgccatttctctccgaatctcacgcactcactatcactatcgacgccgcaaccgccgcgactatctaaacccacccaaaaccaaccgaactcctaaactaaaaaaacaaaaataaaaacgaaacgaatacgcctacgccgaatctaaacgtcaaacactacgcctacgcaaataaaccgaacgcaaacattacgcctacgcaacaataccatcgattaaaacgcatacgcaaaataaactattacgaaaataaaaaaaaa

SEQ ID NO: 12271 - DNA, 577 bp, Artificial Sequence
  chemically treated genomic DNA (Homo sapiens) CpG-island No: 12271
gtaggtagtaacgtaagcgggatgttttttaggttgtttttttgttcggttagtaaatggttgagttggtatatttcgttttttaggtaggagatttcgcgggtcgtttttatgaattgtcggtagttttggtagacgttgcgttttaggttttgcgtcgtttttttcgttagcgtttggatgcgttgtcggtgtttttggaggtttcggtttttattcgattgttgcgagagttgttttacgtatagtcgcgttttaaaattttttgattttagttgtcgacgtaggcggttcgttttattgttcgatatcgttatcgttattttttttcgggttttacgtatttattgttattatcggcgtcgtagtcgtcgcggttgtttagatttatttaaggttaatcgagtttttgggttgaggaagtaggaatgggaacgagacgagtacgtttgcgtcgggtttgagcgttagatattgcgtttgcgtaagtgggtcgagcgtagatattgcgtttgcgtagtaatgttatcggttaaagcgtatgcgtaagatgagttattgcggaagtgaggggagg

SEQ ID NO: 12272 - DNA, 577 bp, Artificial Sequence
  chemically treated genomic DNA (Homo sapiens) CpG-island No: 12272
cctcccctcacttccgcaataactcatcttacgcatacgctttaaccgataacattactacgcaaacgcaatatctacgctcgacccacttacgcaaacgcaatatctaacgctcaaacccgacgcaaacgtactcgtctcgttcccattcctacttcctcaacccaaaaactcgattaaccttaaataaatctaaacaaccgcgacgactacgacgccgataataacaataaatacgtaaaacccgaaaaaaaataacgataacgatatcgaacaataaaacgaaccgcctacgtcgacaactaaaatcaaaaaattttaaaacgcgactatacgtaaaacaactctcgcaacaatcgaataaaaaccgaaacctccaaaaacaccgacaacgcatccaaacgctaacgaaaaaaacgacgcaaaacctaaaacgcaacgtctaccaaaactaccgacaattcataaaaacgacccgcgaaatctcctacctaaaaaacgaaatataccaactcaaccatttactaaccgaacaaaaaaacaacctaaaaaacatcccgcttacgttactacctac

SEQ ID NO: 12273 - DNA, 795 bp, Artificial Sequence
  chemically treated genomic DNA (Homo sapiens) CpG-island No: 12273
  unsure (16, 48, 139, 227, 231, 240, 254, 265, 271, 278, 291, 306)
  unsure (389, 444, 470, 566)
tcgttttttttttcgngcgtgggaagtttttttaaaagtggaggggangcgagtgtcgcgttttgttaatttcgattgcgtttgggtttttttcgcgtcgggtttcggagtcgttttttttgattttgcgattacggtncggggattttgcgcgcgttcgggaatgtagagtttttagcgtcgcgtagggttcgtttcgatttcggtcggttttgggtaattcgttntcgncggttagtnttttattttaagantgtggttcggntttttnatttttngcgggggggaaantgtcgggcgattttntatattgatttttttgcgtatttagcgtaaattacgaatttagagttggagttgttcgtagatttcgcgtagttagatttcgncgtttttatttcgtttcgtttcgtttcgttcggggtattaattttcggtcgaggnaggggtcgcgtggcgtcgcggggggncggttcgcgtacgtttttcgtagggaggatttagggatagttagggtttcgggagagttcgcgcgtatcgttcggtttcgcggcgttagttatggncgttcgtgcgtggtttcgttagggatggggcgacgcggttagagtcgtacgcgatcgaaattcgtattttggagtcgtagagcgcgcggttttgttgtttagcggttttttggtaagtgacgtggggaagaaacgtagggcgtaggagagatagttggaaaggtgtgcggtgtagttggtttaggattgagggtttggaggtcgggtgttggaagattttgagcgaggt

SEQ ID NO: 12274 - DNA, 795 bp, Artificial Sequence
  chemically treated genomic DNA (Homo sapiens) CpG-island No: 12274
  unsure (230, 326, 352, 407, 490, 505, 518, 525, 531, 542, 556, 565)
  unsure (569, 657, 748, 780)
acctcgctcaaaatcttccaacacccgacctccaaaccctcaatcctaaaccaactacaccgcacacctttccaactatctctcctacgccctacgtttcttccccacgtcacttaccaaaaaaccgctaaacaacaaaaccgcgcgctctacgactccaaaatacgaatttcgatcgcgtacgactctaaccgcgtcgccccatccctaacgaaaccacgcacgaacgnccataactaacgccgcgaaaccgaacgatacgcgcgaactctcccgaaaccctaactatccctaaatcctccctacgaaaaacgtacgcgaaccgnccccccgcgacgccacgcgacccctncctcgaccgaaaattaataccccgaacgaaacgaaacgaaacgaaataaaaacgncgaaatctaactacgcgaaatctacgaacaactccaactctaaattcgtaatttacgctaaatacgcaaaaaaatcaatatanaaaatcgcccgacantttcccccccgcnaaaaatnaaaaanccgaaccacantcttaaaataaaanactaaccgncganaacgaattacccaaaaccgaccgaaatcgaaacgaaccctacgcgacgctaaaaactctacattcccgaacgcgcgcaaaatccccgnaccgtaatcgcaaaatcaaaaaaaacgactccgaaacccgacgcgaaaaaaacccaaacgcaatcgaaattaacaaaacgcgacactcgcntcccctccacttttaaaaaaacttcccacgcncgaaaaaaaaaacga

SEQ ID NO: 12275 - DNA, 795 bp, Artificial Sequence
  chemically treated genomic DNA (Homo sapiens) CpG-island No: 12275
  unsure (230, 326, 352, 407, 490, 505, 518, 525, 531, 542, 556, 565)
  unsure (569, 657, 748, 780)
gtttcgtttaaggttttttaatattcgatttttagatttttaattttgggttagttatatcgtatatttttttagttgttttttttgcgttttgcgttttttttttacgttatttgttagggagtcgttaaatagtaagatcgcgcgttttgcggttttagagtgcggatttcggtcgcgtgcggttttgatcgcgtcgttttatttttggcggggttacgtacggacgnttatggttggcgtcgcggagtcgggcgatgcgcgcggattttttcggggttttgattgtttttgagttttttttgcggggggcgtgcgcgggtcgntttttcgcggcgttacgcggtttttntttcggtcggggattggtgtttcgggcggggcggggcggggcgggataaaggcgncggggtttggttgcgcggggtttgcgggtagttttaattttgggttcgtagtttgcgttgggtgcgtaggaaggttagtgtgnggggtcgttcgatantttttttttcgtnggaggtngggagntcgagttatanttttggagtggggnattggtcgncggnagcgggttgtttagggtcggtcgaggtcggggcgagttttgcgcggcgttggagattttgtattttcgggcgcgcgtagggttttcgngtcgtggtcgtagagttaggaggggcggtttcggagttcggcgcggggagggtttaggcgtagtcggggttggtagggcgcgatattcgtnttttttttatttttgaaagggttttttacgtncgagaagaggggcgg

SEQ ID NO: 12276 - DNA, 795 bp, Artificial Sequence
  chemically treated genomic DNA (Homo sapiens) CpG-island No: 12276
  unsure (16, 48, 139, 227, 231, 240, 254, 265, 271, 278, 291, 306)
  unsure (389, 444, 470, 566)
ccgcccctcttctcgnacgtaaaaaaccctttcaaaaataaaaaaaanacgaatatcgcgccctaccaaccccgactacgcctaaaccctccccgcgccgaactccgaaaccgcccctcctaactctacgaccacgacncgaaaaccctacgcgcgcccgaaaatacaaaatctccaacgccgcgcaaaactcgccccgacctcgaccgaccctaaacaacccgctnccgncgaccaatnccccactccaaaantataactcganctcccnacctccnacgaaaaaaaaantatcgaacgaccccncacactaaccttcctacgcacccaacgcaaactacgaacccaaaattaaaactacccgcaaaccccgcgcaaccaaaccccgncgcctttatcccgccccgccccgccccgcccgaaacaccaatccccgaccgaaanaaaaaccgcgtaacgccgcgaaaaancgacccgcgcacgccccccgcaaaaaaaactcaaaaacaatcaaaaccccgaaaaaatccgcgcgcatcgcccgactccgcgacgccaaccataancgtccgtacgtaaccccgccaaaaataaaacgacgcgatcaaaaccgcacgcgaccgaaatccgcactctaaaaccgcaaaacgcgcgatcttactatttaacgactccctaacaaataacgtaaaaaaaaaacgcaaaacgcaaaaaaaacaactaaaaaaatatacgatataactaacccaaaattaaaaatctaaaaatcgaatattaaaaaaccttaaacgaaac

SEQ ID NO: 12277 - DNA, 526 bp, Artificial Sequence
  chemically treated genomic DNA (Homo sapiens) CpG-island No: 12277
  unsure (400, 496)
tgcgtcgtttttgtttttattttcgtttttattttcgttttttgcgcggtttcgacgttgttttgttttttttgtttagtttttagtttttttttttacgtattggtagtttttttcggcgttgtagattttttcgttaagtcgcgttcggttttagttgcgttttcgaggtcggtttcgcggattcgcgtcgtagttttttggagcgttcggggtcgcgcggcgtcgttttaggtacggaggcggtaggtttaggcgcgtttcggatattaggcgcgggaggcggtcggtagtaacgcgagttaagaagcgagcgggagggacgttttagtttcgtttggcgtttttttttcgttatatcggtagtttttttcgttttttttttttatcggggcggggncggtcgcggtgtacggattcgtgttaaagatcgcgtcgttagttttcgtttgtaggtggagaacgttaggttttattattttgttgtttatttaancgtaggggttgtatttaggaaaattttgtt

SEQ ID NO: 12278 - DNA, 526 bp, Artificial Sequence
  chemically treated genomic DNA (Homo sapiens) CpG-island No: 12278
  unsure (31, 127)
aacaaaattttcctaaatacaacccctacgnttaaataaacaacaaaataataaaacctaacgttctccacctacaaacgaaaactaacgacgcgatctttaacacgaatccgtacaccgcgaccgnccccgccccgataaaaaaaaaaaacgaaaaaaactaccgatataacgaaaaaaaaacgccaaacgaaactaaaacgtccctcccgctcgcttcttaactcgcgttactaccgaccgcctcccgcgcctaatatccgaaacgcgcctaaacctaccgcctccgtacctaaaacgacgccgcgcgaccccgaacgctccaaaaaactacgacgcgaatccgcgaaaccgacctcgaaaacgcaactaaaaccgaacgcgacttaacgaaaaaatctacaacgccgaaaaaaactaccaatacgtaaaaaaaaaaactaaaaactaaacaaaaaaaacaaaacaacgtcgaaaccgcgcaaaaaacgaaaataaaaacgaaaataaaaacaaaaacgacgca

SEQ ID NO: 12279 - DNA, 526 bp, Artificial Sequence
  chemically treated genomic DNA (Homo sapiens) CpG-island No: 12279
  unsure (31, 127)
gataggatttttttgggtgtagtttttgcgnttgggtgaatagtagagtgataaagtttggcgttttttatttgtaggcggaggttgacggcgcggtttttggtacgagttcgtgtatcgcggtcgntttcgtttcggtgggagagagggacggaggaagttgtcggtataacgggaggagagcgttaggcggagttggggcgtttttttcgttcgttttttgattcgcgttgttgtcggtcgtttttcgcgtttagtgttcgggacgcgtttgaatttgtcgttttcgtgtttggggcggcgtcgcgcggtttcgagcgttttagaaagttgcggcgcgagttcgcggggtcgatttcggagacgtagttggggtcgggcgcggtttggcgggagggtttgtagcgtcgagggaggttgttagtgcgtgaggaagagagttagagattggataggggagatagagtagcgtcggagtcgcgtaggggacgggagtgagagcgggagtgagagtaggaacgacgta

SEQ ID NO: 12280 - DNA, 526 bp, Artificial Sequence
  chemically treated genomic DNA (Homo sapiens) CpG-island No: 12280
  unsure (400, 496)
tacgtcgttcctactctcactcccgctctcactcccgtcccctacgcgactccgacgctactctatctcccctatccaatctctaactctcttcctcacgcactaacaacctccctcgacgctacaaaccctcccgccaaaccgcgcccgaccccaactacgtctccgaaatcgaccccgcgaactcgcgccgcaactttctaaaacgctcgaaaccgcgcgacgccgccccaaacacgaaaacgacaaattcaaacgcgtcccgaacactaaacgcgaaaaacgaccgacaacaacgcgaatcaaaaaacgaacgaaaaaaacgccccaactccgcctaacgctctcctcccgttataccgacaacttcctccgtccctctctcccaccgaaacgaaancgaccgcgatacacgaactcgtaccaaaaaccgcgccgtcaacctccgcctacaaataaaaaacgccaaactttatcactctactattcacccaancgcaaaaactacacccaaaaaaatcctatc

SEQ ID NO: 12281 - DNA, 640 bp, Artificial Sequence
  chemically treated genomic DNA (Homo sapiens) CpG-island No: 12281
  unsure (47, 106, 135, 155, 164, 273, 636)
cgggttgtcgtagtagagaagagtattgattggttgaggtagaaaangtgtttttgtttcggcgttttcggttttggttgggattattcgcggcggtcgggttcgntggggcgtttggagtgagggttttggttnttcgtcggcgaggtgagttngtatcgttngcgcgggtcgacgacggggtcgggcgtagttttaggttcggtgttttagtgtttagtcgcgttgtggagcggcggttgtagcggttttaggtcgggcgaggtagttttnggaaagggtttgcggtgaataggttggggtttcgggaagggatcgttgggtggcgggttttcgcgaaatgtcgcgtttaagtttttcgcgtatggaatggttgggagaggtttgatggtgggcgtcgggatcgtttttagcgaggcgtttagattgcgcggagaggagcggtatcgttttcgtttttatagagttggcgttcgagattaatttaggttgttgaagttttttagggagtttcgacgttaattttaagattcggcgggaaaacggattttcgaatttagttttaggtttcgtttgttttttaggaagggttttagggaattgcgaatttttttttatatcggggtggttgcgtantgat

SEQ ID NO: 12282 - DNA, 640 bp, Artificial Sequence
  chemically treated genomic DNA (Homo sapiens) CpG-island No: 12282
  unsure (5, 368, 477, 486, 506, 535, 594)
atcantacgcaaccaccccgatataaaaaaaaattcgcaattccctaaaacccttcctaaaaaacaaacgaaacctaaaactaaattcgaaaatccgttttcccgccgaatcttaaaattaacgtcgaaactccctaaaaaacttcaacaacctaaattaatctcgaacgccaactctataaaaacgaaaacgataccgctcctctccgcgcaatctaaacgcctcgctaaaaacgatcccgacgcccaccatcaaacctctcccaaccattccatacgcgaaaaacttaaacgcgacatttcgcgaaaacccgccacccaacgatcccttcccgaaaccccaacctattcaccgcaaaccctttccnaaaactacctcgcccgacctaaaaccgctacaaccgccgctccacaacgcgactaaacactaaaacaccgaacctaaaactacgcccgaccccgtcgtcgacccgcgcnaacgatacnaactcacctcgccgacgaanaaccaaaaccctcactccaaacgccccancgaacccgaccgccgcgaataatcccaaccaaaaccgaaaacgccgaaacaaaaacacnttttctacctcaaccaatcaatactcttctctactacgacaacccg

SEQ ID NO: 12283 - DNA, 640 bp, Artificial Sequence
  chemically treated genomic DNA (Homo sapiens) CpG-island No: 12283
  unsure (5, 368, 477, 486, 506, 535, 594)
gttantgcgtagttatttcgatgtaggagagggttcgtaattttttgaagttttttttggaagataggcgaagtttagggttgggttcggggattcgttttttcgtcgaattttgggattagcgtcggggttttttggggaattttaataatttgaattgatttcggacgttaattttgtaggagcggggacggtgtcgttttttttcgcgtagtttaggcgtttcgttgagggcggtttcggcgtttattattagattttttttagttattttatgcgcggagagtttggacgcggtatttcgcggggattcgttatttagcggttttttttcggagttttagtttgtttatcgtaggttttttttnggggttgtttcgttcggtttagggtcgttgtagtcgtcgttttatagcgcgattgaatattggggtatcgaatttggggttgcgttcggtttcgtcgtcggttcgcgtnagcggtgtnggtttatttcgtcggcgggnaattagaatttttattttaggcgttttancgagttcggtcgtcgcggatgattttagttaaaatcgaaagcgtcgaggtaggggtatnttttttgttttagttaattagtgtttttttttgttacggtagttcg

SEQ ID NO: 12284 - DNA, 640 bp, Artificial Sequence
  chemically treated genomic DNA (Homo sapiens) CpG-island No: 12284
  unsure (47, 106, 135, 155, 164, 273, 636)
cgaactaccgtaacaaaaaaaaacactaattaactaaaacaaaaaanatacccctacctcgacgctttcgattttaactaaaatcatccgcgacgaccgaactcgntaaaacgcctaaaataaaaattctaattncccgccgacgaaataaaccnacaccgctnacgcgaaccgacgacgaaaccgaacgcaaccccaaattcgataccccaatattcaatcgcgctataaaacgacgactacaacgaccctaaaccgaacgaaacaaccccnaaaaaaaacctacgataaacaaactaaaactccgaaaaaaaaccgctaaataacgaatccccgcgaaataccgcgtccaaactctccgcgcataaaataactaaaaaaaatctaataataaacgccgaaaccgccctcaacgaaacgcctaaactacgcgaaaaaaaacgacaccgtccccgctcctacaaaattaacgtccgaaatcaattcaaattattaaaattccccaaaaaaccccgacgctaatcccaaaattcgacgaaaaaacgaatccccgaacccaaccctaaacttcgcctatcttccaaaaaaaacttcaaaaaattacgaaccctctcctacatcgaaataactacgcantaac

SEQ ID NO: 12285 - DNA, 887 bp, Artificial Sequence
  chemically treated genomic DNA (Homo sapiens) CpG-island No: 12285
  unsure (305, 466)
cgttttttaagtcgtaagttatttttgcgttcgagagaggcgggttcggataaagtcgggacgttttttggtatataaagttttatttgtttttttcgttcgtacggtttttgtcgtttggcggttttttttttttacggcgggcgcgggcggggagatggtcgtcggcgtttttcggcgtaaacgggcgttgcgcgcgtagtcgtcgttacgttgatttttcgttttagttggttgttgttcggagttttagtagcgggcgaaggcggaggtttagaagggtaggagatcgtcgcgataggagnttcgagggttcgtatggttttttttcgtcggcgggtgttgtgcgttacggagttcgttaaaggcgtttcgggttcggagcggttttgagtcgcgtcgtttgttgagatcgatcgtttgttgagtcgtttcgtggagttgcgggtaggaattcgaggagtanggaggtggcggcggcggtagtgtttgttttttttagagggcgatgtggtcggtcggcgcgggtattaagttgttttgttttcgagattttgcgtttcggagggcggttttttttgggaattttacggttttgtttttttatatcgtgttcgtcggtcgtagcgttcgggtttttattagcgttaattttgaaggtacgtttttcgttcgggtttgttcgttcgtttttttgttcgttagcgttgcgggagttggagagtgtgtgttcgttttatagttcggtgcgttttgcgttttttttttttagttaaagtcgtggtcgttttgagcgcgtgggaatttaatttgaattatttttttttttttttcgttggtcggttttgtttgtatatttttattaggatatttattttttatttcgg

SEQ ID NO: 12286 - DNA, 887 bp, Artificial Sequence
  chemically treated genomic DNA (Homo sapiens) CpG-island No: 12286
  unsure (422, 583)
ccgaaataaaaaataaatatcctaataaaaatatacaaacaaaaccgaccaacgaaaaaaaaaaaaaaataattcaaattaaattcccacgcgctcaaaacgaccacgactttaactaaaaaaaaaaaacgcaaaacgcaccgaactataaaacgaacacacactctccaactcccgcaacgctaacgaacaaaaaaacgaacgaacaaacccgaacgaaaaacgtaccttcaaaattaacgctaataaaaacccgaacgctacgaccgacgaacacgatataaaaaaacaaaaccgtaaaattcccaaaaaaaaccgccctccgaaacgcaaaatctcgaaaacaaaacaacttaatacccgcgccgaccgaccacatcgccctctaaaaaaaacaaacactaccgccgccgccacctccntactcctcgaattcctacccgcaactccacgaaacgactcaacaaacgatcgatctcaacaaacgacgcgactcaaaaccgctccgaacccgaaacgcctttaacgaactccgtaacgcacaacacccgccgacgaaaaaaaaccatacgaaccctcgaanctcctatcgcgacgatctcctacccttctaaacctccgccttcgcccgctactaaaactccgaacaacaaccaactaaaacgaaaaatcaacgtaacgacgactacgcgcgcaacgcccgtttacgccgaaaaacgccgacgaccatctccccgcccgcgcccgccgtaaaaaaaaaaaaccgccaaacgacaaaaaccgtacgaacgaaaaaaacaaataaaactttatataccaaaaaacgtcccgactttatccgaacccgcctctctcgaacgcaaaaataacttacgacttaaaaaacg

SEQ ID NO: 12287 - DNA, 887 bp, Artificial Sequence
  chemically treated genomic DNA (Homo sapiens) CpG-island No: 12287
  unsure (422, 583)
tcggggtggagaatgggtgttttaatagaagtgtgtaggtaaaatcggttagcgaggggagaaaaaaagtgatttaaattaaatttttacgcgtttagggcggttacggttttagttggaggaagggagcgtagggcgtatcgggttgtggggcggatatatattttttagttttcgtagcgttgacggatagaaggacggacgggtaaattcgagcgagggacgtatttttagggttggcgttgatgaagattcggacgttgcggtcggcgggtacgatgtgagagggtagggtcgtgaggtttttagagaaagtcgtttttcggagcgtagagtttcggggatagggtagtttggtgttcgcgtcggtcggttatatcgttttttgggaggaatagatattgtcgtcgtcgttatttttntgtttttcgggtttttgttcgtagttttacggaacggtttagtaggcggtcgattttagtaggcggcgcggtttagagtcgtttcgagttcgaagcgtttttggcgagtttcgtggcgtatagtattcgtcggcgaggagaagttatacggattttcgggntttttgtcgcggcggttttttgtttttttgggttttcgttttcgttcgttgttagggtttcgagtagtagttagttggagcgggaggttagcgtggcggcggttacgcgcgtagcgttcgtttgcgtcgggaagcgtcggcggttattttttcgttcgcgttcgtcgtgggaggagggggtcgttaggcggtagggatcgtgcgagcgaggagagtagatgaaattttatgtattagaaggcgtttcgattttattcgagttcgtttttttcgggcgtagaaataatttgcggtttagaggacg

SEQ ID NO: 12288 - DNA, 887 bp, Artificial Sequence
  chemically treated genomic DNA (Homo sapiens) CpG-island No: 12288
  unsure (305, 466)
cgtcctctaaaccgcaaattatttctacgcccgaaaaaaacgaactcgaataaaatcgaaacgccttctaatacataaaatttcatctactctcctcgctcgcacgatccctaccgcctaacgaccccctcctcccacgacgaacgcgaacgaaaaaataaccgccgacgcttcccgacgcaaacgaacgctacgcgcgtaaccgccgccacgctaacctcccgctccaactaactactactcgaaaccctaacaacgaacgaaaacgaaaacccaaaaaaacaaaaaaccgccgcgacaaaaancccgaaaatccgtataacttctcctcgccgacgaatactatacgccacgaaactcgccaaaaacgcttcgaactcgaaacgactctaaaccgcgccgcctactaaaatcgaccgcctactaaaccgttccgtaaaactacgaacaaaaacccgaaaaacanaaaaataacgacgacgacaatatctattcctcccaaaaaacgatataaccgaccgacgcgaacaccaaactaccctatccccgaaactctacgctccgaaaaacgactttctctaaaaacctcacgaccctaccctctcacatcgtacccgccgaccgcaacgtccgaatcttcatcaacgccaaccctaaaaatacgtccctcgctcgaatttacccgtccgtccttctatccgtcaacgctacgaaaactaaaaaatatatatccgccccacaacccgatacgccctacgctcccttcctccaactaaaaccgtaaccgccctaaacgcgtaaaaatttaatttaaatcactttttttctcccctcgctaaccgattttacctacacacttctattaaaacacccattctccaccccga

SEQ ID NO: 12289 - DNA, 564 bp, Artificial Sequence
  chemically treated genomic DNA (Homo sapiens) CpG-island No: 12289
  unsure (239, 303, 316, 400, 523, 529)
tatttattcgcgtttcgggtattcgtttttggggcgttttcgtttgggacgtttttcgcgacgtagtggtcgcgcggacgggtagcgatagcgcgtatagcgttagggatagcgcgtaaagtagcgcgggcgcggggcggtgcggagttatggtggcgatagcggtaggggatttagtcggtagtcgcggtttcgggtcgtcgattttaagtagtcgttcgtttatttcgtttaagttnggggatcgttttttagggagggcgcggggcggggatttgtttcggattttggagatatttgggntttttattcggantcgattcgatagggcgcggtagtttttgtattttagtttcggggcggagatttagtattaggtttgatatacggcgggcgttangttgtgtgtatattaaatgggcgtaagtacgagcggcggcgagtttagttgagttttttgcgacgtacgcgagttttttcgttttttcgtatttaatatttttagtaaaaaaataacgggaanttaatnattatagaaagtttagtatcgagttattagtatat

SEQ ID NO: 12290 - DNA, 564 bp, Artificial Sequence
  chemically treated genomic DNA (Homo sapiens) CpG-island No: 12290
  unsure (36, 42, 165, 249, 262, 326)
atatactaataactcgatactaaactttctataatnattaanttcccgttatttttttactaaaaatattaaatacgaaaaaacgaaaaaactcgcgtacgtcgcaaaaaactcaactaaactcgccgccgctcgtacttacgcccatttaatatacacacaacntaacgcccgccgtatatcaaacctaatactaaatctccgccccgaaactaaaatacaaaaactaccgcgccctatcgaatcgantccgaataaaaancccaaatatctccaaaatccgaaacaaatccccgccccgcgccctccctaaaaaacgatccccnaacttaaacgaaataaacgaacgactacttaaaatcgacgacccgaaaccgcgactaccgactaaatcccctaccgctatcgccaccataactccgcaccgccccgcgcccgcgctactttacgcgctatccctaacgctatacgcgctatcgctacccgtccgcgcgaccactacgtcgcgaaaaacgtcccaaacgaaaacgccccaaaaacgaatacccgaaacgcgaataaata

SEQ ID NO: 12291 - DNA, 564 bp, Artificial Sequence
  chemically treated genomic DNA (Homo sapiens) CpG-island No: 12291
  unsure (36, 42, 165, 249, 262, 326)
atgtgttgatggttcggtgttaagttttttataatngttagnttttcgttatttttttgttggaggtgttaggtgcggagaggcgagggggttcgcgtgcgtcgtaggaggtttagttgggttcgtcgtcgttcgtgtttgcgtttatttagtgtgtatatagtntagcgttcgtcgtatgttaggtttggtgttgggttttcgtttcggagttggggtgtaggggttgtcgcgttttgtcgggtcganttcgggtgggaantttagatgtttttaagattcgagatagattttcgtttcgcgttttttttggggggcggtttttnggtttgggcgggatgggcgggcggttatttaaggtcggcgattcgaggtcgcggttgtcgattgggttttttgtcgttgtcgttattatggtttcgtatcgtttcgcgttcgcgttgttttgcgcgttgtttttggcgttgtgcgcgttgtcgttgttcgttcgcgcggttattgcgtcgcggggggcgttttaggcgggggcgttttaggggcgggtgttcgaggcgcgggtgagtg

SEQ ID NO: 12292 - DNA, 564 bp, Artificial Sequence
  chemically treated genomic DNA (Homo sapiens) CpG-island No: 12292
  unsure (239, 303, 316, 400, 523, 529)
cactcacccgcgcctcgaacacccgcccctaaaacgcccccgcctaaaacgccccccgcgacgcaataaccgcgcgaacgaacaacgacaacgcgcacaacgccaaaaacaacgcgcaaaacaacgcgaacgcgaaacgatacgaaaccataataacgacaacgacaaaaaacccaatcgacaaccgcgacctcgaatcgccgaccttaaataaccgcccgcccatcccgcccaaaccnaaaaaccgccccccaaaaaaaacgcgaaacgaaaatctatctcgaatcttaaaaacatctaaanttcccacccgaantcgacccgacaaaacgcgacaacccctacaccccaactccgaaacgaaaacccaacaccaaacctaacatacgacgaacgctanactatatacacactaaataaacgcaaacacgaacgacgacgaacccaactaaacctcctacgacgcacgcgaaccccctcgcctctccgcacctaacacctccaacaaaaaaataacgaaaanctaacnattataaaaaacttaacaccgaaccatcaacacat

SEQ ID NO: 12293 - DNA, 1398 bp, Artificial Sequence
  chemically treated genomic DNA (Homo sapiens) CpG-island No: 12293
taggtcgcgtttagtcgagggggttttcgggcgcggtgcgtattgttcgtttttttattgttttttttcgcgttttcgttttcgcggggtcgttgggcgttcggggaggcgagggtgtcgaggtcggaaaatgagcgttgttcgaagggtggttcggagttgtaggtaacgcggtttagagtttaggtcggagcgggtttcgtatatcgtttttttttcgtagcgattcgcgggttgcgtttagggattgcgtcgggcgttcgggttgtagggacgcgggcgcgggggaggcgcggttagttttgttttgggggacggtcgcgtttttcgttggttttgtagttacgtttcggcggttgtttttgggagcggcgggaggcggtttcggtgagttaggtcggcgcggtagatgtttgggaagatggagaagtttttgtagatcgcgttttattttttggttatcgttttgggttcggtagaggcgtcggcgggggaaaggttaggggtagttcggttcgcgttttcggtttagtttcgttagttcgttcggtattatatcggttacgagattttcgtcgattttaaagtcgagaatatgtagtatttttggaataagaaggttacggtcgcggtggtcgagattttttttttgggttggatcgacgagtaggttttgttgatttagggtaaggaggaatatttggaggcgttgcgcgaaggttggacgcgtcgggttttgcggtcgttttcgggtttttatattcgttgtttgggtgagtgcgatcgtcgcgcgttcgtttcgtttttttttatcggatcgcgttcgtgtcgtgcggtcgcgggtgtttcgttttgttttagttcgtcgcgggtatcgtcgaggtttttttgggtgttcgcgtttttgtcgggggaggagtcgggggttttttgcgagcgtgggattggggaattttttggtatcgaaaggagggagtcgttttattttcggtgcgtcgttttcgtttgttcgcgggagttttttcggtggcgggcggtgtttgaggtcggttaggtgggcgtcgcggttcggcgggcggttcggagggcgcggcgttcggggcgcgtgagtgtttttttttcggtattgtttcgcggttggagtgcgcgggtcgggcggaggtgggcggggaggatttcggggttcgggtcgcgcggggtttttagttggagcggcggtttaggtgcgttcgggacgtttttttttgggcggcgattgcgggggacgcgtcgggaagttagggttgaggttgagtgttgcgcgtacgtattttttaacgaggtaaggttgtagagttcgttttaaatgttttatttgtagtatattttttaagtcgttttgtgtgtttgagggaagga

SEQ ID NO: 12294 - DNA, 1398 bp, Artificial Sequence
  chemically treated genomic DNA (Homo sapiens) CpG-island No: 12294
tccttccctcaaacacacaaaacgacttaaaaaatatactacaaataaaacatttaaaacgaactctacaaccttacctcgttaaaaaatacgtacgcgcaacactcaacctcaaccctaacttcccgacgcgtcccccgcaatcgccgcccaaaaaaaaacgtcccgaacgcacctaaaccgccgctccaactaaaaaccccgcgcgacccgaaccccgaaatcctccccgcccacctccgcccgacccgcgcactccaaccgcgaaacaataccgaaaaaaaaacactcacgcgccccgaacgccgcgccctccgaaccgcccgccgaaccgcgacgcccacctaaccgacctcaaacaccgcccgccaccgaaaaaactcccgcgaacaaacgaaaacgacgcaccgaaaataaaacgactccctcctttcgataccaaaaaattccccaatcccacgctcgcaaaaaacccccgactcctcccccgacaaaaacgcgaacacccaaaaaaacctcgacgatacccgcgacgaactaaaacaaaacgaaacacccgcgaccgcacgacacgaacgcgatccgataaaaaaaaacgaaacgaacgcgcgacgatcgcactcacccaaacaacgaatataaaaacccgaaaacgaccgcaaaacccgacgcgtccaaccttcgcgcaacgcctccaaatattcctccttaccctaaatcaacaaaacctactcgtcgatccaacccaaaaaaaaaatctcgaccaccgcgaccgtaaccttcttattccaaaaatactacatattctcgactttaaaatcgacgaaaatctcgtaaccgatataataccgaacgaactaacgaaactaaaccgaaaacgcgaaccgaactacccctaacctttcccccgccgacgcctctaccgaacccaaaacgataaccaaaaaataaaacgcgatctacaaaaacttctccatcttcccaaacatctaccgcgccgacctaactcaccgaaaccgcctcccgccgctcccaaaaacaaccgccgaaacgtaactacaaaaccaacgaaaaacgcgaccgtcccccaaaacaaaactaaccgcgcctcccccgcgcccgcgtccctacaacccgaacgcccgacgcaatccctaaacgcaacccgcgaatcgctacgaaaaaaaaacgatatacgaaacccgctccgacctaaactctaaaccgcgttacctacaactccgaaccacccttcgaacaacgctcattttccgacctcgacaccctcgcctccccgaacgcccaacgaccccgcgaaaacgaaaacgcgaaaaaaaacaataaaaaaacgaacaatacgcaccgcgcccgaaaaccccctcgactaaacgcgaccta

SEQ ID NO: 12295 - DNA, 1398 bp, Artificial Sequence
  chemically treated genomic DNA (Homo sapiens) CpG-island No: 12295
ttttttttttagatatataaaacgatttgagagatgtgttgtaggtgagatatttaagacgaattttgtagttttgtttcgttgagaaatgcgtgcgcgtaatatttagttttaattttagtttttcggcgcgtttttcgtagtcgtcgtttagggaagggcgtttcgggcgtatttgagtcgtcgttttagttgggagtttcgcgcgattcgagtttcggaatttttttcgtttattttcgttcggttcgcgtattttagtcgcggagtagtgtcgggagggggatatttacgcgtttcgagcgtcgcgtttttcgagtcgttcgtcgagtcgcggcgtttatttggtcggttttaggtatcgttcgttatcggggaggttttcgcgggtaggcgggggcggcgtatcgggaatgggacggtttttttttttcggtgttaggaagttttttaattttacgttcgtagagggttttcggtttttttttcggtagggacgcgggtatttaggggagtttcggcggtgttcgcggcgggttggggtagggcggggtattcgcgatcgtacggtacggacgcgattcggtgggaagggacgggacgggcgcgcggcggtcgtatttatttaggtagcggatgtggaagttcgagggcggtcgtagggttcggcgcgtttagttttcgcgtagcgtttttagatgtttttttttgttttggattagtaggatttgttcgtcgatttagtttaggaagaaggtttcggttatcgcggtcgtgatttttttgttttagaagtgttgtatgttttcggttttgaagtcggcgaagatttcgtagtcgatgtggtgtcgggcgagttggcggggttgggtcgggggcgcgggtcgggttgtttttggtttttttttcgtcggcgtttttgtcgggtttaggacgatggttagggagtgaggcgcgatttgtagaaatttttttatttttttaggtatttgtcgcgtcgatttggtttatcgaggtcgtttttcgtcgtttttaggaatagtcgtcgggacgtggttgtaagattagcggggagcgcgatcgttttttagggtagggttggtcgcgtttttttcgcgttcgcgtttttgtagttcgggcgttcggcgtagtttttgggcgtagttcgcgggtcgttgcggggaagggacggtgtgcggggttcgtttcggtttgagttttggatcgcgttatttgtagtttcgggttatttttcgggtagcgtttatttttcggtttcggtattttcgttttttcgggcgtttagcggtttcgcgggggcggagacgcgggaggaggtagtgagggggcgggtagtgcgtatcgcgttcgggaattttttcggttggacgcggtttg

SEQ ID NO: 12296 - DNA, 1398 bp, Artificial Sequence
  chemically treated genomic DNA (Homo sapiens) CpG-island No: 12296
caaaccgcgtccaaccgaaaaaattcccgaacgcgatacgcactacccgccccctcactacctcctcccgcgtctccgcccccgcgaaaccgctaaacgcccgaaaaaacgaaaataccgaaaccgaaaaataaacgctacccgaaaaataacccgaaactacaaataacgcgatccaaaactcaaaccgaaacgaaccccgcacaccgtcccttccccgcaacgacccgcgaactacgcccaaaaactacgccgaacgcccgaactacaaaaacgcgaacgcgaaaaaaacgcgaccaaccctaccctaaaaaacgatcgcgctccccgctaatcttacaaccacgtcccgacgactattcctaaaaacgacgaaaaacgacctcgataaaccaaatcgacgcgacaaatacctaaaaaaataaaaaaatttctacaaatcgcgcctcactccctaaccatcgtcctaaacccgacaaaaacgccgacgaaaaaaaaaccaaaaacaacccgacccgcgcccccgacccaaccccgccaactcgcccgacaccacatcgactacgaaatcttcgccgacttcaaaaccgaaaacatacaacacttctaaaacaaaaaaatcacgaccgcgataaccgaaaccttcttcctaaactaaatcgacgaacaaatcctactaatccaaaacaaaaaaaaacatctaaaaacgctacgcgaaaactaaacgcgccgaaccctacgaccgccctcgaacttccacatccgctacctaaataaatacgaccgccgcgcgcccgtcccgtcccttcccaccgaatcgcgtccgtaccgtacgatcgcgaataccccgccctaccccaacccgccgcgaacaccgccgaaactcccctaaatacccgcgtccctaccgaaaaaaaaaccgaaaaccctctacgaacgtaaaattaaaaaacttcctaacaccgaaaaaaaaaaaccgtcccattcccgatacgccgcccccgcctacccgcgaaaacctccccgataacgaacgatacctaaaaccgaccaaataaacgccgcgactcgacgaacgactcgaaaaacgcgacgctcgaaacgcgtaaatatccccctcccgacactactccgcgactaaaatacgcgaaccgaacgaaaataaacgaaaaaaattccgaaactcgaatcgcgcgaaactcccaactaaaacgacgactcaaatacgcccgaaacgcccttccctaaacgacgactacgaaaaacgcgccgaaaaactaaaattaaaactaaatattacgcgcacgcatttctcaacgaaacaaaactacaaaattcgtcttaaatatctcacctacaacacatctctcaaatcgttttatatatctaaaaaaaaaa

SEQ ID NO: 12297 - DNA, 680 bp, Artificial Sequence
  chemically treated genomic DNA (Homo sapiens) CpG-island No: 12297
ggtcgcggcgtatcgagtacgtttcgcggtttcggttcgggggtagaaacgcggttattaattaatttgatgttatgtagtttcgcgaagtttggggcgcgaaggtcgcggggaaacgtttgtgtaggcggtagtttttttcgttgcgggattttatgcggttcgaggttcggttcgagaaattcgagttaggttaggttcgtcgtaaggttgtgtttcgggttttttttatggtggggagggcgatttgtcgtttcgattttcggggttttatcgtcggggcgtagcgcgtttttttattcgtttacggcgggtacgattcgggcggattttgcgtatatttttttagttttttttcgtcggcgtttatatcgttagcggcgggttcggttttttttacgtttttttatatttttacggcgaaggtttcgattttatatacgttttataatgtattatattttatttgtaattcgttcggtttatagtttttagatttttggggggaaaggtacgttaggaggtttttcggtcgggaggaggcggggagggggcgggcggggtgggggcgtcgagatttgtagcgtgaaggtaatgggagcgtagataatggttcgatttagcgtaggagtgtttggttaattgggagttacggtataaaagatttaaataaatgaggt

SEQ ID NO: 12298 - DNA, 680 bp, Artificial Sequence
  chemically treated genomic DNA (Homo sapiens) CpG-island No: 12298
acctcatttatttaaatcttttataccgtaactcccaattaaccaaacactcctacgctaaatcgaaccattatctacgctcccattaccttcacgctacaaatctcgacgcccccaccccgcccgccccctccccgcctcctcccgaccgaaaaacctcctaacgtacctttccccccaaaaatctaaaaactataaaccgaacgaattacaaataaaatataatacattataaaacgtatataaaatcgaaaccttcgccgtaaaaatataaaaaaacgtaaaaaaaaccgaacccgccgctaacgatataaacgccgacgaaaaaaaactaaaaaaatatacgcaaaatccgcccgaatcgtacccgccgtaaacgaataaaaaaacgcgctacgccccgacgataaaaccccgaaaatcgaaacgacaaatcgccctccccaccataaaaaaaacccgaaacacaaccttacgacgaacctaacctaactcgaatttctcgaaccgaacctcgaaccgcataaaatcccgcaacgaaaaaaactaccgcctacacaaacgtttccccgcgaccttcgcgccccaaacttcgcgaaactacataacatcaaattaattaataaccgcgtttctacccccgaaccgaaaccgcgaaacgtactcgatacgccgcgacc

SEQ ID NO: 12299 - DNA, 680 bp, Artificial Sequence
  chemically treated genomic DNA (Homo sapiens) CpG-island No: 12299
gttttatttgtttgggttttttgtgtcgtggtttttagttggttaagtatttttgcgttgaatcgggttattgtttgcgtttttattgtttttacgttgtaagtttcggcgtttttatttcgttcgtttttttttcgttttttttcggtcggggagttttttaacgtgtttttttttttaggaatttggaagttataagtcgggcggattgtaaatgaagtgtaatgtattgtgggacgtgtgtaaaatcggagttttcgtcgtgggggtgtgggggggcgtggggagggtcggattcgtcgttggcggtgtagacgtcgacgaggaggggttgggaaaatgtgcgtagagttcgttcgggtcgtgttcgtcgtagacggatgaaggagcgcgttgcgtttcggcgatgaggtttcgaggatcggggcggtaggtcgttttttttattatgaagaagattcggagtataattttgcggcgagtttggtttagttcggatttttcggatcgggtttcggatcgtatgaggtttcgtagcgagaaggattatcgtttgtataagcgttttttcgcggttttcgcgttttaggtttcgcggggttatatgatattaggttggttggtgatcgcgtttttgttttcgggtcggggtcgcgggacgtgttcggtacgtcgcggtt

SEQ ID NO: 12300 - DNA, 680 bp, Artificial Sequence
  chemically treated genomic DNA (Homo sapiens) CpG-island No: 12300
aaccgcgacgtaccgaacacgtcccgcgaccccgacccgaaaacaaaaacgcgatcaccaaccaacctaatatcatataaccccgcgaaacctaaaacgcgaaaaccgcgaaaaaacgcttatacaaacgataatccttctcgctacgaaacctcatacgatccgaaacccgatccgaaaaatccgaactaaaccaaactcgccgcaaaattatactccgaatcttcttcataataaaaaaaacgacctaccgccccgatcctcgaaacctcatcgccgaaacgcaacgcgctccttcatccgtctacgacgaacacgacccgaacgaactctacgcacattttcccaacccctcctcgtcgacgtctacaccgccaacgacgaatccgaccctccccacgcccccccacacccccacgacgaaaactccgattttacacacgtcccacaatacattacacttcatttacaatccgcccgacttataacttccaaattcctaaaaaaaaaaacacgttaaaaaactccccgaccgaaaaaaaacgaaaaaaaaacgaacgaaataaaaacgccgaaacttacaacgtaaaaacaataaaaacgcaaacaataacccgattcaacgcaaaaatacttaaccaactaaaaaccacgacacaaaaaacccaaacaaataaaac

SEQ ID NO: 12301 - DNA, 611 bp, Artificial Sequence
  chemically treated genomic DNA (Homo sapiens) CpG-island No: 12301
tcgggatcgggcgtgcgggaggtcggaggggcggcggtagatttttcgcgtcgggtagtttagcgcgaggcgtggggatgatagtgttcgagtcgtgttttcgcgggtttattagtcgtacggttcgtagttttcggcgttggttggttttgttttcgttgtagttttcgggagatagtttttattatagaggttcgagcggggggcgcgtgtgtataggattcgagtaggttttgtagatagtagttgcggcgggcgggtttttgcggaatttaggaagagttcgcgtcgttttcgcgattgtagcgtttcgttaattttttttttgtcgaggtttcgggcgttgtgcgtgcgcgcgggtggatggttgggtgggtgcgtcgatacgtatgtgttttttatatatgtatgtttttatttattggtcgaggcggcgtcggagttatggttgttaaggacgtcgagtttgcgatcgattttcgcgcggcggtagcgttgtttcggcgcgagcgcgcggaacggttattgaagggtaggaagtaggatagtcgtttagttttatgttaattattaggttgttttaagttagaacgcggtttttattaggtttt

SEQ ID NO: 12302 - DNA, 611 bp, Artificial Sequence
  chemically treated genomic DNA (Homo sapiens) CpG-island No: 12302
aaaacctaataaaaaccgcgttctaacttaaaacaacctaataattaacataaaactaaacgactatcctacttcctacccttcaataaccgttccgcgcgctcgcgccgaaacaacgctaccgccgcgcgaaaatcgatcgcaaactcgacgtccttaacaaccataactccgacgccgcctcgaccaataaataaaaacatacatatataaaaaacacatacgtatcgacgcacccacccaaccatccacccgcgcgcacgcacaacgcccgaaacctcgacaaaaaaaaaattaacgaaacgctacaatcgcgaaaacgacgcgaactcttcctaaattccgcaaaaacccgcccgccgcaactactatctacaaaacctactcgaatcctatacacacgcgccccccgctcgaacctctataataaaaactatctcccgaaaactacaacgaaaacaaaaccaaccaacgccgaaaactacgaaccgtacgactaataaacccgcgaaaacacgactcgaacactatcatccccacgcctcgcgctaaactacccgacgcgaaaaatctaccgccgcccctccgacctcccgcacgcccgatcccga

SEQ ID NO: 12303 - DNA, 611 bp, Artificial Sequence
  chemically treated genomic DNA (Homo sapiens) CpG-island No: 12303
gaagtttgatgggaatcgcgttttaatttaaggtagtttggtgattagtatgagattgggcggttgttttgttttttgttttttaatagtcgtttcgcgcgttcgcgtcggagtagcgttgtcgtcgcgcgggggtcgatcgtaggttcggcgtttttggtagttatggtttcggcgtcgtttcggttagtaagtaggagtatgtatgtgtagggggtatatgcgtgtcggcgtatttatttagttatttattcgcgcgtacgtatagcgttcggagtttcggtaaggggaagattgacgaggcgttgtagtcgcggggacgacgcgggttttttttggatttcgtaggagttcgttcgtcgtagttgttgtttgtagagtttgttcggattttgtgtatacgcgtttttcgttcgagtttttgtgatgaagattgtttttcggggattgtagcggaggtagagttagttagcgtcggggattgcgggtcgtgcggttgataggttcgcggggatacgattcggatattgttatttttacgtttcgcgttgagttgttcggcgcggagggtttgtcgtcgttttttcggtttttcgtacgttcgatttcgg

SEQ ID NO: 12304 - DNA, 611 bp, Artificial Sequence
  chemically treated genomic DNA (Homo sapiens) CpG-island No: 12304
ccgaaatcgaacgtacgaaaaaccgaaaaaacgacgacaaaccctccgcgccgaacaactcaacgcgaaacgtaaaaataacaatatccgaatcgtatccccgcgaacctatcaaccgcacgacccgcaatccccgacgctaactaactctacctccgctacaatccccgaaaaacaatcttcatcacaaaaactcgaacgaaaaacgcgtatacacaaaatccgaacaaactctacaaacaacaactacgacgaacgaactcctacgaaatccaaaaaaaacccgcgtcgtccccgcgactacaacgcctcgtcaatcttccccttaccgaaactccgaacgctatacgtacgcgcgaataaataactaaataaatacgccgacacgcatataccccctacacatacatactcctacttactaaccgaaacgacgccgaaaccataactaccaaaaacgccgaacctacgatcgacccccgcgcgacgacaacgctactccgacgcgaacgcgcgaaacgactattaaaaaacaaaaaacaaaacaaccgcccaatctcatactaatcaccaaactaccttaaattaaaacgcgattcccatcaaacttc

SEQ ID NO: 12305 - DNA, 791 bp, Artificial Sequence
  chemically treated genomic DNA (Homo sapiens) CpG-island No: 12305
cgaggtcgaggagagggtagcgcgttcgtggtggggtcgtttagtattgcgagtcgcgttgaattttattttcggtttgtagggtgcggttttttggttgtttcgtggattcggttagttcgggacgaggacgtaggatttcggtagggacgtcggagttagtttttcgttatttttatacgtttcgcggtttagtggtcgcgcgtacgttatttgcggagttcggttttgttcgttcgtttgggttgtcgtttttcgttatggatgttttcgttttcgcggtcgtttttgattcgcgtacgtttttcgggtaggaagtagaacgattcgcgattattttcggcgtcgagggtaatggggggcgcgtcggggtcgcggttttcggcgggcgcgcgtcggttttattggttttcggggtcgcgtaggggttacgttttcgttttcggtttcgttgtttagtagggcgttggttggttttttcgttcggcgggaatttcgcgattaatcgattttttggatgtcggtcgcgttgtggtttttttatataagaagttaaggagtcggaaagtcgggtgtttgaggtagtagtttgggaatttcggttcggcgggtcgtttttatttatacggacggggcgtggtttttgttagatgcgggcggggtttcgagggtcgtggcgggcgggattcgggtttcggtcgggttggtttggttttcgtaggtgtttttcgttagttacgagtagtttcgggagggtggattcggaggcgcggggattggtgagggtttat

SEQ ID NO: 12306 - DNA, 791 bp, Artificial Sequence
  chemically treated genomic DNA (Homo sapiens) CpG-island No: 12306
ataaaccctcaccaatccccgcgcctccgaatccaccctcccgaaactactcgtaactaacgaaaaacacctacgaaaaccaaaccaacccgaccgaaacccgaatcccgcccgccacgaccctcgaaaccccgcccgcatctaacaaaaaccacgccccgtccgtataaataaaaacgacccgccgaaccgaaattcccaaactactacctcaaacacccgactttccgactccttaacttcttatataaaaaaaccacaacgcgaccgacatccaaaaaatcgattaatcgcgaaattcccgccgaacgaaaaaaccaaccaacgccctactaaacaacgaaaccgaaaacgaaaacgtaacccctacgcgaccccgaaaaccaataaaaccgacgcgcgcccgccgaaaaccgcgaccccgacgcgccccccattaccctcgacgccgaaaataatcgcgaatcgttctacttcctacccgaaaaacgtacgcgaatcaaaaacgaccgcgaaaacgaaaacatccataacgaaaaacgacaacccaaacgaacgaacaaaaccgaactccgcaaataacgtacgcgcgaccactaaaccgcgaaacgtataaaaataacgaaaaactaactccgacgtccctaccgaaatcctacgtcctcgtcccgaactaaccgaatccacgaaacaaccaaaaaaccgcaccctacaaaccgaaaataaaattcaacgcgactcgcaatactaaacgaccccaccacgaacgcgctaccctctcctcgacctcg

SEQ ID NO: 12307 - DNA, 791 bp, Artificial Sequence
  chemically treated genomic DNA (Homo sapiens) CpG-island No: 12307
gtgggtttttattagttttcgcgttttcgaatttattttttcggggttgttcgtggttagcggggggtatttgcggggattaagttagttcggtcgaggttcgggtttcgttcgttacggttttcggggtttcgttcgtatttggtagaagttacgtttcgttcgtgtgggtggggacggttcgtcggatcgaaatttttagattgttgttttaggtattcggtttttcgattttttggttttttatgtgaggaaattatagcgcggtcggtatttagagagtcggttagtcgcgaagttttcgtcggacgaagggattagttagcgttttgttagatagcgaggtcggaagcggaggcgtggtttttgcgcggtttcggaaattagtgaggtcggcgcgcgttcgtcggaagtcgcgatttcgacgcgttttttattgttttcggcgtcggaagtggtcgcgggtcgttttgttttttgttcgaggggcgtgcgcgggttaggggcggtcgcggaggcggaagtatttatggcggagggcggtagtttagacgggcgggtagggtcgggtttcgtaggtaacgtgcgcgcggttattgggtcgcggggcgtgtggggatggcgaagggttggtttcggcgtttttgtcgaggttttgcgttttcgtttcgggttggtcgggtttacggggtagttagggagtcgtattttgtaggtcgggggtggggtttagcgcggttcgtagtgttgggcgattttattacggacgcgttgtttttttttcggtttcg

SEQ ID NO: 12308 - DNA, 791 bp, Artificial Sequence
  chemically treated genomic DNA (Homo sapiens) CpG-island No: 12308
cgaaaccgaaaaaaaaacaacgcgtccgtaataaaatcgcccaacactacgaaccgcgctaaaccccacccccgacctacaaaatacgactccctaactaccccgtaaacccgaccaacccgaaacgaaaacgcaaaacctcgacaaaaacgccgaaaccaacccttcgccatccccacacgccccgcgacccaataaccgcgcgcacgttacctacgaaacccgaccctacccgcccgtctaaactaccgccctccgccataaatacttccgcctccgcgaccgcccctaacccgcgcacgcccctcgaacaaaaaacaaaacgacccgcgaccacttccgacgccgaaaacaataaaaaacgcgtcgaaatcgcgacttccgacgaacgcgcgccgacctcactaatttccgaaaccgcgcaaaaaccacgcctccgcttccgacctcgctatctaacaaaacgctaactaatcccttcgtccgacgaaaacttcgcgactaaccgactctctaaataccgaccgcgctataatttcctcacataaaaaaccaaaaaatcgaaaaaccgaatacctaaaacaacaatctaaaaatttcgatccgacgaaccgtccccacccacacgaacgaaacgtaacttctaccaaatacgaacgaaaccccgaaaaccgtaacgaacgaaacccgaacctcgaccgaactaacttaatccccgcaaataccccccgctaaccacgaacaaccccgaaaaaataaattcgaaaacgcgaaaactaataaaaacccac

SEQ ID NO: 12309 - DNA, 902 bp, Artificial Sequence
  chemically treated genomic DNA (Homo sapiens) CpG-island No: 12309
tcgtaaggttggtgtcggtcgataaacgacgcggcgcgggcgagtgggcggaggcggttgcggggaaggttgggttgtcgcgggacgcggtgaagatagtttgcggagtgttcgggttgaatacgtgagtttgagggtcgttagggaattattgcgtggttgtttttgtgtcggagatttagatgtttggattggtttcggggttttagcgtttgttcggcgagtcggcggttcggggacgggttcgggtcgaggtttgcggtgaattcggttcggcgggtgtttaggaggcgggttcggggcggggtttgcggtgaattcggttcggcgggtgtttaggaggcgggttcggggcggggtttgcggtgaattcggttcggcgggtgtttaggaggcgggttcggggcggggtttgcggtgaattcggttcggcgggtgtttaggaggcggggtaggggcggggtttgtagtgagcgcggtttggtgagtagtttaggaggcgggttcggggcggggtttgcggtgagttcggttcggggggttgtttaggaggtggggtcggggtaggtttggggcggggtttgcggtgagttcgcgttgggcgggttgtttcgggggcgggattgggttgggtttgcggtgagtattaggcgatgcggtacgggtgttgcgggatatatagatacgtttacgattagatttaggtaggtatttatcggcgagcggtcgcgggtgatttttaggcgcggcggtattttacggtggtgaaggttataggtgaggttattttgatagtttcgttcgcgtcgagagtttttttttcgatttgggatcgtagtgtttggggcggggtttttcgtgagggggttgggaagttcgaagtcgtaggtttgattttggtt

SEQ ID NO: 12310 - DNA, 902 bp, Artificial Sequence
  chemically treated genomic DNA (Homo sapiens) CpG-island No: 12310
aaccaaaatcaaacctacgacttcgaacttcccaaccccctcacgaaaaaccccgccccaaacactacgatcccaaatcgaaaaaaaaactctcgacgcgaacgaaactatcaaaataacctcacctataaccttcaccaccgtaaaataccgccgcgcctaaaaatcacccgcgaccgctcgccgataaatacctacctaaatctaatcgtaaacgtatctatatatcccgcaacacccgtaccgcatcgcctaatactcaccgcaaacccaacccaatcccgcccccgaaacaacccgcccaacgcgaactcaccgcaaaccccgccccaaacctaccccgaccccacctcctaaacaaccccccgaaccgaactcaccgcaaaccccgccccgaacccgcctcctaaactactcaccaaaccgcgctcactacaaaccccgcccctaccccgcctcctaaacacccgccgaaccgaattcaccgcaaaccccgccccgaacccgcctcctaaacacccgccgaaccgaattcaccgcaaaccccgccccgaacccgcctcctaaacacccgccgaaccgaattcaccgcaaaccccgccccgaacccgcctcctaaacacccgccgaaccgaattcaccgcaaacctcgacccgaacccgtccccgaaccgccgactcgccgaacaaacgctaaaaccccgaaaccaatccaaacatctaaatctccgacacaaaaacaaccacgcaataattccctaacgaccctcaaactcacgtattcaacccgaacactccgcaaactatcttcaccgcgtcccgcgacaacccaaccttccccgcaaccgcctccgcccactcgcccgcgccgcgtcgtttatcgaccgacaccaaccttacga

SEQ ID NO: 12311 - DNA, 902 bp, Artificial Sequence
  chemically treated genomic DNA (Homo sapiens) CpG-island No: 12311
ggttagagttaggtttgcggtttcgagttttttaatttttttacggagagtttcgttttaaatattgcggttttaggtcgaggggagggttttcggcgcgagcgggattattagggtgattttatttgtgatttttattatcgtgaggtatcgtcgcgtttgggagttattcgcggtcgttcgtcggtaggtgtttgtttgagtttaatcgtaggcgtgtttgtgtgtttcgtagtattcgtgtcgtatcgtttgatgtttatcgtaggtttagtttagtttcgttttcggaatagttcgtttagcgcgagtttatcgtaggtttcgttttaggtttgtttcggttttattttttgagtaatttttcgagtcgagtttatcgtaggtttcgtttcggattcgttttttgggttatttattaagtcgcgtttattgtaggtttcgtttttgtttcgttttttgggtattcgtcgagtcgagtttatcgtaggtttcgtttcggattcgttttttgggtattcgtcgagtcgagtttatcgtaggtttcgtttcggattcgttttttgggtattcgtcgagtcgagtttatcgtaggtttcgtttcggattcgttttttgggtattcgtcgagtcgagtttatcgtaggtttcggttcggattcgttttcggatcgtcggttcgtcgggtaagcgttgggatttcgaggttagtttaggtatttggattttcgatatagaggtagttacgtagtgattttttggcgatttttagatttacgtgtttagttcggatatttcgtaggttatttttatcgcgtttcgcggtagtttagtttttttcgtagtcgttttcgtttattcgttcgcgtcgcgtcgtttgtcggtcggtattagttttgcgg

SEQ ID NO: 12312 - DNA, 902 bp, Artificial Sequence
  chemically treated genomic DNA (Homo sapiens) CpG-island No: 12312
ccgcaaaactaataccgaccgacaaacgacgcgacgcgaacgaataaacgaaaacgactacgaaaaaaactaaactaccgcgaaacgcgataaaaataacctacgaaatatccgaactaaacacgtaaatctaaaaatcgccaaaaaatcactacgtaactacctctatatcgaaaatccaaatacctaaactaacctcgaaatcccaacgcttacccgacgaaccgacgatccgaaaacgaatccgaaccgaaacctacgataaactcgactcgacgaatacccaaaaaacgaatccgaaacgaaacctacgataaactcgactcgacgaatacccaaaaaacgaatccgaaacgaaacctacgataaactcgactcgacgaatacccaaaaaacgaatccgaaacgaaacctacgataaactcgactcgacgaatacccaaaaaacgaaacaaaaacgaaacctacaataaacgcgacttaataaataacccaaaaaacgaatccgaaacgaaacctacgataaactcgactcgaaaaattactcaaaaaataaaaccgaaacaaacctaaaacgaaacctacgataaactcgcgctaaacgaactattccgaaaacgaaactaaactaaacctacgataaacatcaaacgatacgacacgaatactacgaaacacacaaacacgcctacgattaaactcaaacaaacacctaccgacgaacgaccgcgaataactcccaaacgcgacgatacctcacgataataaaaatcacaaataaaatcaccctaataatcccgctcgcgccgaaaaccctcccctcgacctaaaaccgcaatatttaaaacgaaactctccgtaaaaaaattaaaaaactcgaaaccgcaaacctaactctaacc

SEQ ID NO: 12313 - DNA, 1390 bp, Artificial Sequence
  chemically treated genomic DNA (Homo sapiens) CpG-island No: 12313
acgcgttcgggtgaggtgtttagtaggtgttgtcggaagcgtagtagcgcgtatacgaaatcgtttcgtaggttgataaagcgcgtttttaggtagaacgcgcggtcgttttagtttagtaggcgggtgcgtatttcgaagggttttagtaggcgtagcgagcggcggtggcgcgcgtacgaggtcgttagtatcgtgtgcgttcgtaatttttttagcgtttcgagtatttcgtagcgggttaggtgcgcgacgcgcgtaaagtcggtttcgcgtaggtagcgcgcgttgtttatgtgtaatagtaggtttaagttcgagggtagtacgcggttcgggaagcgttgtttagttagtaggttacggacgcgcggttgtagtaggcgcgcgcgtagtacggcgtacggaaggcgtattaggtattagacgtttagtagcgtaaagatagcgagttttagggttagtaacgttattagtagttttagtatagcggcggcggcgggcgcggggttttgcggagttcgtggcgtcggtgtcggtgttcgcggcgttggttacggtgttcgttaggttttttgggaattcgcgagcgtagcgcgttcggagcgaattatagcgcgagggcggtcgagggggaggggttcggagtttcgtttatcgtggcgcgatttttttagcgttttacgtggttcgtttcgtcgtttaggttcgcgttattttcgcgttttttggggcggggcgggcggcgcgttgagcgttatagcggtatttggcggtcgtgcgcggcgttgtaggcgcgagggtgtacgcgcgtttcggcgttttcgtttttttagtagcgcgagattttcgttaggttttgaagacgcggtttggttttggtcgttcggtttttcgtttgagcgtaaaggttttagtattttcgcggtcgaagtcgcgggatttttcgtggaaaatgggatttagttcgatcgttagcggcgttgtagcggattttgcgggaatttagtttttgttttaggatttttagggttattttagttcgtagggcgttcgtagcggtttagggcgaattatttttatggttttcgtgcgtatttttagttttagtcggtatttttttattcgtttttacgatatttattttattttttaaaggttttgttaattttaggtttttttcgagtattttcgtttttttttttttttgaaatcggagtaaattacggtcgggcggaagcgggggagttcgggtgagagttagtgatttagttgcggattttaagtgtcgtcggaggttttggggcgtaggtttagcgggttgtcgcgtagttcggttgttttgtgtttttttttgacgaggttggggaggaaaggcggtttagagaag

SEQ ID NO: 12314 - DNA, 1390 bp, Artificial Sequence
  chemically treated genomic DNA (Homo sapiens) CpG-island No: 12314
cttctctaaaccgcctttcctccccaacctcgtcaaaaaaaaacacaaaacaaccgaactacgcgacaacccgctaaacctacgccccaaaacctccgacgacacttaaaatccgcaactaaatcactaactctcacccgaactcccccgcttccgcccgaccgtaatttactccgatttcaaaaaaaaaaaaaaacgaaaatactcgaaaaaaacctaaaattaacaaaacctttaaaaaataaaataaatatcgtaaaaacgaataaaaaaataccgactaaaactaaaaatacgcacgaaaaccataaaaataattcgccctaaaccgctacgaacgccctacgaactaaaataaccctaaaaatcctaaaacaaaaactaaattcccgcaaaatccgctacaacgccgctaacgatcgaactaaatcccattttccacgaaaaatcccgcgacttcgaccgcgaaaatactaaaacctttacgctcaaacgaaaaaccgaacgaccaaaaccaaaccgcgtcttcaaaacctaacgaaaatctcgcgctactaaaaaaacgaaaacgccgaaacgcgcgtacaccctcgcgcctacaacgccgcgcacgaccgccaaataccgctataacgctcaacgcgccgcccgccccgccccaaaaaacgcgaaaataacgcgaacctaaacgacgaaacgaaccacgtaaaacgctaaaaaaatcgcgccacgataaacgaaactccgaacccctccccctcgaccgccctcgcgctataattcgctccgaacgcgctacgctcgcgaattcccaaaaaacctaacgaacaccgtaaccaacgccgcgaacaccgacaccgacgccacgaactccgcaaaaccccgcgcccgccgccgccgctatactaaaactactaataacgttactaaccctaaaactcgctatctttacgctactaaacgtctaatacctaatacgccttccgtacgccgtactacgcgcgcgcctactacaaccgcgcgtccgtaacctactaactaaacaacgcttcccgaaccgcgtactaccctcgaacttaaacctactattacacataaacaacgcgcgctacctacgcgaaaccgactttacgcgcgtcgcgcacctaacccgctacgaaatactcgaaacgctaaaaaaattacgaacgcacacgatactaacgacctcgtacgcgcgccaccgccgctcgctacgcctactaaaacccttcgaaatacgcacccgcctactaaactaaaacgaccgcgcgttctacctaaaaacgcgctttatcaacctacgaaacgatttcgtatacgcgctactacgcttccgacaacacctactaaacacctcacccgaacgcgt

SEQ ID NO: 12315 - DNA, 1390 bp, Artificial Sequence
  chemically treated genomic DNA (Homo sapiens) CpG-island No: 12315
tttttttgggtcgttttttttttttagtttcgttaggaaggggtataggatagtcgagttgcgcgatagttcgttgggtttgcgttttagggttttcggcgatatttggagttcgtagttgagttattgatttttattcgggttttttcgttttcgttcggtcgtgatttgtttcggttttaaaagggaggaagggcgggaatgttcgggaagagtttggggttggtaggatttttagggggtggaatgaatgtcgtgagggcgagtaaggaggtatcggttggggttgaaaatgcgtacggggattatgagggtgattcgttttgagtcgttgcgaacgttttgcgagttggggtggttttggaggttttggagtagaagttaggttttcgtagagttcgttgtagcgtcgttggcgatcgggttgggttttattttttacgaaaagtttcgcggtttcggtcgcggaggtgttggagtttttgcgtttagacgaagggtcgaacggttagggttaggtcgcgtttttagagtttggcgagggtttcgcgttgttgggaaggcggagacgtcggggcgcgcgtgtattttcgcgtttgtagcgtcgcgtacggtcgttaggtgtcgttgtggcgtttagcgcgtcgttcgtttcgttttagggaacgcgaaagtggcgcgggtttggacggcgggacggattacgtagggcgttgagaaggtcgcgttacggtgggcggggtttcgggtttttttttttcggtcgttttcgcgttgtggttcgtttcgggcgcgttgcgttcgcgagtttttaggaggtttggcgggtatcgtaattagcgtcgcggatatcggtatcggcgttacggatttcgtaggatttcgcgttcgtcgtcgtcgttatgttggggttgttggtggcgttgttggttttggggttcgttgtttttgcgttgttggacgtttggtatttggtgcgtttttcgtgcgtcgtgttgcgcgcgcgtttgttgtagtcgcgcgttcgtgatttgttagttgagtagcgtttttcgggtcgcgtgttgttttcggatttggatttgttgttgtatatgaataacgcgcgttatttgcgcgaggtcgattttgcgcgcgtcgcgtatttgattcgttgcggggtgttcggggcgttgagggagttgcgggcgtatacggtgttggcggtttcgtgcgcgcgttatcgtcgttcgttgcgtttgttggagtttttcgaggtgcgtattcgtttgttgggttgggacgatcgcgcgttttatttggaggcgcgttttgttagtttgcgggacggtttcgtgtgcgcgttgttgcgttttcggtagtatttgttgggtattttattcgagcgcgt

SEQ ID NO: 12316 - DNA, 1390 bp, Artificial Sequence
  chemically treated genomic DNA (Homo sapiens) CpG-island No: 12316
acgcgctcgaataaaatacccaacaaatactaccgaaaacgcaacaacgcgcacacgaaaccgtcccgcaaactaacaaaacgcgcctccaaataaaacgcgcgatcgtcccaacccaacaaacgaatacgcacctcgaaaaactccaacaaacgcaacgaacgacgataacgcgcgcacgaaaccgccaacaccgtatacgcccgcaactccctcaacgccccgaacaccccgcaacgaatcaaatacgcgacgcgcgcaaaatcgacctcgcgcaaataacgcgcgttattcatatacaacaacaaatccaaatccgaaaacaacacgcgacccgaaaaacgctactcaactaacaaatcacgaacgcgcgactacaacaaacgcgcgcgcaacacgacgcacgaaaaacgcaccaaataccaaacgtccaacaacgcaaaaacaacgaaccccaaaaccaacaacgccaccaacaaccccaacataacgacgacgacgaacgcgaaatcctacgaaatccgtaacgccgataccgatatccgcgacgctaattacgatacccgccaaacctcctaaaaactcgcgaacgcaacgcgcccgaaacgaaccacaacgcgaaaacgaccgaaaaaaaaaaacccgaaaccccgcccaccgtaacgcgaccttctcaacgccctacgtaatccgtcccgccgtccaaacccgcgccactttcgcgttccctaaaacgaaacgaacgacgcgctaaacgccacaacgacacctaacgaccgtacgcgacgctacaaacgcgaaaatacacgcgcgccccgacgtctccgccttcccaacaacgcgaaaccctcgccaaactctaaaaacgcgacctaaccctaaccgttcgacccttcgtctaaacgcaaaaactccaacacctccgcgaccgaaaccgcgaaacttttcgtaaaaaataaaacccaacccgatcgccaacgacgctacaacgaactctacgaaaacctaacttctactccaaaacctccaaaaccaccccaactcgcaaaacgttcgcaacgactcaaaacgaatcaccctcataatccccgtacgcattttcaaccccaaccgatacctccttactcgccctcacgacattcattccaccccctaaaaatcctaccaaccccaaactcttcccgaacattcccgcccttcctcccttttaaaaccgaaacaaatcacgaccgaacgaaaacgaaaaaacccgaataaaaatcaataactcaactacgaactccaaatatcgccgaaaaccctaaaacgcaaacccaacgaactatcgcgcaactcgactatcctataccccttcctaacgaaactaaaaaaaaaaaacgacccaaaaaaa

SEQ ID NO: 12317 - DNA, 627 bp, Artificial Sequence
  chemically treated genomic DNA (Homo sapiens) CpG-island No: 12317
acgaggcgaggttttttagaggtttttaggcgttacgggtcgtttgaacgtttcgtttttacggtttggtcggggcggtggttacgcggtgttaggtagacgtcgttcggttttgttttttcggttcgtggttgtggagggcgagttaggtttattcgttcgttgggagttttttggatttcgttgtttcgtagttaggttggcgtttgtttatattcgcggtagggttacgattagtagtaaggcgacgagcgttatcgtttttagcggtgtttagggagggttagcgcgcggcgtttttttttcgtttttttggaattttcgtagttttcgcgcgtttttttttgggtttggtcggtagggggagtttcgttcgtttcggggcgcgcgttttttattcgtcggggtttgtcggggtttttggagttttattttagggtttcgcggtcgttggcggttttgaacgtcggttttgagtttcgttttgtgttgttgttggagcggtcggcggttaggtaggaacgggcgcgggagttttgggaaaggcgcgtgtggaaacgtagtttttgagtttaagggtcgtttttttgaggattttacggtttatagaaagtggtcggcggttag

SEQ ID NO: 12318 - DNA, 627 bp, Artificial Sequence
  chemically treated genomic DNA (Homo sapiens) CpG-island No: 12318
ctaaccgccgaccactttctataaaccgtaaaatcctcaaaaaaacgacccttaaactcaaaaactacgtttccacacgcgcctttcccaaaactcccgcgcccgttcctacctaaccgccgaccgctccaacaacaacacaaaacgaaactcaaaaccgacgttcaaaaccgccaacgaccgcgaaaccctaaaataaaactccaaaaaccccgacaaaccccgacgaataaaaaacgcgcgccccgaaacgaacgaaactccccctaccgaccaaacccaaaaaaaaacgcgcgaaaactacgaaaattccaaaaaaacgaaaaaaaaacgccgcgcgctaaccctccctaaacaccgctaaaaacgataacgctcgtcgccttactactaatcgtaaccctaccgcgaatataaacaaacgccaacctaactacgaaacaacgaaatccaaaaaactcccaacgaacgaataaacctaactcgccctccacaaccacgaaccgaaaaaacaaaaccgaacgacgtctacctaacaccgcgtaaccaccgccccgaccaaaccgtaaaaacgaaacgttcaaacgacccgtaacgcctaaaaacctctaaaaaacctcgcctcgt

SEQ ID NO: 12319 - DNA, 627 bp, Artificial Sequence
  chemically treated genomic DNA (Homo sapiens) CpG-island No: 12319
ttggtcgtcggttattttttgtgggtcgtggggtttttaaggagacggtttttgggtttaggggttgcgtttttatacgcgttttttttagggttttcgcgttcgtttttgtttggtcgtcggtcgttttaatagtagtataaggcgggatttagaatcggcgtttagggtcgttagcggtcgcgaggttttgagatgaggttttaaagatttcgataggtttcggcgggtgggaggcgcgcgtttcggggcgggcggggttttttttatcggttagatttagggagaggcgcgcggaggttgcgaaggttttagaagggcggggagggggcgtcgcgcgttgattttttttgggtatcgttggggacgatggcgttcgtcgttttgttgttggtcgtggttttatcgcgggtgtggatagacgttaatttgattgcgagataacgagatttagaggatttttagcggacgggtgagtttggttcgttttttatagttacgggtcgagaggatagggtcgggcggcgtttgtttggtatcgcgtggttatcgtttcgattaggtcgtgagaacggagcgtttaggcggttcgtggcgtttggaagtttttggggagtttcgtttcgt

SEQ ID NO: 12320 - DNA, 627 bp, Artificial Sequence
  chemically treated genomic DNA (Homo sapiens) CpG-island No: 12320
acgaaacgaaactccccaaaaacttccaaacgccacgaaccgcctaaacgctccgttctcacgacctaatcgaaacgataaccacgcgataccaaacaaacgccgcccgaccctatcctctcgacccgtaactataaaaaacgaaccaaactcacccgtccgctaaaaatcctctaaatctcgttatctcgcaatcaaattaacgtctatccacacccgcgataaaaccacgaccaacaacaaaacgacgaacgccatcgtccccaacgatacccaaaaaaaatcaacgcgcgacgccccctccccgcccttctaaaaccttcgcaacctccgcgcgcctctccctaaatctaaccgataaaaaaaaccccgcccgccccgaaacgcgcgcctcccacccgccgaaacctatcgaaatctttaaaacctcatctcaaaacctcgcgaccgctaacgaccctaaacgccgattctaaatcccgccttatactactattaaaacgaccgacgaccaaacaaaaacgaacgcgaaaaccctaaaaaaaacgcgtataaaaacgcaacccctaaacccaaaaaccgtctccttaaaaaccccacgacccacaaaaaataaccgacgaccaa

SEQ ID NO: 12321 - DNA, 889 bp, Artificial Sequence
  chemically treated genomic DNA (Homo sapiens) CpG-island No: 12321
agacgttgaaagttggcgttcgttgacgtttcgacgcgttttttttatgacgtatgcgtttatcggtcgtgagcgcgggttcggttttcggtgacgtggcggtgaggaggcggagttaagattagcggcgggagggtgggggaggaagagcgaggtgagcgcggacgttagagtggagagcggaaggttagggaggttcggagcggaagtgagattagggagtttgttcgttattgtggattcgagaagtagagagcgagagggggaagaggagcgtgtaagcggaaaagacgggttttttttttcgattttcgagcgcgaggtttttattttgggtttttagcgaacggcggtagcggcggcggttggaataattattcggttaagggcgatagttaattgttgtgagtgtacggggagaggtttaggtagcggcggcggcggcggttttcgggttgcggtgaagaatgttagttattagcgtggattaggtgagggagtagaggttttaggtttggcgaaggttcgagtttcggagttttattttcgcgcggggtttcggttttttttcgtcgtcgtcgttgtcggttttataacggtgtttcgggcgtaagttgttgcggtgtagttattcgggtcggggcgtgcgttttggtttcgtagtttgcgggcgggcgggcgcggtgtcgcggcgggtgggggtaaggatcggttttaggggttttaggatagattttgagggcggtagatatggggcggagatcgggcgagttttgggagacggatttcgagtggcgggtgggaggtttaaaggttgggggtggttgggaaattggtggttgtggaggatatggtgggtttttatttttacgcggatagtttaaaataa

SEQ ID NO: 12322 - DNA, 889 bp, Artificial Sequence
  chemically treated genomic DNA (Homo sapiens) CpG-island No: 12322
ttattttaaactatccgcgtaaaaataaaaacccaccatatcctccacaaccaccaatttcccaaccacccccaacctttaaacctcccacccgccactcgaaatccgtctcccaaaactcgcccgatctccgccccatatctaccgccctcaaaatctatcctaaaacccctaaaaccgatccttacccccacccgccgcgacaccgcgcccgcccgcccgcaaactacgaaaccaaaacgcacgccccgacccgaataactacaccgcaacaacttacgcccgaaacaccgttataaaaccgacaacgacgacgacgaaaaaaaaccgaaaccccgcgcgaaaataaaactccgaaactcgaaccttcgccaaacctaaaacctctactccctcacctaatccacgctaataactaacattcttcaccgcaacccgaaaaccgccgccgccgccgctacctaaacctctccccgtacactcacaacaattaactatcgcccttaaccgaataattattccaaccgccgccgctaccgccgttcgctaaaaacccaaaataaaaacctcgcgctcgaaaatcgaaaaaaaaaacccgtcttttccgcttacacgctcctcttccccctctcgctctctacttctcgaatccacaataacgaacaaactccctaatctcacttccgctccgaacctccctaaccttccgctctccactctaacgtccgcgctcacctcgctcttcctcccccaccctcccgccgctaatcttaactccgcctcctcaccgccacgtcaccgaaaaccgaacccgcgctcacgaccgataaacgcatacgtcataaaaaaaacgcgtcgaaacgtcaacgaacgccaactttcaacgtct

SEQ ID NO: 12323 - DNA, 889 bp, Artificial Sequence
  chemically treated genomic DNA (Homo sapiens) CpG-island No: 12323
ttattttagattattcgcgtaggagtaaaaatttattatattttttatagttattaattttttaattatttttagtttttaaattttttattcgttattcggaattcgttttttagagttcgttcggttttcgttttatgtttgtcgtttttaggatttgttttaaggtttttaagatcggtttttgtttttattcgtcgcggtatcgcgttcgttcgttcgtaagttacggggttagggcgtacgtttcggttcgggtagttatatcgtagtaatttgcgttcggggtatcgttatggggtcggtagcggcggcgacggggaggagtcgaagtttcgcgcgagggtggagtttcggggttcgggttttcgttaagtttggggtttttgtttttttatttgatttacgttagtggttgatattttttatcgtaattcgagagtcgtcgtcgtcgtcgttgtttgggttttttttcgtgtatttatagtagttggttgtcgtttttggtcgagtgattgttttagtcgtcgtcgttgtcgtcgttcgttgagaatttaaaatgagggtttcgcgttcgggagtcggaggaagaggttcgtttttttcgtttgtacgttttttttttttttttcgttttttgtttttcgggtttataatggcggatagattttttagttttattttcgtttcgagtttttttgatttttcgttttttattttgacgttcgcgtttatttcgtttttttttttttattttttcgtcgttgattttggtttcgtttttttatcgttacgttatcggagatcggattcgcgtttacggtcggtgggcgtatgcgttatggagggagcgcgtcggggcgttagcgagcgttaatttttagcgttt

SEQ ID NO: 12324 - DNA, 889 bp, Artificial Sequence
  chemically treated genomic DNA (Homo sapiens) CpG-island No: 12324
aaacgctaaaaattaacgctcgctaacgccccgacgcgctccctccataacgcatacgcccaccgaccgtaaacgcgaatccgatctccgataacgtaacgataaaaaaacgaaaccaaaatcaacgacgaaaaaataaaaaaaaaaaaacgaaataaacgcgaacgtcaaaataaaaaacgaaaaatcaaaaaaactcgaaacgaaaataaaactaaaaaatctatccgccattataaacccgaaaaacaaaaaacgaaaaaaaaaaaaaaaacgtacaaacgaaaaaaacgaacctcttcctccgactcccgaacgcgaaaccctcattttaaattctcaacgaacgacgacaacgacgacgactaaaacaatcactcgaccaaaaacgacaaccaactactataaatacacgaaaaaaaacccaaacaacgacgacgacgacgactctcgaattacgataaaaaatatcaaccactaacgtaaatcaaataaaaaaacaaaaaccccaaacttaacgaaaacccgaaccccgaaactccaccctcgcgcgaaacttcgactcctccccgtcgccgccgctaccgaccccataacgataccccgaacgcaaattactacgatataactacccgaaccgaaacgtacgccctaaccccgtaacttacgaacgaacgaacgcgataccgcgacgaataaaaacaaaaaccgatcttaaaaaccttaaaacaaatcctaaaaacgacaaacataaaacgaaaaccgaacgaactctaaaaaacgaattccgaataacgaataaaaaatttaaaaactaaaaataattaaaaaattaataactataaaaaatataataaatttttactcctacgcgaataatctaaaataa

SEQ ID NO: 12325 - DNA, 610 bp, Artificial Sequence
  chemically treated genomic DNA (Homo sapiens) CpG-island No: 12325
cgtaggaaagcgaggggggagcggtcggtcgtttttgtaatcgaatttaggtagcggcgttggttttttcggcgtcgcggtttcggtcgtcgggtgttcgcgttcgtcgtttttattttgggcgtgtgcggggtgtcgaagagtcgtagtttgcggaaggttttgtgtggcggggtgttcgggtggttcggtcgcggcgagcggcggttttcgttcgttcggcgcgtttcgtaatttcgcggcgacgtattttttgggtcgtcgtagcgtatcggcgagaaagagttatttaggaagtagggggtcgtcggcgatttgatcggcgacgaggagtcgaagtttttttttttttacgagtcgtttttcgttttatcgttcgtttcgttcgcgttcgggtaggcgtcgggtagtaataggtttttttttagttcgtcggggttttcgggggtcggttcgggcgagcggcggcgttcgggttcgggtttcgtggggtttcgcgcgggcggtagcggcgagtcgggtttttgaaaggtcgagtttttttcggtgttgtggtcgttgttttttttttttttttttttttttttttttttatagtcgttgtagggcg

SEQ ID NO: 12326 - DNA, 610 bp, Artificial Sequence
  chemically treated genomic DNA (Homo sapiens) CpG-island No: 12326
cgccctacaacgactataaaaaaaaaaaaaaaaaaaaaaaaaaaaaaaacaacgaccacaacaccgaaaaaaactcgacctttcaaaaacccgactcgccgctaccgcccgcgcgaaaccccacgaaacccgaacccgaacgccgccgctcgcccgaaccgacccccgaaaaccccgacgaactaaaaaaaaacctattactacccgacgcctacccgaacgcgaacgaaacgaacgataaaacgaaaaacgactcgtaaaaaaaaaaaaacttcgactcctcgtcgccgatcaaatcgccgacgaccccctacttcctaaataactctttctcgccgatacgctacgacgacccaaaaaatacgtcgccgcgaaattacgaaacgcgccgaacgaacgaaaaccgccgctcgccgcgaccgaaccacccgaacaccccgccacacaaaaccttccgcaaactacgactcttcgacaccccgcacacgcccaaaataaaaacgacgaacgcgaacacccgacgaccgaaaccgcgacgccgaaaaaaccaacgccgctacctaaattcgattacaaaaacgaccgaccgctcccccctcgctttcctacg

SEQ ID NO: 12327 - DNA, 610 bp, Artificial Sequence
  chemically treated genomic DNA (Homo sapiens) CpG-island No: 12327
cgttttgtagcgattgtgaggaggaggaagaagaggaggaggaggagggtagcggttatagtatcggggaggattcggttttttaagagttcgattcgtcgttgtcgttcgcgcggagttttacggagttcgggttcgagcgtcgtcgttcgttcgggtcggttttcgggagtttcggcgagttggaggaggatttgttgttgttcggcgtttgttcgggcgcggacgaggcgggcggtggggcggagggcgattcgtgggaggaggagggtttcggtttttcgtcgtcggttaagtcgtcggcggttttttattttttgggtagttttttttcgtcggtgcgttgcggcggtttaggagatgcgtcgtcgcggggttgcggggcgcgtcgggcgggcgaaggtcgtcgttcgtcgcggtcggattattcgggtatttcgttatataagatttttcgtaagttgcgatttttcgatatttcgtatacgtttaaggtgagagcggcgggcgcgggtattcggcggtcggggtcgcggcgtcggaggggttagcgtcgttgtttgggttcggttatagaagcggtcggtcgtttttttttcgtttttttgcg

SEQ ID NO: 12328 - DNA, 610 bp, Artificial Sequence
  chemically treated genomic DNA (Homo sapiens) CpG-island No: 12328
cgcaaaaaaacgaaaaaaaaacgaccgaccgcttctataaccgaacccaaacaacgacgctaacccctccgacgccgcgaccccgaccgccgaatacccgcgcccgccgctctcaccttaaacgtatacgaaatatcgaaaaatcgcaacttacgaaaaatcttatataacgaaatacccgaataatccgaccgcgacgaacgacgaccttcgcccgcccgacgcgccccgcaaccccgcgacgacgcatctcctaaaccgccgcaacgcaccgacgaaaaaaaactacccaaaaaataaaaaaccgccgacgacttaaccgacgacgaaaaaccgaaaccctcctcctcccacgaatcgccctccgccccaccgcccgcctcgtccgcgcccgaacaaacgccgaacaacaacaaatcctcctccaactcgccgaaactcccgaaaaccgacccgaacgaacgacgacgctcgaacccgaactccgtaaaactccgcgcgaacgacaacgacgaatcgaactcttaaaaaaccgaatcctccccgatactataaccgctaccctcctcctcctcctcttcttcctcctcctcacaatcgctacaaaacg

SEQ ID NO: 12329 - DNA, 728 bp, Artificial Sequence
  chemically treated genomic DNA (Homo sapiens) CpG-island No: 12329
ttcggcgcggcggggtggcggcggttgttgtcggtttaggaagtttatcgcggttttggggacggggtcgaggataggagagcggaggtttgcggggtttaggatattgcgggtttgggggcgggttcgttacgtgcggttgggcgcgtttagtcgtagtcgcggcgtttttgcgcggcggcggtttgcggtttcggggcgttcgggttgcggacggtggcggtagcggcggcgcggatttttcggtagaggcggggcggttcgagtatcgaggttgaggtttttttaggtttagttttaggttcgggtttcgcggtttttcgcgatcgttaattacgtgagtgtttagtttattaattttagtgtagtttcgggtttgaaaaaaaaaggagggcgcgacgtagttcgcgggggaaggattagttacgcgattttggcgggaattcgttggttttattttcggttcggcgttagttaagtttgggcgggttgtggtgtttcgggtttatgagcgagtttggggcggcggggggttcggttcggcgtcgttcgaatatcgttcggacggggttgggttttttgggaggggtaaaagagagttggattcgtttaagtcgattcgaaagtcggtttggacgtatttttttcgttgttttttcggtgttgggggatttgaagaggggtaggcggtcgggtagcgttttcgggtttttgcgagttgggaagag

SEQ ID NO: 12330 - DNA, 728 bp, Artificial Sequence
  chemically treated genomic DNA (Homo sapiens) CpG-island No: 12330
ctcttcccaactcgcaaaaacccgaaaacgctacccgaccgcctacccctcttcaaatcccccaacaccgaaaaaacaacgaaaaaaatacgtccaaaccgactttcgaatcgacttaaacgaatccaactctcttttacccctcccaaaaaacccaaccccgtccgaacgatattcgaacgacgccgaaccgaaccccccgccgccccaaactcgctcataaacccgaaacaccacaacccgcccaaacttaactaacgccgaaccgaaaataaaaccaacgaattcccgccaaaatcgcgtaactaatccttcccccgcgaactacgtcgcgccctcctttttttttcaaacccgaaactacactaaaattaataaactaaacactcacgtaattaacgatcgcgaaaaaccgcgaaacccgaacctaaaactaaacctaaaaaaacctcaacctcgatactcgaaccgccccgcctctaccgaaaaatccgcgccgccgctaccgccaccgtccgcaacccgaacgccccgaaaccgcaaaccgccgccgcgcaaaaacgccgcgactacgactaaacgcgcccaaccgcacgtaacgaacccgcccccaaacccgcaatatcctaaaccccgcaaacctccgctctcctatcctcgaccccgtccccaaaaccgcgataaacttcctaaaccgacaacaaccgccgccaccccgccgcgccgaa

SEQ ID NO: 12331 - DNA, 728 bp, Artificial Sequence
  chemically treated genomic DNA (Homo sapiens) CpG-island No: 12331
ttttttttagttcgtagagattcggaggcgttgttcggtcgtttgtttttttttagattttttagtatcggaggagtagcgaggggggtgcgtttaggtcggttttcgggtcggtttaggcgaatttagtttttttttgttttttttagaaggtttagtttcgttcgggcggtgttcgggcggcgtcgggtcgggtttttcgtcgttttaggttcgtttataggttcggaatattatagttcgtttagatttggttggcgtcgagtcgggggtggagttagcgggttttcgttaaaatcgcgtagttggtttttttttcgcgggttacgtcgcgttttttttttttttttaaattcggagttgtattgggattggtggattgggtatttacgtggttaacggtcgcgggaagtcgcggagttcgaatttgagattggatttgaggagattttagtttcggtgttcgggtcgtttcgtttttgtcggaaagttcgcgtcgtcgttgtcgttatcgttcgtagttcgagcgtttcggagtcgtaggtcgtcgtcgcgtagagacgtcgcggttgcgattaggcgcgtttagtcgtacgtggcggattcgtttttaggttcgtagtgttttggatttcgtaggttttcgtttttttgttttcggtttcgtttttagggtcgcgatgagttttttgagtcgatagtagtcgtcgttatttcgtcgcgtcggg

SEQ ID NO: 12332 - DNA, 728 bp, Artificial Sequence
  chemically treated genomic DNA (Homo sapiens) CpG-island No: 12332
cccgacgcgacgaaataacgacgactactatcgactcaaaaaactcatcgcgaccctaaaaacgaaaccgaaaacaaaaaaacgaaaacctacgaaatccaaaacactacgaacctaaaaacgaatccgccacgtacgactaaacgcgcctaatcgcaaccgcgacgtctctacgcgacgacgacctacgactccgaaacgctcgaactacgaacgataacgacaacgacgacgcgaactttccgacaaaaacgaaacgacccgaacaccgaaactaaaatctcctcaaatccaatctcaaattcgaactccgcgacttcccgcgaccgttaaccacgtaaatacccaatccaccaatcccaatacaactccgaatttaaaaaaaaaaaaaaaacgcgacgtaacccgcgaaaaaaaaaccaactacgcgattttaacgaaaacccgctaactccacccccgactcgacgccaaccaaatctaaacgaactataatattccgaacctataaacgaacctaaaacgacgaaaaacccgacccgacgccgcccgaacaccgcccgaacgaaactaaaccttctaaaaaaaacaaaaaaaaactaaattcgcctaaaccgacccgaaaaccgacctaaacgcacccccctcgctactcctccgatactaaaaaatctaaaaaaaaacaaacgaccgaacaacgcctccgaatctctacgaactaaaaaaaa

SEQ ID NO: 12333 - DNA, 636 bp, Artificial Sequence
  chemically treated genomic DNA (Homo sapiens) CpG-island No: 12333
gtgcggaagagtttgtcgcgcgagtagtcggtttttcgtaggagtcgagggattcgcgcggttgcggtttaggagcggcggtcgcggagttcggagatttcgtagtcgcggcggcggcggcggcggcggtagtagttagagtagcgtttttcgtcgtcgttcgggaggagttcgtcgcgttcgttcgtcgtttcgttttttagcggcggcgggaggcgcgttttttcggtttagttcgcgttcggtttcgcggggtcgtttcggttcgtttcgaggtaaggggtcgcgtttaggggcgcgggggatttagggtgggtagtacgtgcgcgcggggtcgtaggattcggttatttgttcgttagcgtggaggacgcgcgggggcggaggggcgtttaggcgcgaggttgcgcggtatcggggatttcggacgcgggggcgcggagaggtgggtttttttttatagttaggtcgttgggggtttcgcgtttttgtaggaggtagtaatcgttaagtcggtgggtttcgggcgcgtttcgtcgtagaagatagaggattgggtattcgagtttcggaatttgggggttttcggggtgttcgatagggtggagaaggatcgtgttttagggtaatagtttt

SEQ ID NO: 12334 - DNA, 636 bp, Artificial Sequence
  chemically treated genomic DNA (Homo sapiens) CpG-island No: 12334
aaaactattaccctaaaacacgatccttctccaccctatcgaacaccccgaaaacccccaaattccgaaactcgaatacccaatcctctatcttctacgacgaaacgcgcccgaaacccaccgacttaacgattactacctcctacaaaaacgcgaaacccccaacgacctaactataaaaaaaaacccacctctccgcgcccccgcgtccgaaatccccgataccgcgcaacctcgcgcctaaacgcccctccgcccccgcgcgtcctccacgctaacgaacaaataaccgaatcctacgaccccgcgcgcacgtactacccaccctaaatcccccgcgcccctaaacgcgaccccttacctcgaaacgaaccgaaacgaccccgcgaaaccgaacgcgaactaaaccgaaaaaacgcgcctcccgccgccgctaaaaaacgaaacgacgaacgaacgcgacgaactcctcccgaacgacgacgaaaaacgctactctaactactaccgccgccgccgccgccgccgcgactacgaaatctccgaactccgcgaccgccgctcctaaaccgcaaccgcgcgaatccctcgactcctacgaaaaaccgactactcgcgcgacaaactcttccgcac

SEQ ID NO: 12335 - DNA, 636 bp, Artificial Sequence
  chemically treated genomic DNA (Homo sapiens) CpG-island No: 12335
aaagttgttgttttggggtacgatttttttttattttgtcggatatttcgaggatttttaaatttcgaggttcggatgtttaattttttgttttttgcggcgaaacgcgttcggagtttatcggtttagcgattgttattttttgtagggacgcgaagtttttagcggtttgattgtggaggggaatttattttttcgcgttttcgcgttcggggttttcggtgtcgcgtagtttcgcgtttgagcgttttttcgttttcgcgcgttttttacgttggcgagtaggtgatcgagttttgcgatttcgcgcgtacgtattatttattttgggtttttcgcgtttttaggcgcggttttttatttcggagcgggtcggagcggtttcgcggggtcgggcgcggattgggtcggggagacgcgtttttcgtcgtcgttgggagacgaggcggcgagcgggcgcggcgagtttttttcgggcggcggcgggaggcgttgttttagttgttgtcgtcgtcgtcgtcgtcgtcgcggttgcggggttttcgggtttcgcggtcgtcgtttttgggtcgtagtcgcgcgggtttttcggtttttgcgagaggtcggttgttcgcgcggtaaattttttcgtat

SEQ ID NO: 12336 - DNA, 636 bp, Artificial Sequence
  chemically treated genomic DNA (Homo sapiens) CpG-island No: 12336
atacgaaaaaatttaccgcgcgaacaaccgacctctcgcaaaaaccgaaaaacccgcgcgactacgacccaaaaacgacgaccgcgaaacccgaaaaccccgcaaccgcgacgacgacgacgacgacgacaacaactaaaacaacgcctcccgccgccgcccgaaaaaaactcgccgcgcccgctcgccgcctcgtctcccaacgacgacgaaaaacgcgtctccccgacccaatccgcgcccgaccccgcgaaaccgctccgacccgctccgaaataaaaaaccgcgcctaaaaacgcgaaaaacccaaaataaataatacgtacgcgcgaaatcgcaaaactcgatcacctactcgccaacgtaaaaaacgcgcgaaaacgaaaaaacgctcaaacgcgaaactacgcgacaccgaaaaccccgaacgcgaaaacgcgaaaaaataaattcccctccacaatcaaaccgctaaaaacttcgcgtccctacaaaaaataacaatcgctaaaccgataaactccgaacgcgtttcgccgcaaaaaacaaaaaattaaacatccgaacctcgaaatttaaaaatcctcgaaatatccgacaaaataaaaaaaaatcgtaccccaaaacaacaacttt

SEQ ID NO: 12337 - DNA, 832 bp, Artificial Sequence
  chemically treated genomic DNA (Homo sapiens) CpG-island No: 12337
cggtgcggcgcggttttgtttattttgatgatgttgttgcgtcggggggtcgttcgtgttgtttttaggaggttcgtttcgttgttcgttggggttttcgcggcgtttggtagtgcgatttcgttgcgacggttttttattcggtttttagaggtcgtcgttacgtagttttcggcggtattcgggtttattcgggggtcgttttcgtttttcgtcgcgtcgggcgtcggcggattttttttgtcggtcgcgtttcggttagtggtttggagcgtttagggtttttcgggggaaagcgggacgtcggtagcggagtttagtcgttaggtatcggttgcgtttttgtatcgggaggcggtttcgttagattttgttttatcgtttagcgcgatatgtggcggcggcggcggcggcggcggtaattttttggagaggggatatcgttcgggtagagacgttttcgggtttcggtttaggaggttagtagttcggcgggggacggtggcgggagtggggaggcgatgtgagcgggaggtagaaggagaggcgaaaaagagagggaggtattcgaaatgtgatgtaaacgtcggttttgcgttagataaaaggtatcgggcgtttagttaggcggtttttggagttcggacgtcggcggttcgataggggttagagtcgggcgattgcggtcgggcgtattcgttatttgttcgcggattgcggcgtagcggttttaggaagtgcggcggcggcggcggtttttatttagttttgttgtgatagggagggagatttgttttgatagtttttggggattggtaggcgtttgggtttt

SEQ ID NO: 12338 - DNA, 832 bp, Artificial Sequence
  chemically treated genomic DNA (Homo sapiens) CpG-island No: 12338
aaaacccaaacgcctaccaatccccaaaaactatcaaaacaaatctccctccctatcacaacaaaactaaataaaaaccgccgccgccgccgcacttcctaaaaccgctacgccgcaatccgcgaacaaataacgaatacgcccgaccgcaatcgcccgactctaacccctatcgaaccgccgacgtccgaactccaaaaaccgcctaactaaacgcccgataccttttatctaacgcaaaaccgacgtttacatcacatttcgaatacctccctctctttttcgcctctccttctacctcccgctcacatcgcctccccactcccgccaccgtcccccgccgaactactaacctcctaaaccgaaacccgaaaacgtctctacccgaacgatatcccctctccaaaaaattaccgccgccgccgccgccgccgccacatatcgcgctaaacgataaaacaaaatctaacgaaaccgcctcccgatacaaaaacgcaaccgatacctaacgactaaactccgctaccgacgtcccgctttcccccgaaaaaccctaaacgctccaaaccactaaccgaaacgcgaccgacaaaaaaaatccgccgacgcccgacgcgacgaaaaacgaaaacgacccccgaataaacccgaataccgccgaaaactacgtaacgacgacctctaaaaaccgaataaaaaaccgtcgcaacgaaatcgcactaccaaacgccgcgaaaaccccaacgaacaacgaaacgaacctcctaaaaacaacacgaacgaccccccgacgcaacaacatcatcaaaataaacaaaaccgcgccgcaccg

SEQ ID NO: 12339 - DNA, 832 bp, Artificial Sequence
  chemically treated genomic DNA (Homo sapiens) CpG-island No: 12339
gaggtttagacgtttgttaatttttaagggttgttaaaataagtttttttttttgttataatagagttgagtggaggtcgtcgtcgtcgtcgtattttttgggatcgttgcgtcgtagttcgcgggtaggtggcgggtgcgttcggtcgtagtcgttcggttttggtttttatcgggtcgtcggcgttcgggttttagaggtcgtttggttgggcgttcggtgttttttgtttggcgtagggtcggcgtttgtattatatttcggatatttttttttttttttcgtttttttttttgtttttcgtttatatcgtttttttattttcgttatcgtttttcgtcggattgttagttttttagatcgaagttcgaggacgtttttgttcgagcgatgttttttttttagaaagttgtcgtcgtcgtcgtcgtcgtcgttatatgtcgcgttgggcggtgaaataaagtttggcggggtcgtttttcggtgtaggagcgtaatcggtgtttagcggttggatttcgttgtcggcgtttcgttttttttcggggagttttaaacgttttaggttattggtcgaggcgcggtcggtagggaggattcgtcggcgttcgacgcggcggggggcgaagacgattttcgagtgggttcggatgtcgtcggggattgcgtgacggcggtttttgggggtcggatgagggatcgtcgtagcggggtcgtattgttaggcgtcgcggggattttagcggatagcgaggcgggttttttggaggtagtacgggcgatttttcggcgtagtagtattattaaggtaagtaaagtcgcgtcgtatcg

SEQ ID NO: 12340 - DNA, 832 bp, Artificial Sequence
  chemically treated genomic DNA (Homo sapiens) CpG-island No: 12340
cgatacgacgcgactttacttaccttaataatactactacgccgaaaaatcgcccgtactacctccaaaaaacccgcctcgctatccgctaaaatccccgcgacgcctaacaatacgaccccgctacgacgatccctcatccgacccccaaaaaccgccgtcacgcaatccccgacgacatccgaacccactcgaaaatcgtcttcgccccccgccgcgtcgaacgccgacgaatcctccctaccgaccgcgcctcgaccaataacctaaaacgtttaaaactccccgaaaaaaaacgaaacgccgacaacgaaatccaaccgctaaacaccgattacgctcctacaccgaaaaacgaccccgccaaactttatttcaccgcccaacgcgacatataacgacgacgacgacgacgacgacaactttctaaaaaaaaaacatcgctcgaacaaaaacgtcctcgaacttcgatctaaaaaactaacaatccgacgaaaaacgataacgaaaataaaaaaacgatataaacgaaaaacaaaaaaaaaaacgaaaaaaaaaaaaaaatatccgaaatataatacaaacgccgaccctacgccaaacaaaaaacaccgaacgcccaaccaaacgacctctaaaacccgaacgccgacgacccgataaaaaccaaaaccgaacgactacgaccgaacgcacccgccacctacccgcgaactacgacgcaacgatcccaaaaaatacgacgacgacgacgacctccactcaactctattataacaaaaaaaaaaacttattttaacaacccttaaaaattaacaaacgtctaaacctc

SEQ ID NO: 12341 - DNA, 646 bp, Artificial Sequence
  chemically treated genomic DNA (Homo sapiens) CpG-island No: 12341
cgttaatattatattatattcgaaaatttaggcgatttttatatagggttttcgtaataatacgatattaatattatattatattcgaaaatttaggcgatttttatatagggttttcgtaataatacgatattaatattatattatattcgaaaatttaggcgatttttatatagggttttcgtaataatacgatattaatattatattatattcgaaaatttcggcgatttttatatagggttttcgtaataatacgatattaatattatattatattcgaaaatcgaggcgatttttatatagggttttcgtaataatacgacgttaatattatattatattcgaaaatttaggcgatttttatatagggttttcgtaataatacgacgttaatattatattatattcgaaaatttaggcgatttttatatagggttttcgtaataatacgatattaatattatattatattcgaaaatttaggcgatttttatatagggttttcgtaataatacgtattaatattatattatattagaaaatcgaggcgatttttagatagggttttcgtaataatacgatattaatattatattatatttaaaaatcgaggcgattttttttacgtttatgttagtaatgt

SEQ ID NO: 12342 - DNA, 646 bp, Artificial Sequence
  chemically treated genomic DNA (Homo sapiens) CpG-island No: 12342
acattactaacataaacgtaaaaaaaatcgcctcgatttttaaatataatataatattaatatcgtattattacgaaaaccctatctaaaaatcgcctcgattttctaatataatataatattaatacgtattattacgaaaaccctatataaaaatcgcctaaattttcgaatataatataatattaatatcgtattattacgaaaaccctatataaaaatcgcctaaattttcgaatataatataatattaacgtcgtattattacgaaaaccctatataaaaatcgcctaaattttcgaatataatataatattaacgtcgtattattacgaaaaccctatataaaaatcgcctcgattttcgaatataatataatattaatatcgtattattacgaaaaccctatataaaaatcgccgaaattttcgaatataatataatattaatatcgtattattacgaaaaccctatataaaaatcgcctaaattttcgaatataatataatattaatatcgtattattacgaaaaccctatataaaaatcgcctaaattttcgaatataatataatattaatatcgtattattacgaaaaccctatataaaaatcgcctaaattttcgaatataatataatattaacg

SEQ ID NO: 12343 - DNA, 646 bp, Artificial Sequence
  chemically treated genomic DNA (Homo sapiens) CpG-island No: 12343
gtattattaatatggacgtgaagaaagtcgtttcggtttttgggtgtgatgtggtgttggtgtcgtgttgttgcgaaggttttgtttgaaagtcgtttcggttttttggtgtgatgtggtgttggtgcgtgttgttgcgaaggttttgtgtgaaagtcgtttgggttttcgggtgtgatgtggtattggtgtcgtgttgttgcgaaggttttgtgtgaaagtcgtttgggttttcgggtgtgatgtggtgttggcgtcgtgttgttgcgaaggttttgtgtgaaagtcgtttgggttttcgggtgtgatgtggtgttggcgtcgtgttgttgcgaaggttttgtgtgaaagtcgtttcggttttcgggtgtgatgtggtgttggtgtcgtgttgttgcgaaggttttgtgtgaaagtcgtcggggttttcgggtgtgatgtggtgttggtgtcgtgttgttgcgaaggttttgtgtgaaggtcgtttgggttttcgggtgtgatgtggtgttggtgtcgtgttgttgcgaaggttttgtgtgaaggtcgtttgggttttcgggtgtgatgtggtgttggtgtcgtgttgttgcgaaggttttgtgtgaaagtcgtttgggttttcgggtgtgatgtggtgttggcg

SEQ ID NO: 12344 - DNA, 646 bp, Artificial Sequence
  chemically treated genomic DNA (Homo sapiens) CpG-island No: 12344
cgccaacaccacatcacacccgaaaacccaaacgactttcacacaaaaccttcgcaacaacacgacaccaacaccacatcacacccgaaaacccaaacgaccttcacacaaaaccttcgcaacaacacgacaccaacaccacatcacacccgaaaacccaaacgaccttcacacaaaaccttcgcaacaacacgacaccaacaccacatcacacccgaaaaccccgacgactttcacacaaaaccttcgcaacaacacgacaccaacaccacatcacacccgaaaaccgaaacgactttcacacaaaaccttcgcaacaacacgacgccaacaccacatcacacccgaaaacccaaacgactttcacacaaaaccttcgcaacaacacgacgccaacaccacatcacacccgaaaacccaaacgactttcacacaaaaccttcgcaacaacacgacaccaataccacatcacacccgaaaacccaaacgactttcacacaaaaccttcgcaacaacacgcaccaacaccacatcacaccaaaaaaccgaaacgactttcaaacaaaaccttcgcaacaacacgacaccaacaccacatcacacccaaaaaccgaaacgactttcttcacgtccatattaataatac

SEQ ID NO: 12345 - DNA, 660 bp, Artificial Sequence
  chemically treated genomic DNA (Homo sapiens) CpG-island No: 12345
gtcgcggtcgcgagatcgcgcggaggagtttcgagggagggcgggggtcgtggtgcgcggaggtgatattggcggatgtttcgggttcgttcggtatttatagtatacgaaggttagggtttttaggagtacgattcgggttagttagaaggtgttcgtgtggagatgggtcggagagtttgcggggttacgtttcggcgcgggcggcgatttaggtttcggattcgagtatttagtttttcgtttttttagcgatttcgcgggcgtcgttattgttgggttgttagggcgtatgtgcggggagggcgtattttcggaggtttcgtttattttcggaggtttcgtttattttcggaggtttcgtttttttttggtcggttttgtttacggcgaagttttatttatatttcgggaggtttcgtttatagtttcggagtatcgtttttttagtcggtttcgtttacgcgcgggagcgggtgttcggagtttgtttttttcgtagttttcgttgggcgttgttgcgggtagggcgcggggtcgggtatttgggaggtggtgcgcgtcgttcgattcgagtttattggggtaggtacgcgtgtttttcgttagttcgagttgtagaggttaggtgtttttttttagttaggcgtttttttagtt

SEQ ID NO: 12346 - DNA, 660 bp, Artificial Sequence
  chemically treated genomic DNA (Homo sapiens) CpG-island No: 12346
aactaaaaaaacgcctaactaaaaaaaaacacctaacctctacaactcgaactaacgaaaaacacgcgtacctaccccaataaactcgaatcgaacgacgcgcaccacctcccaaatacccgaccccgcgccctacccgcaacaacgcccaacgaaaactacgaaaaaaacaaactccgaacacccgctcccgcgcgtaaacgaaaccgactaaaaaaacgatactccgaaactataaacgaaacctcccgaaatataaataaaacttcgccgtaaacaaaaccgaccaaaaaaaaacgaaacctccgaaaataaacgaaacctccgaaaataaacgaaacctccgaaaatacgccctccccgcacatacgccctaacaacccaacaataacgacgcccgcgaaatcgctaaaaaaacgaaaaactaaatactcgaatccgaaacctaaatcgccgcccgcgccgaaacgtaaccccgcaaactctccgacccatctccacacgaacaccttctaactaacccgaatcgtactcctaaaaaccctaaccttcgtatactataaataccgaacgaacccgaaacatccgccaatatcacctccgcgcaccacgacccccgccctccctcgaaactcctccgcgcgatctcgcgaccgcgac

SEQ ID NO: 12347 - DNA, 660 bp, Artificial Sequence
  chemically treated genomic DNA (Homo sapiens) CpG-island No: 12347
agttgggaaggcgtttggttgggggagggtatttggtttttgtaattcggattgacggaaggtacgcgtgtttgttttagtgagttcgggtcgggcgacgcgtattattttttaggtattcggtttcgcgttttattcgtagtagcgtttagcgagaattgcgaaggaggtaggtttcgggtattcgttttcgcgcgtgggcggggtcggttggaggggcggtgtttcgggattgtgagcggggtttttcggggtgtgggtggggtttcgtcgtgggtagggtcggttagggagaggcggggttttcgagaatgggcggggttttcgagaatgggcggggttttcgggagtgcgtttttttcgtatatgcgttttgatagtttaataatggcggcgttcgcggagtcgttgaggaggcggaagattgggtattcggattcggagtttgagtcgtcgttcgcgtcggggcgtggtttcgtaggtttttcggtttatttttatacgggtattttttggttgattcggatcgtgtttttgaaggttttagttttcgtgtattgtgagtgtcgggcgggttcgggatattcgttagtgttattttcgcgtattacgattttcgttttttttcgagattttttcgcgcggtttcgcggtcgcggt

SEQ ID NO: 12348 - DNA, 660 bp, Artificial Sequence
  chemically treated genomic DNA (Homo sapiens) CpG-island No: 12348
accgcgaccgcgaaaccgcgcgaaaaaatctcgaaaaaaaacgaaaatcgtaatacgcgaaaataacactaacgaatatcccgaacccgcccgacactcacaatacacgaaaactaaaaccttcaaaaacacgatccgaatcaaccaaaaaatacccgtataaaaataaaccgaaaaacctacgaaaccacgccccgacgcgaacgacgactcaaactccgaatccgaatacccaatcttccgcctcctcaacgactccgcgaacgccgccattattaaactatcaaaacgcatatacgaaaaaaacgcactcccgaaaaccccgcccattctcgaaaaccccgcccattctcgaaaaccccgcctctccctaaccgaccctacccacgacgaaaccccacccacaccccgaaaaaccccgctcacaatcccgaaacaccgcccctccaaccgaccccgcccacgcgcgaaaacgaatacccgaaacctacctccttcgcaattctcgctaaacgctactacgaataaaacgcgaaaccgaatacctaaaaaataatacgcgtcgcccgacccgaactcactaaaacaaacacgcgtaccttccgtcaatccgaattacaaaaaccaaataccctcccccaaccaaacgccttcccaact

SEQ ID NO: 12349 - DNA, 584 bp, Artificial Sequence
  chemically treated genomic DNA (Homo sapiens) CpG-island No: 12349
gtttcgaatgttttttttttaatttttttttcgtttttggttttggtttataatttttttttattttttatttatttcgtttttattttcgtattttttaatatggtttatttaagtatcgtcgttttgttttttcgcgtttttaatttttcggtagttttattcggttcgttacgtttattttttcgcgttttttttttttttacgttttttttttacggtaacgattatttttatcgtttttttttatttttatcgttagcggtttcgtttacgcgtcggcgttatttttcggcgttcgttttgtttttacgttattcgtatcgggtattttagcgcgcgtcgatacgttttttttttcgtttcggtatcgtttcggcgaaattttacgttattttttttcgtacgcgttaagttttatgtttcggttaggataacgttcgcggttagcgtttacgcgtatttttatcgtacggttttcgtcgtcgttttcgtttcggttgttttaggttattttcgtgaatttttttaggttgttttttttgttattaatttttttttcggttttatatttattttaagtt

SEQ ID NO: 12350 - DNA, 584 bp, Artificial Sequence
  chemically treated genomic DNA (Homo sapiens) CpG-island No: 12350
aacttaaaataaatataaaaccgaaaaaaaaattaataacaaaaaaaacaacctaaaaaaattcacgaaaataacctaaaacaaccgaaacgaaaacgacgacgaaaaccgtacgataaaaatacgcgtaaacgctaaccgcgaacgttatcctaaccgaaacataaaacttaacgcgtacgaaaaaaaataacgtaaaatttcgccgaaacgataccgaaacgaaaaaaaaaacgtatcgacgcgcgctaaaatacccgatacgaataacgtaaaaacaaaacgaacgccgaaaaataacgccgacgcgtaaacgaaaccgctaacgataaaaataaaaaaaaacgataaaaataatcgttaccgtaaaaaaaaaacgtaaaaaaaaaaaaaacgcgaaaaaataaacgtaacgaaccgaataaaactaccgaaaaattaaaaacgcgaaaaaacaaaacgacgatacttaaataaaccatattaaaaaatacgaaaataaaaacgaaataaataaaaaataaaaaaaaattataaaccaaaaccaaaaacgaaaaaaaaattaaaaaaaaaacattcgaaac

SEQ ID NO: 12351 - DNA, 584 bp, Artificial Sequence
  chemically treated genomic DNA (Homo sapiens) CpG-island No: 12351
agtttgaggtgggtgtagggtcgggaaggaggttggtggtagaaggagtagtttgaaagaatttacgaaggtgatttaaagtagtcggggcggagacggcggcgggagtcgtacggtgggggtgcgcgtagacgttagtcgcgagcgttgttttagtcgaagtatgaggtttagcgcgtacgggagggggtggcgtagagtttcgtcgaggcgatgtcgaggcggaggagggggcgtgtcggcgcgcgttgggatgttcggtgcgggtagcgtaggggtagagcgggcgtcgaggagtagcgtcgacgcgtaagcggagtcgttggcgataggagtggggagaggcggtgggagtggtcgttgtcgtgggagagaggcgtagggggggggggggcgcgagggagtgagcgtggcggatcggatagggttgtcggggggttgggggcgcggggaagtagggcggcggtgtttgggtaggttatgttgggggatgcgggagtaagaacggggtgggtggggagtggagaggggttgtaaattaaagttaggggcgagaaggggattgggggggaaatattcgggat

SEQ ID NO: 12352 - DNA, 584 bp, Artificial Sequence
  chemically treated genomic DNA (Homo sapiens) CpG-island No: 12352
atcccgaatatttcccccccaatccccttctcgcccctaactttaatttacaacccctctccactccccacccaccccgttcttactcccgcatcccccaacataacctacccaaacaccgccgccctacttccccgcgcccccaaccccccgacaaccctatccgatccgccacgctcactccctcgcgccccccccccccctacgcctctctcccacgacaacgaccactcccaccgcctctccccactcctatcgccaacgactccgcttacgcgtcgacgctactcctcgacgcccgctctacccctacgctacccgcaccgaacatcccaacgcgcgccgacacgccccctcctccgcctcgacatcgcctcgacgaaactctacgccaccccctcccgtacgcgctaaacctcatacttcgactaaaacaacgctcgcgactaacgtctacgcgcacccccaccgtacgactcccgccgccgtctccgccccgactactttaaatcaccttcgtaaattctttcaaactactccttctaccaccaacctccttcccgaccctacacccacctcaaact

SEQ ID NO: 12353 - DNA, 665 bp, Artificial Sequence
  chemically treated genomic DNA (Homo sapiens) CpG-island No: 12353
  unsure (440)
ttttatttcgagttttacggaggttttttcggaattagtttttgttttttcgtatcggttaggttttttttttatttttcgatttattttttattcgatttttattcgttatttcgtttttttttttttttttttttcgcggttttttttttttttttttcggtttatatcgattgtatatcgcgttcgttttttgcgtaatgttattttttcgtttttatttttttaatattcgtttttttttatcgtttttttgttttttttttttcgtttttaatttgtcgtatcgttttttttttgtcgttttatcgtcgttttttttttttttattttcgattttttttttttttttttttcgttgtcgtatcgcgtatttttttcgttttcgttgtttttttttttttttgttttttcgtattttttttttttttttttttttnttttttttttttttttttttttttttttatttttattttttattttcgtttttttttttttttatcgtttttttttttttttgtagtttcgttttttcgtttatcgttttttttttttttcgttacgttttcgtatcgttacgcgttttttgttttttagtgtacgcggttgttttagtgtattatttatttttgtattgagaaatatagacgtagtttatttta

SEQ ID NO: 12354 - DNA, 665 bp, Artificial Sequence
  chemically treated genomic DNA (Homo sapiens) CpG-island No: 12354
  unsure (226)
taaaataaactacgtctatatttctcaatacaaaaataaataatacactaaaacaaccgcgtacactaaaaaacaaaaaacgcgtaacgatacgaaaacgtaacgaaaaaaaaaaaaaacgataaacgaaaaaacgaaactacaaaaaaaaaaaaaaacgataaaaaaaaaaaaaaacgaaaataaaaaataaaaataaaaaaaaaaaaaaaaaaaaaaaaaaaanaaaaaaaaaaaaaaaaaaaaaatacgaaaaaacaaaaaaaaaaaaaaacaacgaaaacgaaaaaaatacgcgatacgacaacgaaaaaaaaaaaaaaaaaaaatcgaaaataaaaaaaaaaaaaacgacgataaaacgacaaaaaaaaaacgatacgacaaattaaaaacgaaaaaaaaaaaacaaaaaaacgataaaaaaaaacgaatattaaaaaaataaaaacgaaaaaataacattacgcaaaaaacgaacgcgatatacaatcgatataaaccgaaaaaaaaaaaaaaaaaaccgcgaaaaaaaaaaaaaaaaaaaaacgaaataacgaataaaaatcgaataaaaaataaatcgaaaaataaaaaaaaaacctaaccgatacgaaaaaacaaaaactaattccgaaaaaacctccgtaaaactcgaaataaaa

SEQ ID NO: 12355 - DNA, 665 bp, Artificial Sequence
  chemically treated genomic DNA (Homo sapiens) CpG-island No: 12355
  unsure (226)
taagatgaattacgtttgtattttttagtatagaaataaatgatgtattaaggtagtcgcgtgtattggggggtaggagacgcgtagcgatgcggaagcgtggcggggagagaggaaggcggtagacgagagggcgaggttgtagagggaaggggaggcggtgagggggaggaggagcgagggtgggaagtgggggtggggggggagagagagagggggggggggngggagaaaggagagagagggggtgcgggagaatagggggggggggggataacgggggcgagggaggtacgcggtacggtagcgaggaggagggagggagggggtcgggagtgggggaagaagaggcggcggtgggacggtaaggggagagcgatgcgataagttgagagcgaagagaggaggatagaggggcgatggagagggacgagtattgagaggatggagacgaagaggtggtattacgtaaggaacgagcgcggtgtgtagtcgatataggtcggaaggggagggggagaggtcgcgggaagaagggggaagggaggacgagatggcgagtgagaatcggatgggaagtaagtcgaaggatgagggaggggtttagtcggtgcgggaggataggagttggtttcgaaagaattttcgtgaggttcgaggtgggg

SEQ ID NO: 12356 - DNA, 665 bp, Artificial Sequence
  chemically treated genomic DNA (Homo sapiens) CpG-island No: 12356
  unsure (440)
ccccacctcgaacctcacgaaaattctttcgaaaccaactcctatcctcccgcaccgactaaacccctccctcatccttcgacttacttcccatccgattctcactcgccatctcgtcctcccttcccccttcttcccgcgacctctccccctccccttccgacctatatcgactacacaccgcgctcgttccttacgtaataccacctcttcgtctccatcctctcaatactcgtccctctccatcgcccctctatcctcctctcttcgctctcaacttatcgcatcgctctccccttaccgtcccaccgccgcctcttcttcccccactcccgaccccctccctccctcctcctcgctaccgtaccgcgtacctccctcgcccccgttatccccccccccccctattctcccgcaccccctctctctcctttctcccnccccccccccctctctctctccccccccacccccacttcccaccctcgctcctcctccccctcaccgcctccccttccctctacaacctcgccctctcgtctaccgccttcctctctccccgccacgcttccgcatcgctacgcgtctcctaccccccaatacacgcgactaccttaatacatcatttatttctatactaaaaaatacaaacgtaattcatctta

SEQ ID NO: 12357 - DNA, 570 bp, Artificial Sequence
  chemically treated genomic DNA (Homo sapiens) CpG-island No: 12357
  unsure (93, 104)
cgtattttgcggattaatcgttttattttgtcgtatttttatcgggttatcgattggtaaaagttttcgaacgtgttcgcggcgtttttattncgttttcgggnttcgcgaatatttattttagttttttgtttgtttaggatttcgttttttcggtttttttagttttaaaattttttttttatcgtttgattttaattttatatgcgggttcgttagttttaggagttaattagacgcgttgtttttgcgcgaatcggttagttttgatttgatgaaacgtagtaatattattatcgtaaaagtggaatatggcgtcgatatcgcgtggttggtcgattattatatagaagattttatcgttagttatgtcgtttaatattggttggacgttgtcgtataatagaaaacggtggttattattttgcgcgaattggtatcgtttgataaacgtttcggtattatttaataagcgtatgaaaaagtttttgtcggggtggttaatcgtattttcgatgaagggtattaggtgattgcgttttttatttgtacgggtattgatagttataa

SEQ ID NO: 12358 - DNA, 570 bp, Artificial Sequence
  chemically treated genomic DNA (Homo sapiens) CpG-island No: 12358
  unsure (467, 478)
ttataactatcaatacccgtacaaataaaaaacgcaatcacctaatacccttcatcgaaaatacgattaaccaccccgacaaaaactttttcatacgcttattaaataataccgaaacgtttatcaaacgataccaattcgcgcaaaataataaccaccgttttctattatacgacaacgtccaaccaatattaaacgacataactaacgataaaatcttctatataataatcgaccaaccacgcgatatcgacgccatattccacttttacgataataatattactacgtttcatcaaatcaaaactaaccgattcgcgcaaaaacaacgcgtctaattaactcctaaaactaacgaacccgcatataaaattaaaatcaaacgataaaaaaaaaattttaaaactaaaaaaaccgaaaaaacgaaatcctaaacaaacaaaaaactaaaataaatattcgcgaancccgaaaacgnaataaaaacgccgcgaacacgttcgaaaacttttaccaatcgataacccgataaaaatacgacaaaataaaacgattaatccgcaaaatacg

SEQ ID NO: 12359 - DNA, 570 bp, Artificial Sequence
  chemically treated genomic DNA (Homo sapiens) CpG-island No: 12359
  unsure (467, 478)
ttatagttgttaatgttcgtataggtggagagcgtaattatttgatattttttatcgagaatgcgattgattatttcggtaaaggtttttttatacgtttgttgagtggtgtcgagacgtttgttaaacggtgttagttcgcgtagggtaatggttatcgttttttgttgtgcggtaacgtttagttagtgttgaacggtatagttggcggtgaagttttttgtgtggtgatcgattagttacgcggtatcgacgttatgttttatttttgcggtggtgatattgttgcgttttattagattaaagttgatcgattcgcgtaggaatagcgcgtttgattaatttttagggttggcgggttcgtatatggggttggagttagacgatgagaagggaattttgaagttgaaggggtcgagagaacgggattttgggtaggtagggagttgaaataagtgttcgcgggnttcgggaacgnaatgaaagcgtcgcgagtacgttcgggggtttttgttagtcgataattcggtaaaaatgcggtagggtgggacggttaattcgtaaaatgcg

SEQ ID NO: 12360 - DNA, 570 bp, Artificial Sequence
  chemically treated genomic DNA (Homo sapiens) CpG-island No: 12360
  unsure (93, 104)
cgcattttacgaattaaccgtcccaccctaccgcatttttaccgaattatcgactaacaaaaacccccgaacgtactcgcgacgctttcattncgttcccgaancccgcgaacacttatttcaactccctacctacccaaaatcccgttctctcgaccccttcaacttcaaaattcccttctcatcgtctaactccaaccccatatacgaacccgccaaccctaaaaattaatcaaacgcgctattcctacgcgaatcgatcaactttaatctaataaaacgcaacaatatcaccaccgcaaaaataaaacataacgtcgataccgcgtaactaatcgatcaccacacaaaaaacttcaccgccaactataccgttcaacactaactaaacgttaccgcacaacaaaaaacgataaccattaccctacgcgaactaacaccgtttaacaaacgtctcgacaccactcaacaaacgtataaaaaaacctttaccgaaataatcaatcgcattctcgataaaaaatatcaaataattacgctctccacctatacgaacattaacaactataa

SEQ ID NO: 12361 - DNA, 776 bp, Artificial Sequence
  chemically treated genomic DNA (Homo sapiens) CpG-island No: 12361
acggttcgcggtttgacgattcgatcgaggcgtaggcgttgatcgttatttacggtcgtgatcgtgattttggtcggtcgttgtggttggggtcggttaagtcgaatatcggttatacgtaagcggcggcgggtgtggttggtgtgattaagatggtgatggcgatgcggtacgggtagttgttacgtacgttgtacgtggaattttcgtcgtcggaggtggattggtcggcggggacggtttaattttttacggagaatacgttttggtttaggagtggtcgtgttcgtcgggtgggggtgtcgtcgttcgggattagtggtattaacgcgtacgttattttcgaatagttttcgggagtgtcgagttagtttgcggggtcgggttcgggttttgtcgtggatgtttcggtggtgtcgtggatggtgtcgggtaaaatattcgaagcgttattcgcgtaggtaacggcgttgatgatttatttggacgagcgatttgatgttttttcgttggatgttgggtatttcgttggcgttgattcggtcggcgttggatggacgaacgggggtgttgggttttattcgtaaatagcgttgtacggcgtgtaaagcgttgtgtgtttgggtttacgttatggaagttgggtgatacggcgaacgtcgattcgttttagtatcgttaaatagtcgtttttgtgtgaagaatgtatcgttgttatattcgttgtagttagggaagttttaaataagcgataaaaggtaaattatttagtatat

SEQ ID NO: 12362 - DNA, 776 bp, Artificial Sequence
  chemically treated genomic DNA (Homo sapiens) CpG-island No: 12362
atatactaaataatttaccttttatcgcttatttaaaacttccctaactacaacgaatataacaacgatacattcttcacacaaaaacgactatttaacgatactaaaacgaatcgacgttcgccgtatcacccaacttccataacgtaaacccaaacacacaacgctttacacgccgtacaacgctatttacgaataaaacccaacacccccgttcgtccatccaacgccgaccgaatcaacgccaacgaaatacccaacatccaacgaaaaaacatcaaatcgctcgtccaaataaatcatcaacgccgttacctacgcgaataacgcttcgaatattttacccgacaccatccacgacaccaccgaaacatccacgacaaaacccgaacccgaccccgcaaactaactcgacactcccgaaaactattcgaaaataacgtacgcgttaataccactaatcccgaacgacgacacccccacccgacgaacacgaccactcctaaaccaaaacgtattctccgtaaaaaattaaaccgtccccgccgaccaatccacctccgacgacgaaaattccacgtacaacgtacgtaacaactacccgtaccgcatcgccatcaccatcttaatcacaccaaccacacccgccgccgcttacgtataaccgatattcgacttaaccgaccccaaccacaacgaccgaccaaaatcacgatcacgaccgtaaataacgatcaacgcctacgcctcgatcgaatcgtcaaaccgcgaaccgt

SEQ ID NO: 12363 - DNA, 776 bp, Artificial Sequence
  chemically treated genomic DNA (Homo sapiens) CpG-island No: 12363
atgtgttgggtggtttattttttgtcgtttgtttggggtttttttggttgtagcggatatgataacggtgtattttttatatagggacggttgtttagcgatgttgaggcgggtcggcgttcgtcgtattatttaatttttataacgtaaatttaggtatatagcgttttgtacgtcgtataacgttgtttacgggtgaggtttaatattttcgttcgtttatttagcgtcggtcgggttaacgttagcgaggtatttaatatttagcgaggagatattaggtcgttcgtttagataggttattaacgtcgttgtttgcgcggatagcgtttcgggtgttttgttcgatattatttacggtattatcggaatatttacgatagaattcgaattcggtttcgtagattgattcggtattttcgggggttgttcgaggatgacgtgcgcgttagtattattgatttcgaacgacgatatttttattcgacgaatacgattatttttgggttagggcgtgtttttcgtaaggagttgaatcgttttcgtcgattaatttattttcggcgacggagattttacgtgtaacgtgcgtggtagttgttcgtgtcgtatcgttattattattttgattatattagttatattcgtcgtcgtttgcgtatgatcgatgttcgatttgatcgattttaattataacggtcggttaggattacgattacggtcgtaggtggcgattagcgtttgcgtttcgatcggatcgttaagtcgcggatcgt

SEQ ID NO: 12364 - DNA, 776 bp, Artificial Sequence
  chemically treated genomic DNA (Homo sapiens) CpG-island No: 12364
acgatccgcgacttaacgatccgatcgaaacgcaaacgctaatcgccacctacgaccgtaatcgtaatcctaaccgaccgttataattaaaatcgatcaaatcgaacatcgatcatacgcaaacgacgacgaatataactaatataatcaaaataataataacgatacgacacgaacaactaccacgcacgttacacgtaaaatctccgtcgccgaaaataaattaatcgacgaaaacgattcaactccttacgaaaaacacgccctaacccaaaaataatcgtattcgtcgaataaaaatatcgtcgttcgaaatcaataatactaacgcgcacgtcatcctcgaacaacccccgaaaataccgaatcaatctacgaaaccgaattcgaattctatcgtaaatattccgataataccgtaaataatatcgaacaaaacacccgaaacgctatccgcgcaaacaacgacgttaataacctatctaaacgaacgacctaatatctcctcgctaaatattaaatacctcgctaacgttaacccgaccgacgctaaataaacgaacgaaaatattaaacctcacccgtaaacaacgttatacgacgtacaaaacgctatatacctaaatttacgttataaaaattaaataatacgacgaacgccgacccgcctcaacatcgctaaacaaccgtccctatataaaaaatacaccgttatcatatccgctacaaccaaaaaaaccccaaacaaacgacaaaaaataaaccacccaacacat

SEQ ID NO: 12365 - DNA, 786 bp, Artificial Sequence
  chemically treated genomic DNA (Homo sapiens) CpG-island No: 12365
  unsure (716, 736, 743)
cgtttcgttattcgttcgtttttacgtttattacggatcggatatttttcgttttgggaaatttattacgagaattttttggcgatatttttcgcgagttttaggtcgcgttggcgttgatcgttatttacggtcgtgatcgtgattttggtcggtcgttgtggttggggtcggttaagtcgaatatcggttatacgtaagcggcggcgggtgtggttggtgtgattaagatggtgatggcgatgcggtacgggtagttgttacgtacgttgtacgtggaatcgtcgtcgtcggaggtggattggtcggcggggacggtttaattttttacggagaatacgttttggtttaggagtggtcgtgttcgtcgggtgggggtgtcgtcgttcgggattagtggtattaacgcgtacgttattttcgaatagttttcgggagtgtcgagttagtttgcggggtcgggttcgggttttgtcgtggatgtttcggtggtgtcgtggatggtgtcgggtaaaatattcgaagcgttattcgcgtaggtaacggcgttgatgatttatttggacgagcgatttgatgttttttcgttggatgttgggtattcgttggcgttgatacggtcggcgttggatgagcgagcggtggtgttggggtcggatcgtgaaacgtttgtgtgcggtgtgaaagcgttgtttgtcggttatgaggtttttggngtggggatcggatttgtggnggttggnggttcgatcgggtttgtgtttttcgttaaggtggttagtggtt

SEQ ID NO: 12366 - DNA, 786 bp, Artificial Sequence
  chemically treated genomic DNA (Homo sapiens) CpG-island No: 12366
  unsure (44, 51, 71)
aaccactaaccaccttaacgaaaaacacaaacccgatcgaaccnccaaccnccacaaatccgatccccacnccaaaaacctcataaccgacaaacaacgctttcacaccgcacacaaacgtttcacgatccgaccccaacaccaccgctcgctcatccaacgccgaccgtatcaacgccaacgaatacccaacatccaacgaaaaaacatcaaatcgctcgtccaaataaatcatcaacgccgttacctacgcgaataacgcttcgaatattttacccgacaccatccacgacaccaccgaaacatccacgacaaaacccgaacccgaccccgcaaactaactcgacactcccgaaaactattcgaaaataacgtacgcgttaataccactaatcccgaacgacgacacccccacccgacgaacacgaccactcctaaaccaaaacgtattctccgtaaaaaattaaaccgtccccgccgaccaatccacctccgacgacgacgattccacgtacaacgtacgtaacaactacccgtaccgcatcgccatcaccatcttaatcacaccaaccacacccgccgccgcttacgtataaccgatattcgacttaaccgaccccaaccacaacgaccgaccaaaatcacgatcacgaccgtaaataacgatcaacgccaacgcgacctaaaactcgcgaaaaatatcgccaaaaaattctcgtaataaatttcccaaaacgaaaaatatccgatccgtaataaacgtaaaaacgaacgaataacgaaacg

SEQ ID NO: 12367 - DNA, 786 bp, Artificial Sequence
  chemically treated genomic DNA (Homo sapiens) CpG-island No: 12367
  unsure (44, 51, 71)
agttattggttattttgacggaaaatataaattcgatcgggttnttagttnttatagattcggtttttatnttagaagttttatgatcggtagatagcgtttttatatcgtatataaacgttttacggttcgattttagtattatcgttcgtttatttagcgtcgatcgtgttaacgttagcgagtatttaatatttagcgaggagatattaggtcgttcgtttagataggttattaacgtcgttgtttgcgcggatagcgtttcgggtgttttgttcgatattatttacggtattatcggaatatttacgatagaattcgaattcggtttcgtagattgattcggtattttcgggggttgttcgaggatgacgtgcgcgttagtattattgatttcgaacgacgatatttttattcgacgaatacgattatttttgggttagggcgtgtttttcgtaaggagttgaatcgttttcgtcgattaatttattttcggcgacggcgattttacgtgtaacgtgcgtggtagttgttcgtgtcgtatcgttattattattttgattatattagttatattcgtcgtcgtttgcgtatgatcgatgttcgatttgatcgattttaattataacggtcggttaggattacgattacggtcgtaggtggcgattagcgttagcgcgatttaaaattcgcggggggtgtcgttaaagggttttcgtaatgggttttttaaagcggaaaatgttcggttcgtggtgggcgtgaaggcgagcgaatagcgaggcg

SEQ ID NO: 12368 - DNA, 786 bp, Artificial Sequence
  chemically treated genomic DNA (Homo sapiens) CpG-island No: 12368
  unsure (716, 736, 743)
cgcctcgctattcgctcgccttcacgcccaccacgaaccgaacattttccgctttaaaaaacccattacgaaaaccctttaacgacaccccccgcgaattttaaatcgcgctaacgctaatcgccacctacgaccgtaatcgtaatcctaaccgaccgttataattaaaatcgatcaaatcgaacatcgatcatacgcaaacgacgacgaatataactaatataatcaaaataataataacgatacgacacgaacaactaccacgcacgttacacgtaaaatcgccgtcgccgaaaataaattaatcgacgaaaacgattcaactccttacgaaaaacacgccctaacccaaaaataatcgtattcgtcgaataaaaatatcgtcgttcgaaatcaataatactaacgcgcacgtcatcctcgaacaacccccgaaaataccgaatcaatctacgaaaccgaattcgaattctatcgtaaatattccgataataccgtaaataatatcgaacaaaacacccgaaacgctatccgcgcaaacaacgacgttaataacctatctaaacgaacgacctaatatctcctcgctaaatattaaatactcgctaacgttaacacgatcgacgctaaataaacgaacgataatactaaaatcgaaccgtaaaacgtttatatacgatataaaaacgctatctaccgatcataaaacttctaanataaaaaccgaatctataanaactaanaacccgatcgaatttatattttccgtcaaaataaccaataact

SEQ ID NO: 12369 - DNA, 783 bp, Artificial Sequence
  chemically treated genomic DNA (Homo sapiens) CpG-island No: 12369
gtcgaaacggggttggttgtagtcggtggtcggggagatttttagtttgcgttcgagtatttcggggtgtggggttagaggtaggtcgatttcggcgtgtatatcgttcgttttgtattcgagcgtttttattcggttttttttgaagtttgtgtattgcgatcgagtttttttaaagtagtagcggggttcgcggttacgtgaggtcgatttttggaaagtttttggaaagtcgttttcgtagtagtcgggcggggcgcgagcggagcgttgattggggagggaggcggggagtaagggaggcgcgtcggtttgggaagtcgcgcgtattcgttgtttttgggatcgacgtttaatttttgttaagtttcgtcgtagtcgtcgcggttggcgggttttgggttttttttgaagtatgagttttttcgttcgtagttatttttatcgcgtggttcgcggatagtgcgcgtcggggtttcgggtgtatagttttaggatatttcgtgttcgtagttcgggcgttcgcggtaggtatcggtagtgggggaagttcgaaggtttcgtttcgaggagagttatcggggagggcggcgaggcgcggtcgcgtgcgtcggggagcggcggacggtttgggttttcgtagttcggagcgtcggggaagagagagttcgaatcgcggttttgtttcgcggtttagcgttgttgtttgttttttttagttttttttcggcgtttggaagtgtttggagttttttttttttattttttttaaattgttattta

SEQ ID NO: 12370 - DNA, 783 bp, Artificial Sequence
  chemically treated genomic DNA (Homo sapiens) CpG-island No: 12370
taaataacaatttaaaaaaaataaaaaaaaaaaactccaaacacttccaaacgccgaaaaaaaactaaaaaaaacaaacaacaacgctaaaccgcgaaacaaaaccgcgattcgaactctctcttccccgacgctccgaactacgaaaacccaaaccgtccgccgctccccgacgcacgcgaccgcgcctcgccgccctccccgataactctcctcgaaacgaaaccttcgaacttcccccactaccgatacctaccgcgaacgcccgaactacgaacacgaaatatcctaaaactatacacccgaaaccccgacgcgcactatccgcgaaccacgcgataaaaataactacgaacgaaaaaactcatacttcaaaaaaaacccaaaacccgccaaccgcgacgactacgacgaaacttaacaaaaattaaacgtcgatcccaaaaacaacgaatacgcgcgacttcccaaaccgacgcgcctcccttactccccgcctccctccccaatcaacgctccgctcgcgccccgcccgactactacgaaaacgactttccaaaaactttccaaaaatcgacctcacgtaaccgcgaaccccgctactactttaaaaaaactcgatcgcaatacacaaacttcaaaaaaaaccgaataaaaacgctcgaatacaaaacgaacgatatacacgccgaaatcgacctacctctaaccccacaccccgaaatactcgaacgcaaactaaaaatctccccgaccaccgactacaaccaaccccgtttcgac

SEQ ID NO: 12371 - DNA, 783 bp, Artificial Sequence
  chemically treated genomic DNA (Homo sapiens) CpG-island No: 12371
tgaatggtagtttaggggaaataaaaaaaagaaattttagatatttttagacgtcgagaaggggttggagaaagtaggtagtaacgttaggtcgcggggtagagtcgcggttcggattttttttttttcggcgtttcgagttgcggaagtttaggtcgttcgtcgtttttcggcgtacgcggtcgcgtttcgtcgtttttttcggtaatttttttcggggcggagttttcgggttttttttattatcggtatttgtcgcgggcgttcgagttgcgggtacggggtattttgaggttgtgtattcgggatttcggcgcgtattgttcgcgggttacgcggtgagggtggttgcgggcgagagggtttatgttttaggggaagtttaaggttcgttagtcgcggcggttgcgacgagatttggtaagagttaaacgtcggttttaggagtagcgagtgcgcgcgattttttagatcgacgcgttttttttgtttttcgtttttttttttagttagcgtttcgttcgcgtttcgttcggttgttgcggaggcggttttttaggaattttttaggaatcggttttacgtgatcgcgggtttcgttattgttttaaagaggttcggtcgtaatatataggttttagggaagatcgggtgagagcgttcgggtgtagggcgggcggtgtgtacgtcggggtcggtttgtttttggttttatatttcggggtgttcgggcgtaagttagagattttttcggttatcggttatagttaatttcgtttcggt

SEQ ID NO: 12372 - DNA, 783 bp, Artificial Sequence
  chemically treated genomic DNA (Homo sapiens) CpG-island No: 12372
accgaaacgaaattaactataaccgataaccgaaaaaatctctaacttacgcccgaacaccccgaaatataaaaccaaaaacaaaccgaccccgacgtacacaccgcccgccctacacccgaacgctctcacccgatcttccctaaaacctatatattacgaccgaacctctttaaaacaataacgaaacccgcgatcacgtaaaaccgattcctaaaaaattcctaaaaaaccgcctccgcaacaaccgaacgaaacgcgaacgaaacgctaactaaaaaaaaaaacgaaaaacaaaaaaaacgcgtcgatctaaaaaatcgcgcgcactcgctactcctaaaaccgacgtttaactcttaccaaatctcgtcgcaaccgccgcgactaacgaaccttaaacttcccctaaaacataaaccctctcgcccgcaaccaccctcaccgcgtaacccgcgaacaatacgcgccgaaatcccgaatacacaacctcaaaataccccgtacccgcaactcgaacgcccgcgacaaataccgataataaaaaaaacccgaaaactccgccccgaaaaaaattaccgaaaaaaacgacgaaacgcgaccgcgtacgccgaaaaacgacgaacgacctaaacttccgcaactcgaaacgccgaaaaaaaaaaaatccgaaccgcgactctaccccgcgacctaacgttactacctactttctccaaccccttctcgacgtctaaaaatatctaaaatttcttttttttatttcccctaaactaccattca

SEQ ID NO: 12373 - DNA, 827 bp, Artificial Sequence
  chemically treated genomic DNA (Homo sapiens) CpG-island No: 12373
ggacgcgaatttttttttgattttagttcgggcggttatttgtttttgtcgcggtgattttttttttatgattttgcggtgttttgagtttttcgggaatggcggggaagggacgcggagttagtgggggatcgcggggtcggcggaggagttattttcgtaggcggcgcgtttggcgaaggttttgcgggagttcggttagataggtagggagtcgatcggtcgcgacgcgtgcgggagggagcgtttttttaaggaagtagttaggaagcggggtcgaggtgggaagtaaagaataagatggaaatacgttttttgtttttaagggatcgcggagagtacgttcgtagggttttgggtttttgggaatgcgtaaggaaagtggttttttagggatttaggtttggcggagcgtagagcgcgggaagagttttttggaaatagttttttagtacgttggaagatttattgtttttcgtagttgtttagggttaggttttcgggttcgaatttcggtcggggaaagcgtcgggcgtttttttttgtacggggtgtaattagtaagtcggtgtcgcgggtttcgtaggtttagtagtatttggttttcgggcggagttgcggttgtagtttaggattttggcggttaagtttagggattgatattgtcgcgagggcggttgttcgggcgtcgagagtaggttgcgaagttttcgtcgagcgcggtttttatggtcggcgcgtttagggtattgtcgtttttaagtatagttaggtaattcgcgcggtacgttgtttttaggtatttgaaaaaagaaaaaagaaaaaaa

SEQ ID NO: 12374 - DNA, 827 bp, Artificial Sequence
  chemically treated genomic DNA (Homo sapiens) CpG-island No: 12374
tttttttcttttttcttttttcaaatacctaaaaacaacgtaccgcgcgaattacctaactatacttaaaaacgacaataccctaaacgcgccgaccataaaaaccgcgctcgacgaaaacttcgcaacctactctcgacgcccgaacaaccgccctcgcgacaatatcaatccctaaacttaaccgccaaaatcctaaactacaaccgcaactccgcccgaaaaccaaatactactaaacctacgaaacccgcgacaccgacttactaattacaccccgtacaaaaaaaaacgcccgacgctttccccgaccgaaattcgaacccgaaaacctaaccctaaacaactacgaaaaacaataaatcttccaacgtactaaaaaactatttccaaaaaactcttcccgcgctctacgctccgccaaacctaaatccctaaaaaaccactttccttacgcattcccaaaaacccaaaaccctacgaacgtactctccgcgatcccttaaaaacaaaaaacgtatttccatcttattctttacttcccacctcgaccccgcttcctaactacttccttaaaaaaacgctccctcccgcacgcgtcgcgaccgatcgactccctacctatctaaccgaactcccgcaaaaccttcgccaaacgcgccgcctacgaaaataactcctccgccgaccccgcgatcccccactaactccgcgtcccttccccgccattcccgaaaaactcaaaacaccgcaaaatcataaaaaaaaaatcaccgcgacaaaaacaaataaccgcccgaactaaaatcaaaaaaaaattcgcgtcc

SEQ ID NO: 12375 - DNA, 827 bp, Artificial Sequence
  chemically treated genomic DNA (Homo sapiens) CpG-island No: 12375
ttttttttttttttttttttttagatgtttagagatagcgtgtcgcgcgaattgtttgattgtatttgaaagcggtagtattttgggcgcgtcgattatggaagtcgcgttcggcgggggtttcgtagtttattttcgacgttcgggtagtcgttttcgcggtagtgttagtttttgaatttggtcgttaagattttgggttgtagtcgtagtttcgttcgggagttagatgttgttgggtttgcggggttcgcggtatcgatttgttgattgtatttcgtgtaaagggaggcgttcgacgtttttttcggtcggggttcgagttcgggagtttaattttgagtagttgcggaaaatagtaaattttttagcgtgttaagaagttatttttaagaagtttttttcgcgttttgcgtttcgttaggtttgagtttttggagaattattttttttacgtatttttaaggatttaggattttgcgagcgtgtttttcgcggttttttggaagtaagggacgtatttttattttattttttgttttttatttcgatttcgttttttagttgtttttttggggaggcgttttttttcgtacgcgtcgcggtcgatcggttttttatttgtttgatcgagttttcgtagggttttcgttagacgcgtcgtttgcggggatggttttttcgtcgatttcgcggttttttattggtttcgcgtttttttttcgttattttcggagggtttaaggtatcgtagggttatgagagaagggttatcgcggtaaagataggtggtcgttcgagttggggttagagaagggttcgcgttt

SEQ ID NO: 12376 - DNA, 827 bp, Artificial Sequence
  chemically treated genomic DNA (Homo sapiens) CpG-island No: 12376
aaacgcgaacccttctctaaccccaactcgaacgaccacctatctttaccgcgataacccttctctcataaccctacgataccttaaaccctccgaaaataacgaaaaaaaaacgcgaaaccaataaaaaaccgcgaaatcgacgaaaaaaccatccccgcaaacgacgcgtctaacgaaaaccctacgaaaactcgatcaaacaaataaaaaaccgatcgaccgcgacgcgtacgaaaaaaaacgcctccccaaaaaaacaactaaaaaacgaaatcgaaataaaaaacaaaaaataaaataaaaatacgtcccttacttccaaaaaaccgcgaaaaacacgctcgcaaaatcctaaatccttaaaaatacgtaaaaaaaataattctccaaaaactcaaacctaacgaaacgcaaaacgcgaaaaaaacttcttaaaaataacttcttaacacgctaaaaaatttactattttccgcaactactcaaaattaaactcccgaactcgaaccccgaccgaaaaaaacgtcgaacgcctccctttacacgaaatacaatcaacaaatcgataccgcgaaccccgcaaacccaacaacatctaactcccgaacgaaactacgactacaacccaaaatcttaacgaccaaattcaaaaactaacactaccgcgaaaacgactacccgaacgtcgaaaataaactacgaaacccccgccgaacgcgacttccataatcgacgcgcccaaaatactaccgctttcaaatacaatcaaacaattcgcgcgacacgctatctctaaacatctaaaaaaaaaaaaaaaaaaaaaa

SEQ ID NO: 12377 - DNA, 570 bp, Artificial Sequence
  chemically treated genomic DNA (Homo sapiens) CpG-island No: 12377
tcgggtttgtttgtttttggtcgtcgtcgttatcgtcgcgtaagtcggatagtcgtgagggttggaggggaaattaggttatcggttcgtagacgcggcgcggagtaggcgtttcgggttcggagtaagatagcgttcgggaagcgggtcggggcgggtcgggtacgcgggggattcggagaggcggggattttggtgttttagtcgtagtagttttttacgtttataaaagtggagagatcggggaggtgcggcgcggttttggttgcggtcgttttttttcgtttaaggagttgatattttgtaggattcgcgcgacgtttagtcgtcggcgtttttcgggatttcgtcgtcgggaggagggggcggaggagggtggagattgcggggtttggttaaggaaggcgtatattttcgggcgggcggtcgtgacgcggcggggattaattttgtatgaataatgtgagtgcgtttggaaaagagattttttgtttcgcgggttcggggtaagagttcgtaggttatttttttcgggtaggggcgtttaatttaatcggttttagggtattg

SEQ ID NO: 12378 - DNA, 570 bp, Artificial Sequence
  chemically treated genomic DNA (Homo sapiens) CpG-island No: 12378
caataccctaaaaccgattaaattaaacgcccctacccgaaaaaaataacctacgaactcttaccccgaacccgcgaaacaaaaaatctcttttccaaacgcactcacattattcatacaaaattaatccccgccgcgtcacgaccgcccgcccgaaaatatacgccttccttaaccaaaccccgcaatctccaccctcctccgccccctcctcccgacgacgaaatcccgaaaaacgccgacgactaaacgtcgcgcgaatcctacaaaatatcaactccttaaacgaaaaaaaacgaccgcaaccaaaaccgcgccgcacctccccgatctctccacttttataaacgtaaaaaactactacgactaaaacaccaaaatccccgcctctccgaatcccccgcgtacccgacccgccccgacccgcttcccgaacgctatcttactccgaacccgaaacgcctactccgcgccgcgtctacgaaccgataacctaatttcccctccaaccctcacgactatccgacttacgcgacgataacgacgacgaccaaaaacaaacaaacccga

SEQ ID NO: 12379 - DNA, 570 bp, Artificial Sequence
  chemically treated genomic DNA (Homo sapiens) CpG-island No: 12379
tagtgttttggagtcggttgggttgagcgtttttgttcggggaaggtagtttgcgggtttttgtttcgagttcgcggagtaggaggttttttttttaagcgtatttatattatttatgtaaagttaattttcgtcgcgttacggtcgttcgttcgaggatgtgcgttttttttggttaagtttcgtagtttttattttttttcgtttttttttttcggcggcggggtttcggggagcgtcggcgattgggcgtcgcgcgagttttgtaaaatgttaattttttgggcgaagagaggcggtcgtagttagggtcgcgtcgtattttttcggtttttttatttttataggcgtaggaagttattgcggttggggtattagagttttcgttttttcgggtttttcgcgtgttcggttcgtttcggttcgtttttcgggcgttgttttatttcgggttcggggcgtttgtttcgcgtcgcgtttgcgaatcggtgatttggttttttttttagtttttacggttgttcgatttgcgcggcggtggcggcggcggttaagagtaggtaaattcgg

SEQ ID NO: 12380 - DNA, 570 bp, Artificial Sequence
  chemically treated genomic DNA (Homo sapiens) CpG-island No: 12380
ccgaatttacctactcttaaccgccgccgccaccgccgcgcaaatcgaacaaccgtaaaaactaaaaaaaaaaccaaatcaccgattcgcaaacgcgacgcgaaacaaacgccccgaacccgaaataaaacaacgcccgaaaaacgaaccgaaacgaaccgaacacgcgaaaaacccgaaaaaacgaaaactctaataccccaaccgcaataacttcctacgcctataaaaataaaaaaaccgaaaaaatacgacgcgaccctaactacgaccgcctctcttcgcccaaaaaattaacattttacaaaactcgcgcgacgcccaatcgccgacgctccccgaaaccccgccgccgaaaaaaaaaaacgaaaaaaaataaaaactacgaaacttaaccaaaaaaaacgcacatcctcgaacgaacgaccgtaacgcgacgaaaattaactttacataaataatataaatacgcttaaaaaaaaaacctcctactccgcgaactcgaaacaaaaacccgcaaactaccttccccgaacaaaaacgctcaacccaaccgactccaaaacacta

SEQ ID NO: 12381 - DNA, 500 bp, Artificial Sequence
  chemically treated genomic DNA (Homo sapiens) CpG-island No: 12381
  unsure (382, 422, 424, 436, 453)
ggtatagtaggtagcgtagattattaacggtgtgtttagttagttattggtaattttttcggcgagtttggttaatcgtgattagaacgaagtgaacgaaattcgtcgttagtgggttttggtttttcgggaaacgggattattacgatggaataggttaacgtaggaatgcgcgtagttcgtcggtagaatcgattatttttgttattattcgggtagtttgttgtatgggtgtcggaagaagtattcgttatcgtcggattgttaaacgttagcgagttggttgatatggtttacgagtattgtcggaagcgaggtttgtattcggatgtcggagttttatttcgtggaaattaaacgcgtattattggttggttattantttgtattagaatatgcgggtttatgcgtttattgatgtngnattacgtcgtanggtcgtagatgagtttngttatatgattgcgagattaatcgtggtgaggcgatttttgaatagt

SEQ ID NO: 12382 - DNA, 500 bp, Artificial Sequence
  chemically treated genomic DNA (Homo sapiens) CpG-island No: 12382
  unsure (48, 65, 77, 79, 119)
actattcaaaaatcgcctcaccacgattaatctcgcaatcatataacnaaactcatctacgaccntacgacgtaatncnacatcaataaacgcataaacccgcatattctaatacaaantaataaccaaccaataatacgcgtttaatttccacgaaataaaactccgacatccgaatacaaacctcgcttccgacaatactcgtaaaccatatcaaccaactcgctaacgtttaacaatccgacgataacgaatacttcttccgacacccatacaacaaactacccgaataataacaaaaataatcgattctaccgacgaactacgcgcattcctacgttaacctattccatcgtaataatcccgtttcccgaaaaaccaaaacccactaacgacgaatttcgttcacttcgttctaatcacgattaaccaaactcgccgaaaaaattaccaataactaactaaacacaccgttaataatctacgctacctactatacc

SEQ ID NO: 12383 - DNA, 500 bp, Artificial Sequence
  chemically treated genomic DNA (Homo sapiens) CpG-island No: 12383
  unsure (48, 65, 77, 79, 119)
attgtttagggatcgttttattacggttaatttcgtagttatatgatnaagtttatttgcggttntacggcgtaatntngtattagtaagcgtatgggttcgtatgttttgatataggntggtaattagttagtagtgcgcgtttgatttttacgggataagatttcggtattcggatataggtttcgttttcggtaatattcgtaaattatattaattagttcgttgacgtttggtagttcggcggtaacggatgtttttttcggtatttatgtaataaattgttcgggtgatggtagaaatggtcgattttgtcgacgggttacgcgtatttttgcgttaatttgttttatcgtggtgatttcgtttttcgaaaagttagaatttattggcgacggatttcgtttatttcgttttggttacggttagttaggttcgtcgggaaagttgttagtaattggttgaatatatcgttgatgatttgcgttatttgttgtatt

SEQ ID NO: 12384 - DNA, 500 bp, Artificial Sequence
  chemically treated genomic DNA (Homo sapiens) CpG-island No: 12384
  unsure (382, 422, 424, 436, 453)
aatacaacaaataacgcaaatcatcaacgatatattcaaccaattactaacaactttcccgacgaacctaactaaccgtaaccaaaacgaaataaacgaaatccgtcgccaataaattctaacttttcgaaaaacgaaatcaccacgataaaacaaattaacgcaaaaatacgcgtaacccgtcgacaaaatcgaccatttctaccatcacccgaacaatttattacataaataccgaaaaaaacatccgttaccgccgaactaccaaacgtcaacgaactaattaatataatttacgaatattaccgaaaacgaaacctatatccgaataccgaaatcttatcccgtaaaaatcaaacgcgcactactaactaattaccancctatatcaaaacatacgaacccatacgcttactaatacnanattacgccgtanaaccgcaaataaacttnatcatataactacgaaattaaccgtaataaaacgatccctaaacaat

SEQ ID NO: 12385 - DNA, 842 bp, Artificial Sequence
  chemically treated genomic DNA (Homo sapiens) CpG-island No: 12385
  unsure (28)
ttcgtagacgcggcgcggagtaggcgtntcgggttcggagtaagatagcgttcgggaagcgggtcggggcgggtcgggtacgcgggggattcggagaggcggggattttggtgttttagtcgtagtagttttttacgtttataaaagtggagagatcggggaggtgcggcgcggttttggttgcggtcgttttttttcgtttaaggagttgatattttgtaggattcgcgcgacgtttagtcgtcggcgtttttcgggatttcgtcgtcgggaggagggggcggaggagggtggagattgcggggtttggttaaggaaggcgtatattttcgggcgggcggtcgtgacgcggcggggattaattttgtatgaataatgtgagtgcgtttggaaaagagattttttgtttcgcgggttcggggtaagagttcgtaggttatttttttcgggtaggggcgtttaatttaatcggttttagggaattggtaatttggttagaggatcgcgcgaaggtaagcggggtgagaggaggagggggcgatagttttaattgtttatagggtgggcgggatggtgacggagcgtcgtaagaattcggaggggtgcgggcggttaagtcgagcgcgcgcgggcgggtaggcgggtgagcgtgggtggtgggggtgttattagtttgattatttgttttcgcggggtttttgcgtttcggatttgggaggaggtgttttttcgtgttcgggtatcgcgcggcggtaggttgggagttacggagtggatagtggtggaatagggtggtcgggttttgttttaatcgtagcggttttgttttttaaattttaagt

SEQ ID NO: 12386 - DNA, 842 bp, Artificial Sequence
  chemically treated genomic DNA (Homo sapiens) CpG-island No: 12386
  unsure (815)
acttaaaatttaaaaaacaaaaccgctacgattaaaacaaaacccgaccaccctattccaccactatccactccgtaactcccaacctaccgccgcgcgatacccgaacacgaaaaaacacctcctcccaaatccgaaacgcaaaaaccccgcgaaaacaaataatcaaactaataacacccccaccacccacgctcacccgcctacccgcccgcgcgcgctcgacttaaccgcccgcacccctccgaattcttacgacgctccgtcaccatcccgcccaccctataaacaattaaaactatcgccccctcctcctctcaccccgcttaccttcgcgcgatcctctaaccaaattaccaattccctaaaaccgattaaattaaacgcccctacccgaaaaaaataacctacgaactcttaccccgaacccgcgaaacaaaaaatctcttttccaaacgcactcacattattcatacaaaattaatccccgccgcgtcacgaccgcccgcccgaaaatatacgccttccttaaccaaaccccgcaatctccaccctcctccgccccctcctcccgacgacgaaatcccgaaaaacgccgacgactaaacgtcgcgcgaatcctacaaaatatcaactccttaaacgaaaaaaaacgaccgcaaccaaaaccgcgccgcacctccccgatctctccacttttataaacgtaaaaaactactacgactaaaacaccaaaatccccgcctctccgaatcccccgcgtacccgacccgccccgacccgcttcccgaacgctatcttactccgaacccganacgcctactccgcgccgcgtctacgaa

SEQ ID NO: 12387 - DNA, 842 bp, Artificial Sequence
  chemically treated genomic DNA (Homo sapiens) CpG-island No: 12387
  unsure (815)
gtttggggtttgaggaatagagtcgttgcgattggaatagagttcggttattttgttttattattgtttatttcgtagtttttagtttgtcgtcgcgcggtgttcgaatacgagagggtatttttttttagattcggggcgtagaagtttcgcggaggtaggtaattaggttgatgatatttttattatttacgtttattcgtttgttcgttcgcgcgcgttcggtttagtcgttcgtattttttcgggtttttgcgacgtttcgttattatttcgtttattttgtggatagttggaattgtcgtttttttttttttttatttcgtttgttttcgcgcggttttttagttaaattattagttttttggagtcggttgggttgagcgtttttgttcggggaaggtagtttgcgggtttttgtttcgagttcgcggagtaggaggttttttttttaagcgtatttatattatttatgtaaagttaattttcgtcgcgttacggtcgttcgttcgaggatgtgcgttttttttggttaagtttcgtagtttttattttttttcgtttttttttttcggcggcggggtttcggggagcgtcggcgattgggcgtcgcgcgagttttgtaaaatgttaattttttgggcgaagagaggcggtcgtagttagggtcgcgtcgtattttttcggtttttttatttttataggcgtaggaagttattgcggttggggtattagagttttcgttttttcgggtttttcgcgtgttcggttcgtttcggttcgtttttcgggcgttgttttatttcgggttcggngcgtttgtttcgcgtcgcgtttgcgaa

SEQ ID NO: 12388 - DNA, 842 bp, Artificial Sequence
  chemically treated genomic DNA (Homo sapiens) CpG-island No: 12388
  unsure (28)
ttcgcaaacgcgacgcgaaacaaacgcnccgaacccgaaataaaacaacgcccgaaaaacgaaccgaaacgaaccgaacacgcgaaaaacccgaaaaaacgaaaactctaataccccaaccgcaataacttcctacgcctataaaaataaaaaaaccgaaaaaatacgacgcgaccctaactacgaccgcctctcttcgcccaaaaaattaacattttacaaaactcgcgcgacgcccaatcgccgacgctccccgaaaccccgccgccgaaaaaaaaaaacgaaaaaaaataaaaactacgaaacttaaccaaaaaaaacgcacatcctcgaacgaacgaccgtaacgcgacgaaaattaactttacataaataatataaatacgcttaaaaaaaaaacctcctactccgcgaactcgaaacaaaaacccgcaaactaccttccccgaacaaaaacgctcaacccaaccgactccaaaaaactaataatttaactaaaaaaccgcgcgaaaacaaacgaaataaaaaaaaaaaaaaacgacaattccaactatccacaaaataaacgaaataataacgaaacgtcgcaaaaacccgaaaaaatacgaacgactaaaccgaacgcgcgcgaacgaacaaacgaataaacgtaaataataaaaatatcatcaacctaattacctacctccgcgaaacttctacgccccgaatctaaaaaaaaataccctctcgtattcgaacaccgcgcgacgacaaactaaaaactacgaaataaacaataataaaacaaaataaccgaactctattccaatcgcaacgactctattcctcaaaccccaaac

SEQ ID NO: 12389 - DNA, 760 bp, Artificial Sequence
  chemically treated genomic DNA (Homo sapiens) CpG-island No: 12389
cgcggaattttgcggtcggtagcggttttttttttttttcgggtcgcgatttcgtcgattcgcgttaaatatatggagattaataaagttacgttttcgagttacgtggttagtgttttttttttttcgcgggcgggttgggggcgcgcgaggaggggcgtcgcgagtttgaggagcggggggcggtgatagcgtcgtttttcgtcgcgggatttcggtcgttacgggattttcgtttcgtttcggttttttcggtagttcggtttgcgaagttcggtggttaggtcggtgggttttagtcgcgtcgggtattggttcgttcgttcgtttatttattatagtgatcggggatattatggcggcggcggcggcggttggtattttgtttcgggttgtagcggttaggacgcgtttacggttaggtaagtcggcgacgattttataaagttcggagacgggataataattttcgagcgttcgcgttcggggttttgttagttagtttcgtgacgttattttgttagggtaatgagcgggcgggacggggggcgaggcggttggcgcgcggtaggtttcggttgttgttcggagaaggaggatttttcggggttagaggcgatatttttatgttcgttttttggaggcgtgtaaggcgtttacggaacgtgaacgtgatcgtgatttcggtgtttgggtgaggattgagtttggttgagagataaatatattgttgttttggacgtatagttatatatatttt

SEQ ID NO: 12390 - DNA, 760 bp, Artificial Sequence
  chemically treated genomic DNA (Homo sapiens) CpG-island No: 12390
aaaatatatataactatacgtccaaaacaacaatatatttatctctcaaccaaactcaatcctcacccaaacaccgaaatcacgatcacgttcacgttccgtaaacgccttacacgcctccaaaaaacgaacataaaaatatcgcctctaaccccgaaaaatcctccttctccgaacaacaaccgaaacctaccgcgcgccaaccgcctcgccccccgtcccgcccgctcattaccctaacaaaataacgtcacgaaactaactaacaaaaccccgaacgcgaacgctcgaaaattattatcccgtctccgaactttataaaatcgtcgccgacttacctaaccgtaaacgcgtcctaaccgctacaacccgaaacaaaataccaaccgccgccgccgccgccataatatccccgatcactataataaataaacgaacgaacgaaccaatacccgacgcgactaaaacccaccgacctaaccaccgaacttcgcaaaccgaactaccgaaaaaaccgaaacgaaacgaaaatcccgtaacgaccgaaatcccgcgacgaaaaacgacgctatcaccgccccccgctcctcaaactcgcgacgcccctcctcgcgcgcccccaacccgcccgcgaaaaaaaaaaaacactaaccacgtaactcgaaaacgtaactttattaatctccatatatttaacgcgaatcgacgaaatcgcgacccgaaaaaaaaaaaaaaccgctaccgaccgcaaaattccgcg

SEQ ID NO: 12391 - DNA, 760 bp, Artificial Sequence
  chemically treated genomic DNA (Homo sapiens) CpG-island No: 12391
aaaatgtatgtggttgtgcgtttaggatagtaatgtgtttgttttttagttaagtttagtttttatttaggtatcggggttacggttacgtttacgtttcgtggacgttttgtacgtttttaagaggcgggtatgggggtatcgtttttgatttcgggagatttttttttttcgagtagtagtcggggtttgtcgcgcgttagtcgtttcgtttttcgtttcgttcgtttattgttttggtagggtgacgttacggggttagttgatagaatttcgggcgcgggcgttcggaagttattgtttcgttttcgggttttgtagaatcgtcgtcggtttatttggtcgtgggcgcgttttggtcgttgtagttcggagtagggtgttagtcgtcgtcgtcgtcgttatggtgttttcggttattgtggtgagtgagcgagcgagcgagttagtgttcggcgcggttggagtttatcggtttggttatcggatttcgtaggtcgagttgtcgaaggggtcgaggcggggcgggggtttcgtggcggtcggagtttcgcggcgggaggcggcgttgttatcgtttttcgttttttagattcgcggcgttttttttcgcgcgtttttagttcgttcgcggagggaggaaaatattggttacgtgattcggaagcgtgattttgttgatttttatgtatttggcgcgggtcggcggggtcgcggttcgggagagggaggggatcgttgtcggtcgtagagtttcgcg

SEQ ID NO: 12392 - DNA, 760 bp, Artificial Sequence
  chemically treated genomic DNA (Homo sapiens) CpG-island No: 12392
cgcgaaactctacgaccgacaacgatcccctccctctcccgaaccgcgaccccgccgacccgcgccaaatacataaaaatcaacaaaatcacgcttccgaatcacgtaaccaatattttcctccctccgcgaacgaactaaaaacgcgcgaaaaaaaacgccgcgaatctaaaaaacgaaaaacgataacaacgccgcctcccgccgcgaaactccgaccgccacgaaacccccgccccgcctcgaccccttcgacaactcgacctacgaaatccgataaccaaaccgataaactccaaccgcgccgaacactaactcgctcgctcgctcactcaccacaataaccgaaaacaccataacgacgacgacgacgactaacaccctactccgaactacaacgaccaaaacgcgcccacgaccaaataaaccgacgacgattctacaaaacccgaaaacgaaacaataacttccgaacgcccgcgcccgaaattctatcaactaaccccgtaacgtcaccctaccaaaacaataaacgaacgaaacgaaaaacgaaacgactaacgcgcgacaaaccccgactactactcgaaaaaaaaaaatctcccgaaatcaaaaacgatacccccatacccgcctcttaaaaacgtacaaaacgtccacgaaacgtaaacgtaaccgtaaccccgatacctaaataaaaactaaacttaactaaaaaacaaacacattactatcctaaacgcacaaccacatacatttt

SEQ ID NO: 12393 - DNA, 1043 bp, Artificial Sequence
  chemically treated genomic DNA (Homo sapiens) CpG-island No: 12393
tcgggcgtttagggttcgagtgttttgcgtttcggttattttttttagggcgtcgtcgggttggttggggcgtagtttatacgttcgcgggggcgaagcgatagtagtcgtagggttgggagcgaggagttatttatcgtagtacgtcgagtttagtaatagcgtcgttattaggggttatattttcgcgttcgtcgcggggtcgtcgtcgtcgtcgtaggtgttcggagtagtagtcgtcgtcgtcgttataggtaggatcgatcgtcgtcgcgcgttataggtaggatttattgtttaggttgtacggtcgcgcgtacgcgcgtttttattgtttttcgttcgttttttcgtttgtttttcgttcgcgagagtcgcgtacgcgtattcggtttcgtttcgtaatcgttgttgttgacgcggcgttttttttagtcgtaggttttagattcggggttcgtttgttcgttttacggaggtcggatgtttgttttagggcggtggtacgcgtcgcgtttttaggttacgttttgtcgtattcgttcgtttttggggttcgcgtgttcgttcgtcgtaggaggttgaattttgtgtttttacgttcgtcggggattttattgtattcgtttttgttcgcgggtcggtttttgtttttcgcgcggcgttgggttttattgttttttttttttattttttttttttttgtttttatttttattttcgcgttttaggggtcgggtttcgtttcgttttagttcgcgtttttttttggattcgacgttcggttgcgcgcgtggattaggatatttaggtttttattagcgttcgtttttttcggacgcggtcgtttagcgtcgaagcggtttttgagttcgaggtcgttacgtttagggtagggcggtggtcgggtatttgttcgtagggagtttttattcgtttttcgcgggttttgcgttcggttcgtttattcgttttgtttttttttatgcggttttttttttttttttttatttggttttttagtgtttttattttttgattag

SEQ ID NO: 12394 - DNA, 1043 bp, Artificial Sequence
  chemically treated genomic DNA (Homo sapiens) CpG-island No: 12394
ctaatcaaaaaataaaaacactaaaaaaccaaataaaaaaaaaaaaaaaaaaccgcataaaaaaaaacaaaacgaataaacgaaccgaacgcaaaacccgcgaaaaacgaataaaaactccctacgaacaaatacccgaccaccgccctaccctaaacgtaacgacctcgaactcaaaaaccgcttcgacgctaaacgaccgcgtccgaaaaaaacgaacgctaataaaaacctaaatatcctaatccacgcgcgcaaccgaacgtcgaatccaaaaaaaaacgcgaactaaaacgaaacgaaacccgacccctaaaacgcgaaaataaaaataaaaacaaaaaaaaaaaaaataaaaaaaaaaaacaataaaacccaacgccgcgcgaaaaacaaaaaccgacccgcgaacaaaaacgaatacaataaaatccccgacgaacgtaaaaacacaaaattcaacctcctacgacgaacgaacacgcgaaccccaaaaacgaacgaatacgacaaaacgtaacctaaaaacgcgacgcgtaccaccgccctaaaacaaacatccgacctccgtaaaacgaacaaacgaaccccgaatctaaaacctacgactaaaaaaaacgccgcgtcaacaacaacgattacgaaacgaaaccgaatacgcgtacgcgactctcgcgaacgaaaaacaaacgaaaaaacgaacgaaaaacaataaaaacgcgcgtacgcgcgaccgtacaacctaaacaataaatcctacctataacgcgcgacgacgatcgatcctacctataacgacgacgacgactactactccgaacacctacgacgacgacgacgaccccgcgacgaacgcgaaaatataacccctaataacgacgctattactaaactcgacgtactacgataaataactcctcgctcccaaccctacgactactatcgcttcgcccccgcgaacgtataaactacgccccaaccaacccgacgacgccctaaaaaaaataaccgaaacgcaaaacactcgaaccctaaacgcccga

SEQ ID NO: 12395 - DNA, 1043 bp, Artificial Sequence
  chemically treated genomic DNA (Homo sapiens) CpG-island No: 12395
ttgattagaggatgaaaatattaaagaattaagtgagaaagagggaagagaatcgtatagggaagagtagagcgagtagacgagtcgaacgtagagttcgcgaggggcgagtggaagttttttgcgggtaggtattcgattatcgttttgttttgggcgtggcggtttcgggtttagggatcgtttcggcgttagacggtcgcgttcggaggaaacgggcgttggtgaaagtttaggtgttttggtttacgcgcgtagtcggacgtcgggtttagggagagacgcgggttggggcgggacgggattcggtttttgaagcgcgagggtgggagtgaaagtaaagaggagaaaagtagagagagaggatagtggggtttagcgtcgcgcgaaaggtaggaatcgattcgcggataggaacgggtgtaatgaggttttcggcgagcgtgggaatatagggtttagttttttgcggcgggcgagtacgcggattttaggggcgggcgggtgcgataggacgtgatttggaagcgcggcgcgtgttatcgttttggagtaggtattcggttttcgtggagcgggtaggcgggtttcgggtttggagtttgcgattggggagggcgtcgcgttaatagtagcggttgcggggcggggtcgagtgcgcgtgcgcggttttcgcgggcggggagtaggcgggggagcgggcgggaagtagtgggagcgcgcgtgcgcgcggtcgtgtagtttgggtagtgggttttgtttgtgacgcgcggcggcggtcggttttgtttgtaacggcggcggcggttgttgtttcggatatttgcggcggcggcggcgatttcgcggcgggcgcggagatgtggtttttggtagcggcgttgttgttgggttcggcgtgttgcggtgagtggtttttcgtttttagttttgcggttgttgtcgtttcgttttcgcgggcgtgtgggttgcgttttagttagttcggcggcgttttgaagagggtggtcggggcgtagaatattcgggttttgagcgttcga

SEQ ID NO: 12396 - DNA, 1043 bp, Artificial Sequence
  chemically treated genomic DNA (Homo sapiens) CpG-island No: 12396
tcgaacgctcaaaacccgaatattctacgccccgaccaccctcttcaaaacgccgccgaactaactaaaacgcaacccacacgcccgcgaaaacgaaacgacaacaaccgcaaaactaaaaacgaaaaaccactcaccgcaacacgccgaacccaacaacaacgccgctaccaaaaaccacatctccgcgcccgccgcgaaatcgccgccgccgccgcaaatatccgaaacaacaaccgccgccgccgttacaaacaaaaccgaccgccgccgcgcgtcacaaacaaaacccactacccaaactacacgaccgcgcgcacgcgcgctcccactacttcccgcccgctcccccgcctactccccgcccgcgaaaaccgcgcacgcgcactcgaccccgccccgcaaccgctactattaacgcgacgccctccccaatcgcaaactccaaacccgaaacccgcctacccgctccacgaaaaccgaatacctactccaaaacgataacacgcgccgcgcttccaaatcacgtcctatcgcacccgcccgcccctaaaatccgcgtactcgcccgccgcaaaaaactaaaccctatattcccacgctcgccgaaaacctcattacacccgttcctatccgcgaatcgattcctacctttcgcgcgacgctaaaccccactatcctctctctctacttttctcctctttactttcactcccaccctcgcgcttcaaaaaccgaatcccgtcccgccccaacccgcgtctctccctaaacccgacgtccgactacgcgcgtaaaccaaaacacctaaactttcaccaacgcccgtttcctccgaacgcgaccgtctaacgccgaaacgatccctaaacccgaaaccgccacgcccaaaacaaaacgataatcgaatacctacccgcaaaaaacttccactcgcccctcgcgaactctacgttcgactcgtctactcgctctactcttccctatacgattctcttccctctttctcacttaattctttaatattttcatcctctaatcaa

SEQ ID NO: 12397 - DNA, 1003 bp, Artificial Sequence
  chemically treated genomic DNA (Homo sapiens) CpG-island No: 12397
  unsure (925)
atcgcgtttttattaatatttttaatttatttatatacgtaatataacgaattatttttttttaattatttcgtttttttttaattttttttttttatttttttttacgtatcgcgtatttatcgttatttatttcgttcgtatttattttcgatatgtagtttattcgtaacgtattttcgttttatttttattttttatttacgtatttttatcgacgcgcgttagttattgcgatttttatcgcgatacgacgattttttatttttgattagtattcgttatcgtttatttcgattatatattcgcgtaatattcgatatcgcgtacgttatattaacgtcgttaatatcgtcgattgttgttcgtttgtagtgcgtagtatacgttcgtgcgacgtcgttgcgattgatttacggcgttacgtcgattattggttattattataatattttatttttattttttagtattattcgattttattgttttatatagatattttatttttgttatacgtaaatcgcgtttatcggtaatagttaatttacgtttacggtatacgtcgtattcgcgtttcgcgtattttttttattttataatttcgttttcgttatatttttaatattcgatttttttatttttattaatttcgtacgtaacgtcgcgtttcgtaatttcgtattcggagacgtattagatttatttcgtttatttcgtaacgtattacgttatttttattacgtatatcgtatttttcgcgtattcgggtttttattttgcgatttaatttcgcgcgttcgcgatattttttggttttatatcggatatgtcgcggttcgtaatatcgttatttttatttatacgtatacggattttattattattttattatagattcgcgattcggataggcgttattttngtattcgtgatacgtaatttcgcgatcgtattatttcgttttagtagttatttatttttatttattgtaaaaagaaat

SEQ ID NO: 12398 - DNA, 1003 bp, Artificial Sequence
  chemically treated genomic DNA (Homo sapiens) CpG-island No: 12398
  unsure (79)
atttctttttacaataaataaaaataaataactactaaaacgaaataatacgatcgcgaaattacgtatcacgaatacnaaaataacgcctatccgaatcgcgaatctataataaaataataataaaatccgtatacgtataaataaaaataacgatattacgaaccgcgacatatccgatataaaaccaaaaaatatcgcgaacgcgcgaaattaaatcgcaaaataaaaacccgaatacgcgaaaaatacgatatacgtaataaaaataacgtaatacgttacgaaataaacgaaataaatctaatacgtctccgaatacgaaattacgaaacgcgacgttacgtacgaaattaataaaaataaaaaaatcgaatattaaaaatataacgaaaacgaaattataaaataaaaaaaatacgcgaaacgcgaatacgacgtataccgtaaacgtaaattaactattaccgataaacgcgatttacgtataacaaaaataaaatatctatataaaacaataaaatcgaataatactaaaaaataaaaataaaatattataataataaccaataatcgacgtaacgccgtaaatcaatcgcaacgacgtcgcacgaacgtatactacgcactacaaacgaacaacaatcgacgatattaacgacgttaatataacgtacgcgatatcgaatattacgcgaatatataatcgaaataaacgataacgaatactaatcaaaaataaaaaatcgtcgtatcgcgataaaaatcgcaataactaacgcgcgtcgataaaaatacgtaaataaaaaataaaaataaaacgaaaatacgttacgaataaactacatatcgaaaataaatacgaacgaaataaataacgataaatacgcgatacgtaaaaaaaaataaaaaaaaaaaattaaaaaaaaacgaaataattaaaaaaaaataattcgttatattacgtatataaataaattaaaaatattaataaaaacgcgat

SEQ ID NO: 12399 - DNA, 1003 bp, Artificial Sequence
  chemically treated genomic DNA (Homo sapiens) CpG-island No: 12399
  unsure (79)
gtttttttttgtaataaataaaaatgagtaattattagagcggggtggtgcgatcgcgaagttgcgtgttacgggtgtnggggtggcgtttgttcgggtcgcgaatttgtagtagagtgatggtagagttcgtgtacgtgtgagtgagggtgacggtattgcggatcgcgatatgttcgatgtaagattaggaagtgtcgcgagcgcgcgaggttgagtcgtaagatgagagttcgggtacgcggagggtgcgatgtgcgtgatggagatgacgtaatgcgttgcggaatggacgaggtagatttggtgcgttttcggatgcggaattgcggagcgcggcgttgcgtgcggagttggtagaggtgggagaatcgagtgttggaggtatgacggagacggagttgtagagtggaggaggtgcgcgaggcgcgggtgcggcgtatgtcgtgagcgtggattggttgttatcgatgagcgcgatttgcgtgtggtaagagtaaggtgtttatgtgaggtagtgaggtcgagtagtgttggagagtgggaatggggtgttgtgatagtggttagtgatcggcgtagcgtcgtaggttagtcgtagcggcgtcgtacgagcgtgtgttgcgtattgtaggcgggtagtagtcggcggtgttgacgacgttgatgtggcgtgcgcggtatcgggtattgcgcgaatgtgtggtcggaataggcggtggcgggtgttgattagagatgggggatcgtcgtgtcgcgatggaggtcgtaatggttggcgcgcgtcggtggggatgcgtggatgggaggtagaggtgagacggaggtgcgttgcgagtgggttgtatatcgggagtgagtgcggacgaggtagatggcggtgggtgcgcgatgcgtgagaagaggtggagggaggaggttgggagggagcgaggtggttgagagggggtagttcgttgtgttacgtgtgtggatgggttggaggtgttgatggagacgcggt

SEQ ID NO: 12400 - DNA, 1003 bp, Artificial Sequence
  chemically treated genomic DNA (Homo sapiens) CpG-island No: 12400
  unsure (925)
accgcgtctccatcaacacctccaacccatccacacacgtaacacaacgaactaccccctctcaaccacctcgctccctcccaacctcctccctccacctcttctcacgcatcgcgcacccaccgccatctacctcgtccgcactcactcccgatatacaacccactcgcaacgcacctccgtctcacctctacctcccatccacgcatccccaccgacgcgcgccaaccattacgacctccatcgcgacacgacgatcccccatctctaatcaacacccgccaccgcctattccgaccacacattcgcgcaatacccgataccgcgcacgccacatcaacgtcgtcaacaccgccgactactacccgcctacaatacgcaacacacgctcgtacgacgccgctacgactaacctacgacgctacgccgatcactaaccactatcacaacaccccattcccactctccaacactactcgacctcactacctcacataaacaccttactcttaccacacgcaaatcgcgctcatcgataacaaccaatccacgctcacgacatacgccgcacccgcgcctcgcgcacctcctccactctacaactccgtctccgtcatacctccaacactcgattctcccacctctaccaactccgcacgcaacgccgcgctccgcaattccgcatccgaaaacgcaccaaatctacctcgtccattccgcaacgcattacgtcatctccatcacgcacatcgcaccctccgcgtacccgaactctcatcttacgactcaacctcgcgcgctcgcgacacttcctaatcttacatcgaacatatcgcgatccgcaataccgtcaccctcactcacacgtacacgaactctaccatcactctactacaaattcgcgacccgaacaaacgccaccccnacacccgtaacacgcaacttcgcgatcgcaccaccccgctctaataattactcatttttatttattacaaaaaaaaac

SEQ ID NO: 12401 - DNA, 809 bp, Artificial Sequence
  chemically treated genomic DNA (Homo sapiens) CpG-island No: 12401
  unsure (633)
tgtcggaatagtacgacgaaaagtcgtaggtatagtaggtagcgtagattattaacggtgtgtttagttagttattggtaattttttcggcgagttttggttaatcgtgattagaacgaagtgaacgaaattcggcgttagggggttttggtttttcgggaaaacgggattaattaggatggaatagggtaacgtaggaatgcgcgtaaattcgatcggagaaacgattattttttgttattaattcgggtagatttggtgtatgggggtcgggaagaaaataattcgttattcgatcggaatggttaaaacgttaagcggagattgggtggaaaatggggtttaaataaggaattggttcgggaagatcgaagggttcgtggaaattcgggaaggtcggaggaggtattaaaatcgcgggaaaaaagataaaatttcgttatttaaaaggggatgggtgtaattatttattttgggtattaaggaaatatcggcgcgggtttaaaaaggcggatttttaaacgggagggcgcgaaaaaaaaaaaatttcggcgagagggtcgttttagaaaaaaaagattatttcgcgttatatatgagatatgggcgcggaaataataagatatttcgaancggaaagggtaaaaatacgttcggtggaacgcgcgaggtgaaaacgaaaacgtaacgttgagcgtaaaagggagtcgcggtgcgtgatacgttatttgaaaaaagcgagggcgaatacgcgagttatatgggggggggagaaaaagattcggaaatgaaaaattaagaacgtatcg

SEQ ID NO: 12402 - DNA, 809 bp, Artificial Sequence
  chemically treated genomic DNA (Homo sapiens) CpG-island No: 12402
  unsure (177)
cgatacgttcttaatttttcatttccgaatctttttctcccccccccatataactcgcgtattcgccctcgcttttttcaaataacgtatcacgcaccgcgactcccttttacgctcaacgttacgttttcgttttcacctcgcgcgttccaccgaacgtatttttaccctttccgnttcgaaatatcttattatttccgcgcccatatctcatatataacgcgaaataatcttttttttctaaaacgaccctctcgccgaaattttttttttttcgcgccctcccgtttaaaaatccgcctttttaaacccgcgccgatatttccttaatacccaaaataaataattacacccatccccttttaaataacgaaattttatcttttttcccgcgattttaatacctcctccgaccttcccgaatttccacgaacccttcgatcttcccgaaccaattccttatttaaaccccattttccacccaatctccgcttaacgttttaaccattccgatcgaataacgaattattttcttcccgacccccatacaccaaatctacccgaattaataacaaaaaataatcgtttctccgatcgaatttacgcgcattcctacgttaccctattccatcctaattaatcccgttttcccgaaaaaccaaaaccccctaacgccgaatttcgttcacttcgttctaatcacgattaaccaaaactcgccgaaaaaattaccaataactaactaaacacaccgttaataatctacgctacctactatacctacgacttttcgtcgtactattccgaca

SEQ ID NO: 12403 - DNA, 809 bp, Artificial Sequence
  chemically treated genomic DNA (Homo sapiens) CpG-island No: 12403
  unsure (177)
cggtacgtttttgattttttattttcgagttttttttttttttttttatgtaattcgcgtgttcgttttcgttttttttaagtggcgtgttacgtatcgcggtttttttttgcgtttagcgttgcgttttcgtttttatttcgcgcgttttatcgagcgtatttttgtttttttcgnttcggggtgttttattgttttcgcgtttatgttttatgtgtggcgcgagatggttttttttttttggggcggttttttcgtcggggttttttttttttcgcgttttttcgtttaaaggttcgtttttttgggttcgcgtcggtgtttttttgatatttagggtgggtggttatatttatttttttttaggtggcggggttttgttttttttttcgcggttttaatgtttttttcggttttttcgggtttttacgggtttttcggttttttcgggttaattttttgtttaaattttattttttatttagttttcgtttgacgttttggttatttcggtcgggtaacggattgtttttttttcggtttttatgtattaaatttgttcgggttgatggtaaaaaatggtcgttttttcgatcgggtttacgcgtatttttgcgttattttgttttattttggttgatttcgttttttcgaaaagttagaattttttggcgtcggatttcgtttatttcgttttggttacggttagttagggttcgtcgggaaagttgttagtaattggttgaatatatcgttgatgatttgcgttatttgttgtatttgcggtttttcgtcgtattgtttcggta

SEQ ID NO: 12404 - DNA, 809 bp, Artificial Sequence
  chemically treated genomic DNA (Homo sapiens) CpG-island No: 12404
  unsure (633)
taccgaaacaatacgacgaaaaaccgcaaatacaacaaataacgcaaatcatcaacgatatattcaaccaattactaacaactttcccgacgaaccctaactaaccgtaaccaaaacgaaataaacgaaatccgacgccaaaaaattctaacttttcgaaaaaacgaaatcaaccaaaataaaacaaaataacgcaaaaatacgcgtaaacccgatcgaaaaaacgaccattttttaccatcaacccgaacaaatttaatacataaaaaccgaaaaaaaaacaatccgttacccgaccgaaataaccaaaacgtcaaacgaaaactaaataaaaaataaaatttaaacaaaaaattaacccgaaaaaaccgaaaaacccgtaaaaacccgaaaaaaccgaaaaaaacattaaaaccgcgaaaaaaaaaacaaaaccccgccacctaaaaaaaaataaatataaccacccaccctaaatatcaaaaaaacaccgacgcgaacccaaaaaaacgaacctttaaacgaaaaaacgcgaaaaaaaaaaaaccccgacgaaaaaaccgccccaaaaaaaaaaaaccatctcgcgccacacataaaacataaacgcgaaaacaataaaacaccccgaancgaaaaaaacaaaaatacgctcgataaaacgcgcgaaataaaaacgaaaacgcaacgctaaacgcaaaaaaaaaccgcgatacgtaacacgccacttaaaaaaaacgaaaacgaacacgcgaattacataaaaaaaaaaaaaaaaaactcgaaaataaaaaatcaaaaacgtaccg

SEQ ID NO: 12405 - DNA, 817 bp, Artificial Sequence
  chemically treated genomic DNA (Homo sapiens) CpG-island No: 12405
tttttggaatttttcgtatgtttaggcgcgcgatcgaatgaaaagggaggggggaagggaagggtggagaggggagggggaagaggagcggcggttacgcgttaggttttggcggcgttacgaggaaagcgcgcggtcgtcgtttttttattattcggcggacgaggacgattcgcgcgggttttattatcggtcggtcgtagttagtcggattttggcgttgttttttgtttcgttttacgtttcgttttaggtcgtttttttatttgggtggtttttttcgatcgattttgaggtgaaaaggaatgtgtttttttcgatgaacgtttcgtggaagtcgttgagttgttcgtttatgttggtgtcggtgtgcggaagtggttttacgaaggagtagcggcgaggcggtagcggttgcgaaatgcgtaagttgcggatagcgttttattcgtagtaggcgggcggcgcggagcgaacgaagtagcgggcggtgcggttcggtatttatagagtagcgttcgcgcgcgttcggttcgggtttcgtttttcggcgtcgcgcgttaatgtattatttgcgcgggggtcgggggaggaagggtagttcgtttcgcggagttcgggttgaattatattgcgcggtcgcgggaggtgtcgtggtaattcggttttttagagatcgtttagttattttgagtcgttagagttaggagaaaaatgtagacgcgaggagacgtgggggattgtttttttttgtttgatgtgggagaaaaagcgattggggtttgttggattcgtttttttgtgcggtgatatggta

SEQ ID NO: 12406 - DNA, 817 bp, Artificial Sequence
  chemically treated genomic DNA (Homo sapiens) CpG-island No: 12406
taccatatcaccgcacaaaaaaacgaatccaacaaaccccaatcgctttttctcccacatcaaacaaaaaaaaacaatcccccacgtctcctcgcgtctacatttttctcctaactctaacgactcaaaataactaaacgatctctaaaaaaccgaattaccacgacacctcccgcgaccgcgcaatataattcaacccgaactccgcgaaacgaactacccttcctcccccgacccccgcgcaaataatacattaacgcgcgacgccgaaaaacgaaacccgaaccgaacgcgcgcgaacgctactctataaataccgaaccgcaccgcccgctacttcgttcgctccgcgccgcccgcctactacgaataaaacgctatccgcaacttacgcatttcgcaaccgctaccgcctcgccgctactccttcgtaaaaccacttccgcacaccgacaccaacataaacgaacaactcaacgacttccacgaaacgttcatcgaaaaaaacacattccttttcacctcaaaatcgatcgaaaaaaaccacccaaataaaaaaacgacctaaaacgaaacgtaaaacgaaacaaaaaacaacgccaaaatccgactaactacgaccgaccgataataaaacccgcgcgaatcgtcctcgtccgccgaataataaaaaaacgacgaccgcgcgctttcctcgtaacgccgccaaaacctaacgcgtaaccgccgctcctcttccccctcccctctccacccttcccttcccccctcccttttcattcgatcgcgcgcctaaacatacgaaaaattccaaaaa

SEQ ID NO: 12407 - DNA, 817 bp, Artificial Sequence
  chemically treated genomic DNA (Homo sapiens) CpG-island No: 12407
tgttatgttatcgtataggggagcgggtttagtaagttttagtcgtttttttttttatattaaataaggaagagtaattttttacgttttttcgcgtttgtattttttttttagttttagcggtttaagatagttgaacggtttttggagggtcggattgttacggtatttttcgcggtcgcgtagtgtggtttagttcggatttcgcggggcgagttgttttttttttttcgattttcgcgtaagtggtgtattggcgcgcggcgtcgaggggcggggttcgagtcgggcgcgcgcgggcgttgttttataaatatcgggtcgtatcgttcgttgtttcgttcgtttcgcgtcgttcgtttgttacgagtagaacgttgttcgtagtttgcgtatttcgtagtcgttgtcgtttcgtcgttgttttttcgtaaggttattttcgtatatcgatattaatatgaacggatagtttaacggtttttacgaggcgtttatcgaggagggtatatttttttttattttagagtcggtcggggaaggttatttaggtgaggggacggtttgaagcgaagcgtggggcggggtagaaggtagcgttaaggttcggttggttgcggtcggtcggtggtggggttcgcgcgggtcgttttcgttcgtcgggtgatggaagagcggcgatcgcgcgtttttttcgtggcgtcgttagggtttggcgcgtggtcgtcgtttttttttttttttttttttttatttttttttttttttttttttttttattcggtcgcgcgtttaggtatgcggaaggttttagaaa

SEQ ID NO: 12408 - DNA, 817 bp, Artificial Sequence
  chemically treated genomic DNA (Homo sapiens) CpG-island No: 12408
tttctaaaaccttccgcatacctaaacgcgcgaccgaataaaaaaaaaaaaaaaaaaaaaaaaataaaaaaaaaaaaaaaaaaaaaaacgacgaccacgcgccaaaccctaacgacgccacgaaaaaaacgcgcgatcgccgctcttccatcacccgacgaacgaaaacgacccgcgcgaaccccaccaccgaccgaccgcaaccaaccgaaccttaacgctaccttctaccccgccccacgcttcgcttcaaaccgtcccctcacctaaataaccttccccgaccgactctaaaataaaaaaaaatataccctcctcgataaacgcctcgtaaaaaccgttaaactatccgttcatattaatatcgatatacgaaaataaccttacgaaaaaacaacgacgaaacgacaacgactacgaaatacgcaaactacgaacaacgttctactcgtaacaaacgaacgacgcgaaacgaacgaaacaacgaacgatacgacccgatatttataaaacaacgcccgcgcgcgcccgactcgaaccccgcccctcgacgccgcgcgccaatacaccacttacgcgaaaatcgaaaaaaaaaaaacaactcgccccgcgaaatccgaactaaaccacactacgcgaccgcgaaaaataccgtaacaatccgaccctccaaaaaccgttcaactatcttaaaccgctaaaactaaaaaaaaaatacaaacgcgaaaaaacgtaaaaaattactcttccttatttaatataaaaaaaaaaacgactaaaacttactaaacccgctcccctatacgataacataaca

SEQ ID NO: 12409 - DNA, 743 bp, Artificial Sequence
  chemically treated genomic DNA (Homo sapiens) CpG-island No: 12409
gcggagagacgtttttttagttatgtgtacggcgataattttaggtagagttggaatgtaggttgtttcgagatttttatttgttgacgttttttcggtaggaatcggttaaacggaatttttagttatttcggttttagagcggtttttacgttatagtttttcgcgtttaggtttttcgaagttgggatatcgtttacgtttttttcgtgacgcgggcgcggggttcgggagttgtagtttcgggtagggcgcgggtatcgaggtcggggttgcgcggattttacgtttcggcgggcggcgcggcgaggtttggggtttttaggggcggggtcgttcggttttttaaattttttagggttgtttcgagggtcgtagttagagtcggcgttacgagggggtcgagtagggtgcggcggcggcggggcgtttcggggaggtgcgtattgggtttttttttttttttcgggtttttaggaattatttggggattttcgcgtttcgggttttggggggtcgtcggtcgtagggttcggttttagtcggggttttcgcgtttaggcgagcgggggtcgggtcgggttgggtttttcgcgtgaattcgtttttcgtttagggcgtcgatggttaggtggttgtttgcgcgtcgtcgattcgttatcgttttattgggtcggtatttagtttttttttggcgtggttttttcggttgtttagttttttttttagttttggttttttag

SEQ ID NO: 12410 - DNA, 743 bp, Artificial Sequence
  chemically treated genomic DNA (Homo sapiens) CpG-island No: 12410
ctaaaaaaccaaaactaaaaaaaaaactaaacaaccgaaaaaaccacgccaaaaaaaaactaaataccgacccaataaaacgataacgaatcgacgacgcgcaaacaaccacctaaccatcgacgccctaaacgaaaaacgaattcacgcgaaaaacccaacccgacccgacccccgctcgcctaaacgcgaaaaccccgactaaaaccgaaccctacgaccgacgaccccccaaaacccgaaacgcgaaaatccccaaataattcctaaaaacccgaaaaaaaaaaaaaaacccaatacgcacctccccgaaacgccccgccgccgccgcaccctactcgaccccctcgtaacgccgactctaactacgaccctcgaaacaaccctaaaaaatttaaaaaaccgaacgaccccgcccctaaaaaccccaaacctcgccgcgccgcccgccgaaacgtaaaatccgcgcaaccccgacctcgatacccgcgccctacccgaaactacaactcccgaaccccgcgcccgcgtcacgaaaaaaacgtaaacgatatcccaacttcgaaaaacctaaacgcgaaaaactataacgtaaaaaccgctctaaaaccgaaataactaaaaattccgtttaaccgattcctaccgaaaaaacgtcaacaaataaaaatctcgaaacaacctacattccaactctacctaaaattatcgccgtacacataactaaaaaaacgtctctccgc

SEQ ID NO: 12411 - DNA, 743 bp, Artificial Sequence
  chemically treated genomic DNA (Homo sapiens) CpG-island No: 12411
ttgagggattagggttgggagaagggttggataatcgaagaggttacgttaaggagaggttgggtgtcggtttagtggagcggtggcgagtcggcggcgcgtaggtaattatttgattatcggcgttttgggcgaggggcgggtttacgcggaaagtttagttcggttcggttttcgttcgtttgggcgcggggatttcggttggggtcggattttgcggtcggcgattttttaggattcgggacgcgagagtttttaggtgatttttggaagttcggaggaagggaaggagtttagtacgtattttttcggagcgtttcgtcgtcgtcgtattttgttcggttttttcgtggcgtcgattttagttgcggttttcggagtagttttgaaaggtttaaagggtcgagcggtttcgtttttggaggttttaggtttcgtcgcgtcgttcgtcgggacgtggagttcgcgtagtttcggtttcggtgttcgcgttttgttcgagattataattttcgagtttcgcgttcgcgttacgggggaaacgtgggcggtgttttaatttcggaggatttgggcgcggagggttgtggcgtgaagatcgttttaaaatcgagatgattagaggtttcgtttaatcgatttttgtcggggaagcgttagtaggtggggatttcggggtagtttgtattttagttttatttgggattgtcgtcgtgtatatggttggaggagcgttttttcgt

SEQ ID NO: 12412 - DNA, 743 bp, Artificial Sequence
  chemically treated genomic DNA (Homo sapiens) CpG-island No: 12412
acgaaaaaacgctcctccaaccatatacacgacgacaatcccaaataaaactaaaatacaaactaccccgaaatccccacctactaacgcttccccgacaaaaatcgattaaacgaaacctctaatcatctcgattttaaaacgatcttcacgccacaaccctccgcgcccaaatcctccgaaattaaaacaccgcccacgtttcccccgtaacgcgaacgcgaaactcgaaaattataatctcgaacaaaacgcgaacaccgaaaccgaaactacgcgaactccacgtcccgacgaacgacgcgacgaaacctaaaacctccaaaaacgaaaccgctcgaccctttaaacctttcaaaactactccgaaaaccgcaactaaaatcgacgccacgaaaaaaccgaacaaaatacgacgacgacgaaacgctccgaaaaaatacgtactaaactccttcccttcctccgaacttccaaaaatcacctaaaaactctcgcgtcccgaatcctaaaaaatcgccgaccgcaaaatccgaccccaaccgaaatccccgcgcccaaacgaacgaaaaccgaaccgaactaaactttccgcgtaaacccgcccctcgcccaaaacgccgataatcaaataattacctacgcgccgccgactcgccaccgctccactaaaccgacacccaacctctccttaacgtaacctcttcgattatccaacccttctcccaaccctaatccctcaa

SEQ ID NO: 12413 - DNA, 674 bp, Artificial Sequence
  chemically treated genomic DNA (Homo sapiens) CpG-island No: 12413
taggcgttgatcgttatttattgtcgtgatcgtgattttggtcggtcgttgtggttggggtcggttaagtcgaatatcggttatacgtaagcggcggcgggtgtggttggtgtgattaagatggtgatggcgatgcggtacgggtagttgttacgtacgttgtacgtggaatcgtcgtcgtcggaggtggattggtcggcggggacggtttaattttttacggagaatacgttttggtttaggagtggtcgtgttcgtcgggtgggggtgtcgtcgttcgggattagtggtattaacgcgtacgttattttcgaatagttttcgggagtgtcgagttagtttgcggggtcgggttcgggttttgtcgtggatgtttcggtggtgtcgtggatggtgtcgggtaaaatattcgaagcgttattcgcgtaggtaacggcgttgatgatttatttggacgagcgatttgatgttttttcgttggatgttgggtattcgttggcgttgatacggtcggcgttggatgagcgagcggtggtgtttgggtcggatcgtgaaacgttgttgtgcggtgtgaaagcgttgtttgtcgggttatgaggttttttgggttggtgatcgggattttgggggggttggggggttcgttatcggggttttgttgtttttttcgggtt

SEQ ID NO: 12414 - DNA, 674 bp, Artificial Sequence
  chemically treated genomic DNA (Homo sapiens) CpG-island No: 12414
aacccgaaaaaaacaacaaaaccccgataacgaaccccccaacccccccaaaatcccgatcaccaacccaaaaaacctcataacccgacaaacaacgctttcacaccgcacaacaacgtttcacgatccgacccaaacaccaccgctcgctcatccaacgccgaccgtatcaacgccaacgaatacccaacatccaacgaaaaaacatcaaatcgctcgtccaaataaatcatcaacgccgttacctacgcgaataacgcttcgaatattttacccgacaccatccacgacaccaccgaaacatccacgacaaaacccgaacccgaccccgcaaactaactcgacactcccgaaaactattcgaaaataacgtacgcgttaataccactaatcccgaacgacgacacccccacccgacgaacacgaccactcctaaaccaaaacgtattctccgtaaaaaattaaaccgtccccgccgaccaatccacctccgacgacgacgattccacgtacaacgtacgtaacaactacccgtaccgcatcgccatcaccatcttaatcacaccaaccacacccgccgccgcttacgtataaccgatattcgacttaaccgaccccaaccacaacgaccgaccaaaatcacgatcacgacaataaataacgatcaacgccta

SEQ ID NO: 12415 - DNA, 674 bp, Artificial Sequence
  chemically treated genomic DNA (Homo sapiens) CpG-island No: 12415
gattcggaaaaaataataaaatttcgatggcgggttttttagtttttttaagatttcggttattaatttagaaagttttatgattcggtagatagcgtttttatatcgtataataacgttttacggttcgatttaagtattatcgttcgtttatttagcgtcgatcgtgttaacgttagcgagtatttaatatttagcgaggagatattaggtcgttcgtttagataggttattaacgtcgttgtttgcgcggatagcgtttcgggtgttttgttcgatattatttacggtattatcggaatatttacgatagaattcgaattcggtttcgtagattgattcggtattttcgggggttgttcgaggatgacgtgcgcgttagtattattgatttcgaacgacgatatttttattcgacgaatacgattatttttgggttagggcgtgtttttcgtaaggagttgaatcgttttcgtcgattaatttattttcggcgacggcgattttacgtgtaacgtgcgtggtagttgttcgtgtcgtatcgttattattattttgattatattagttatattcgtcgtcgtttgcgtatgatcgatgttcgatttgatcgattttaattataacggtcggttaggattacgattacggtaataggtggcgattagcgtttg

SEQ ID NO: 12416 - DNA, 674 bp, Artificial Sequence
  chemically treated genomic DNA (Homo sapiens) CpG-island No: 12416
caaacgctaatcgccacctattaccgtaatcgtaatcctaaccgaccgttataattaaaatcgatcaaatcgaacatcgatcatacgcaaacgacgacgaatataactaatataatcaaaataataataacgatacgacacgaacaactaccacgcacgttacacgtaaaatcgccgtcgccgaaaataaattaatcgacgaaaacgattcaactccttacgaaaaacacgccctaacccaaaaataatcgtattcgtcgaataaaaatatcgtcgttcgaaatcaataatactaacgcgcacgtcatcctcgaacaacccccgaaaataccgaatcaatctacgaaaccgaattcgaattctatcgtaaatattccgataataccgtaaataatatcgaacaaaacacccgaaacgctatccgcgcaaacaacgacgttaataacctatctaaacgaacgacctaatatctcctcgctaaatattaaatactcgctaacgttaacacgatcgacgctaaataaacgaacgataatacttaaatcgaaccgtaaaacgttattatacgatataaaaacgctatctaccgaatcataaaactttctaaattaataaccgaaatcttaaaaaaactaaaaaacccgccatcgaaattttattattttttccgaatc

SEQ ID NO: 12417 - DNA, 544 bp, Artificial Sequence
  chemically treated genomic DNA (Homo sapiens) CpG-island No: 12417
  unsure (131, 135..136, 191)
tttttcgcgggggcgcgggcgttttttttcgcgttttcggtcgttttttttttttttttcgttttttcgttttttcgcgtttttttttttttcgtttcgttcgggtcgtttcgcggggggggcggcggcgngttnncgcgcgttttcgttttttcggttttttttcgcgcgcgtttttttttcgggtcgtnttttcgcgtcgtcgggcgcgcgcgggcggcgttttttcggttttttgtttttcgttcggcgttttttttttcggcgttcgtgtggttcgtcgggttgggtgttcgcgtttttttgtttttttttttcgttcgcgtcggttttttttgttcgtttgtttttttttttcgtgtgtttttttgtcggttcgtttcgcgcgggtttgtttgcgtttttttttttttcgtgttttttttcgtttcgcgtttttcgcgcggcgggttttttcggttgttttttgtttgttttttttttttttttttttttttttcgtttttttcgtcgggatgcgtattagaaaataaaaaaaaaaaaa

SEQ ID NO: 12418 - DNA, 544 bp, Artificial Sequence
  chemically treated genomic DNA (Homo sapiens) CpG-island No: 12418
  unsure (354, 409..410, 414)
tttttttttttttattttctaatacgcatcccgacgaaaaaaacgaaaaaaaaaaaaaaaaaaaaaaaaaacaaacaaaaaacaaccgaaaaaacccgccgcgcgaaaaacgcgaaacgaaaaaaaacacgaaaaaaaaaaaaacgcaaacaaacccgcgcgaaacgaaccgacaaaaaaacacacgaaaaaaaaaaacaaacgaacaaaaaaaaccgacgcgaacgaaaaaaaaaaacaaaaaaacgcgaacacccaacccgacgaaccacacgaacgccgaaaaaaaaaacgccgaacgaaaaacaaaaaaccgaaaaaacgccgcccgcgcgcgcccgacgacgcgaaaanacgacccgaaaaaaaaacgcgcgcgaaaaaaaaccgaaaaaacgaaaacgcgcgnnaacncgccgccgccccccccgcgaaacgacccgaacgaaacgaaaaaaaaaaaaacgcgaaaaaacgaaaaaacgaaaaaaaaaaaaaaaacgaccgaaaacgcgaaaaaaaacgcccgcgcccccgcgaaaaa

SEQ ID NO: 12419 - DNA, 544 bp, Artificial Sequence
  chemically treated genomic DNA (Homo sapiens) CpG-island No: 12419
  unsure (354, 409..410, 414)
tttttttttttttgttttttaatgcgtatttcgacgggaggggcggaggaggagagaagagagaagagagatagataagaggtagtcggagaggttcgtcgcgcgaagagcgcggggcggagagaagtacggggaagaggaaggcgtagatagattcgcgcggaacggatcgataggggggtatacgaaggaagagaatagacggatagggggagtcggcgcgggcgggaaggaaagataggggagcgcggatatttagttcgacgagttatacgggcgtcgaggagggaggcgtcgggcgggggatagagggtcgggggggcgtcgttcgcgcgcgttcggcggcgcgggggngcggttcggggggggggcgcgcgcgggggggggtcgggggggcgggggcgcgcgnnggtncgtcgtcgtttttttcgcggggcggttcgggcggggcggggggggggggggcgcgggggggcgggggggcgggggggggggggggggcggtcgggggcgcgggggggggcgttcgcgttttcgcgggggg

SEQ ID NO: 12420 - DNA, 544 bp, Artificial Sequence
  chemically treated genomic DNA (Homo sapiens) CpG-island No: 12420
  unsure (131, 135..136, 191)
ccccccgcgaaaacgcgaacgcccccccccgcgcccccgaccgcccccccccccccccccgcccccccgcccccccgcgccccccccccccccgccccgcccgaaccgccccgcgaaaaaaacgacgacgnaccnncgcgcgcccccgcccccccgacccccccccgcgcgcgccccccccccgaaccgcncccccgcgccgccgaacgcgcgcgaacgacgcccccccgaccctctatcccccgcccgacgcctccctcctcgacgcccgtataactcgtcgaactaaatatccgcgctcccctatctttccttcccgcccgcgccgactccccctatccgtctattctcttccttcgtatacccccctatcgatccgttccgcgcgaatctatctacgccttcctcttccccgtacttctctccgccccgcgctcttcgcgcgacgaacctctccgactacctcttatctatctctcttctctcttctctcctcctccgcccctcccgtcgaaatacgcattaaaaaacaaaaaaaaaaaaa

SEQ ID NO: 12421 - DNA, 1025 bp, Artificial Sequence
  chemically treated genomic DNA (Homo sapiens) CpG-island No: 12421
  unsure (582, 596, 605, 706, 870, 942)
atagcgggggcggtcgtcgcgtttttttttttttttcggtgtgtaaatgtgtgtgtgcggtgttatgtcggataagagggaggtgatcgtggcggcggcggcggcggttttgtttattgtttttttcggtgtgtgtgtgtgaggaaatcggggttgtagcgaggttaaggttgtttttgaagtagcggcggcgatcgggacgattattttggcgattcgagtggttggttttcgcggagtgtgagaaggataaggtatttttgcgttttcgttacgttcgagcgtttcgggtttttcggtcgttttcgcggttcgtacgttcgggttttagttcggtttgtagcggcgttcgcgggcgggcgagaaggtaacgtcgtcgttcggtcgtcgtcggtcgttttttgttttttttttagtcgtcgcgttaggttcgggcgacgcggacgtcgcgtttcgagtttgagggtagtcggcggcgcggtttttttagcgggttcggttggacgttcgtttcggattttcgcgatggggcgcgggggtcggcgcggttaggagtgcggcgagtggagcggtgggtgcggngcggcggggttttncggttcgtngggcggcggtggcggcgtttgtgttttgtgtttttgcgcgtcgtcggtttttcgtttgtcgcggtttcgtgcgtttcgtcgggggcgtcgcgtttcgcgtntttcgtgcgcggcgtttttcgttttttcgttttttttttcgtttgttttttgcgtttttttttggtttttgttttttcgttttcgtttttttttttttttgttttttgcgtttttggcgtttcgcgtttcgcgttttgttttttttttcgcgtcgtcgtcgttncggttgttcgtgtgtcgtcgttttttcgcgttttttgttttttcgtttttgttttttttttgtttttgtttnttttttttttttgtttttttttcggttcgtgcgtttgtcgtttttttttttattttcgcgtgtttagtatataaatagtaaaa

SEQ ID NO: 12422 - DNA, 1025 bp, Artificial Sequence
  chemically treated genomic DNA (Homo sapiens) CpG-island No: 12422
  unsure (84, 156, 320, 421, 430, 444)
ttttactatttatatactaaacacgcgaaaataaaaaaaaaaacgacaaacgcacgaaccgaaaaaaaaacaaaaaaaaaaaanaaacaaaaacaaaaaaaaaacaaaaacgaaaaaacaaaaaacgcgaaaaaacgacgacacacgaacaaccgnaacgacgacgacgcgaaaaaaaaaacaaaacgcgaaacgcgaaacgccaaaaacgcaaaaaacaaaaaaaaaaaaaaacgaaaacgaaaaaacaaaaaccaaaaaaaaacgcaaaaaacaaacgaaaaaaaaaacgaaaaaacgaaaaacgccgcgcacgaaanacgcgaaacgcgacgcccccgacgaaacgcacgaaaccgcgacaaacgaaaaaccgacgacgcgcaaaaacacaaaacacaaacgccgccaccgccgcccnacgaaccgnaaaaccccgccgcnccgcacccaccgctccactcgccgcactcctaaccgcgccgacccccgcgccccatcgcgaaaatccgaaacgaacgtccaaccgaacccgctaaaaaaaccgcgccgccgactaccctcaaactcgaaacgcgacgtccgcgtcgcccgaacctaacgcgacgactaaaaaaaaaacaaaaaacgaccgacgacgaccgaacgacgacgttaccttctcgcccgcccgcgaacgccgctacaaaccgaactaaaacccgaacgtacgaaccgcgaaaacgaccgaaaaacccgaaacgctcgaacgtaacgaaaacgcaaaaataccttatccttctcacactccgcgaaaaccaaccactcgaatcgccaaaataatcgtcccgatcgccgccgctacttcaaaaacaaccttaacctcgctacaaccccgatttcctcacacacacacaccgaaaaaaacaataaacaaaaccgccgccgccgccgccacgatcacctccctcttatccgacataacaccgcacacacacatttacacaccgaaaaaaaaaaaaaaacgcgacgaccgcccccgctat

SEQ ID NO: 12423 - DNA, 1025 bp, Artificial Sequence
  chemically treated genomic DNA (Homo sapiens) CpG-island No: 12423
  unsure (84, 156, 320, 421, 430, 444)
ttttattgtttgtgtattaggtacgcggggatggaaaaagaaacggtaaacgtacgagtcggaggaggggtagaagggaaggangagtaaaagtaaaaggggggtaggagcgaagagataaagaacgcgagggaacgacgatatacgaataatcgnagcgacggcgacgcgagagagggaatagaacgcggggcgcggggcgttagaaacgtagaggataaaagggaggggggacgggagcgagggaatagaaattagaggagagcgtaagaaatagacgaggagaagaacggagaggcgggaggcgtcgcgtacgaaanacgcgaggcgcggcgttttcggcggagcgtacggggtcgcggtaggcggagagtcggcggcgcgtaggggtataggatataggcgtcgttatcgtcgtttngcgggtcgnggggtttcgtcgtntcgtatttatcgttttattcgtcgtatttttagtcgcgtcgattttcgcgttttatcgcgaagattcggagcggacgtttagtcgagttcgttgaggaggtcgcgtcgtcggttgtttttaaattcgaggcgcggcgttcgcgtcgttcgggtttagcgcggcggttgaggagaaagtagggagcgatcggcggcggtcgagcggcggcgttgttttttcgttcgttcgcgggcgtcgttgtaggtcgggttgaagttcgggcgtgcgagtcgcgagggcggtcggggagttcgaggcgttcggacgtggcgaggacgtagaggtgttttgttttttttatatttcgcgaaggttagttattcgagtcgttagagtagtcgtttcggtcgtcgtcgttgttttaaaggtagttttagtttcgttgtagtttcgatttttttatatatatatatcgagagggataataaatagagtcgtcgtcgtcgtcgttacggttattttttttttgttcggtataatatcgtatatatatatttgtatatcggggagagagggagggcgcggcggtcgttttcgttgt

SEQ ID NO: 12424 - DNA, 1025 bp, Artificial Sequence
  chemically treated genomic DNA (Homo sapiens) CpG-island No: 12424
  unsure (582, 596, 605, 706, 870, 942)
acaacgaaaacgaccgccgcgccctccctctctccccgatatacaaatatatatatacgatattataccgaacaaaaaaaaaataaccgtaacgacgacgacgacgactctatttattatccctctcgatatatatatataaaaaaatcgaaactacaacgaaactaaaactacctttaaaacaacgacgacgaccgaaacgactactctaacgactcgaataactaaccttcgcgaaatataaaaaaaacaaaacacctctacgtcctcgccacgtccgaacgcctcgaactccccgaccgccctcgcgactcgcacgcccgaacttcaacccgacctacaacgacgcccgcgaacgaacgaaaaaacaacgccgccgctcgaccgccgccgatcgctccctactttctcctcaaccgccgcgctaaacccgaacgacgcgaacgccgcgcctcgaatttaaaaacaaccgacgacgcgacctcctcaacgaactcgactaaacgtccgctccgaatcttcgcgataaaacgcgaaaatcgacgcgactaaaaatacgacgaataaaacgataaatacganacgacgaaaccccncgacccgcnaaacgacgataacgacgcctatatcctatacccctacgcgccgccgactctccgcctaccgcgaccccgtacgctccgccgaaaacgccgcgcctcgcgtntttcgtacgcgacgcctcccgcctctccgttcttctcctcgtctatttcttacgctctcctctaatttctattccctcgctcccgtcccccctcccttttatcctctacgtttctaacgccccgcgccccgcgttctattccctctctcgcgtcgccgtcgctncgattattcgtatatcgtcgttccctcgcgttctttatctcttcgctcctaccccccttttacttttactcntccttcccttctacccctcctccgactcgtacgtttaccgtttctttttccatccccgcgtacctaatacacaaacaataaaa

SEQ ID NO: 12425 - DNA, 644 bp, Artificial Sequence
  chemically treated genomic DNA (Homo sapiens) CpG-island No: 12425
  unsure (323)
cgtgatcgtgattttggtcggtcgttgtggttggggtcggttaagtcgaatatcggttatacgtaagcggcggcgggtgtggttggtgtgattaagatggtgatggcgatgcggtacgggtagttgttacgtacgttgtacgtggaatcgtcgtcgtcgtttgtggattggtcggcggggacggtttaattttttacggagaatacgttttggtttaggagtggtcgtgttcgtcgggtgggggtgtcgtcgttcgggattagtggtattaacgcgtacgttattttcgaatagttttcgggagtgtcgagttagtttgcggngtcgggttcgggttttgtcgtggatgtttcggtggtgtcgtggatggtgtcgggtaaaatattcgaagcgttattcgcgtaggtaacggcgttgatgatttatttggacgagcgatttgatgttttttcgttggatgttgggtattcgttggcgttgatacgggtcggcgttggatgagcgagcggtggtgttggggtcggattcgtgaacgttgttgtgcggtgtgaaagcgttggttgtcgggtatgaggtttttggggttggggatcggattttgggggggtttgggggtcgtatcgggttttggggtttttcggtta

SEQ ID NO: 12426 - DNA, 644 bp, Artificial Sequence
  chemically treated genomic DNA (Homo sapiens) CpG-island No: 12426
  unsure (322)
taaccgaaaaaccccaaaacccgatacgacccccaaacccccccaaaatccgatccccaaccccaaaaacctcatacccgacaaccaacgctttcacaccgcacaacaacgttcacgaatccgaccccaacaccaccgctcgctcatccaacgccgacccgtatcaacgccaacgaatacccaacatccaacgaaaaaacatcaaatcgctcgtccaaataaatcatcaacgccgttacctacgcgaataacgcttcgaatattttacccgacaccatccacgacaccaccgaaacatccacgacaaaacccgaacccgacnccgcaaactaactcgacactcccgaaaactattcgaaaataacgtacgcgttaataccactaatcccgaacgacgacacccccacccgacgaacacgaccactcctaaaccaaaacgtattctccgtaaaaaattaaaccgtccccgccgaccaatccacaaacgacgacgacgattccacgtacaacgtacgtaacaactacccgtaccgcatcgccatcaccatcttaatcacaccaaccacacccgccgccgcttacgtataaccgatattcgacttaaccgaccccaaccacaacgaccgaccaaaatcacgatcacg

SEQ ID NO: 12427 - DNA, 644 bp, Artificial Sequence
  chemically treated genomic DNA (Homo sapiens) CpG-island No: 12427
  unsure (322)
tggtcgggaaattttaaaattcgatgcggtttttaagtttttttagaattcggtttttaattttagaagttttatgttcggtagttagcgtttttatatcgtataataacgtttacgggttcgattttagtattatcgttcgtttatttagcgtcgattcgtgttaacgttagcgagtatttaatatttagcgaggagatattaggtcgttcgtttagataggttattaacgtcgttgtttgcgcggatagcgtttcgggtgttttgttcgatattatttacggtattatcggaatatttacgatagaattcgaattcggtntcgtagattgattcggtattttcgggggttgttcgaggatgacgtgcgcgttagtattattgatttcgaacgacgatatttttattcgacgaatacgattatttttgggttagggcgtgtttttcgtaaggagttgaatcgttttcgtcgattaatttataaacggcgacggcgattttacgtgtaacgtgcgtggtagttgttcgtgtcgtatcgttattattattttgattatattagttatattcgtcgtcgtttgcgtatgatcgatgttcgatttgatcgattttaattataacggtcggttaggattacgattacg

SEQ ID NO: 12428 - DNA, 644 bp, Artificial Sequence
  chemically treated genomic DNA (Homo sapiens) CpG-island No: 12428
  unsure (323)
cgtaatcgtaatcctaaccgaccgttataattaaaatcgatcaaatcgaacatcgatcatacgcaaacgacgacgaatataactaatataatcaaaataataataacgatacgacacgaacaactaccacgcacgttacacgtaaaatcgccgtcgccgtttataaattaatcgacgaaaacgattcaactccttacgaaaaacacgccctaacccaaaaataatcgtattcgtcgaataaaaatatcgtcgttcgaaatcaataatactaacgcgcacgtcatcctcgaacaacccccgaaaataccgaatcaatctacganaccgaattcgaattctatcgtaaatattccgataataccgtaaataatatcgaacaaaacacccgaaacgctatccgcgcaaacaacgacgttaataacctatctaaacgaacgacctaatatctcctcgctaaatattaaatactcgctaacgttaacacgaatcgacgctaaataaacgaacgataatactaaaatcgaacccgtaaacgttattatacgatataaaaacgctaactaccgaacataaaacttctaaaattaaaaaccgaattctaaaaaaacttaaaaaccgcatcgaattttaaaatttcccgacca

SEQ ID NO: 12429 - DNA, 629 bp, Artificial Sequence
  chemically treated genomic DNA (Homo sapiens) CpG-island No: 12429
ggtaaaagtatcgtcggtattagcgtttttttgtttttattgtcgtaaaatatggtaattgtagtttatttatatcgttttttaattcggttcgtattagaaaattattggtgtggttatgaatggcgttggatgttcgggtaatagttcgtattatgggcgttggttttaatacgattttacgttatttaaaaaatttaggtcgtagtcggtaatttcgcgtatatagtcgggtagtgacgttatcgtttgcgcggaaatggacgaatagtggggttatgtcggggttaaatcgcgttagcgttggttgttttacgcgtatgatagttttcggaagacggttgttgcgtacgtattcggtgaacgtattatggcgacgttggggcgttttatgagtttgttgttattttttgacgtggtgatatggatgacggatggttggtcgttgtatgaatttcgtttgaagggaaagttgtacgtaattagtaagcgatatacgtagcgaattgagcggtataatttgaatttgaggtagtatttggtacggttgggacggaagtcgttgtcgtttttaaaatcggtggagttgtatgataaagttatcgggtattatttgaatataaaatatt

SEQ ID NO: 12430 - DNA, 629 bp, Artificial Sequence
  chemically treated genomic DNA (Homo sapiens) CpG-island No: 12430
aatattttatattcaaataatacccgataactttatcatacaactccaccgattttaaaaacgacaacgacttccgtcccaaccgtaccaaatactacctcaaattcaaattataccgctcaattcgctacgtatatcgcttactaattacgtacaactttcccttcaaacgaaattcatacaacgaccaaccatccgtcatccatatcaccacgtcaaaaaataacaacaaactcataaaacgccccaacgtcgccataatacgttcaccgaatacgtacgcaacaaccgtcttccgaaaactatcatacgcgtaaaacaaccaacgctaacgcgatttaaccccgacataaccccactattcgtccatttccgcgcaaacgataacgtcactacccgactatatacgcgaaattaccgactacgacctaaattttttaaataacgtaaaatcgtattaaaaccaacgcccataatacgaactattacccgaacatccaacgccattcataaccacaccaataattttctaatacgaaccgaattaaaaaacgatataaataaactacaattaccatattttacgacaataaaaacaaaaaaacgctaataccgacgatacttttacc

SEQ ID NO: 12431 - DNA, 629 bp, Artificial Sequence
  chemically treated genomic DNA (Homo sapiens) CpG-island No: 12431
agtgttttatgtttagataatgttcgatgattttgttatgtagttttatcgattttgagaacgatagcgattttcgttttagtcgtgttaggtgttgttttagatttaggttatgtcgtttaattcgttgcgtatatcgtttgttgattacgtgtagttttttttttaggcgggatttatatagcggttagttattcgttatttatattattacgttaaagggtgatagtaggtttataagacgttttagcgtcgttatagtgcgtttatcgaatacgtgcgtaataatcgtttttcggagattgttatacgcgtaaaatagttagcgttggcgcgatttagtttcgatatagttttattgttcgtttattttcgcgtagacgatgacgttattgttcggttgtatgcgcgaggttatcgattgcggtttgagttttttaagtgacgtaaaatcgtgttgaggttaacgtttataatgcgggttgttgttcgggtatttaacgttatttatggttatattaatgattttttggtgcggatcgggttgagaagcggtgtaagtgaattgtagttgttatgttttacggtagtgagagtagagaagcgttgatgtcggcggtgtttttgtt

SEQ ID NO: 12432 - DNA, 629 bp, Artificial Sequence
  chemically treated genomic DNA (Homo sapiens) CpG-island No: 12432
aacaaaaacaccgccgacatcaacgcttctctactctcactaccgtaaaacataacaactacaattcacttacaccgcttctcaacccgatccgcaccaaaaaatcattaatataaccataaataacgttaaatacccgaacaacaacccgcattataaacgttaacctcaacacgattttacgtcacttaaaaaactcaaaccgcaatcgataacctcgcgcatacaaccgaacaataacgtcatcgtctacgcgaaaataaacgaacaataaaactatatcgaaactaaatcgcgccaacgctaactattttacgcgtataacaatctccgaaaaacgattattacgcacgtattcgataaacgcactataacgacgctaaaacgtcttataaacctactatcaccctttaacgtaataatataaataacgaataactaaccgctatataaatcccgcctaaaaaaaaaactacacgtaatcaacaaacgatatacgcaacgaattaaacgacataacctaaatctaaaacaacacctaacacgactaaaacgaaaatcgctatcgttctcaaaatcgataaaactacataacaaaatcatcgaacattatctaaacataaaacact

SEQ ID NO: 12433 - DNA, 570 bp, Artificial Sequence
  chemically treated genomic DNA (Homo sapiens) CpG-island No: 12433
tttcgattttttttttatttcgagggcggatggttttcggggtttcggggacgaagacgcggagggcggcgtcggttataggtttttgggagtttcgggattgcggggcgacggttgttgttcgcgaaggtcgtttggtttaaatgtagttatttttatcggtaggattcggggtaggggggtcgtagtttttggggttcggttcgtttcggtgtcgtgaagtggtgggcgtttcggggtttcgtttggtttcgcgcgtgaggttttcgcggacgtggcggcgaagaggggtgagcgcggtgttcggggtttggttggtttaggtcgaggaaagtttagtttttcgagttttcggtagtcgattgttttcggatcgggtttttatggtaatcgcgagcggaggtggggtagggggcgcggcgcgagggtcgttttcgcgggatttggcgggtgttatttgttgtcgggagagtcgttttttttttagcgcgcggagatatttgttttagttttttcgagttagaggttttttgtatagtttttggattttatcgggtttgagtgcgtgtt

SEQ ID NO: 12434 - DNA, 570 bp, Artificial Sequence
  chemically treated genomic DNA (Homo sapiens) CpG-island No: 12434
aacacgcactcaaacccgataaaatccaaaaactatacaaaaaacctctaactcgaaaaaactaaaacaaatatctccgcgcgctaaaaaaaaaacgactctcccgacaacaaataacacccgccaaatcccgcgaaaacgaccctcgcgccgcgccccctaccccacctccgctcgcgattaccataaaaacccgatccgaaaacaatcgactaccgaaaactcgaaaaactaaactttcctcgacctaaaccaaccaaaccccgaacaccgcgctcacccctcttcgccgccacgtccgcgaaaacctcacgcgcgaaaccaaacgaaaccccgaaacgcccaccacttcacgacaccgaaacgaaccgaaccccaaaaactacgacccccctaccccgaatcctaccgataaaaataactacatttaaaccaaacgaccttcgcgaacaacaaccgtcgccccgcaatcccgaaactcccaaaaacctataaccgacgccgccctccgcgtcttcgtccccgaaaccccgaaaaccatccgccctcgaaataaaaaaaaaatcgaaa

SEQ ID NO: 12435 - DNA, 570 bp, Artificial Sequence
  chemically treated genomic DNA (Homo sapiens) CpG-island No: 12435
ggtacgtatttaggttcggtgaggtttaggaattgtgtaagaggtttttggttcggaggggttgaaataggtgttttcgcgcgttgggggaagagcgattttttcggtaataggtagtattcgttaaatttcgcgggaacggttttcgcgtcgcgttttttgttttattttcgttcgcggttgttatgaagattcggttcgggagtagtcgattgtcggagattcgggaggttgagtttttttcggtttgagttagttagatttcgggtatcgcgtttattttttttcgtcgttacgttcgcgaaggttttacgcgcgaggttaggcgaggtttcgaggcgtttattattttacgatatcggagcgaatcgggttttagaggttgcgatttttttgtttcgaattttgtcggtgggagtggttgtatttgaattaaacggttttcgcgggtagtagtcgtcgtttcgtagtttcggggtttttaagggtttgtgatcgacgtcgtttttcgcgttttcgttttcgaagtttcgggaattattcgttttcggggtaagggaggagtcgggg

SEQ ID NO: 12436 - DNA, 570 bp, Artificial Sequence
  chemically treated genomic DNA (Homo sapiens) CpG-island No: 12436
ccccgactcctcccttaccccgaaaacgaataattcccgaaacttcgaaaacgaaaacgcgaaaaacgacgtcgatcacaaacccttaaaaaccccgaaactacgaaacgacgactactacccgcgaaaaccgtttaattcaaatacaaccactcccaccgacaaaattcgaaacaaaaaaatcgcaacctctaaaacccgattcgctccgatatcgtaaaataataaacgcctcgaaacctcgcctaacctcgcgcgtaaaaccttcgcgaacgtaacgacgaaaaaaaataaacgcgatacccgaaatctaactaactcaaaccgaaaaaaactcaacctcccgaatctccgacaatcgactactcccgaaccgaatcttcataacaaccgcgaacgaaaataaaacaaaaaacgcgacgcgaaaaccgttcccgcgaaatttaacgaatactacctattaccgaaaaaatcgctcttcccccaacgcgcgaaaacacctatttcaacccctccgaaccaaaaacctcttacacaattcctaaacctcaccgaacctaaatacgtacc

SEQ ID NO: 12437 - DNA, 867 bp, Artificial Sequence
  chemically treated genomic DNA (Homo sapiens) CpG-island No: 12437
gggacgttttacgcgagagcgttataggtcgggagtttttttcgttttttcgcgcgggataatcggcgataggcgtcggtcgttttttagttttgttttaaaggcgcgtattttttcggcgagttgtgtttttcgtagtcgttgggttgattcgtcgcgggtgtcggcgtattttttttcggcgttacggtcgtttttattttcgttttattgttgtcgggtatttagtttttttttcgcggagcgttacgggtttagagcgtcggggaggaggcggggtcgcgacgttcgggcgcgttcggattggttgagcgaagtattttagttaatttattcgttttagagggtcgtcgagttttagcggggaggcgacgtgcgttgggttaggtgacgggtgggggcggggtttagcgcgttatagagtttttcgggaatcgggcgttagaagtcgcgttttttgggtcggcggattttcgtatttttattttcgggggagtttcgtgatttttgttgtttgcggtagggtcgttatcgggtcgcggtcggttagtcggcgtaagagtaggcggggttcgagttggatttgaggagtagaggcggttgggtagttttgcgggtgtttttttttagtcgtatgagcgcgggatcgtgtatttcgggagagtcggggtcgcgcggttttgtttttcgcgaattttcgaggggaagtgtcggggtcgcggtagatagttagggtttcgggagtttttcgtaggttattttggatagtgatgagtaggttcgttggatttgcgcgttcgttagtcggagcggttttataggggatttggatggcgtgaagttaagagttacgtatcgaggatggat

SEQ ID NO: 12438 - DNA, 867 bp, Artificial Sequence
  chemically treated genomic DNA (Homo sapiens) CpG-island No: 12438
atccatcctcgatacgtaactcttaacttcacgccatccaaatcccctataaaaccgctccgactaacgaacgcgcaaatccaacgaacctactcatcactatccaaaataacctacgaaaaactcccgaaaccctaactatctaccgcgaccccgacacttcccctcgaaaattcgcgaaaaacaaaaccgcgcgaccccgactctcccgaaatacacgatcccgcgctcatacgactaaaaaaaaacacccgcaaaactacccaaccgcctctactcctcaaatccaactcgaaccccgcctactcttacgccgactaaccgaccgcgacccgataacgaccctaccgcaaacaacaaaaatcacgaaactcccccgaaaataaaaatacgaaaatccgccgacccaaaaaacgcgacttctaacgcccgattcccgaaaaactctataacgcgctaaaccccgcccccacccgtcacctaacccaacgcacgtcgcctccccgctaaaactcgacgaccctctaaaacgaataaattaactaaaatacttcgctcaaccaatccgaacgcgcccgaacgtcgcgaccccgcctcctccccgacgctctaaacccgtaacgctccgcgaaaaaaaaactaaatacccgacaacaataaaacgaaaataaaaacgaccgtaacgccgaaaaaaaatacgccgacacccgcgacgaatcaacccaacgactacgaaaaacacaactcgccgaaaaaatacgcgcctttaaaacaaaactaaaaaacgaccgacgcctatcgccgattatcccgcgcgaaaaaacgaaaaaaactcccgacctataacgctctcgcgtaaaacgtccc

SEQ ID NO: 12439 - DNA, 867 bp, Artificial Sequence
  chemically treated genomic DNA (Homo sapiens) CpG-island No: 12439
gtttattttcgatgcgtgatttttaattttacgttatttaggttttttatggagtcgtttcgattaacggacgcgtaggtttagcggatttgtttattattgtttagggtggtttgcgggagattttcggggttttggttgtttgtcgcggtttcggtattttttttcgagggttcgcggggaataaggtcgcgcggtttcggttttttcggagtgtacggtttcgcgtttatgcggttagagggaggtattcgtaggattgtttagtcgtttttgttttttaggtttagttcgggtttcgtttgtttttacgtcgattaatcggtcgcggttcgatggcggttttgtcgtagatagtaaaggttacggggttttttcggaagtgaaagtgcggggattcgtcggtttaggagacgcggtttttagcgttcggttttcgggaagttttgtgacgcgttaagtttcgtttttattcgttatttgatttagcgtacgtcgttttttcgttggggttcggcggttttttgaagcgggtggattggttggggtgtttcgtttagttaattcggacgcgttcgggcgtcgcggtttcgtttttttttcggcgttttgggttcgtagcgtttcgcgggaaggaggttggatgttcggtagtagtggggcggggatggaggcggtcgtggcgtcggggagggatgcgtcggtattcgcggcgagttagtttagcggttgcgggaaatataattcgtcggagaggtgcgcgtttttagggtagggttggggagcggtcggcgtttgtcgtcgattgtttcgcgcgggaggacgaagggggttttcggtttgtggcgttttcgcgtggggcgtttt

SEQ ID NO: 12440 - DNA, 867 bp, Artificial Sequence
  chemically treated genomic DNA (Homo sapiens) CpG-island No: 12440
aaaacgccccacgcgaaaacgccacaaaccgaaaacccccttcgtcctcccgcgcgaaacaatcgacgacaaacgccgaccgctccccaaccctaccctaaaaacgcgcacctctccgacgaattatatttcccgcaaccgctaaactaactcgccgcgaataccgacgcatccctccccgacgccacgaccgcctccatccccgccccactactaccgaacatccaacctccttcccgcgaaacgctacgaacccaaaacgccgaaaaaaaaacgaaaccgcgacgcccgaacgcgtccgaattaactaaacgaaacaccccaaccaatccacccgcttcaaaaaaccgccgaaccccaacgaaaaaacgacgtacgctaaatcaaataacgaataaaaacgaaacttaacgcgtcacaaaacttcccgaaaaccgaacgctaaaaaccgcgtctcctaaaccgacgaatccccgcactttcacttccgaaaaaaccccgtaacctttactatctacgacaaaaccgccatcgaaccgcgaccgattaatcgacgtaaaaacaaacgaaacccgaactaaacctaaaaaacaaaaacgactaaacaatcctacgaatacctccctctaaccgcataaacgcgaaaccgtacactccgaaaaaaccgaaaccgcgcgaccttattccccgcgaaccctcgaaaaaaaataccgaaaccgcgacaaacaaccaaaaccccgaaaatctcccgcaaaccaccctaaacaataataaacaaatccgctaaacctacgcgtccgttaatcgaaacgactccataaaaaacctaaataacgtaaaattaaaaatcacgcatcgaaaataaac

SEQ ID NO: 12441 - DNA, 882 bp, Artificial Sequence
  chemically treated genomic DNA (Homo sapiens) CpG-island No: 12441
gaaatatcgcggggtttagacggcgtcgttcgttcggttcgtagtcggggcgcgggaggggttacgcgtatggtatcgtttcgtttttagtcgtttcgtttagttcgcgcgtagtttttggggcggtcgggttacgtcgcgcgtcgattggtggcgttcgggattttttttgtaggtgattgacggcgtcggtcgtttttgttcgtcgttcgttcgttgttgtcgttcgttcggggtgtggagttcggtcgttgttcgcgggttgagtgtttgtcgttgttgtcgtttttatttagttttcgttatggattttttcggggatttgtcggagttcgagcgttcgtcgcgttcggttgtcggtaagcgggttgcgcgggtcggttagggaagggagagtaggcgggatgggggcggtttgaggtcggggcggttgaggcggcgttcgcgttgggaggcggcgggcggcgcgggttgtacggggtttgtttttgtttggttaggtttcgttcgggttattggcggttttgtcggaggttcggtcgttcgcggattacggagaggtcgtttcgttattttcgttacgtaggaaggaaagggtcgagtcgtcgtggttacggttttttgcgtggcggtgaaaggcgtcggcgcgatcgcgtgggtcgattcgagggatcggttttgaacgttcggcggtatcgcggttttcgcgtttcgattttattcgcggtttgggttgttttgcgcgtcgttcgttcgcgtatttcgggtcgtattttattcgcgggttgtggaacggtcgcgtttcgggtcggtgtaagtttaggggtttggcgtttttatttgtattggagattgaattaattattattttaatttttcgtg

SEQ ID NO: 12442 - DNA, 882 bp, Artificial Sequence
  chemically treated genomic DNA (Homo sapiens) CpG-island No: 12442
cacgaaaaattaaaataataattaattcaatctccaatacaaataaaaacgccaaacccctaaacttacaccgacccgaaacgcgaccgttccacaacccgcgaataaaatacgacccgaaatacgcgaacgaacgacgcgcaaaacaacccaaaccgcgaataaaatcgaaacgcgaaaaccgcgataccgccgaacgttcaaaaccgatccctcgaatcgacccacgcgatcgcgccgacgcctttcaccgccacgcaaaaaaccgtaaccacgacgactcgaccctttccttcctacgtaacgaaaataacgaaacgacctctccgtaatccgcgaacgaccgaacctccgacaaaaccgccaataacccgaacgaaacctaaccaaacaaaaacaaaccccgtacaacccgcgccgcccgccgcctcccaacgcgaacgccgcctcaaccgccccgacctcaaaccgcccccatcccgcctactctcccttccctaaccgacccgcgcaacccgcttaccgacaaccgaacgcgacgaacgctcgaactccgacaaatccccgaaaaaatccataacgaaaactaaataaaaacgacaacaacgacaaacactcaacccgcgaacaacgaccgaactccacaccccgaacgaacgacaacaacgaacgaacgacgaacaaaaacgaccgacgccgtcaatcacctacaaaaaaaatcccgaacgccaccaatcgacgcgcgacgtaacccgaccgccccaaaaactacgcgcgaactaaacgaaacgactaaaaacgaaacgataccatacgcgtaacccctcccgcgccccgactacgaaccgaacgaacgacgccgtctaaaccccgcgatatttc

SEQ ID NO: 12443 - DNA, 882 bp, Artificial Sequence
  chemically treated genomic DNA (Homo sapiens) CpG-island No: 12443
tacgaaggattaagatggtgattaatttaatttttagtgtaaataaaaacgttaagtttttgaatttgtatcggttcggaacgcggtcgttttatagttcgcgggtgaagtgcggttcggaatgcgcgggcgggcgacgcgtaaggtagtttaggtcgcgggtggaatcggggcgcgggggtcgcggtgtcgtcgggcgtttagagtcggtttttcgggtcggtttacgcggtcgcgtcggcgttttttatcgttacgtagagggtcgtggttacgacggttcggtttttttttttttgcgtagcgaaaatggcggagcggttttttcgtagttcgcgagcgatcgggttttcgatagggtcgttagtggttcggacggggtttggttaggtaggagtaggtttcgtgtagttcgcgtcgttcgtcgttttttagcgcgggcgtcgttttagtcgtttcggttttaggtcgtttttatttcgtttgtttttttttttttggtcggttcgcgtaattcgtttatcggtagtcgggcgcggcgagcgttcgggtttcggtaggttttcgaagaggtttatggcggaggttgggtggaggcggtagtagcgatagatatttagttcgcgagtagcggtcgggttttatatttcgggcgggcggtagtagcgggcgggcgacgggtaggggcggtcggcgtcgttagttatttgtagggagagtttcggacgttattaatcggcgcgcggcgtggttcggtcgttttagaggttgcgcgcgggttgggcggggcggttgggggcggggcggtgttatgcgcgtggtttttttcgcgtttcgattgcgagtcgggcggacggcgtcgtttgggtttcgcggtgtttt

SEQ ID NO: 12444 - DNA, 882 bp, Artificial Sequence
  chemically treated genomic DNA (Homo sapiens) CpG-island No: 12444
aaaacaccgcgaaacccaaacgacgccgtccgcccgactcgcaatcgaaacgcgaaaaaaaccacgcgcataacaccgccccgcccccaaccgccccgcccaacccgcgcgcaacctctaaaacgaccgaaccacgccgcgcgccgattaataacgtccgaaactctccctacaaataactaacgacgccgaccgcccctacccgtcgcccgcccgctactaccgcccgcccgaaatataaaacccgaccgctactcgcgaactaaatatctatcgctactaccgcctccacccaacctccgccataaacctcttcgaaaacctaccgaaacccgaacgctcgccgcgcccgactaccgataaacgaattacgcgaaccgaccaaaaaaaaaaaaacaaacgaaataaaaacgacctaaaaccgaaacgactaaaacgacgcccgcgctaaaaaacgacgaacgacgcgaactacacgaaacctactcctacctaaccaaaccccgtccgaaccactaacgaccctatcgaaaacccgatcgctcgcgaactacgaaaaaaccgctccgccattttcgctacgcaaaaaaaaaaaaaccgaaccgtcgtaaccacgaccctctacgtaacgataaaaaacgccgacgcgaccgcgtaaaccgacccgaaaaaccgactctaaacgcccgacgacaccgcgacccccgcgccccgattccacccgcgacctaaactaccttacgcgtcgcccgcccgcgcattccgaaccgcacttcacccgcgaactataaaacgaccgcgttccgaaccgatacaaattcaaaaacttaacgtttttatttacactaaaaattaaattaatcaccatcttaatccttcgta

SEQ ID NO: 12445 - DNA, 590 bp, Artificial Sequence
  chemically treated genomic DNA (Homo sapiens) CpG-island No: 12445
gtagcgcgtacgggagtcgggagggggcgcgggcgggcgcgcggtttcgggcgaggcgggggatttaagcgcgttataaggcgaggagttcggcgttcgagacgtcgcgttcggagtcgcgagggaatcgtcgttcgtatgtttcggttcgtcgtttcgtcggagttcgtttgttgttcgtttaacgcggtttgttggtcgcgtttcgcgggtttggggttttcggagtttgggcgttttcgaggagtcgcgttcgtagggagtcgtcgttcgggaacgagttagttcggggtttcggggagagtcgcgcggggtcggtcgttcgttcgtcggtaagacgttcgggttcgttttagattttagattcgattgttttcggttcggggcggcgggaggcggacgtggagtcgagttcgtttttattttcgagggttgttgtatcgtttggtatcggggtttcggcgttcgtagagatttagggtcgtgtagacgtcgtttttagttcggcggggtagttttgattttggttttggggtagtttgatttaaagtaaggttttattaggtcggcgaaatttttttttttttttg

SEQ ID NO: 12446 - DNA, 590 bp, Artificial Sequence
  chemically treated genomic DNA (Homo sapiens) CpG-island No: 12446
caaaaaaaaaaaaaaatttcgccgacctaataaaaccttactttaaatcaaactaccccaaaaccaaaatcaaaactaccccgccgaactaaaaacgacgtctacacgaccctaaatctctacgaacgccgaaaccccgataccaaacgatacaacaaccctcgaaaataaaaacgaactcgactccacgtccgcctcccgccgccccgaaccgaaaacaatcgaatctaaaatctaaaacgaacccgaacgtcttaccgacgaacgaacgaccgaccccgcgcgactctccccgaaaccccgaactaactcgttcccgaacgacgactccctacgaacgcgactcctcgaaaacgcccaaactccgaaaaccccaaacccgcgaaacgcgaccaacaaaccgcgttaaacgaacaacaaacgaactccgacgaaacgacgaaccgaaacatacgaacgacgattccctcgcgactccgaacgcgacgtctcgaacgccgaactcctcgccttataacgcgcttaaatcccccgcctcgcccgaaaccgcgcgcccgcccgcgccccctcccgactcccgtacgcgctac

SEQ ID NO: 12447 - DNA, 590 bp, Artificial Sequence
  chemically treated genomic DNA (Homo sapiens) CpG-island No: 12447
taaaagaaaaggggggtttcgtcgatttagtagaattttgttttaagttaaattattttaaagttaaagttaaggttgtttcgtcgggttgagggcggcgtttatacggttttgagtttttgcggacgtcggagtttcggtgttaggcgatgtagtagttttcgggggtgagggcgggttcggttttacgttcgtttttcgtcgtttcgagtcgggggtagtcgggtttagggtttggagcgggttcgggcgttttatcggcggacgagcggtcggtttcgcgcggtttttttcggggtttcgggttagttcgttttcgggcggcggttttttgcgggcgcggtttttcgagggcgtttaggtttcggggattttaggttcgcggggcgcggttagtaggtcgcgttagacgagtagtaggcgggtttcggcggggcggcgggtcggggtatgcgggcggcggttttttcgcggtttcgagcgcggcgtttcggacgtcgggtttttcgttttataacgcgtttgaatttttcgtttcgttcgagatcgcgcgttcgttcgcgttttttttcggttttcgtgcgcgttgt

SEQ ID NO: 12448 - DNA, 590 bp, Artificial Sequence
  chemically treated genomic DNA (Homo sapiens) CpG-island No: 12448
acaacgcgcacgaaaaccgaaaaaaaacgcgaacgaacgcgcgatctcgaacgaaacgaaaaattcaaacgcgttataaaacgaaaaacccgacgtccgaaacgccgcgctcgaaaccgcgaaaaaaccgccgcccgcataccccgacccgccgccccgccgaaacccgcctactactcgtctaacgcgacctactaaccgcgccccgcgaacctaaaatccccgaaacctaaacgccctcgaaaaaccgcgcccgcaaaaaaccgccgcccgaaaacgaactaacccgaaaccccgaaaaaaaccgcgcgaaaccgaccgctcgtccgccgataaaacgcccgaacccgctccaaaccctaaacccgactacccccgactcgaaacgacgaaaaacgaacgtaaaaccgaacccgccctcacccccgaaaactactacatcgcctaacaccgaaactccgacgtccgcaaaaactcaaaaccgtataaacgccgccctcaacccgacgaaacaaccttaactttaactttaaaataatttaacttaaaacaaaattctactaaatcgacgaaaccccccttttctttta

SEQ ID NO: 12449 - DNA, 895 bp, Artificial Sequence
  chemically treated genomic DNA (Homo sapiens) CpG-island No: 12449
ttaggtcgagggacgtcgttttcgttttatttttgcgttcggtaggtttttggtttcgttagtatttgtcgtttagggttggatttacgcggcgggcgggtgaggggtttttggcgcgcggttatcgttcgttttgtgttaggtgcggtgcggtagcgggagcgcgcggagttcgaattttgtacgtgtggtttcgtcgggtcggtcgttgcgagtttcgtttcggtttcggttatcgtcggggaggacgacgacgacgtggtgggggacgtgttggtattgttggtcgcgtttttggtttcggggcgcgggcgtcgcgcgtggaggtcgtttttttttgtcgtttgcgtcgggacgcgttggtggagcggcgcgcgttgtacgagtttggcgtttattatttggtgagtgtcggcgcgcgggagggcgggtgagttcggtcgggcgggagtcggggtgattattcgtgtttttcgtagttcgacgtcgagggtgtttttcgtcgcggttcgggtttgaatttgattagcggttagtatagggcgttcgtggttggtttttacgttttcgtcgttacgttgtacgtgggtgaggttcggggcgtgggaggatcgttcgttttgtcgtttatttcgtcgttcgttcgtttgattacgttttattttttttcgtagcgttcggggagtcgtcgaggagggggtcgtcgcgttttcgggattatttgcgtttgtttatttgtatttagtttcggtgttagcgtaacgcgtgagtgtatttcggttcggattttatattcgtattcgttcggtttttataagttggaggtggttaaataggtattggacggggttttcgttcgtttatattttatcgtggtttaggtgattttatattt

SEQ ID NO: 12450 - DNA, 895 bp, Artificial Sequence
  chemically treated genomic DNA (Homo sapiens) CpG-island No: 12450
aaatataaaatcacctaaaccacgataaaatataaacgaacgaaaaccccgtccaatacctatttaaccacctccaacttataaaaaccgaacgaatacgaatataaaatccgaaccgaaatacactcacgcgttacgctaacaccgaaactaaatacaaataaacaaacgcaaataatcccgaaaacgcgacgaccccctcctcgacgactccccgaacgctacgaaaaaaaataaaacgtaatcaaacgaacgaacgacgaaataaacgacaaaacgaacgatcctcccacgccccgaacctcacccacgtacaacgtaacgacgaaaacgtaaaaaccaaccacgaacgccctatactaaccgctaatcaaattcaaacccgaaccgcgacgaaaaacaccctcgacgtcgaactacgaaaaacacgaataatcaccccgactcccgcccgaccgaactcacccgccctcccgcgcgccgacactcaccaaataataaacgccaaactcgtacaacgcgcgccgctccaccaacgcgtcccgacgcaaacgacaaaaaaaaacgacctccacgcgcgacgcccgcgccccgaaaccaaaaacgcgaccaacaataccaacacgtcccccaccacgtcgtcgtcgtcctccccgacgataaccgaaaccgaaacgaaactcgcaacgaccgacccgacgaaaccacacgtacaaaattcgaactccgcgcgctcccgctaccgcaccgcacctaacacaaaacgaacgataaccgcgcgccaaaaacccctcacccgcccgccgcgtaaatccaaccctaaacgacaaatactaacgaaaccaaaaacctaccgaacgcaaaaataaaacgaaaacgacgtccctcgacctaa

SEQ ID NO: 12451 - DNA, 895 bp, Artificial Sequence
  chemically treated genomic DNA (Homo sapiens) CpG-island No: 12451
aggtgtggggttatttaggttacggtggggtgtgaacgggcggaagtttcgtttagtgtttgtttaattatttttagtttgtggaggtcgagcgaatgcgggtgtggggttcgggtcggggtatatttacgcgttgcgttggtatcgggattggatgtagatgagtaggcgtaggtggtttcgggggcgcggcggtttttttttcggcggtttttcgagcgttgcgggggagggtgggacgtggttaagcgggcgggcggcggggtgggcgatagagcgggcgatttttttacgtttcgggttttatttacgtgtagcgtggcggcgagagcgtagaagttagttacgggcgttttgtattggtcgttggttaagtttaggttcgggtcgcggcggaaggtattttcggcgtcgggttgcgaggggtacggatggttatttcggttttcgttcggtcggatttattcgttttttcgcgcgtcggtatttattaggtagtagacgttaagttcgtgtagcgcgcgtcgttttattaacgcgtttcggcgtaggcggtagaggaaagcggtttttacgcgcggcgttcgcgtttcggggttaggggcgcggttagtagtgttagtacgttttttattacgtcgtcgtcgtttttttcggcggtggtcgagatcggggcgaggttcgtagcgatcggttcggcggggttatacgtatagggttcgggtttcgcgcgttttcgttgtcgtatcgtatttggtatagagcgagcggtggtcgcgcgttagggattttttattcgttcgtcgcgtgggtttagttttgaacgataggtgttagcgagattaggggtttgtcgggcgtaggggtggggcgagggcgacgtttttcggtttga

SEQ ID NO: 12452 - DNA, 895 bp, Artificial Sequence
  chemically treated genomic DNA (Homo sapiens) CpG-island No: 12452
tcaaaccgaaaaacgtcgccctcgccccacccctacgcccgacaaacccctaatctcgctaacacctatcgttcaaaactaaacccacgcgacgaacgaataaaaaatccctaacgcgcgaccaccgctcgctctataccaaatacgatacgacaacgaaaacgcgcgaaacccgaaccctatacgtataaccccgccgaaccgatcgctacgaacctcgccccgatctcgaccaccgccgaaaaaaacgacgacgacgtaataaaaaacgtactaacactactaaccgcgcccctaaccccgaaacgcgaacgccgcgcgtaaaaaccgctttcctctaccgcctacgccgaaacgcgttaataaaacgacgcgcgctacacgaacttaacgtctactacctaataaataccgacgcgcgaaaaaacgaataaatccgaccgaacgaaaaccgaaataaccatccgtacccctcgcaacccgacgccgaaaataccttccgccgcgacccgaacctaaacttaaccaacgaccaatacaaaacgcccgtaactaacttctacgctctcgccgccacgctacacgtaaataaaacccgaaacgtaaaaaaatcgcccgctctatcgcccaccccgccgcccgcccgcttaaccacgtcccaccctcccccgcaacgctcgaaaaaccgccgaaaaaaaaaccgccgcgcccccgaaaccacctacgcctactcatctacatccaatcccgataccaacgcaacgcgtaaatataccccgacccgaaccccacacccgcattcgctcgacctccacaaactaaaaataattaaacaaacactaaacgaaacttccgcccgttcacaccccaccgtaacctaaataaccccacacct

SEQ ID NO: 12453 - DNA, 1340 bp, Artificial Sequence
  chemically treated genomic DNA (Homo sapiens) CpG-island No: 12453
agcgacggtagcgtcgatggtttggtacgtggatacgaacgtgtgtatttcgtgtatgtattggatgtagtcggtagcgaaggttcgttcgttttcgtttgtagttgttcgcgttttgggttcgagggtgggagggagagagtcgcgtttcgcgcggtgagcggcgattgcgtggtttagttattcggttcgcggggacgcggtttatttaggagacgcgggggcgtattttgtttcggtgggagttttcgtcgtcgataggataggggcgtcgggagggaagtttttcgtttggtaggggttataggcgttcgcggtcggcgttttcgttcgtttcgtcgttatttatcgcgcgttcggtttcgtagtatattttggattcgtcgtatcgttagttttagtatttcggcgttttttagtttggtttgtatttgcgcgggcgggaagggcggtgagtcggtagcgcgttttcggattcgttcgttcgtttcgtagttttttacgcgtttgtttcggcgtcgtatttcggcgttcgttagtagtagtcgtagtttttgtaggttttcgttgaattcgcgcgcgtcgttttttttttattaggggttttcgggtttgcggggagcggggtattgaattttagtttcgtacgtttttcgttcgtttgttcgtttatgtttcgtacgtatttgcggttttttcgcgttttttagtcgtttttattttacggtttatacggtttcggttaggcgtcgcgggtggcgttattgtcgtttcgtcggggacgcggtaggggttaggagtagcggggacggggagcggcggggatcggagtgtcggcgtttttcgttgtttcgcggtcgtttagtagtagtttagtcgttgcgtttttcgcggttttcggttcgtcgcggtttcgttttttttatagtcgtttatttgtattttaatgcgtcgattggtcgcgcgggttcggggcggtcgatcgcgaggcgcgttgtagttaatcggggtagcgcgttttgttcggtttagcggttttggcggtcgggtagttggttgagttaggcgggtttttagttcggttttttttagatttcgcgggggggcggtatcggggcggcgatttcgggtagttgcggttttgttcgcgtttgttttttttcgtttgttgttttaggattattgatttgtcgcgcgtgcgagtaggcgtttattcgttcgttcgttcgttcgtttatttatttatttatttattaatttatttatttttttttttcgtcgatggcgtttttagagttgagcgttggggttattggttttagaatgcgtttttggtgtgt

SEQ ID NO: 12454 - DNA, 1340 bp, Artificial Sequence
  chemically treated genomic DNA (Homo sapiens) CpG-island No: 12454
acacaccaaaaacgcattctaaaaccaataaccccaacgctcaactctaaaaacgccatcgacgaaaaaaaaaaataaataaattaataaataaataaataaataaacgaacgaacgaacgaacgaataaacgcctactcgcacgcgcgacaaatcaataatcctaaaacaacaaacgaaaaaaaacaaacgcgaacaaaaccgcaactacccgaaatcgccgccccgataccgcccccccgcgaaatctaaaaaaaaccgaactaaaaacccgcctaactcaaccaactacccgaccgccaaaaccgctaaaccgaacaaaacgcgctaccccgattaactacaacgcgcctcgcgatcgaccgccccgaacccgcgcgaccaatcgacgcattaaaatacaaataaacgactataaaaaaaacgaaaccgcgacgaaccgaaaaccgcgaaaaacgcaacgactaaactactactaaacgaccgcgaaacaacgaaaaacgccgacactccgatccccgccgctccccgtccccgctactcctaacccctaccgcgtccccgacgaaacgacaataacgccacccgcgacgcctaaccgaaaccgtataaaccgtaaaataaaaacgactaaaaaacgcgaaaaaaccgcaaatacgtacgaaacataaacgaacaaacgaacgaaaaacgtacgaaactaaaattcaataccccgctccccgcaaacccgaaaacccctaataaaaaaaaaacgacgcgcgcgaattcaacgaaaacctacaaaaactacgactactactaacgaacgccgaaatacgacgccgaaacaaacgcgtaaaaaactacgaaacgaacgaacgaatccgaaaacgcgctaccgactcaccgcccttcccgcccgcgcaaatacaaaccaaactaaaaaacgccgaaatactaaaactaacgatacgacgaatccaaaatatactacgaaaccgaacgcgcgataaataacgacgaaacgaacgaaaacgccgaccgcgaacgcctataacccctaccaaacgaaaaacttccctcccgacgcccctatcctatcgacgacgaaaactcccaccgaaacaaaatacgcccccgcgtctcctaaataaaccgcgtccccgcgaaccgaataactaaaccacgcaatcgccgctcaccgcgcgaaacgcgactctctccctcccaccctcgaacccaaaacgcgaacaactacaaacgaaaacgaacgaaccttcgctaccgactacatccaatacatacacgaaatacacacgttcgtatccacgtaccaaaccatcgacgctaccgtcgct

SEQ ID NO: 12455 - DNA, 1340 bp, Artificial Sequence
  chemically treated genomic DNA (Homo sapiens) CpG-island No: 12455
gtatattagggacgtattttggggttagtggttttagcgtttaattttggaggcgttatcggcgaaggagggaaatgaatgaattaatgggtgaatgaatgagtggacggacggacggacggacgggtggacgtttgttcgtacgcgcggtagattagtggttttagagtagtagacggagagaaataagcgcgggtagggtcgtagttattcggggtcgtcgtttcggtgtcgttttttcgcggggtttagggaaggtcgggttgggggttcgtttagtttagttagttgttcgatcgttagagtcgttgggtcggataaagcgcgttgtttcgattggttgtagcgcgtttcgcggtcggtcgtttcgggttcgcgcggttaatcggcgtattgagatgtaaataagcggttataaaaggggcgggatcgcggcgggtcggaagtcgcgaggagcgtaacggttgggttgttgttgggcggtcgcggggtagcggagggcgtcggtatttcggttttcgtcgtttttcgttttcgttgtttttagtttttgtcgcgttttcggcggagcggtaatggcgttattcgcggcgtttggtcgggatcgtgtgggtcgtgagatgaggacggttgggagacgcgaggggatcgtaagtgcgtgcggggtatgggcgagtaagcgggcgggaggcgtgcggggttgggatttagtgtttcgtttttcgtaggttcggaagtttttggtggagaagaagcggcgcgcgcggatttaacgagagtttgtaggagttgcggttgttgttggcgggcgtcgaggtgcggcgtcgagataggcgcgtaggaggttgcggggcgggcgggcgggttcgggagcgcgttgtcggtttatcgtttttttcgttcgcgtaggtgtaggttaagttggagaacgtcgaagtgttggagttgacggtgcggcgggtttagggtgtgttgcggggtcgggcgcgcggtgagtggcggcggggcgggcgggggcgtcggtcgcgggcgtttgtaatttttgttagacggaggatttttttttcggcgtttttgttttgtcggcggcgagggtttttatcggagtagggtgcgttttcgcgttttttgggtgagtcgcgttttcgcgggtcgggtggttgggttacgtagtcgtcgtttatcgcgcgggacgcggtttttttttttttattttcgggtttagagcgcgagtagttgtaggcggaagcgagcgagttttcgttgtcggttatatttagtgtatgtacgaggtgtatacgttcgtgtttacgtgttaggttatcgacgttatcgtcgtt

SEQ ID NO: 12456 - DNA, 1340 bp, Artificial Sequence
  chemically treated genomic DNA (Homo sapiens) CpG-island No: 12456
aacgacgataacgtcgataacctaacacgtaaacacgaacgtatacacctcgtacatacactaaatataaccgacaacgaaaactcgctcgcttccgcctacaactactcgcgctctaaacccgaaaataaaaaaaaaaaaaccgcgtcccgcgcgataaacgacgactacgtaacccaaccacccgacccgcgaaaacgcgactcacccaaaaaacgcgaaaacgcaccctactccgataaaaaccctcgccgccgacaaaacaaaaacgccgaaaaaaaaatcctccgtctaacaaaaattacaaacgcccgcgaccgacgcccccgcccgccccgccgccactcaccgcgcgcccgaccccgcaacacaccctaaacccgccgcaccgtcaactccaacacttcgacgttctccaacttaacctacacctacgcgaacgaaaaaaacgataaaccgacaacgcgctcccgaacccgcccgcccgccccgcaacctcctacgcgcctatctcgacgccgcacctcgacgcccgccaacaacaaccgcaactcctacaaactctcgttaaatccgcgcgcgccgcttcttctccaccaaaaacttccgaacctacgaaaaacgaaacactaaatcccaaccccgcacgcctcccgcccgcttactcgcccataccccgcacgcacttacgatcccctcgcgtctcccaaccgtcctcatctcacgacccacacgatcccgaccaaacgccgcgaataacgccattaccgctccgccgaaaacgcgacaaaaactaaaaacaacgaaaacgaaaaacgacgaaaaccgaaataccgacgccctccgctaccccgcgaccgcccaacaacaacccaaccgttacgctcctcgcgacttccgacccgccgcgatcccgccccttttataaccgcttatttacatctcaatacgccgattaaccgcgcgaacccgaaacgaccgaccgcgaaacgcgctacaaccaatcgaaacaacgcgctttatccgacccaacgactctaacgatcgaacaactaactaaactaaacgaacccccaacccgaccttccctaaaccccgcgaaaaaacgacaccgaaacgacgaccccgaataactacgaccctacccgcgcttatttctctccgtctactactctaaaaccactaatctaccgcgcgtacgaacaaacgtccacccgtccgtccgtccgtccgtccactcattcattcacccattaattcattcatttccctccttcgccgataacgcctccaaaattaaacgctaaaaccactaaccccaaaatacgtccctaatatac

SEQ ID NO: 12457 - DNA, 641 bp, Artificial Sequence
  chemically treated genomic DNA (Homo sapiens) CpG-island No: 12457
  unsure (300, 441)
gttgtggttggggtcggttaagtcgaatatcggttatacgtaagcggcggcgggtgtggttggtgtgattaagatggtgatggcgatgcggtacgggtagttgttacgtacgttgtacgtggaatcgtcgtcgtcgtttttggattggtcggcggggacggtttaattttttacggagaatacgttttggtttaggagtggtcgtgttcgtcgggtgggggtgtcgtcgttcgggattagtggtattaacgcgtacgttattttcgaatagttttcgggagtgtcgagttagtttgcggngtcgggttcgggttttgtcgtggatgtttcggtggtgtcgtggatggtgtcgggtaaaatattcgaagcgttattcgcgtaggtaacggcgttgatgatttatttggacgagcgatttgatgttttttcgttggatgttgngtattcgttggcgttgatacggtcggcgttggatgagcgagcggtggtgttggggtcgggatcgtgaaacgttgttgtgcggggtgaaagcgttgtttgtcggttatgaggtttttggggttggtgatcggatttgtgggggttggggggtcgatcgggttttggttttttcgtttagggtggttagtggttggggattg

SEQ ID NO: 12458 - DNA, 641 bp, Artificial Sequence
  chemically treated genomic DNA (Homo sapiens) CpG-island No: 12458
  unsure (201, 342)
caatccccaaccactaaccaccctaaacgaaaaaaccaaaacccgatcgaccccccaacccccacaaatccgatcaccaaccccaaaaacctcataaccgacaaacaacgctttcaccccgcacaacaacgtttcacgatcccgaccccaacaccaccgctcgctcatccaacgccgaccgtatcaacgccaacgaatacncaacatccaacgaaaaaacatcaaatcgctcgtccaaataaatcatcaacgccgttacctacgcgaataacgcttcgaatattttacccgacaccatccacgacaccaccgaaacatccacgacaaaacccgaacccgacnccgcaaactaactcgacactcccgaaaactattcgaaaataacgtacgcgttaataccactaatcccgaacgacgacacccccacccgacgaacacgaccactcctaaaccaaaacgtattctccgtaaaaaattaaaccgtccccgccgaccaatccaaaaacgacgacgacgattccacgtacaacgtacgtaacaactacccgtaccgcatcgccatcaccatcttaatcacaccaaccacacccgccgccgcttacgtataaccgatattcgacttaaccgaccccaaccacaac

SEQ ID NO: 12459 - DNA, 641 bp, Artificial Sequence
  chemically treated genomic DNA (Homo sapiens) CpG-island No: 12459
  unsure (201, 342)
taatttttagttattgattattttgaacggaaaaattaaaattcgatcggttttttagtttttatagattcggttattaattttagaagttttatgatcggtagatagcgtttttatttcgtataataacgttttacggtttcgattttagtattatcgttcgtttatttagcgtcgatcgtgttaacgttagcgagtatntaatatttagcgaggagatattaggtcgttcgtttagataggttattaacgtcgttgtttgcgcggatagcgtttcgggtgttttgttcgatattatttacggtattatcggaatatttacgatagaattcgaattcggtntcgtagattgattcggtattttcgggggttgttcgaggatgacgtgcgcgttagtattattgatttcgaacgacgatatttttattcgacgaatacgattatttttgggttagggcgtgtttttcgtaaggagttgaatcgttttcgtcgattaatttaaaaacggcgacggcgattttacgtgtaacgtgcgtggtagttgttcgtgtcgtatcgttattattattttgattatattagttatattcgtcgtcgtttgcgtatgatcgatgttcgatttgatcgattttaattataat

SEQ ID NO: 12460 - DNA, 641 bp, Artificial Sequence
  chemically treated genomic DNA (Homo sapiens) CpG-island No: 12460
  unsure (300, 441)
attataattaaaatcgatcaaatcgaacatcgatcatacgcaaacgacgacgaatataactaatataatcaaaataataataacgatacgacacgaacaactaccacgcacgttacacgtaaaatcgccgtcgccgtttttaaattaatcgacgaaaacgattcaactccttacgaaaaacacgccctaacccaaaaataatcgtattcgtcgaataaaaatatcgtcgttcgaaatcaataatactaacgcgcacgtcatcctcgaacaacccccgaaaataccgaatcaatctacganaccgaattcgaattctatcgtaaatattccgataataccgtaaataatatcgaacaaaacacccgaaacgctatccgcgcaaacaacgacgttaataacctatctaaacgaacgacctaatatctcctcgctaaatattanatactcgctaacgttaacacgatcgacgctaaataaacgaacgataatactaaaatcgaaaccgtaaaacgttattatacgaaataaaaacgctatctaccgatcataaaacttctaaaattaataaccgaatctataaaaactaaaaaaccgatcgaattttaatttttccgttcaaaataatcaataactaaaaatta

SEQ ID NO: 12461 - DNA, 1067 bp, Artificial Sequence
  chemically treated genomic DNA (Homo sapiens) CpG-island No: 12461
tttttcgcgttttgtttttgtgcgttttttttttttttttttttttgttcgtttttttttttttttttttttacgtattcgtttttcgcgcgtagggatttttgggtaaggttattgcgtttcggattcgcggtcgttggtagggcgtttagggggcgtatttacgcggatgacgtagcgcgaggagtttttgtcgtttaggttgatttagagcgagaagagcgcggcggtattgtatacgttttgcgttttgtatagtagttggttgaggttttagttggttgaggtttcgcgattttcggacgttttttcgcgtcgtttaggttttagttttcgtagttttttatgatttttagtatgggtcgaggatttagtcgttcgatttcgcgtatgtcgaggtacgaacggaaaaaggcgtttattttgtattgggtcgcgtcgtcgggtttatttttgggtcgtgttagtaggcgttttaggcgtttttttttttgttcgtcgaaggtcgcgatggtgttataggtgagtttttcgtcgggggtggcgtggcgtcgtagttagtagtcgtagacgaacgagtagaagttttggtatgggtcgatgttggcgtttaggttggcggttaggaagcgagcggcgcgcgcgaaggttttgcgtttagggtagttttcgggataggcgtcgtcgtcggtcgcgatcgggtttaggtatttgagcgttagtatagtcgttagaatggcgtagagattagcggcgaatattagtttcgatagtaggtttattttacgtagggttttagcgcggtagttcggatcgggtttcggtggcgttgcgcgttgttttttgagagaagttcgggggtagggaggtttcgcgcgcgtttttcgcgtcgtagcggtttacgtatttgattttttggaatttatcgtagtgcgtcgttagcgaatatcgggttttatggcgtcgaggtcgtcgcggtgtagatttgggttatttgggttatgggatgcgcgtggtcgtcggttttttagtgggtttttgtatggtttcggggggttaaagttgcg

SEQ ID NO: 12462 - DNA, 1067 bp, Artificial Sequence
  chemically treated genomic DNA (Homo sapiens) CpG-island No: 12462
cgcaactttaaccccccgaaaccatacaaaaacccactaaaaaaccgacgaccacgcgcatcccataacccaaataacccaaatctacaccgcgacgacctcgacgccataaaacccgatattcgctaacgacgcactacgataaattccaaaaaatcaaatacgtaaaccgctacgacgcgaaaaacgcgcgcgaaacctccctacccccgaacttctctcaaaaaacaacgcgcaacgccaccgaaacccgatccgaactaccgcgctaaaaccctacgtaaaataaacctactatcgaaactaatattcgccgctaatctctacgccattctaacgactatactaacgctcaaatacctaaacccgatcgcgaccgacgacgacgcctatcccgaaaactaccctaaacgcaaaaccttcgcgcgcgccgctcgcttcctaaccgccaacctaaacgccaacatcgacccataccaaaacttctactcgttcgtctacgactactaactacgacgccacgccacccccgacgaaaaactcacctataacaccatcgcgaccttcgacgaacaaaaaaaaaaacgcctaaaacgcctactaacacgacccaaaaataaacccgacgacgcgacccaatacaaaataaacgcctttttccgttcgtacctcgacatacgcgaaatcgaacgactaaatcctcgacccatactaaaaatcataaaaaactacgaaaactaaaacctaaacgacgcgaaaaaacgtccgaaaatcgcgaaacctcaaccaactaaaacctcaaccaactactatacaaaacgcaaaacgtatacaataccgccgcgctcttctcgctctaaatcaacctaaacgacaaaaactcctcgcgctacgtcatccgcgtaaatacgccccctaaacgccctaccaacgaccgcgaatccgaaacgcaataaccttacccaaaaatccctacgcgcgaaaaacgaatacgtaaaaaaaaaaaaaaaaaaaaacgaacaaaaaaaaaaaaaaaaaaaaaacgcacaaaaacaaaacgcgaaaaa

SEQ ID NO: 12463 - DNA, 1067 bp, Artificial Sequence
  chemically treated genomic DNA (Homo sapiens) CpG-island No: 12463
cgtagttttggtttttcggggttatgtagaggtttattaggaggtcggcggttacgcgtattttatagtttaggtggtttaggtttgtatcgcggcggtttcggcgttatggagttcggtattcgttgacggcgtattacgatgagttttaagaggttaagtacgtgagtcgttgcggcgcggggggcgcgcgcggggtttttttgttttcgggttttttttaaggagtagcgcgtagcgttatcggggttcggttcgggttgtcgcgttggaattttgcgtgaggtgagtttgttgtcggggttggtgttcgtcgttgatttttgcgttattttggcggttatgttggcgtttaagtatttgggttcggtcgcggtcggcggcggcgtttgtttcgagagttgttttgagcgtaaggttttcgcgcgcgtcgttcgttttttggtcgttaatttggacgttagtatcgatttatgttaggatttttattcgttcgtttgcggttgttgattgcggcgttacgttattttcgacgaaaagtttatttatggtattatcgcggttttcggcgagtagaaagaggagcgtttgaggcgtttgttggtacggtttagggatgggttcggcggcgcggtttagtgtaaggtgagcgttttttttcgttcgtgtttcgatatgcgcgagatcgagcgattgagttttcggtttatgttagaggttatggaggattgcgggggttgggatttgggcggcgcggaggagcgttcgggggtcgcgggattttaattagttgggattttaattagttgttgtataaggcgtagggcgtgtatagtgtcgtcgcgtttttttcgttttagattagtttggacgataggaatttttcgcgttacgttattcgcgtgagtgcgttttttgagcgttttgttagcggtcgcggattcggggcgtagtggttttgtttaggggtttttgcgcgcgggaggcgggtgcgtgagaggagaggagggaagagacgagtaggagaggggaggggaggggagcgtatagaggtagagcgcgggagg

SEQ ID NO: 12464 - DNA, 1067 bp, Artificial Sequence
  chemically treated genomic DNA (Homo sapiens) CpG-island No: 12464
cctcccgcgctctacctctatacgctcccctcccctcccctctcctactcgtctcttccctcctctcctctcacgcacccgcctcccgcgcgcaaaaacccctaaacaaaaccactacgccccgaatccgcgaccgctaacaaaacgctcaaaaaacgcactcacgcgaataacgtaacgcgaaaaattcctatcgtccaaactaatctaaaacgaaaaaaacgcgacgacactatacacgccctacgccttatacaacaactaattaaaatcccaactaattaaaatcccgcgacccccgaacgctcctccgcgccgcccaaatcccaacccccgcaatcctccataacctctaacataaaccgaaaactcaatcgctcgatctcgcgcatatcgaaacacgaacgaaaaaaaacgctcaccttacactaaaccgcgccgccgaacccatccctaaaccgtaccaacaaacgcctcaaacgctcctctttctactcgccgaaaaccgcgataataccataaataaacttttcgtcgaaaataacgtaacgccgcaatcaacaaccgcaaacgaacgaataaaaatcctaacataaatcgatactaacgtccaaattaacgaccaaaaaacgaacgacgcgcgcgaaaaccttacgctcaaaacaactctcgaaacaaacgccgccgccgaccgcgaccgaacccaaatacttaaacgccaacataaccgccaaaataacgcaaaaatcaacgacgaacaccaaccccgacaacaaactcacctcacgcaaaattccaacgcgacaacccgaaccgaaccccgataacgctacgcgctactccttaaaaaaaacccgaaaacaaaaaaaccccgcgcgcgccccccgcgccgcaacgactcacgtacttaacctcttaaaactcatcgtaatacgccgtcaacgaataccgaactccataacgccgaaaccgccgcgatacaaacctaaaccacctaaactataaaatacgcgtaaccgccgacctcctaataaacctctacataaccccgaaaaaccaaaactacg

SEQ ID NO: 12465 - DNA, 550 bp, Artificial Sequence
  chemically treated genomic DNA (Homo sapiens) CpG-island No: 12465
ttgcgcgaagttttatttacgttggggcgcgagttgttcgggcgagtttagagttatgtaggcgcggcgcgtagtttatggagttttagagtcgagtttgggagtcgtagtcggcggatggacgtaaataaagtcgggaggtttcgcgtagcggttacgaaggtgacggaagtggtcgcggttgtagggatttaggcgttatttattcggtaggtgcgcgtcggagtttggcggtgatcgagcgggtcgggttcgagcgggggtttgagtaggagcgaagcggcgttagcgttcggtgttttttagcgttcgtcgttttttttgtcgtcgcgtcgagttcgtcgcgtcgttcgttagtaggttcgagggagggggcgcgtcggcggttttattttttttcgttcgtttcgcgcgtttttttttttttttgtatttttcgggttatttggtagtggggcggtagcgcggacgtgggtcggcgaagtagagggatagtaagcggttagttttgaagttttgtttttagtttggttttttttggaggggttgg

SEQ ID NO: 12466 - DNA, 550 bp, Artificial Sequence
  chemically treated genomic DNA (Homo sapiens) CpG-island No: 12466
ccaacccctccaaaaaaaaccaaactaaaaacaaaacttcaaaactaaccgcttactatccctctacttcgccgacccacgtccgcgctaccgccccactaccaaataacccgaaaaatacaaaaaaaaaaaaaaacgcgcgaaacgaacgaaaaaaaataaaaccgccgacgcgccccctccctcgaacctactaacgaacgacgcgacgaactcgacgcgacgacaaaaaaaacgacgaacgctaaaaaacaccgaacgctaacgccgcttcgctcctactcaaacccccgctcgaacccgacccgctcgatcaccgccaaactccgacgcgcacctaccgaataaataacgcctaaatccctacaaccgcgaccacttccgtcaccttcgtaaccgctacgcgaaacctcccgactttatttacgtccatccgccgactacgactcccaaactcgactctaaaactccataaactacgcgccgcgcctacataactctaaactcgcccgaacaactcgcgccccaacgtaaataaaacttcgcgcaa

SEQ ID NO: 12467 - DNA, 550 bp, Artificial Sequence
  chemically treated genomic DNA (Homo sapiens) CpG-island No: 12467
ttaatttttttagggagggttaggttggagatagaattttaaggttggtcgtttgttgtttttttatttcgtcgatttacgttcgcgttgtcgttttattgttaggtggttcgagagatgtaggaggaaggaggggcgcgcggggcgggcggaggagggtggagtcgtcggcgcgttttttttttcgggtttgttggcgggcggcgcggcgggttcggcgcggcggtagaggaggcggcgggcgttgggagatatcggacgttagcgtcgtttcgtttttgtttaggttttcgttcgggttcgattcgttcggttatcgttaggtttcggcgcgtatttgtcgggtaggtggcgtttgagtttttgtagtcgcggttattttcgttattttcgtagtcgttgcgcggagtttttcggttttgtttgcgtttattcgtcggttgcgatttttaggttcggttttgaggttttatggattgcgcgtcgcgtttgtatggttttgggttcgttcggatagttcgcgttttagcgtgggtgaaatttcgcgtaa

SEQ ID NO: 12468 - DNA, 550 bp, Artificial Sequence
  chemically treated genomic DNA (Homo sapiens) CpG-island No: 12468
ttacgcgaaatttcacccacgctaaaacgcgaactatccgaacgaacccaaaaccatacaaacgcgacgcgcaatccataaaacctcaaaaccgaacctaaaaatcgcaaccgacgaataaacgcaaacaaaaccgaaaaactccgcgcaacgactacgaaaataacgaaaataaccgcgactacaaaaactcaaacgccacctacccgacaaatacgcgccgaaacctaacgataaccgaacgaatcgaacccgaacgaaaacctaaacaaaaacgaaacgacgctaacgtccgatatctcccaacgcccgccgcctcctctaccgccgcgccgaacccgccgcgccgcccgccaacaaacccgaaaaaaaaaacgcgccgacgactccaccctcctccgcccgccccgcgcgcccctccttcctcctacatctctcgaaccacctaacaataaaacgacaacgcgaacgtaaatcgacgaaataaaaaaacaacaaacgaccaaccttaaaattctatctccaacctaaccctccctaaaaaaattaa

SEQ ID NO: 12469 - DNA, 719 bp, Artificial Sequence
  chemically treated genomic DNA (Homo sapiens) CpG-island No: 12469
cgcgaacgcggttgtatcgcgtgggagggcggttacggcgagtttaagtttacggattcggacgaggtggcgcggcggtggggcgagcgtaagagtaagtttaatatgaattacgataagttgagtcgcgttttgttatttattacgataagaatattatgagtaaggtgtatggtaagcgttacgtttatcgtttcgatttttagggtttggcgtaggtttgttagtcgtcgttcgcgtacgtttatgtcgtcgtcgtagttgttgtcgtcgtcgcgtcgtttaggacggcgcgttttataagttgttcgtcggtttcgattcgttgttttttttcggtttttttaaatttaattttatggtcgtttcgttggaggtcgcgtcgacggttttttttattggtcgggtcggtgtcgacgttatcgttgaagtcgttagcgtcgcgttttaatttagtcgtagtttgtagttttagttacgaatattcggtcgtagagcgttagtttcgtatttgggaggttattattattagatagggcggtcgagtgtttgcggtttcggtcggacgttttagagtttcgtcgtattttatttgtatttcggggaggtttcgggagttttcgttaatcgttttttaatttagagtttattttatttgtcgtatttagtagggggacgggatcgaagtttttttaatttttgtttggtattagatttgt

SEQ ID NO: 12470 - DNA, 719 bp, Artificial Sequence
  chemically treated genomic DNA (Homo sapiens) CpG-island No: 12470
acaaatctaataccaaacaaaaattaaaaaaacttcgatcccgtccccctactaaatacgacaaataaaataaactctaaattaaaaaacgattaacgaaaactcccgaaacctccccgaaatacaaataaaatacgacgaaactctaaaacgtccgaccgaaaccgcaaacactcgaccgccctatctaataataataacctcccaaatacgaaactaacgctctacgaccgaatattcgtaactaaaactacaaactacgactaaattaaaacgcgacgctaacgacttcaacgataacgtcgacaccgacccgaccaataaaaaaaaccgtcgacgcgacctccaacgaaacgaccataaaattaaatttaaaaaaaccgaaaaaaaacaacgaatcgaaaccgacgaacaacttataaaacgcgccgtcctaaacgacgcgacgacgacaacaactacgacgacgacataaacgtacgcgaacgacgactaacaaacctacgccaaaccctaaaaatcgaaacgataaacgtaacgcttaccatacaccttactcataatattcttatcgtaataaataacaaaacgcgactcaacttatcgtaattcatattaaacttactcttacgctcgccccaccgccgcgccacctcgtccgaatccgtaaacttaaactcgccgtaaccgccctcccacgcgatacaaccgcgttcgcg

SEQ ID NO: 12471 - DNA, 719 bp, Artificial Sequence
  chemically treated genomic DNA (Homo sapiens) CpG-island No: 12471
gtaaatttagtattagataaggattgagggagtttcggtttcgtttttttgttaagtgcggtaggtggagtaaattttggattagaggacggttgacggaggttttcgggattttttcgagatgtagatgggatacggcgagattttaggacgttcggtcgaggtcgtaggtattcgatcgttttgtttagtggtaatggttttttaagtgcgaggttgacgttttacggtcgaatgttcgtggttggggttgtaagttgcgattgggttagagcgcggcgttggcggttttagcggtggcgtcggtatcggttcggttagtaggagaagtcgtcggcgcgatttttagcgaggcggttatgaggttgagtttggagaggtcggggaagggtagcgggtcgaggtcggcgggtagtttgtagagcgcgtcgttttgggcgacgcggcggcggtagtagttgcggcggcggtatgagcgtgcgcgggcggcggttggtagatttgcgttaggttttggaagtcgaagcggtaggcgtagcgtttattatgtattttgtttatgatgtttttgtcgtagtagatagtagggcgcggtttagtttgtcgtagtttatgttgggtttgtttttgcgttcgttttatcgtcgcgttatttcgttcgggttcgtgagtttgaattcgtcgtgatcgtttttttacgcgatgtagtcgcgttcgcg

SEQ ID NO: 12472 - DNA, 719 bp, Artificial Sequence
  chemically treated genomic DNA (Homo sapiens) CpG-island No: 12472
cgcgaacgcgactacatcgcgtaaaaaaacgatcacgacgaattcaaactcacgaacccgaacgaaataacgcgacgataaaacgaacgcaaaaacaaacccaacataaactacgacaaactaaaccgcgccctactatctactacgacaaaaacatcataaacaaaatacataataaacgctacgcctaccgcttcgacttccaaaacctaacgcaaatctaccaaccgccgcccgcgcacgctcataccgccgccgcaactactaccgccgccgcgtcgcccaaaacgacgcgctctacaaactacccgccgacctcgacccgctacccttccccgacctctccaaactcaacctcataaccgcctcgctaaaaatcgcgccgacgacttctcctactaaccgaaccgataccgacgccaccgctaaaaccgccaacgccgcgctctaacccaatcgcaacttacaaccccaaccacgaacattcgaccgtaaaacgtcaacctcgcacttaaaaaaccattaccactaaacaaaacgatcgaatacctacgacctcgaccgaacgtcctaaaatctcgccgtatcccatctacatctcgaaaaaatcccgaaaacctccgtcaaccgtcctctaatccaaaatttactccacctaccgcacttaacaaaaaaacgaaaccgaaactccctcaatccttatctaatactaaatttac

SEQ ID NO: 12473 - DNA, 1046 bp, Artificial Sequence
  chemically treated genomic DNA (Homo sapiens) CpG-island No: 12473
ttttcgtcgagaataaaatggcggcgttggcggagggttaattataaggcggggtcgcggttattttttttttatttttatttttgcgtcggtcgggtcggttagggggaattcgttcgtttcgttcggtcgcgggcggggaggggaggggagcggttcggtttattatgtaaagcgtcgggcgtcgtcgtcgttatttcgtggtaaaggtaaaagggtcgggtttagtcgtcgtcgcggcgtttttatgttcgcgcgttaggttcgtttttttcgtcgtcggttcgagttcgttcgatttttttttaattttattttaggatttggcgttaaagcggtttcgaagcgggtttcgtgtttgcggcgggcggttttcggcgcggagggtagggcgcggggagttcgggttttcggtgtcggcggatggcgggagttcgggggtcgcgggttcgcggggtagcgggcgagagacgagacgtcgaggtgggagcggggtggcggggacgggttcgggggcgtcgtcggggtcgcggagaagggggggtttgttattgtttttgttagtgaaaggttagagttcgtgatttcggtgtcgtcgtcgtcgtcgttcgcgcgttggtaggaggagggcgaatgtttttttttttttttttagcgttagtttcgtcgtcgcggcggggggcgggcgagaacgcgattggttgaggcgcgcgcgcgtatcggaacgtcgtagtcggcgttcggtttattcggttcgtgggttgtggggtttcgggcggcggcggttacgtagttgtcgtcggttttggtcgcggtcgggcgggcggatatgtggtttaaatggcgtaggcgtcggggtttagaggttgaagggttggtcgttttaaaaattcgtggacgtcgcgtacggttattcggacgtaggttcgtttttttggggaatcgcgagtttttcgtagttgggtggggatcgttttcgtagtggcggtttttattttgttttttcgtttagttaaggtttttggaaggttcgtaaagtgtttgtt

SEQ ID NO: 12474 - DNA, 1046 bp, Artificial Sequence
  chemically treated genomic DNA (Homo sapiens) CpG-island No: 12474
aacaaacactttacgaaccttccaaaaaccttaactaaacgaaaaaacaaaataaaaaccgccactacgaaaacgatccccacccaactacgaaaaactcgcgattccccaaaaaaacgaacctacgtccgaataaccgtacgcgacgtccacgaatttttaaaacgaccaacccttcaacctctaaaccccgacgcctacgccatttaaaccacatatccgcccgcccgaccgcgaccaaaaccgacgacaactacgtaaccgccgccgcccgaaaccccacaacccacgaaccgaataaaccgaacgccgactacgacgttccgatacgcgcgcgcgcctcaaccaatcgcgttctcgcccgccccccgccgcgacgacgaaactaacgctaaaaaaaaaaaaaaaaacattcgccctcctcctaccaacgcgcgaacgacgacgacgacgacaccgaaatcacgaactctaacctttcactaacaaaaacaataacaaacccccccttctccgcgaccccgacgacgcccccgaacccgtccccgccaccccgctcccacctcgacgtctcgtctctcgcccgctaccccgcgaacccgcgacccccgaactcccgccatccgccgacaccgaaaacccgaactccccgcgccctaccctccgcgccgaaaaccgcccgccgcaaacacgaaacccgcttcgaaaccgctttaacgccaaatcctaaaataaaattaaaaaaaaatcgaacgaactcgaaccgacgacgaaaaaaacgaacctaacgcgcgaacataaaaacgccgcgacgacgactaaacccgacccttttacctttaccacgaaataacgacgacgacgcccgacgctttacataataaaccgaaccgctcccctcccctccccgcccgcgaccgaacgaaacgaacgaattccccctaaccgacccgaccgacgcaaaaataaaaataaaaaaaaaataaccgcgaccccgccttataattaaccctccgccaacgccgccattttattctcgacgaaaa

SEQ ID NO: 12475 - DNA, 1046 bp, Artificial Sequence
  chemically treated genomic DNA (Homo sapiens) CpG-island No: 12475
aatagatattttgcgagttttttagaagttttggttaagcgagaaggtagggtggaggtcgttattgcgaggacggtttttatttagttgcgaggagttcgcggttttttagaggggcgggtttgcgttcgggtaatcgtgcgcgacgtttacgagtttttaggacgattagttttttagtttttaggtttcgacgtttgcgttatttaagttatatattcgttcgttcggtcgcggttaaggtcggcggtagttacgtagtcgtcgtcgttcggggttttatagtttacgggtcggatggatcgagcgtcggttgcggcgtttcggtgcgcgcgcgcgttttagttaatcgcgttttcgttcgtttttcgtcgcggcggcgaggttggcgttgggaagaggaagaagaatattcgttttttttttattagcgcgcgggcggcggcggcggcggtatcggggttacgaattttgattttttattgataaaaataataataaattttttttttttcgcgatttcggcggcgttttcgggttcgttttcgttatttcgtttttatttcggcgtttcgtttttcgttcgttgtttcgcgagttcgcggttttcgggttttcgttattcgtcgatatcgggagttcgggtttttcgcgttttgtttttcgcgtcgggggtcgttcgtcgtagatacgggattcgtttcgaggtcgttttggcgttaaattttgaggtaaaattgaaagagggtcgggcgggttcgggtcggcggcggagggggcgggtttggcgcgcggatatggaggcgtcgcggcggcggttgaattcgatttttttatttttgttacggggtggcggcggcggcgttcggcgttttgtatagtgggtcgggtcgtttttttttttttttcgttcgcggtcgggcgaagcgagcgggttttttttgatcggttcggtcggcgtaagggtgggggtggagggggaatggtcgcggtttcgttttatagttggtttttcgttagcgtcgttattttgttttcgacggaga

SEQ ID NO: 12476 - DNA, 1046 bp, Artificial Sequence
  chemically treated genomic DNA (Homo sapiens) CpG-island No: 12476
tctccgtcgaaaacaaaataacgacgctaacgaaaaaccaactataaaacgaaaccgcgaccattccccctccacccccacccttacgccgaccgaaccgatcaaaaaaaacccgctcgcttcgcccgaccgcgaacgaaaaaaaaaaaaaaacgacccgacccactatacaaaacgccgaacgccgccgccgccaccccgtaacaaaaataaaaaaatcgaattcaaccgccgccgcgacgcctccatatccgcgcgccaaacccgccccctccgccgccgacccgaacccgcccgaccctctttcaattttacctcaaaatttaacgccaaaacgacctcgaaacgaatcccgtatctacgacgaacgacccccgacgcgaaaaacaaaacgcgaaaaacccgaactcccgatatcgacgaataacgaaaacccgaaaaccgcgaactcgcgaaacaacgaacgaaaaacgaaacgccgaaataaaaacgaaataacgaaaacgaacccgaaaacgccgccgaaatcgcgaaaaaaaaaaaatttattattatttttatcaataaaaaatcaaaattcgtaaccccgataccgccgccgccgccgcccgcgcgctaataaaaaaaaaacgaatattcttcttcctcttcccaacgccaacctcgccgccgcgacgaaaaacgaacgaaaacgcgattaactaaaacgcgcgcgcgcaccgaaacgccgcaaccgacgctcgatccatccgacccgtaaactataaaaccccgaacgacgacgactacgtaactaccgccgaccttaaccgcgaccgaacgaacgaatatataacttaaataacgcaaacgtcgaaacctaaaaactaaaaaactaatcgtcctaaaaactcgtaaacgtcgcgcacgattacccgaacgcaaacccgcccctctaaaaaaccgcgaactcctcgcaactaaataaaaaccgtcctcgcaataacgacctccaccctaccttctcgcttaaccaaaacttctaaaaaactcgcaaaatatctatt

SEQ ID NO: 12477 - DNA, 975 bp, Artificial Sequence
  chemically treated genomic DNA (Homo sapiens) CpG-island No: 12477
ggggagcgggttggaggattttgtaagtataggtttttatggagcgttcgttcgggggacgggattttttttttttttttttttttcgttcgttcggaatttcgttttcgtcgcgggttcggaataatgtagtcgttcgtttcggggattagttatttattatttaggttagtgtttcgttgtcgtcgtttacgtcggttttcgcgtcgtagttattcgatttggttatggcgagtgtttttagtttataggttttgaggtcgtagtcgtcgttttcgtttttttgcgggtcgttgggtttcgtcgtttcgtatttatcgttttattcgtcgtatttttagtcgcgtcgattttcgcgttttatcgcgaagattcggagcggacgtttagtcgagttcgttgaggaggtcgcgtcgtcggttgtttttaaattcgaggcgcggcgttcgcgtcgttcgggtttagcgcggcggttgaggagaaagtagggagcgatcggcggcggtcgagcggcggcgttgttttttcgttcgttcgcgggcgtcgttgtaggtcgggttgaagttcgggcgtgcgagtcgcgagggcggtcggggagttcgaggcgttcggacgtggcgaggacgtagaggtgttttgttttttttatatttcgcgaaggttagttattcgagtcgttagagtagtcgtttcggtcgtcgtcgttgttttaaaggtagttttagtttcgttgtagtttcgatttttttatatatatatatcgagagggttaataaatagagtcgtcgtcgtcgtcgttacggttattttttttttgttcggtatattatcgtatatatatatttgtatatcggggagagagggagggcgcgtcggtcgttttcgttgttagttagcgttatgttgtttaattcgggttttgtcgttatagtttttcggttaattttaaaattttaagttttttggaggggcggg

SEQ ID NO: 12478 - DNA, 975 bp, Artificial Sequence
  chemically treated genomic DNA (Homo sapiens) CpG-island No: 12478
cccgcccctccaaaaaacttaaaattttaaaattaaccgaaaaactataacgacaaaacccgaattaaacaacataacgctaactaacaacgaaaacgaccgacgcgccctccctctctccccgatatacaaatatatatatacgataatataccgaacaaaaaaaaaataaccgtaacgacgacgacgacgactctatttattaaccctctcgatatatatatataaaaaaatcgaaactacaacgaaactaaaactacctttaaaacaacgacgacgaccgaaacgactactctaacgactcgaataactaaccttcgcgaaatataaaaaaaacaaaacacctctacgtcctcgccacgtccgaacgcctcgaactccccgaccgccctcgcgactcgcacgcccgaacttcaacccgacctacaacgacgcccgcgaacgaacgaaaaaacaacgccgccgctcgaccgccgccgatcgctccctactttctcctcaaccgccgcgctaaacccgaacgacgcgaacgccgcgcctcgaatttaaaaacaaccgacgacgcgacctcctcaacgaactcgactaaacgtccgctccgaatcttcgcgataaaacgcgaaaatcgacgcgactaaaaatacgacgaataaaacgataaatacgaaacgacgaaacccaacgacccgcaaaaaaacgaaaacgacgactacgacctcaaaacctataaactaaaaacactcgccataaccaaatcgaataactacgacgcgaaaaccgacgtaaacgacgacaacgaaacactaacctaaataataaataactaatccccgaaacgaacgactacattattccgaacccgcgacgaaaacgaaattccgaacgaacgaaaaaaaaaaaaaaaaaaaaaatcccgtcccccgaacgaacgctccataaaaacctatacttacaaaatcctccaacccgctcccc

SEQ ID NO: 12479 - DNA, 975 bp, Artificial Sequence
  chemically treated genomic DNA (Homo sapiens) CpG-island No: 12479
ttcgtttttttagggggtttggaattttgggattggtcgagaggttgtggcgataaggttcggattggatagtatggcgttgattgatagcgggggcggtcggcgcgtttttttttttttttcggtgtgtaaatgtgtgtgtgcggtggtatgtcggataagagggaggtgatcgtggcggcggcggcggcggttttgtttattggttttttcggtgtgtgtgtgtgaggaaatcggggttgtagcgaggttaaggttgtttttgaagtagcggcggcgatcgggacgattattttggcgattcgagtggttggttttcgcggagtgtgagaaggataaggtatttttgcgttttcgttacgttcgagcgtttcgggtttttcggtcgttttcgcggttcgtacgttcgggttttagttcggtttgtagcggcgttcgcgggcgggcgagaaggtaacgtcgtcgttcggtcgtcgtcggtcgttttttgttttttttttagtcgtcgcgttaggttcgggcgacgcggacgtcgcgtttcgagtttgagggtagtcggcggcgcggtttttttagcgggttcggttggacgttcgtttcggattttcgcgatggggcgcgggggtcggcgcggttaggagtgcggcgagtggagcggtgggtgcggagcggcggggtttagcggttcgtagggaggcgggagcggcggttgcggttttagggtttgtgagttggaggtattcgttatggttaagtcgggtggttgcggcgcgggagtcggcgtgggcggcggtaacggggtattgatttgggtggtaagtggttggttttcgggacgggcggttgtattgtttcgggttcgcggcgggggcggaatttcgaacgggcgggggaggggaaagggagggaaatttcgtttttcgaacgggcgttttataggggtttgtgtttgtagaattttttagttcgtttttt

SEQ ID NO: 12480 - DNA, 975 bp, Artificial Sequence
  chemically treated genomic DNA (Homo sapiens) CpG-island No: 12480
aaaaaacgaactaaaaaattctacaaacacaaacccctataaaacgcccgttcgaaaaacgaaatttccctccctttcccctcccccgcccgttcgaaattccgcccccgccgcgaacccgaaacaatacaaccgcccgtcccgaaaaccaaccacttaccacccaaatcaataccccgttaccgccgcccacgccgactcccgcgccgcaaccacccgacttaaccataacgaatacctccaactcacaaaccctaaaaccgcaaccgccgctcccgcctccctacgaaccgctaaaccccgccgctccgcacccaccgctccactcgccgcactcctaaccgcgccgacccccgcgccccatcgcgaaaatccgaaacgaacgtccaaccgaacccgctaaaaaaaccgcgccgccgactaccctcaaactcgaaacgcgacgtccgcgtcgcccgaacctaacgcgacgactaaaaaaaaaacaaaaaacgaccgacgacgaccgaacgacgacgttaccttctcgcccgcccgcgaacgccgctacaaaccgaactaaaacccgaacgtacgaaccgcgaaaacgaccgaaaaacccgaaacgctcgaacgtaacgaaaacgcaaaaataccttatccttctcacactccgcgaaaaccaaccactcgaatcgccaaaataatcgtcccgatcgccgccgctacttcaaaaacaaccttaacctcgctacaaccccgatttcctcacacacacacaccgaaaaaaccaataaacaaaaccgccgccgccgccgccacgatcacctccctcttatccgacataccaccgcacacacacatttacacaccgaaaaaaaaaaaaaaacgcgccgaccgcccccgctatcaatcaacgccatactatccaatccgaaccttatcgccacaacctctcgaccaatcccaaaattccaaaccccctaaaaaaacgaa

SEQ ID NO: 12481 - DNA, 738 bp, Artificial Sequence
  chemically treated genomic DNA (Homo sapiens) CpG-island No: 12481
tcggtcgttatattttttgcgattgaagtatttgtttcgttatgaatttgttaagagttgagcgttttcgttttatatcgtagcgtagttttcgggatttcgatggggaagacggtaaaatcgatgttttgggagaggaggaagatgaagacgaggtggaagacgaggaggaggaggcgagttagtagtttttagagtagtcgttttagtcggggttgtaggtggttcggtggggcggggttgcgttttttcgagagtatatcgagggcggcggcggttcgagcgattttttagagtttggtatcgagtttagggtatcgttaaggtttgcggcggtttttgaagatgttcggtagtcggtaaagttttttattcgtatatcgcgtttattattatggttattttgtaaagttcgtataagcgttttacgtttagcggtatttgcgtttttattagtggcgttttttttattatcgtcgtaagtttttcgtttggtagaatagtattcgttataatttttcgttgaacgattgtttcgttaagatttttcgcgagtcgggtcgtttaggaagggtaattattggagtttggatttcgttttttaggatatgttcgataatggtagtttttttcggcgtaggaagcgtttttagcgttattaattgatttcgggagtttatttgttttattttttttttttatttgttgtatacgtcgttttgtataattttcgtttag

SEQ ID NO: 12482 - DNA, 738 bp, Artificial Sequence
  chemically treated genomic DNA (Homo sapiens) CpG-island No: 12482
ctaaacgaaaattatacaaaacgacgtatacaacaaataaaaaaaaaaaataaaacaaataaactcccgaaatcaattaataacgctaaaaacgcttcctacgccgaaaaaaactaccattatcgaacatatcctaaaaaacgaaatccaaactccaataattacccttcctaaacgacccgactcgcgaaaaatcttaacgaaacaatcgttcaacgaaaaattataacgaatactattctaccaaacgaaaaacttacgacgataataaaaaaaacgccactaataaaaacgcaaataccgctaaacgtaaaacgcttatacgaactttacaaaataaccataataataaacgcgatatacgaataaaaaactttaccgactaccgaacatcttcaaaaaccgccgcaaaccttaacgataccctaaactcgataccaaactctaaaaaatcgctcgaaccgccgccgccctcgatatactctcgaaaaaacgcaaccccgccccaccgaaccacctacaaccccgactaaaacgactactctaaaaactactaactcgcctcctcctcctcgtcttccacctcgtcttcatcttcctcctctcccaaaacatcgattttaccgtcttccccatcgaaatcccgaaaactacgctacgatataaaacgaaaacgctcaactcttaacaaattcataacgaaacaaatacttcaatcgcaaaaaatataacgaccga

SEQ ID NO: 12483 - DNA, 738 bp, Artificial Sequence
  chemically treated genomic DNA (Homo sapiens) CpG-island No: 12483
ttgggcgggggttgtgtagggcggcgtgtgtagtaggtagagggaaggggtggggtaggtgggttttcggggttagttggtggcgttggaaacgttttttacgtcggagaaagttgttattgtcgaatatgttttgggaggcggggtttaggttttagtagttgttttttttgggcggttcggttcgcgggggattttgacgaagtagtcgtttagcgagaggttgtggcggatgttgttttgttaggcggggaatttgcggcggtagtaggggaagcgttattaatgaaggcgtagatgtcgttgagcgtgaggcgtttgtgcgggttttgtaggatggttatggtgatgagcgcgatgtacgagtagggggttttgtcggttgtcgggtatttttagaggtcgtcgtagattttggcggtgttttgaattcggtgttaaattttgaggggtcgttcgggtcgtcgtcgttttcgatgtgttttcggggaagcgtaatttcgttttatcgggttatttgtagtttcggttggagcgattgttttaggaattgttggttcgttttttttttttcgttttttatttcgtttttatttttttttttttttaggatatcgattttatcgttttttttatcggagtttcggaggttgcgttgcggtgtggagcgaaggcgtttagtttttggtaagtttatggcggagtaggtgttttagtcgtaggggatgtggcggtcga

SEQ ID NO: 12484 - DNA, 738 bp, Artificial Sequence
  chemically treated genomic DNA (Homo sapiens) CpG-island No: 12484
tcgaccgccacatcccctacgactaaaacacctactccgccataaacttaccaaaaactaaacgccttcgctccacaccgcaacgcaacctccgaaactccgataaaaaaaacgataaaatcgatatcctaaaaaaaaaaaaaaataaaaacgaaataaaaaacgaaaaaaaaaaaacgaaccaacaattcctaaaacaatcgctccaaccgaaactacaaataacccgataaaacgaaattacgcttccccgaaaacacatcgaaaacgacgacgacccgaacgacccctcaaaatttaacaccgaattcaaaacaccgccaaaatctacgacgacctctaaaaatacccgacaaccgacaaaaccccctactcgtacatcgcgctcatcaccataaccatcctacaaaacccgcacaaacgcctcacgctcaacgacatctacgccttcattaataacgcttcccctactaccgccgcaaattccccgcctaacaaaacaacatccgccacaacctctcgctaaacgactacttcgtcaaaatcccccgcgaaccgaaccgcccaaaaaaaacaactactaaaacctaaaccccgcctcccaaaacatattcgacaataacaactttctccgacgtaaaaaacgtttccaacgccaccaactaaccccgaaaacccacctaccccaccccttccctctacctactacacacgccgccctacacaacccccgcccaa

SEQ ID NO: 12485 - DNA, 532 bp, Artificial Sequence
  chemically treated genomic DNA (Homo sapiens) CpG-island No: 12485
gttaggttgttcgtttcgttttttataatagtttcgcgaagttattttttcgtgtttttttcgattcggacgttttttcgtttatatcgttagggaggtttcggaggggttgttttcgcgtgttaagttagttatcggggcggattttgtttttacgtgcggtttcgagtgagggttggagagattagggacgttgcgggtcggttttttcgggttttgtcgttagtttggattttgcgcgttttcgaattacgttcgtcggtttagttcgcgtcgtagcgattttattttcggttcgtttcgcgttttcgtagttgttacgtaatcgcgtaaggatttcgagggaggttgttcggtcgaacgtgaaggatttcgtcggtcgttggttgtttagcggcgtttggcgggagggtcgtaggagtgcgtatgcggtcgagtgcgggattggggtttttggttgtgggtgtggtattgaggttttagcgggtgtcgttcgtttagagggagtggagcggtgagtacgttaggggtg

SEQ ID NO: 12486 - DNA, 532 bp, Artificial Sequence
  chemically treated genomic DNA (Homo sapiens) CpG-island No: 12486
cacccctaacgtactcaccgctccactccctctaaacgaacgacacccgctaaaacctcaataccacacccacaaccaaaaaccccaatcccgcactcgaccgcatacgcactcctacgaccctcccgccaaacgccgctaaacaaccaacgaccgacgaaatccttcacgttcgaccgaacaacctccctcgaaatccttacgcgattacgtaacaactacgaaaacgcgaaacgaaccgaaaataaaatcgctacgacgcgaactaaaccgacgaacgtaattcgaaaacgcgcaaaatccaaactaacgacaaaacccgaaaaaaccgacccgcaacgtccctaatctctccaaccctcactcgaaaccgcacgtaaaaacaaaatccgccccgataactaacttaacacgcgaaaacaacccctccgaaacctccctaacgatataaacgaaaaaacgtccgaatcgaaaaaaacacgaaaaaataacttcgcgaaactattataaaaaacgaaacgaacaacctaac

SEQ ID NO: 12487 - DNA, 532 bp, Artificial Sequence
  chemically treated genomic DNA (Homo sapiens) CpG-island No: 12487
tatttttgacgtgtttatcgttttattttttttaggcgggcggtattcgttgaagttttagtattatatttatagttaggagttttagtttcgtattcggtcgtatgcgtatttttgcggttttttcgttaggcgtcgttgggtagttagcgatcggcggggttttttacgttcggtcgggtagtttttttcggggtttttgcgcggttgcgtagtagttgcgaggacgcggggcgagtcggaagtggagtcgttgcggcgcgagttgggtcggcgggcgtggttcgagagcgcgtagagtttagattggcggtagggttcgaaggggtcgattcgtagcgtttttggtttttttagtttttattcggaatcgtacgtgagggtaaaattcgtttcggtggttggtttagtacgcggggatagttttttcgaggtttttttagcggtgtgggcgagagggcgttcgggtcgggggaagtacggaaaggtggtttcgcgaggttgttgtggggggcgggacgggtagtttggt

SEQ ID NO: 12488 - DNA, 532 bp, Artificial Sequence
  chemically treated genomic DNA (Homo sapiens) CpG-island No: 12488
accaaactacccgtcccgccccccacaacaacctcgcgaaaccacctttccgtacttcccccgacccgaacgccctctcgcccacaccgctaaaaaaacctcgaaaaaactatccccgcgtactaaaccaaccaccgaaacgaattttaccctcacgtacgattccgaataaaaactaaaaaaaccaaaaacgctacgaatcgaccccttcgaaccctaccgccaatctaaactctacgcgctctcgaaccacgcccgccgacccaactcgcgccgcaacgactccacttccgactcgccccgcgtcctcgcaactactacgcaaccgcgcaaaaaccccgaaaaaaactacccgaccgaacgtaaaaaaccccgccgatcgctaactacccaacgacgcctaacgaaaaaaccgcaaaaatacgcatacgaccgaatacgaaactaaaactcctaactataaatataatactaaaacttcaacgaataccgcccgcctaaaaaaaataaaacgataaacacgtcaaaaata

SEQ ID NO: 12489 - DNA, 931 bp, Artificial Sequence
  chemically treated genomic DNA (Homo sapiens) CpG-island No: 12489
ggtcgagtaggcggtcgagcgacgtttttacgtcgttaaataggcggtggatgcgttcggtgtattcggcgtcgcggatgaaggttttgtagttagcgaaggttaagtcgcgcgtttgttgtagtagttgcgttcgttttttcgttaggcgttcgggttcgcgtcgtagtcgttttagtttcgagtcgtttaattttcggaggtagcggtttatatcgggtcgttcgcgttattgggtttcggggaagcggtttcggaatagcgacgttaggagttttttattttttatttcgtcgagagtcgttgttgtggtcgtggttatcgatgggatagtcgtcgcggtcgttatttttttagtaataacgttatttttttttcggattataaggggcgttgatttcgaatttaggataggaagaaataggtatattttcggtttttatgtttttttattcggtcggtttgtttttttttgcggtcgtttagattattgggcgttagcgagacgaattattggtacggggttagagaggaaggttttgggattgtcggggagtagcgagcgatcgattttcgtttttagttattaaggtacgaggattcggtgttttaatttagggggaaaaatgcggtttttgattgaagaggagattcgtgttatgtttgagaagatagcgaaatagtaggagcgcgcggggcggacgcgggagtgtgtgggtgtggtggttaagggtggagtgggggcgcggtgtcggagatcggttcgttcgggcgcggtttttagttttttttttgtttttagtattggggagaatttttaattgttggtggatcggttcgatggtatttattgttttcgtttgtataacgatcgggtgtattatgtgaggtgaggcggggtcgggtaggtagtatggatttaggggagagg

SEQ ID NO: 12490 - DNA, 931 bp, Artificial Sequence
  chemically treated genomic DNA (Homo sapiens) CpG-island No: 12490
cctctcccctaaatccatactacctacccgaccccgcctcacctcacataatacacccgatcgttatacaaacgaaaacaataaataccatcgaaccgatccaccaacaattaaaaattctccccaatactaaaaacaaaaaaaaaactaaaaaccgcgcccgaacgaaccgatctccgacaccgcgcccccactccacccttaaccaccacacccacacactcccgcgtccgccccgcgcgctcctactatttcgctatcttctcaaacataacacgaatctcctcttcaatcaaaaaccgcatttttccccctaaattaaaacaccgaatcctcgtaccttaataactaaaaacgaaaatcgatcgctcgctactccccgacaatcccaaaaccttcctctctaaccccgtaccaataattcgtctcgctaacgcccaataatctaaacgaccgcaaaaaaaaacaaaccgaccgaataaaaaaacataaaaaccgaaaatatacctatttcttcctatcctaaattcgaaatcaacgccccttataatccgaaaaaaaaataacgttattactaaaaaaataacgaccgcgacgactatcccatcgataaccacgaccacaacaacgactctcgacgaaataaaaaataaaaaactcctaacgtcgctattccgaaaccgcttccccgaaacccaataacgcgaacgacccgatataaaccgctacctccgaaaattaaacgactcgaaactaaaacgactacgacgcgaacccgaacgcctaacgaaaaaacgaacgcaactactacaacaaacgcgcgacttaaccttcgctaactacaaaaccttcatccgcgacgccgaatacaccgaacgcatccaccgcctatttaacgacgtaaaaacgtcgctcgaccgcctactcgacc

SEQ ID NO: 12491 - DNA, 931 bp, Artificial Sequence
  chemically treated genomic DNA (Homo sapiens) CpG-island No: 12491
ttttttttttgggtttatgttgtttgttcggtttcgttttattttatatagtatattcggtcgttgtgtagacggaaatagtaggtgttatcgggtcggtttattagtagttgaagattttttttaatgttgagggtaaaaagaggattggagatcgcgttcgaacgaatcggttttcggtatcgcgtttttattttatttttggttattatatttatatattttcgcgttcgtttcgcgcgtttttattatttcgttatttttttaaatatgatacgggttttttttttagttaaaggtcgtatttttttttttgggttggaatatcggattttcgtgttttggtaattggaaacggaagtcggtcgttcgttgtttttcggtaattttaaagtttttttttttagtttcgtattaatagttcgtttcgttagcgtttaatagtttggacgatcgtaggggaaagtaagtcggtcggatgagaaagtatagagatcggaaatgtgtttgtttttttttgttttaagttcggagttagcgttttttgtggttcggaagggaagtgacgttgttgttgggaagatggcgatcgcggcgattattttatcggtagttacggttatagtagcggttttcggcgaggtggaggatgaagggtttttggcgtcgttgtttcgggatcgttttttcgaggtttagtggcgcgagcggttcgatgtgggtcgttattttcgggagttgagcggttcggggttggagcggttgcggcgcgagttcgagcgtttggcggaggagcgggcgtagttgttgtagtagacgcgcgatttggttttcgttaattataagatttttattcgcggcgtcgagtgtatcgagcgtatttatcgtttgtttggcgacgtggaggcgtcgttcggtcgtttgttcgatt

SEQ ID NO: 12492 - DNA, 931 bp, Artificial Sequence
  chemically treated genomic DNA (Homo sapiens) CpG-island No: 12492
aatcgaacaaacgaccgaacgacgcctccacgtcgccaaacaaacgataaatacgctcgatacactcgacgccgcgaataaaaatcttataattaacgaaaaccaaatcgcgcgtctactacaacaactacgcccgctcctccgccaaacgctcgaactcgcgccgcaaccgctccaaccccgaaccgctcaactcccgaaaataacgacccacatcgaaccgctcgcgccactaaacctcgaaaaaacgatcccgaaacaacgacgccaaaaacccttcatcctccacctcgccgaaaaccgctactataaccgtaactaccgataaaataatcgccgcgatcgccatcttcccaacaacaacgtcacttcccttccgaaccacaaaaaacgctaactccgaacttaaaacaaaaaaaaacaaacacatttccgatctctatactttctcatccgaccgacttactttcccctacgatcgtccaaactattaaacgctaacgaaacgaactattaatacgaaactaaaaaaaaaaactttaaaattaccgaaaaacaacgaacgaccgacttccgtttccaattaccaaaacacgaaaatccgatattccaacccaaaaaaaaaaatacgacctttaactaaaaaaaaaacccgtatcatatttaaaaaaataacgaaataataaaaacgcgcgaaacgaacgcgaaaatatataaatataataaccaaaaataaaataaaaacgcgataccgaaaaccgattcgttcgaacgcgatctccaatcctctttttaccctcaacattaaaaaaaatcttcaactactaataaaccgacccgataacacctactatttccgtctacacaacgaccgaatatactatataaaataaaacgaaaccgaacaaacaacataaacccaaaaaaaaaa

SEQ ID NO: 12493 - DNA, 645 bp, Artificial Sequence
  chemically treated genomic DNA (Homo sapiens) CpG-island No: 12493
cgttttaatttttttttttcggttcggtttttattttgtatgatgtttcggatttgtttgaagttttcgtatcggttatttcgaaaggttcgtagcgtttcgtggaagtagaatttgagtatttagcgattgattgttttttttagtcgtgtttttttcgcgtcgcgtttcgtcgggttttttagtttcggttcgtggcgttttcgtcgggttcgttcgttattgcgggacgttcgtttgttagttgttcgttcgttgtcgtcgttattttcgttttttttcgttatcgtgttcgatcgtcgcgcgtttttttcgttttttcggtcgggtcgttttttcggttgtgacgtcgttgggttacgtacgacgttcgggtcgttagcggggttcgtcgtttcggttttcgcggttatgatagaaatagcgtttcgagtcgttcgcgggtttttgggagggaaaggatcggagggttcggttttttttttagacgtcgtagttttcgatgtgtcggtcgtaatgttttttggggtttgaagtttatatcgtttaggtcggtgaattcggcgggttttgtagttaatttcgtttcgaatttatagaaaatagttattatgttagggacgcggaatagtgtattagagattg

SEQ ID NO: 12494 - DNA, 645 bp, Artificial Sequence
  chemically treated genomic DNA (Homo sapiens) CpG-island No: 12494
caatctctaatacactattccgcgtccctaacataataactattttctataaattcgaaacgaaattaactacaaaacccgccgaattcaccgacctaaacgatataaacttcaaaccccaaaaaacattacgaccgacacatcgaaaactacgacgtctaaaaaaaaaaccgaaccctccgatcctttccctcccaaaaacccgcgaacgactcgaaacgctatttctatcataaccgcgaaaaccgaaacgacgaaccccgctaacgacccgaacgtcgtacgtaacccaacgacgtcacaaccgaaaaaacgacccgaccgaaaaaacgaaaaaaacgcgcgacgatcgaacacgataacgaaaaaaaacgaaaataacgacgacaacgaacgaacaactaacaaacgaacgtcccgcaataacgaacgaacccgacgaaaacgccacgaaccgaaactaaaaaacccgacgaaacgcgacgcgaaaaaaacacgactaaaaaaaacaatcaatcgctaaatactcaaattctacttccacgaaacgctacgaacctttcgaaataaccgatacgaaaacttcaaacaaatccgaaacatcatacaaaataaaaaccgaaccgaaaaaaaaaaattaaaacg

SEQ ID NO: 12495 - DNA, 645 bp, Artificial Sequence
  chemically treated genomic DNA (Homo sapiens) CpG-island No: 12495
tagtttttaatatattgtttcgcgtttttagtatagtagttgttttttgtaaattcggagcgaagttgattgtaaaattcgtcgggtttatcggtttgggcggtgtggattttaagttttaggaggtattgcggtcggtatatcgggaattacggcgtttgagaagggggtcgggtttttcggtttttttttttttagaagttcgcgggcggttcggaacgttgtttttattatggtcgcgggagtcgggacggcgggtttcgttaacggttcgggcgtcgtgcgtgatttagcggcgttatagtcgaggaagcggttcggtcgggagggcggggagggcgcgcggcgatcggatacgatggcgggaggaggcgggagtagcgacggtagcgggcgggtagttggtaggcgggcgtttcgtagtagcgggcgggttcggcgggggcgttacgagtcggggttggggggttcggcggagcgcggcgcgggggaggtacggttggaagaggtagttaatcgttgggtgtttaagttttatttttacgaggcgttgcgggtttttcggggtagtcggtacggggattttagatagattcgggatattatgtagggtgagggtcgggtcgggggaggggggttggagcg

SEQ ID NO: 12496 - DNA, 645 bp, Artificial Sequence
  chemically treated genomic DNA (Homo sapiens) CpG-island No: 12496
cgctccaacccccctcccccgacccgaccctcaccctacataatatcccgaatctatctaaaatccccgtaccgactaccccgaaaaacccgcaacgcctcgtaaaaataaaacttaaacacccaacgattaactacctcttccaaccgtacctcccccgcgccgcgctccgccgaaccccccaaccccgactcgtaacgcccccgccgaacccgcccgctactacgaaacgcccgcctaccaactacccgcccgctaccgtcgctactcccgcctcctcccgccatcgtatccgatcgccgcgcgccctccccgccctcccgaccgaaccgcttcctcgactataacgccgctaaatcacgcacgacgcccgaaccgttaacgaaacccgccgtcccgactcccgcgaccataataaaaacaacgttccgaaccgcccgcgaacttctaaaaaaaaaaaaaccgaaaaacccgacccccttctcaaacgccgtaattcccgatataccgaccgcaatacctcctaaaacttaaaatccacaccgcccaaaccgataaacccgacgaattttacaatcaacttcgctccgaatttacaaaaaacaactactatactaaaaacgcgaaacaatatattaaaaacta

SEQ ID NO: 12497 - DNA, 935 bp, Artificial Sequence
  chemically treated genomic DNA (Homo sapiens) CpG-island No: 12497
tgttcgaagtgaggtcgagggatttttaggattcgggataggagaggagggagcgagataggagaggagggagcgagtatcgttgtttgaacgtttagtcggatttcgggtcgagttttttgagggtgtttgtgcggttcgggtgaggttgatttttacggcggtatcggggcgtcggttatacgaagcggttttggggttgggttagtcgggtagggtcggaaggtttgagggtggagatgttattcggtttcgagcgcgtggaaatagatacgggcggaagcggcgagggggcggtcggagcggggtcgcgaggtcggggttgggaggcgtttatttgattattcgttcgtcgttcggttttgcggttcgtaggattcgttgttttcggttttcgaagtcgggtcgggtcgtacgaagtatttggagggttgacgttgttattttattttttgggttcgttttatatttcgcggcgttgtttgcggtttcggttcggtttcggggagtcgaggtattgggttcggcgcgggaagttcggcggtgggcgttgagcgcggtgcgcgggtagggcggtcgttcgtagcgggagtcgagttcgagggtaagcgaggagcgtagtttagagcggtcgggttcgagtcgagcggttgttttttagcgtttacggttcgtattgtaggtatttttttttgtttcggcgaaggtagggggcggttcgagaggtaggattgattggggacgaggaggtgggattagggcgagacggatagggggcggggacggggtgggtgggataaggtcggggcggggtttggcgggacgtatattttcggggcggggttaggggcggagcggggtagaattcggaaattttgatttcgtttggaataatagcgtttattgagtagttttatttttataataaaacgaat

SEQ ID NO: 12498 - DNA, 935 bp, Artificial Sequence
  chemically treated genomic DNA (Homo sapiens) CpG-island No: 12498
attcgttttattataaaaataaaactactcaataaacgctattattccaaacgaaatcaaaatttccgaattctaccccgctccgcccctaaccccgccccgaaaatatacgtcccgccaaaccccgccccgaccttatcccacccaccccgtccccgccccctatccgtctcgccctaatcccacctcctcgtccccaatcaatcctacctctcgaaccgccccctaccttcgccgaaacaaaaaaaaatacctacaatacgaaccgtaaacgctaaaaaacaaccgctcgactcgaacccgaccgctctaaactacgctcctcgcttaccctcgaactcgactcccgctacgaacgaccgccctacccgcgcaccgcgctcaacgcccaccgccgaacttcccgcgccgaacccaatacctcgactccccgaaaccgaaccgaaaccgcaaacaacgccgcgaaatataaaacgaacccaaaaaataaaataacaacgtcaaccctccaaatacttcgtacgacccgacccgacttcgaaaaccgaaaacaacgaatcctacgaaccgcaaaaccgaacgacgaacgaataatcaaataaacgcctcccaaccccgacctcgcgaccccgctccgaccgccccctcgccgcttccgcccgtatctatttccacgcgctcgaaaccgaataacatctccaccctcaaaccttccgaccctacccgactaacccaaccccaaaaccgcttcgtataaccgacgccccgataccgccgtaaaaatcaacctcacccgaaccgcacaaacaccctcaaaaaactcgacccgaaatccgactaaacgttcaaacaacgatactcgctccctcctctcctatctcgctccctcctctcctatcccgaatcctaaaaatccctcgacctcacttcgaaca

SEQ ID NO: 12499 - DNA, 935 bp, Artificial Sequence
  chemically treated genomic DNA (Homo sapiens) CpG-island No: 12499
gttcgttttattgtgagaataaaattgtttaatgggcgttgttattttaagcgaggttaggattttcggattttatttcgtttcgtttttggtttcgtttcgagaatgtacgtttcgttaggtttcgtttcggttttgttttatttatttcgttttcgttttttgttcgtttcgttttagttttattttttcgtttttagttagttttgtttttcgaatcgttttttgttttcgtcgaggtagggagaggtgtttgtagtgcgagtcgtggacgttagggggtagtcgttcggttcgggttcgatcgttttgggttgcgtttttcgtttgttttcggattcggttttcgttgcgagcggtcgttttgttcgcgtatcgcgtttagcgtttatcgtcgggtttttcgcgtcggatttagtatttcggtttttcggggtcggatcgaggtcgtaagtagcgtcgcggggtgtggggcggatttaggagatgaaatgataacgttaattttttaggtatttcgtgcggttcggttcgatttcggaggtcgaaggtagcgggttttgcgggtcgtagagtcgggcggcgggcgggtggttaggtgggcgttttttagtttcggtttcgcgatttcgtttcggtcgttttttcgtcgttttcgttcgtgtttgtttttacgcgttcggagtcgggtggtatttttatttttaggtttttcggttttgttcggttggtttagttttagggtcgtttcgtgtagtcggcgtttcggtatcgtcgtggggattagttttattcgagtcgtataggtatttttaggaagttcggttcggggttcggttgggcgtttagatagcgatgttcgttttttttttttttgtttcgttttttttttttttgtttcgggttttggaagtttttcgattttatttcgaata

SEQ ID NO: 12500 - DNA, 935 bp, Artificial Sequence
  chemically treated genomic DNA (Homo sapiens) CpG-island No: 12500
tattcgaaataaaatcgaaaaacttccaaaacccgaaacaaaaaaaaaaaaaacgaaacaaaaaaaaaaaaaacgaacatcgctatctaaacgcccaaccgaaccccgaaccgaacttcctaaaaatacctatacgactcgaataaaactaatccccacgacgataccgaaacgccgactacacgaaacgaccctaaaactaaaccaaccgaacaaaaccgaaaaacctaaaaataaaaataccacccgactccgaacgcgtaaaaacaaacacgaacgaaaacgacgaaaaaacgaccgaaacgaaatcgcgaaaccgaaactaaaaaacgcccacctaaccacccgcccgccgcccgactctacgacccgcaaaacccgctaccttcgacctccgaaatcgaaccgaaccgcacgaaatacctaaaaaattaacgttatcatttcatctcctaaatccgccccacaccccgcgacgctacttacgacctcgatccgaccccgaaaaaccgaaatactaaatccgacgcgaaaaacccgacgataaacgctaaacgcgatacgcgaacaaaacgaccgctcgcaacgaaaaccgaatccgaaaacaaacgaaaaacgcaacccaaaacgatcgaacccgaaccgaacgactaccccctaacgtccacgactcgcactacaaacacctctccctacctcgacgaaaacaaaaaacgattcgaaaaacaaaactaactaaaaacgaaaaaataaaactaaaacgaaacgaacaaaaaacgaaaacgaaataaataaaacaaaaccgaaacgaaacctaacgaaacgtacattctcgaaacgaaaccaaaaacgaaacgaaataaaatccgaaaatcctaacctcgcttaaaataacaacgcccattaaacaattttattctcacaataaaacgaac

SEQ ID NO: 12501 - DNA, 584 bp, Artificial Sequence
  chemically treated genomic DNA (Homo sapiens) CpG-island No: 12501
tgtttattcgtcgtatatcgtttaaaaagtttagagatagtatggcggggacggcgagtaggatatcggtaggggaaagggcgcgatgattagcgggcggaattattggagttcgggtcgggtttatattggataggatttcgtagtgtttgtattttcgttttcggggcgggagttggtacggtcgggtacggttttcgtttttcgcgttttttcgttgcggagagttgatagagagatttacgattttgttagtttagttttagggtttggtttcgtcgtgggagggtttttacgttttggttttcgtttgttaaaaattcgattggacgttatttttcgcgttcggtttcgcggtttttatcgaggacgcgatttaggtttagttggggaggttgttttgttattttcggaaggcgggtttttgtgttcgttcgggtaatcgcgagtaattttttcggtgtcggcggtagaagcggtttcggtttcggtttgtgtatgtgtgtgtagtggatgtgtcgtttgatcgtagttattttgatcgagtacgttttatgcgttatggaaagttgaggagatgtttt

SEQ ID NO: 12502 - DNA, 584 bp, Artificial Sequence
  chemically treated genomic DNA (Homo sapiens) CpG-island No: 12502
aaaacatctcctcaactttccataacgcataaaacgtactcgatcaaaataactacgatcaaacgacacatccactacacacacatacacaaaccgaaaccgaaaccgcttctaccgccgacaccgaaaaaattactcgcgattacccgaacgaacacaaaaacccgccttccgaaaataacaaaacaacctccccaactaaacctaaatcgcgtcctcgataaaaaccgcgaaaccgaacgcgaaaaataacgtccaatcgaatttttaacaaacgaaaaccaaaacgtaaaaaccctcccacgacgaaaccaaaccctaaaactaaactaacaaaatcgtaaatctctctatcaactctccgcaacgaaaaaacgcgaaaaacgaaaaccgtacccgaccgtaccaactcccgccccgaaaacgaaaatacaaacactacgaaatcctatccaatataaacccgacccgaactccaataattccgcccgctaatcatcgcgccctttcccctaccgatatcctactcgccgtccccgccatactatctctaaactttttaaacgatatacgacgaataaaca

SEQ ID NO: 12503 - DNA, 584 bp, Artificial Sequence
  chemically treated genomic DNA (Homo sapiens) CpG-island No: 12503
aaagtatttttttagttttttatagcgtatgagacgtgttcgattagagtaattacggttagacgatatatttattgtatatatatatataagtcgggatcggaatcgtttttatcgtcgatatcggagaggttgttcgcgattgttcgggcgggtatagaggttcgtttttcgaaggtggtagagtagtttttttaattaagtttgggtcgcgttttcggtgaaggtcgcggggtcgagcgcgggaagtggcgtttagtcgggtttttggtaggcgagagttagagcgtgagaatttttttacggcgaggttaagttttgagattggattagtaaggtcgtgagtttttttgttagtttttcgtagcgaaggggcgcggggggcggggatcgtgttcgatcgtgttagttttcgtttcggaagcggaagtgtaagtattgcggggttttgtttagtgtgagttcgattcgagttttagtagtttcgttcgttggttatcgcgtttttttttttgtcggtgttttgttcgtcgttttcgttatgttgtttttagattttttggacgatgtgcggcggatgaata

SEQ ID NO: 12504 - DNA, 584 bp, Artificial Sequence
  chemically treated genomic DNA (Homo sapiens) CpG-island No: 12504
tattcatccgccgcacatcgtccaaaaaatctaaaaacaacataacgaaaacgacgaacaaaacaccgacaaaaaaaaaaacgcgataaccaacgaacgaaactactaaaactcgaatcgaactcacactaaacaaaaccccgcaatacttacacttccgcttccgaaacgaaaactaacacgatcgaacacgatccccgccccccgcgccccttcgctacgaaaaactaacaaaaaaactcacgaccttactaatccaatctcaaaacttaacctcgccgtaaaaaaattctcacgctctaactctcgcctaccaaaaacccgactaaacgccacttcccgcgctcgaccccgcgaccttcaccgaaaacgcgacccaaacttaattaaaaaaactactctaccaccttcgaaaaacgaacctctatacccgcccgaacaatcgcgaacaacctctccgatatcgacgataaaaacgattccgatcccgacttatatatatatatacaataaatatatcgtctaaccgtaattactctaatcgaacacgtctcatacgctataaaaaactaaaaaaatacttt

SEQ ID NO: 12505 - DNA, 567 bp, Artificial Sequence
  chemically treated genomic DNA (Homo sapiens) CpG-island No: 12505
  unsure (387, 408)
atttttttcgtttttagcgtatattgagtaaattcggcgtgtgtttgatgatatcgcgtagcgtatggataatcgtgttttgggtgttggcgtaaatttgtagtaatatattattatgatataacgtcgtatttagcgagtcgttggggaaacgcgttattttttgtagtttttttggtatttgtggcgtaaggttaaagcgtttattaaataatgagtgatttatcgataacgtgatggtgagattatcgggcgtaatgtagtcgttaagaatgtcggaatcgagtggtggtaggcgcggatttggcgtttttggtgttgtttcgttttgagttagaaaagtaaaacgttgagttaataagcgaaataatcgtttaagatcggttntatcgttggtaagtatattanacgttattagtattattgcggtttgttgtggcgttaggatttttgtttgatgtttattatataacggttgttttttattgcgagtattcggtgaaagcgtattcggcgtattgtgacgtttttgtgtatgagcgatcggatagtttttcggtagggtta

SEQ ID NO: 12506 - DNA, 567 bp, Artificial Sequence
  chemically treated genomic DNA (Homo sapiens) CpG-island No: 12506
  unsure (160, 181)
taaccctaccgaaaaactatccgatcgctcatacacaaaaacgtcacaatacgccgaatacgctttcaccgaatactcgcaataaaaaacaaccgttatataataaacatcaaacaaaaatcctaacgccacaacaaaccgcaataatactaataacgtntaatatacttaccaacgatanaaccgatcttaaacgattatttcgcttattaactcaacgttttacttttctaactcaaaacgaaacaacaccaaaaacgccaaatccgcgcctaccaccactcgattccgacattcttaacgactacattacgcccgataatctcaccatcacgttatcgataaatcactcattatttaataaacgctttaaccttacgccacaaataccaaaaaaactacaaaaaataacgcgtttccccaacgactcgctaaatacgacgttatatcataataatatattactacaaatttacgccaacacccaaaacacgattatccatacgctacgcgatatcatcaaacacacgccgaatttactcaatatacgctaaaaacgaaaaaaat

SEQ ID NO: 12507 - DNA, 567 bp, Artificial Sequence
  chemically treated genomic DNA (Homo sapiens) CpG-island No: 12507
  unsure (160, 181)
tggttttgtcgggaaattgttcggtcgtttatgtataaaaacgttatagtgcgtcgggtacgtttttatcggatgttcgtaatgagaaatagtcgttgtatggtgagtattaggtagggattttgacgttataataggtcgtaatgatgttggtggcgtntgatgtgtttgttagcgatanagtcgattttgagcggttgtttcgtttgttgatttagcgttttgtttttttgatttagggcggagtagtattagaaacgttaaattcgcgtttgttattattcgatttcggtatttttggcggttatattgcgttcgataattttattattacgttatcggtgggttatttattgtttgatgagcgttttggttttgcgttatagatgttaaaaaagttgtagaagatgacgcgtttttttaacgattcgttggatgcggcgttatgttatggtgatgtgttgttatagatttgcgttaatatttaggatacggttatttatgcgttgcgcgatattattaaatatacgtcggatttgtttagtgtgcgttggaagcgggaagggt

SEQ ID NO: 12508 - DNA, 567 bp, Artificial Sequence
  chemically treated genomic DNA (Homo sapiens) CpG-island No: 12508
  unsure (387, 408)
acccttcccgcttccaacgcacactaaacaaatccgacgtatatttaataatatcgcgcaacgcataaataaccgtatcctaaatattaacgcaaatctataacaacacatcaccataacataacgccgcatccaacgaatcgttaaaaaaacgcgtcatcttctacaacttttttaacatctataacgcaaaaccaaaacgctcatcaaacaataaataacccaccgataacgtaataataaaattatcgaacgcaatataaccgccaaaaataccgaaatcgaataataacaaacgcgaatttaacgtttctaatactactccgccctaaatcaaaaaaacaaaacgctaaatcaacaaacgaaacaaccgctcaaaatcgactntatcgctaacaaacacatcanacgccaccaacatcattacgacctattataacgtcaaaatccctacctaatactcaccatacaacgactatttctcattacgaacatccgataaaaacgtacccgacgcactataacgtttttatacataaacgaccgaacaatttcccgacaaaacca

SEQ ID NO: 12509 - DNA, 679 bp, Artificial Sequence
  chemically treated genomic DNA (Homo sapiens) CpG-island No: 12509
agttcgttagagattttgatttttttcgggagtataatatagattcgaattggttaattcgggttgacgtcggtttagttgatttttattttggtaagaggttttcggagtgttttagcgttttttaggtttgttgcggtcgttttagtttacgggtcgcgcggaggatttaagataaaaggacgtagggtgtcgatttgatcgatttcggtatcgcgagagcgcgacgaggtttttggagttcgcggtttcgttaagggttttatcgcgtttcgattttcgggtttcgcgtttatttttcgggtttgcgttcggcgtcgcggtgttttgtttttcggcgtaattcggtttattagcgtttgcgtcggttttgcgttttcgttttaggttttatcgcgcgggggacggcgggttgcggggagggacgcggtcggttgggtacgggaggttcgggatcgttttataatttcgtttttttatatttcggttcgtataattttacgtacgggtacggttttttgttcgggtagttcggtttatttggttcggcgcgtcgagtacggcggtgcgggcgtaggtatggtagtacgggtacgcggagcgtagggcgaggcgaggcggcggggattttatagagtcgacgtgcgggtttgtagcgcgtgcgagtttattttgtttt

SEQ ID NO: 12510 - DNA, 679 bp, Artificial Sequence
  chemically treated genomic DNA (Homo sapiens) CpG-island No: 12510
aaaacaaaataaactcgcacgcgctacaaacccgcacgtcgactctataaaatccccgccgcctcgcctcgccctacgctccgcgtacccgtactaccatacctacgcccgcaccgccgtactcgacgcgccgaaccaaataaaccgaactacccgaacaaaaaaccgtacccgtacgtaaaattatacgaaccgaaatataaaaaaacgaaattataaaacgatcccgaacctcccgtacccaaccgaccgcgtccctccccgcaacccgccgtcccccgcgcgataaaacctaaaacgaaaacgcaaaaccgacgcaaacgctaataaaccgaattacgccgaaaaacaaaacaccgcgacgccgaacgcaaacccgaaaaataaacgcgaaacccgaaaatcgaaacgcgataaaacccttaacgaaaccgcgaactccaaaaacctcgtcgcgctctcgcgataccgaaatcgatcaaatcgacaccctacgtccttttatcttaaatcctccgcgcgacccgtaaactaaaacgaccgcaacaaacctaaaaaacgctaaaacactccgaaaacctcttaccaaaataaaaatcaactaaaccgacgtcaacccgaattaaccaattcgaatctatattatactcccgaaaaaaatcaaaatctctaacgaact

SEQ ID NO: 12511 - DNA, 679 bp, Artificial Sequence
  chemically treated genomic DNA (Homo sapiens) CpG-island No: 12511
aaaatagagtaagttcgtacgcgttgtaggttcgtacgtcgattttataggattttcgtcgtttcgtttcgttttgcgtttcgcgtgttcgtgttgttatgtttgcgttcgtatcgtcgtgttcggcgcgtcgggttaggtgggtcgggttgttcgggtagggagtcgtgttcgtgcgtggggttgtgcgggtcggggtgtgggagggcgaggttgtaaggcggtttcgaatttttcgtgtttagtcgatcgcgttttttttcgtagttcgtcgtttttcgcgcgatggagtttgggacggaagcgtagagtcgacgtaggcgttggtaggtcgaattacgtcgaggagtagagtatcgcggcgtcgagcgtagattcgagaggtgggcgcgggattcgggggtcggggcgcggtggggtttttgacgaggtcgcgggttttagggatttcgtcgcgttttcgcggtgtcgggatcggttaggtcggtattttgcgtttttttattttgggtttttcgcgcggttcgtggattggggcggtcgtagtaggtttgggaggcgttggaatatttcggaagttttttgttaggatgggagttagttgaatcggcgttagttcgagttagttagttcgagtttgtgttgtgttttcgggagaggttagggtttttgacgagtt

SEQ ID NO: 12512 - DNA, 679 bp, Artificial Sequence
  chemically treated genomic DNA (Homo sapiens) CpG-island No: 12512
aactcgtcaaaaaccctaacctctcccgaaaacacaacacaaactcgaactaactaactcgaactaacgccgattcaactaactcccatcctaacaaaaaacttccgaaatattccaacgcctcccaaacctactacgaccgccccaatccacgaaccgcgcgaaaaacccaaaataaaaaaacgcaaaataccgacctaaccgatcccgacaccgcgaaaacgcgacgaaatccctaaaacccgcgacctcgtcaaaaaccccaccgcgccccgacccccgaatcccgcgcccacctctcgaatctacgctcgacgccgcgatactctactcctcgacgtaattcgacctaccaacgcctacgtcgactctacgcttccgtcccaaactccatcgcgcgaaaaacgacgaactacgaaaaaaaacgcgatcgactaaacacgaaaaattcgaaaccgccttacaacctcgccctcccacaccccgacccgcacaaccccacgcacgaacacgactccctacccgaacaacccgacccacctaacccgacgcgccgaacacgacgatacgaacgcaaacataacaacacgaacacgcgaaacgcaaaacgaaacgaaacgacgaaaatcctataaaatcgacgtacgaacctacaacgcgtacgaacttactctatttt

SEQ ID NO: 12513 - DNA, 736 bp, Artificial Sequence
  chemically treated genomic DNA (Homo sapiens) CpG-island No: 12513
gcgcgggtagagagcgtagagtagagtagggtagggttgaggtagaaattcgcgttttcggtcggcgtttacgagttttgcgcgtttcgtttttaatcgtttttatgtgggcgtcgggttcgtttcggtttttcgcgcgcgtcgggtcgggcgagattatcgggttacgtcgtagggtttatttagttgtgcgcgtttcggagtcgattggggttagggcgaggtttcgggatcgcgggtagtcgcgaagttcgattgttcggttttcggttcgggagttagatggacgtcgtgggttgaggagaggtttgaggaaaaggttgtttttattcgcgggattgaggcggtcgggcgggggtttttgcgacgttgataggtcgcgttttggcgggcgggggtagttttggcgggagattcggtcgcgcgcgacgcggcgtaggtcgtgggggaagggtaagcggtacgtttttcggtttgggtcgtggcgtattttttattggtttcggtttgggtggagcgcggttttgtttggtttttgtttaggtgggggcgtgttttttttttggcgggaattcggaattcggaattcggaaggcgcggtttgtggcgggtattgattgttttttacggtttcgtggtcgttgtaggtttcgtacgcgtcgtttattgttttgagtcgtttaaagttttggagtaattttttaggtcgtaatagttgataattatattgagtttt

SEQ ID NO: 12514 - DNA, 736 bp, Artificial Sequence
  chemically treated genomic DNA (Homo sapiens) CpG-island No: 12514
aaaactcaatataattatcaactattacgacctaaaaaattactccaaaactttaaacgactcaaaacaataaacgacgcgtacgaaacctacaacgaccacgaaaccgtaaaaaacaatcaatacccgccacaaaccgcgccttccgaattccgaattccgaattcccgccaaaaaaaaaacacgcccccacctaaacaaaaaccaaacaaaaccgcgctccacccaaaccgaaaccaataaaaaatacgccacgacccaaaccgaaaaacgtaccgcttacccttcccccacgacctacgccgcgtcgcgcgcgaccgaatctcccgccaaaactacccccgcccgccaaaacgcgacctatcaacgtcgcaaaaacccccgcccgaccgcctcaatcccgcgaataaaaacaaccttttcctcaaacctctcctcaacccacgacgtccatctaactcccgaaccgaaaaccgaacaatcgaacttcgcgactacccgcgatcccgaaacctcgccctaaccccaatcgactccgaaacgcgcacaactaaataaaccctacgacgtaacccgataatctcgcccgacccgacgcgcgcgaaaaaccgaaacgaacccgacgcccacataaaaacgattaaaaacgaaacgcgcaaaactcgtaaacgccgaccgaaaacgcgaatttctacctcaaccctaccctactctactctacgctctctacccgcgc

SEQ ID NO: 12515 - DNA, 736 bp, Artificial Sequence
  chemically treated genomic DNA (Homo sapiens) CpG-island No: 12515
aagatttagtgtagttgttaattgttgcgatttaaaaggttattttaaaattttaagcggtttaaaataatagacggcgcgtacggggtttgtagcggttacgggatcgtgggaagtagttagtattcgttataggtcgcgtttttcgggtttcgggtttcgggttttcgttagggaggagatacgtttttatttgggtaggaattaagtagagtcgcgttttatttaggtcggaattaatgggagatgcgttacgatttaggtcgagaaacgtgtcgtttattttttttttacgatttgcgtcgcgtcgcgcgcggtcgaatttttcgttaaagttgttttcgttcgttaaggcgcgatttattagcgtcgtagaggttttcgttcggtcgttttaatttcgcgggtgggggtaattttttttttaggtttttttttagtttacggcgtttatttggttttcgagtcgagggtcgggtagtcgggtttcgcggttgttcgcggtttcgaggtttcgttttagttttagtcggtttcgaggcgcgtatagttgagtggattttgcggcgtggttcgatggtttcgttcgattcggcgcgcgcgggaggtcgaggcgggttcggcgtttatataaaggcggttgggggcggggcgcgtagagttcgtgagcgtcggtcggggacgcgggtttttgttttagttttgttttgttttattttgcgttttttgttcgcgt

SEQ ID NO: 12516 - DNA, 736 bp, Artificial Sequence
  chemically treated genomic DNA (Homo sapiens) CpG-island No: 12516
acgcgaacaaaaaacgcaaaataaaacaaaacaaaactaaaacaaaaacccgcgtccccgaccgacgctcacgaactctacgcgccccgcccccaaccgcctttatataaacgccgaacccgcctcgacctcccgcgcgcgccgaatcgaacgaaaccatcgaaccacgccgcaaaatccactcaactatacgcgcctcgaaaccgactaaaactaaaacgaaacctcgaaaccgcgaacaaccgcgaaacccgactacccgaccctcgactcgaaaaccaaataaacgccgtaaactaaaaaaaaacctaaaaaaaaaattacccccacccgcgaaattaaaacgaccgaacgaaaacctctacgacgctaataaatcgcgccttaacgaacgaaaacaactttaacgaaaaattcgaccgcgcgcgacgcgacgcaaatcgtaaaaaaaaaataaacgacacgtttctcgacctaaatcgtaacgcatctcccattaattccgacctaaataaaacgcgactctacttaattcctacccaaataaaaacgtatctcctccctaacgaaaacccgaaacccgaaacccgaaaaacgcgacctataacgaatactaactacttcccacgatcccgtaaccgctacaaaccccgtacgcgccgtctattattttaaaccgcttaaaattttaaaataaccttttaaatcgcaacaattaacaactacactaaatctt

SEQ ID NO: 12517 - DNA, 505 bp, Artificial Sequence
  chemically treated genomic DNA (Homo sapiens) CpG-island No: 12517
ggtgcgtaggagttttcgtttgtttagtttcgttgtcggcgtttttcggtcggcggttatagttttgatgttgttttaataaaataaagtttttttttcgtgcgcggtttttagtggtgaaagggtcgatttatagagttagagttttttttcggcgtttcgttcgttcgttttgcggtggcgttggtttggtcgcgggtaatttatagttttaatttagtatatttgttcgggttagggcggtatgattggggttttttatttcggtttcgggcgcggggcggtttaaggttttatttacggttatcgtaggttttcgttcggttacgttttttatgtaggcgtttggaagtttcgcggtattcggtgggtgaagataagttgtgtcgtttgtgttttggcggcggtcgttttttaatttttatggttcggtttttttttagttcggtcgttcgtttataggtgaggagatcgaggtcgaggtagaggcgttggagtttttttt

SEQ ID NO: 12518 - DNA, 505 bp, Artificial Sequence
  chemically treated genomic DNA (Homo sapiens) CpG-island No: 12518
aaaaaaaactccaacgcctctacctcgacctcgatctcctcacctataaacgaacgaccgaactaaaaaaaaaccgaaccataaaaattaaaaaacgaccgccgccaaaacacaaacgacacaacttatcttcacccaccgaataccgcgaaacttccaaacgcctacataaaaaacgtaaccgaacgaaaacctacgataaccgtaaataaaaccttaaaccgccccgcgcccgaaaccgaaataaaaaaccccaatcataccgccctaacccgaacaaatatactaaattaaaactataaattacccgcgaccaaaccaacgccaccgcaaaacgaacgaacgaaacgccgaaaaaaaactctaactctataaatcgaccctttcaccactaaaaaccgcgcacgaaaaaaaaactttattttattaaaacaacatcaaaactataaccgccgaccgaaaaacgccgacaacgaaactaaacaaacgaaaactcctacgcacc

SEQ ID NO: 12519 - DNA, 505 bp, Artificial Sequence
  chemically treated genomic DNA (Homo sapiens) CpG-island No: 12519
gagagaaattttagcgtttttgtttcggtttcggtttttttatttgtggacgggcggtcgggttggggaggggtcgggttatgggggttggagagcggtcgtcgttaaggtataaacgatatagtttgtttttatttatcgggtgtcgcggggtttttaaacgtttgtatgaggaacgtggtcgggcgggagtttgcggtggtcgtgaatggagttttgagtcgtttcgcgttcggggtcgggataaagggttttagttatgtcgttttggttcgggtaagtgtgttaagttgaggttataaattattcgcggttaggttagcgttatcgtagggcgggcgggcggggcgtcgggagggggttttggttttgtaaatcggtttttttattattggaggtcgcgtacgaaagaaaaattttgttttattaaagtaatattagggttgtggtcgtcggtcgagaggcgtcggtagcgaggttgggtaggcgagggtttttgcgtatt

SEQ ID NO: 12520 - DNA, 505 bp, Artificial Sequence
  chemically treated genomic DNA (Homo sapiens) CpG-island No: 12520
aatacgcaaaaaccctcgcctacccaacctcgctaccgacgcctctcgaccgacgaccacaaccctaatattactttaataaaacaaaatttttctttcgtacgcgacctccaataataaaaaaaccgatttacaaaaccaaaaccccctcccgacgccccgcccgcccgccctacgataacgctaacctaaccgcgaataatttataacctcaacttaacacacttacccgaaccaaaacgacataactaaaaccctttatcccgaccccgaacgcgaaacgactcaaaactccattcacgaccaccgcaaactcccgcccgaccacgttcctcatacaaacgtttaaaaaccccgcgacacccgataaataaaaacaaactatatcgtttataccttaacgacgaccgctctccaacccccataacccgacccctccccaacccgaccgcccgtccacaaataaaaaaaccgaaaccgaaacaaaaacgctaaaatttctctc

SEQ ID NO: 12521 - DNA, 590 bp, Artificial Sequence
  chemically treated genomic DNA (Homo sapiens) CpG-island No: 12521
ggttatagacgtagattgtatggcggttcggcggttcgcggggaggtgtgagcgacgcgggcgcgcgggtcggggagggcgtttgagggtcgaggtagatggcgttcgtttcgttcggttttcgcgttttttttttcgtcggcggttgtagtttttcggaataatgttattttttttatgaatgaaagtggttcggcgtttgaatgtgcgtgttatttagcggcgtgataggggtcgtcgggaggttagcgcgcgtttttagcgtttgttcgggcggtttcgtttttaggggtgtcggaggggcggtcgcggggggagtttggttttcgtatttttatttagataaagatattattttttacggttcgggaatgttagttagtttcggggaagggcggcggttaggttgcggagttttttttggattttttgcgggcgcgcggggttttttttagtcgtttttggaacgtttcgtttatttttttttcggggcgttttcgttcgtattggagttggtgaaataggtagtgagttgatcggttaataaatttaattcggttttttaataagatgggtcgggtagtaaaaat

SEQ ID NO: 12522 - DNA, 590 bp, Artificial Sequence
  chemically treated genomic DNA (Homo sapiens) CpG-island No: 12522
atttttactacccgacccatcttattaaaaaaccgaattaaatttattaaccgatcaactcactacctatttcaccaactccaatacgaacgaaaacgccccgaaaaaaaaataaacgaaacgttccaaaaacgactaaaaaaaaccccgcgcgcccgcaaaaaatccaaaaaaaactccgcaacctaaccgccgcccttccccgaaactaactaacattcccgaaccgtaaaaaataatatctttatctaaataaaaatacgaaaaccaaactccccccgcgaccgcccctccgacacccctaaaaacgaaaccgcccgaacaaacgctaaaaacgcgcgctaacctcccgacgacccctatcacgccgctaaataacacgcacattcaaacgccgaaccactttcattcataaaaaaaataacattattccgaaaaactacaaccgccgacgaaaaaaaaaacgcgaaaaccgaacgaaacgaacgccatctacctcgaccctcaaacgccctccccgacccgcgcgcccgcgtcgctcacacctccccgcgaaccgccgaaccgccatacaatctacgtctataacc

SEQ ID NO: 12523 - DNA, 590 bp, Artificial Sequence
  chemically treated genomic DNA (Homo sapiens) CpG-island No: 12523
atttttattgttcggtttattttgttaaggaatcggattaagtttattgatcgattaatttattatttgttttattagttttagtgcgggcgggggcgtttcgggggaggggtgggcggggcgttttaggagcgattgggggaggtttcgcgcgttcgtagggggtttaggagaggtttcgtagtttggtcgtcgttttttttcggggttggttgatattttcgggtcgtagggagtaatatttttatttgaatgagaatgcgaaagttaagtttttttcgcggtcgttttttcggtatttttggaagcggggtcgttcgagtagacgttaaaagcgcgcgttgatttttcgacggtttttgttacgtcgttgaatgatacgtatatttaagcgtcgggttatttttatttataaaaaaaatgatattgtttcgggaggttgtagtcgtcgacggagaaaggggcgcgggggtcgggcggggcggacgttatttgtttcggtttttaggcgtttttttcggttcgcgcgttcgcgtcgtttatattttttcgcgagtcgtcgagtcgttatataatttgcgtttgtgatt

SEQ ID NO: 12524 - DNA, 590 bp, Artificial Sequence
  chemically treated genomic DNA (Homo sapiens) CpG-island No: 12524
aatcacaaacgcaaattatataacgactcgacgactcgcgaaaaaatataaacgacgcgaacgcgcgaaccgaaaaaaacgcctaaaaaccgaaacaaataacgtccgccccgcccgacccccgcgcccctttctccgtcgacgactacaacctcccgaaacaatatcattttttttataaataaaaataacccgacgcttaaatatacgtatcattcaacgacgtaacaaaaaccgtcgaaaaatcaacgcgcgcttttaacgtctactcgaacgaccccgcttccaaaaataccgaaaaaacgaccgcgaaaaaaacttaactttcgcattctcattcaaataaaaatattactccctacgacccgaaaatatcaaccaaccccgaaaaaaaacgacgaccaaactacgaaacctctcctaaaccccctacgaacgcgcgaaacctcccccaatcgctcctaaaacgccccgcccacccctcccccgaaacgcccccgcccgcactaaaactaataaaacaaataataaattaatcgatcaataaacttaatccgattccttaacaaaataaaccgaacaataaaaat

SEQ ID NO: 12525 - DNA, 916 bp, Artificial Sequence
  chemically treated genomic DNA (Homo sapiens) CpG-island No: 12525
cgttttatcgttttatggcgtttttaattgtattttgtcgatttcgtattcggtttttttggtgtttttgttttttggtacgtattattttattttttttgtcgtgtatttttttgaatttatagttttttttgcgttttatcgtatgggtttagtttttgtaattttgcgttcgatgtcgtgggttagcgttcggtaatttttattttcgtttagtagtttgtcggtcgcgttcgtaagtttcgttatcggggttttacggttcgtcggtgtattttttgtttcgcgacgtacgtttatatttgttcgtttttttcgtattttcgacgtttattttttattttttattttgtcgtagaaatagttcgtttttgttcgatatttatggttttttgcggtgtggtcgtattcgttgtttttattggcgattatatacgttgtttgacgtatcgtatgcggtatgatttttacgtacgggaatatcgtcgtttttatttattattattggcggttcgtttggtatagtggtgacggagtagcgtcgtcgttattcgtacgtagaggttaggtgtagcgtttgttaatttttagtgtggcgattatatatagtacgtttttgttttgcgtttttttattacgttcggttattgttttacgtatttgtgtttgcgtcgacgttttggttatcggttcgggttatcgaatgacgcggcggttatgatttacggtttattggtttgcggtttgggagtatgtgattgttgcgtcgttaataggataatatttattcgtaagtcgtgttattttttcgttcgtacgttcgagtatcggaattttttagtttttttggtagcgttttaatagtattatttattatttattggcgtttgtcgcgtaaggttgtagtaatcgtgtg

SEQ ID NO: 12526 - DNA, 916 bp, Artificial Sequence
  chemically treated genomic DNA (Homo sapiens) CpG-island No: 12526
cacacgattactacaaccttacgcgacaaacgccaataaataataaataatactattaaaacgctaccaaaaaaactaaaaaattccgatactcgaacgtacgaacgaaaaaataacacgacttacgaataaatattatcctattaacgacgcaacaatcacatactcccaaaccgcaaaccaataaaccgtaaatcataaccgccgcgtcattcgataacccgaaccgataaccaaaacgtcgacgcaaacacaaatacgtaaaacaataaccgaacgtaataaaaaaacgcaaaacaaaaacgtactatatataatcgccacactaaaaattaacaaacgctacacctaacctctacgtacgaataacgacgacgctactccgtcaccactataccaaacgaaccgccaataataataaataaaaacgacgatattcccgtacgtaaaaatcataccgcatacgatacgtcaaacaacgtatataatcgccaataaaaacaacgaatacgaccacaccgcaaaaaaccataaatatcgaacaaaaacgaactatttctacgacaaaataaaaaataaaaaataaacgtcgaaaatacgaaaaaaacgaacaaatataaacgtacgtcgcgaaacaaaaaatacaccgacgaaccgtaaaaccccgataacgaaacttacgaacgcgaccgacaaactactaaacgaaaataaaaattaccgaacgctaacccacgacatcgaacgcaaaattacaaaaactaaacccatacgataaaacgcaaaaaaaactataaattcaaaaaaatacacgacaaaaaaaataaaataatacgtaccaaaaaacaaaaacaccaaaaaaaccgaatacgaaatcgacaaaatacaattaaaaacgccataaaacgataaaacg

SEQ ID NO: 12527 - DNA, 916 bp, Artificial Sequence
  chemically treated genomic DNA (Homo sapiens) CpG-island No: 12527
tatacgattgttataattttgcgcgataagcgttagtagatgatgagtagtattattaggacgttattagaagagttaggagatttcgatattcgggcgtgcgagcgaggaagtagtacggtttacgaatggatgttgttttattagcggcgtagtaattatatgtttttagatcgtaggttagtgagtcgtggattatgatcgtcgcgttattcggtggttcgagtcgatagttagagcgtcggcgtaggtataggtacgtagaatagtgatcgggcgtgatgaaggagcgtagaataagggcgtgttgtgtgtagtcgttatattaagagttagtaagcgttgtatttgatttttgcgtacgggtggcgacggcgttgtttcgttattattgtgttagacgaatcgttagtgatgataggtaggggcggcggtgttttcgtgcgtaggaattatatcgtatacggtgcgttaggtagcgtatgtagtcgttagtaagaatagcggatgcgattatatcgtaggaagttatagatatcgagtagaagcgagttgtttttacggtaggatgagagataaaaggtaagcgtcgggggtacgaagggagcgaatagatgtgagcgtgcgtcgcggggtaggaaatgtatcggcgggtcgtggggtttcggtggcgaggtttgcgggcgcggtcggtagattattaagcgggaatggggattgtcgaacgttggtttacggtatcgggcgtaaagttgtaaggattaggtttatgcgatgaagcgtagggagggttataaatttaagggaatgtacggtaagagaggtgagataatacgtgttagaaagtaaggatattagaaaggtcggatacggggtcggtaagatgtaattgagagcgttatggggcgatggagcg

SEQ ID NO: 12528 - DNA, 916 bp, Artificial Sequence
  chemically treated genomic DNA (Homo sapiens) CpG-island No: 12528
cgctccatcgccccataacgctctcaattacatcttaccgaccccgtatccgacctttctaatatccttactttctaacacgtattatctcacctctcttaccgtacattcccttaaatttataaccctccctacgcttcatcgcataaacctaatccttacaactttacgcccgataccgtaaaccaacgttcgacaatccccattcccgcttaataatctaccgaccgcgcccgcaaacctcgccaccgaaaccccacgacccgccgatacatttcctaccccgcgacgcacgctcacatctattcgctcccttcgtacccccgacgcttaccttttatctctcatcctaccgtaaaaacaactcgcttctactcgatatctataacttcctacgatataatcgcatccgctattcttactaacgactacatacgctacctaacgcaccgtatacgatataattcctacgcacgaaaacaccgccgcccctacctatcatcactaacgattcgtctaacacaataataacgaaacaacgccgtcgccacccgtacgcaaaaatcaaatacaacgcttactaactcttaatataacgactacacacaacacgcccttattctacgctccttcatcacgcccgatcactattctacgtacctatacctacgccgacgctctaactatcgactcgaaccaccgaataacgcgacgatcataatccacgactcactaacctacgatctaaaaacatataattactacgccgctaataaaacaacatccattcgtaaaccgtactacttcctcgctcgcacgcccgaatatcgaaatctcctaactcttctaataacgtcctaataatactactcatcatctactaacgcttatcgcgcaaaattataacaatcgtata

SEQ ID NO: 12529 - DNA, 549 bp, Artificial Sequence
  chemically treated genomic DNA (Homo sapiens) CpG-island No: 12529
ttttcgaacgatcgtcgggtcgtattttattgattgatcgtagcgttacggattttatttgttatacgtcgatattcgttattgtattattttagcggcgtgaattggcgtaagttttcgtttaatacgttttgcgtgatatcggttttgtttaattttattaggatacgttttatattataacgttatttttattcgtttttttttatggtatatcgtcgtacgatttttatagtcgttcgttcgtttatttttcgggtgttcgtatttttaatatttaggtatataattcgttatcggcgattagagtagtatattttcgttatgtattcggttttcgcgcgcgtagcgggtatatacgtattcgttgaagtttttgatttttttttatataagtgcgttcgtatcgggtttttttattatttaatatttgcgagagttcgcggattacgttcgtatattttaattgtttattttgagttacgtatttattataaattattattgtattttttttagtcgttttttattttagtggtatttaatatt

SEQ ID NO: 12530 - DNA, 549 bp, Artificial Sequence
  chemically treated genomic DNA (Homo sapiens) CpG-island No: 12530
aatattaaataccactaaaataaaaaacgactaaaaaaaatacaataataatttataataaatacgtaactcaaaataaacaattaaaatatacgaacgtaatccgcgaactctcgcaaatattaaataataaaaaaacccgatacgaacgcacttatataaaaaaaaatcaaaaacttcaacgaatacgtatatacccgctacgcgcgcgaaaaccgaatacataacgaaaatatactactctaatcgccgataacgaattatatacctaaatattaaaaatacgaacacccgaaaaataaacgaacgaacgactataaaaatcgtacgacgatataccataaaaaaaaacgaataaaaataacgttataatataaaacgtatcctaataaaattaaacaaaaccgatatcacgcaaaacgtattaaacgaaaacttacgccaattcacgccgctaaaataatacaataacgaatatcgacgtataacaaataaaatccgtaacgctacgatcaatcaataaaatacgacccgacgatcgttcgaaaa

SEQ ID NO: 12531 - DNA, 549 bp, Artificial Sequence
  chemically treated genomic DNA (Homo sapiens) CpG-island No: 12531
ggtgttagatattattggggtagagagcgattgaagggagtgtagtggtgatttatagtgaatacgtagtttaaagtgggtagttggggtgtgcgagcgtgattcgcgggttttcgtagatgttagatagtagaaaggttcgatgcggacgtatttatgtaggagggaattagaagttttagcgggtgcgtatatgttcgttacgcgcgcgaaagtcggatatatggcggagatatattgttttggtcgtcggtgacgagttgtgtgtttaggtgttgagagtacggatattcggagaataggcgggcgaacggttatgggggtcgtgcggcgatatgttatggagaggagcgagtgaggatgacgttgtggtgtgggacgtattttaatgagattgagtagagtcgatattacgtaggacgtgttgagcgagaatttgcgttagtttacgtcgttgaggtaatgtaatagcggatatcgacgtgtagtagatggggttcgtgacgttgcgattaattagtggggtgcggttcggcgatcgttcgaaga

SEQ ID NO: 12532 - DNA, 549 bp, Artificial Sequence
  chemically treated genomic DNA (Homo sapiens) CpG-island No: 12532
tcttcgaacgatcgccgaaccgcaccccactaattaatcgcaacgtcacgaaccccatctactacacgtcgatatccgctattacattacctcaacgacgtaaactaacgcaaattctcgctcaacacgtcctacgtaatatcgactctactcaatctcattaaaatacgtcccacaccacaacgtcatcctcactcgctcctctccataacatatcgccgcacgacccccataaccgttcgcccgcctattctccgaatatccgtactctcaacacctaaacacacaactcgtcaccgacgaccaaaacaatatatctccgccatatatccgactttcgcgcgcgtaacgaacatatacgcacccgctaaaacttctaattccctcctacataaatacgtccgcatcgaacctttctactatctaacatctacgaaaacccgcgaatcacgctcgcacaccccaactacccactttaaactacgtattcactataaatcaccactacactcccttcaatcgctctctaccccaataatatctaacacc

SEQ ID NO: 12533 - DNA, 583 bp, Artificial Sequence
  chemically treated genomic DNA (Homo sapiens) CpG-island No: 12533
  unsure (509)
gggagtagtggaataggtagttggggcgaatgttttggacgggtgtacgagaggagtttagattcgcggggtcgaggggagacggagggagaaggaggaagttaagatgagggtgggaggatttgtcgagacggtggagagacgcgggaaaagggggtgagagtgaggtgtgtagggtgcgagattggaggagtaagtaacgcgcgggtcgaggcggagaggtaggaacgaggtatcgaggtggagggtagcggcggatcggcgtagataggcggcgtcgtagcgagatgaggtagacggcgacgcgtggtggtacggtgttttgtattgcggtggattggcgtatgtgttgtacggatcgaagcgatgtggcgtgatgtcgtgttacggcgttcgagtacgagcgagcgcgttgagcgtcgtgagtggtgtaaggtgtgtaggttgattcgatattgtgtgcgacggcgtgtgagcgagagtagcgcgcgcgagagcgcgacgggatnggtgtgagcgtatgagacgaggtgtgcgtgggtgcgtgggtcgtgtgttattgttatgtgtttttgataaatga

SEQ ID NO: 12534 - DNA, 583 bp, Artificial Sequence
  chemically treated genomic DNA (Homo sapiens) CpG-island No: 12534
  unsure (75)
tcatttatcaaaaacacataacaataacacacgacccacgcacccacgcacacctcgtctcatacgctcacaccnatcccgtcgcgctctcgcgcgcgctactctcgctcacacgccgtcgcacacaatatcgaatcaacctacacaccttacaccactcacgacgctcaacgcgctcgctcgtactcgaacgccgtaacacgacatcacgccacatcgcttcgatccgtacaacacatacgccaatccaccgcaatacaaaacaccgtaccaccacgcgtcgccgtctacctcatctcgctacgacgccgcctatctacgccgatccgccgctaccctccacctcgatacctcgttcctacctctccgcctcgacccgcgcgttacttactcctccaatctcgcaccctacacacctcactctcacccccttttcccgcgtctctccaccgtctcgacaaatcctcccaccctcatcttaacttcctccttctccctccgtctcccctcgaccccgcgaatctaaactcctctcgtacacccgtccaaaacattcgccccaactacctattccactactccc

SEQ ID NO: 12535 - DNA, 583 bp, Artificial Sequence
  chemically treated genomic DNA (Homo sapiens) CpG-island No: 12535
  unsure (75)
ttatttattaggaatatataataatggtatacgatttacgtatttacgtatatttcgttttatgcgtttatattngtttcgtcgcgttttcgcgcgcgttgttttcgtttatacgtcgtcgtatatagtatcgggttagtttatatattttatattatttacggcgtttagcgcgttcgttcgtattcgagcgtcgtggtacggtattacgttatatcgtttcgattcgtgtagtatatacgttagtttatcgtagtgtaagatatcgtgttattacgcgtcgtcgtttgttttatttcgttacggcgtcgtttgtttgcgtcggttcgtcgttgttttttatttcggtgtttcgtttttgttttttcgtttcgattcgcgcgttatttgtttttttaatttcgtattttgtatattttatttttatttttttttttcgcgtttttttatcgtttcgatagatttttttatttttattttggtttttttttttttttttcgttttttttcgatttcgcgagtttgaatttttttcgtgtattcgtttagggtattcgttttagttgtttattttattgttttt

SEQ ID NO: 12536 - DNA, 583 bp, Artificial Sequence
  chemically treated genomic DNA (Homo sapiens) CpG-island No: 12536
  unsure (509)
aaaaacaataaaataaacaactaaaacgaataccctaaacgaatacacgaaaaaaattcaaactcgcgaaatcgaaaaaaaacgaaaaaaaaaaaaaaaaaccaaaataaaaataaaaaaatctatcgaaacgataaaaaaacgcgaaaaaaaaaaataaaaataaaatatacaaaatacgaaattaaaaaaacaaataacgcgcgaatcgaaacgaaaaaacaaaaacgaaacaccgaaataaaaaacaacgacgaaccgacgcaaacaaacgacgccgtaacgaaataaaacaaacgacgacgcgtaataacacgatatcttacactacgataaactaacgtatatactacacgaatcgaaacgatataacgtaataccgtaccacgacgctcgaatacgaacgaacgcgctaaacgccgtaaataatataaaatatataaactaacccgatactatatacgacgacgtataaacgaaaacaacgcgcgcgaaaacgcgacgaaacnaatataaacgcataaaacgaaatatacgtaaatacgtaaatcgtataccattattatatattcctaataaataa

SEQ ID NO: 12537 - DNA, 694 bp, Artificial Sequence
  chemically treated genomic DNA (Homo sapiens) CpG-island No: 12537
  unsure (178, 180, 292, 429..)
gcgttgaacgtcgaggtgtacgcgtaggtattggttaagtgcgcgttagggtgttcgggagggggcgggtgcgggtcgtattgtcgggcggggtgcgcgagtgaggagggcggggtgcgcgagtgaggagggcgggggagtgcgcgagtgaggagggcggggtgcgcgagtgaggagngngcgggggagtgcgcgagtgaggagggcgggggagtgcgcgagtgaggagggcgggggagtgcgcgagtgaggagggaggggtgtattagtgaggaggttgtgggagtgcgtngaggaaggagggtcggggagggggcgagtgacgaaggcgggggagtgttttaatgaggagggcgggggagtgcgcgagtgaggagggttgggtgcgttaatgaggagggcggggtgcgcgagtgaggagggcggggnntgcgcgagtgaggagggcggggtgcgcgagttaggagggcggggtgcgcgagcgagggcgttcggtcggtaggtggtattgtggcgtcgtcgtgggtcgagtttggcgaagcgttgtacgttcgagatcgcgtagtttggtgagtggtagcgtttggttttatattcgcgtttcggatatcgatggttatttttttacgttcgtgatttagtggttttttaatgtaggttgcggttttttagtttagaaggttttgggttttgg

SEQ ID NO: 12538 - DNA, 694 bp, Artificial Sequence
  chemically treated genomic DNA (Homo sapiens) CpG-island No: 12538
  unsure (265..266, 403, 515, 517)
ccaaaacccaaaaccttctaaactaaaaaaccgcaacctacattaaaaaaccactaaatcacgaacgtaaaaaaataaccatcgatatccgaaacgcgaatataaaaccaaacgctaccactcaccaaactacgcgatctcgaacgtacaacgcttcgccaaactcgacccacgacgacgccacaataccacctaccgaccgaacgccctcgctcgcgcaccccgccctcctaactcgcgcaccccgccctcctcactcgcgcannccccgccctcctcactcgcgcaccccgccctcctcattaacgcacccaaccctcctcactcgcgcactcccccgccctcctcattaaaacactcccccgccttcgtcactcgccccctccccgaccctccttcctcnacgcactcccacaacctcctcactaatacacccctccctcctcactcgcgcactcccccgccctcctcactcgcgcactcccccgccctcctcactcgcgcactcccccgcncnctcctcactcgcgcaccccgccctcctcactcgcgcactcccccgccctcctcactcgcgcaccccgccctcctcactcgcgcaccccgcccgacaatacgacccgcacccgccccctcccgaacaccctaacgcgcacttaaccaatacctacgcgtacacctcgacgttcaacgc

SEQ ID NO: 12539 - DNA, 694 bp, Artificial Sequence
  chemically treated genomic DNA (Homo sapiens) CpG-island No: 12539
  unsure (265..266, 403, 515, 517)
ttagaatttagggttttttgggttgagaggtcgtagtttgtattggaaggttattgagttacggacgtgggaagatgattatcggtgttcgagacgcgagtataaagttaggcgttgttatttattaagttgcgcgatttcgggcgtgtagcgtttcgttaggttcggtttacggcgacgttatagtgttatttgtcggtcggacgttttcgttcgcgtatttcgtttttttgattcgcgtatttcgttttttttattcgcgtanntttcgttttttttattcgcgtatttcgttttttttattggcgtatttagttttttttattcgcgtattttttcgttttttttattggagtattttttcgttttcgttattcgtttttttttcggttttttttttttngcgtatttttatagtttttttattagtgtatttttttttttttattcgcgtattttttcgttttttttattcgcgtattttttcgttttttttattcgcgtattttttcgtntnttttttattcgcgtatttcgttttttttattcgcgtattttttcgttttttttattcgcgtatttcgttttttttattcgcgtatttcgttcggtagtgcggttcgtattcgttttttttcgagtattttggcgcgtatttagttagtatttgcgcgtgtatttcggcgtttaacgt

SEQ ID NO: 12540 - DNA, 694 bp, Artificial Sequence
  chemically treated genomic DNA (Homo sapiens) CpG-island No: 12540
  unsure (178, 180, 292, 429..)
acgttaaacgccgaaatacacgcgcaaatactaactaaatacgcgccaaaatactcgaaaaaaaacgaatacgaaccgcactaccgaacgaaatacgcgaataaaaaaaacgaaatacgcgaataaaaaaaacgaaaaaatacgcgaataaaaaaaacgaaatacgcgaataaaaaananacgaaaaaatacgcgaataaaaaaaacgaaaaaatacgcgaataaaaaaaacgaaaaaatacgcgaataaaaaaaaaaaaatacactaataaaaaaactataaaaatacgcnaaaaaaaaaaaaccgaaaaaaaaacgaataacgaaaacgaaaaaatactccaataaaaaaaacgaaaaaatacgcgaataaaaaaaactaaatacgccaataaaaaaaacgaaatacgcgaataaaaaaaacgaaanntacgcgaataaaaaaaacgaaatacgcgaatcaaaaaaacgaaatacgcgaacgaaaacgtccgaccgacaaataacactataacgtcgccgtaaaccgaacctaacgaaacgctacacgcccgaaatcgcgcaacttaataaataacaacgcctaactttatactcgcgtctcgaacaccgataatcatcttcccacgtccgtaactcaataaccttccaatacaaactacgacctctcaacccaaaaaaccctaaattctaa

SEQ ID NO: 12541 - DNA, 628 bp, Artificial Sequence
  chemically treated genomic DNA (Homo sapiens) CpG-island No: 12541
gtttcggcgtttttttttttttaggattgtgcgttttttttaatgggcggggtcggaattggtcgagggttttcggttttgtgcgtgtcgggggcggagtttgaagaaggtttttatagtatggtcgtcggtattgtagttgttttagcgtttttgagttaggagagtcgaacgcgggtcgggggtgtcgggggtttacgggtttcggtttcggttattatggatagtttttttttcggtattagtgaagggagaggttgagggtggtattggggcggtaagaggtagggatgtgaggcgggaatgcggagggttttaaggcgtgggtgtgggcggagggttgtttcgttgttttcgtagacgagggggtttcgtacgtatagttaaagggggtggcgagatttttgttttagatgtgttgggcggggtacggtagagcgttttaggtgttttgagagaagagacggaggtggacgtgtaaatgattcgttcgtttaaggttatacgtgacggcgggttggtgatatttttcgttgtttagtttcgtatatacgtttaggtatatttattgttatttttattaggttgtgagtttttcggttatattcgtttttttatttttaaggta

SEQ ID NO: 12542 - DNA, 628 bp, Artificial Sequence
  chemically treated genomic DNA (Homo sapiens) CpG-island No: 12542
taccttaaaaataaaaaaacgaatataaccgaaaaactcacaacctaataaaaataacaataaatatacctaaacgtatatacgaaactaaacaacgaaaaatatcaccaacccgccgtcacgtataaccttaaacgaacgaatcatttacacgtccacctccgtctcttctctcaaaacacctaaaacgctctaccgtaccccgcccaacacatctaaaacaaaaatctcgccaccccctttaactatacgtacgaaaccccctcgtctacgaaaacaacgaaacaaccctccgcccacacccacgccttaaaaccctccgcattcccgcctcacatccctacctcttaccgccccaataccaccctcaacctctcccttcactaataccgaaaaaaaaactatccataataaccgaaaccgaaacccgtaaacccccgacacccccgacccgcgttcgactctcctaactcaaaaacgctaaaacaactacaataccgacgaccatactataaaaaccttcttcaaactccgcccccgacacgcacaaaaccgaaaaccctcgaccaattccgaccccgcccattaaaaaaaacgcacaatcctaaaaaaaaaaaaacgccgaaac

SEQ ID NO: 12543 - DNA, 628 bp, Artificial Sequence
  chemically treated genomic DNA (Homo sapiens) CpG-island No: 12543
tattttaaaggtgaaggagcgggtgtggtcggagagtttatagtttggtagaaataatagtgagtatgtttgagcgtgtgtacggggttgggtagcgggggatgttattaattcgtcgttacgtgtaattttgggcggacgggttatttatacgtttattttcgtttttttttttagaatatttgggacgttttgtcgtgtttcgtttaatatatttggggtagggatttcgttattttttttggttgtgcgtgcgaggttttttcgtttgcgggaatagcgaagtagtttttcgtttatatttacgttttgaaatttttcgtattttcgttttatatttttattttttatcgttttagtattatttttagtttttttttttattaatatcgaagaaaaaattgtttatagtgatcggggtcgggattcgtaggttttcgatattttcggttcgcgttcggtttttttgatttaaaaacgttaaggtagttgtagtatcggcggttatgttgtaagagttttttttaaatttcgttttcgatacgtataaagtcggggattttcggttagtttcggtttcgtttattaaaggagacgtatagttttggaaaagaaaaggcgtcgagat

SEQ ID NO: 12544 - DNA, 628 bp, Artificial Sequence
  chemically treated genomic DNA (Homo sapiens) CpG-island No: 12544
atctcgacgccttttcttttccaaaactatacgtctcctttaataaacgaaaccgaaactaaccgaaaatccccgactttatacgtatcgaaaacgaaatttaaaaaaaactcttacaacataaccgccgatactacaactaccttaacgtttttaaatcaaaaaaaccgaacgcgaaccgaaaatatcgaaaacctacgaatcccgaccccgatcactataaacaattttttcttcgatattaataaaaaaaaaaactaaaaataatactaaaacgataaaaaataaaaatataaaacgaaaatacgaaaaatttcaaaacgtaaatataaacgaaaaactacttcgctattcccgcaaacgaaaaaacctcgcacgcacaaccaaaaaaaataacgaaatccctaccccaaatatattaaacgaaacacgacaaaacgtcccaaatattctaaaaaaaaaaacgaaaataaacgtataaataacccgtccgcccaaaattacacgtaacgacgaattaataacatcccccgctacccaaccccgtacacacgctcaaacatactcactattatttctaccaaactataaactctccgaccacacccgctccttcacctttaaaata

SEQ ID NO: 12545 - DNA, 558 bp, Artificial Sequence
  chemically treated genomic DNA (Homo sapiens) CpG-island No: 12545
agttttttttgcggtgagataaaataaatagaaatagttatgagagtaggatcgagaggggattttgcgatggaagggagagaaggcggggatataggcgcggggagcgcgggggtataaaaaagcggggggagagtagagcggcgaaggcgggagtttagtttagtcggcggagaggtcgataggcgggagcgggagtagtcgtagcgatacggggtcgcggatgagatttaggcgagggcgggatagtaacgtcggataggggacgttggcgacgggcgttagaatagcgggcgacgataggtcggaagattcggggcggtagagatcgagggagggtcgggagacgggagaaaggatttgaggtacgggacgcgacggtagagcgcgcgaaaatagtgcgcgcggacgtcggcgagagggtatgacggatcgaggatggaaagagtaagcgagacgtagacgatataggaggtagaatatacgacggcgtagaaggacgagcggaacgaacgaggatcgtagggtgggacgcgagggagggagtagcgacggcgg

SEQ ID NO: 12546 - DNA, 558 bp, Artificial Sequence
  chemically treated genomic DNA (Homo sapiens) CpG-island No: 12546
ccgccgtcgctactccctccctcgcgtcccaccctacgatcctcgttcgttccgctcgtccttctacgccgtcgtatattctacctcctatatcgtctacgtctcgcttactctttccatcctcgatccgtcataccctctcgccgacgtccgcgcgcactattttcgcgcgctctaccgtcgcgtcccgtacctcaaatcctttctcccgtctcccgaccctccctcgatctctaccgccccgaatcttccgacctatcgtcgcccgctattctaacgcccgtcgccaacgtcccctatccgacgttactatcccgccctcgcctaaatctcatccgcgaccccgtatcgctacgactactcccgctcccgcctatcgacctctccgccgactaaactaaactcccgccttcgccgctctactctccccccgcttttttatacccccgcgctccccgcgcctatatccccgccttctctcccttccatcgcaaaatcccctctcgatcctactctcataactatttctatttattttatctcaccgcaaaaaaaact

SEQ ID NO: 12547 - DNA, 558 bp, Artificial Sequence
  chemically treated genomic DNA (Homo sapiens) CpG-island No: 12547
tcgtcgtcgttgttttttttttcgcgttttattttacggttttcgttcgtttcgttcgtttttttgcgtcgtcgtgtgttttgttttttgtgtcgtttgcgtttcgtttgttttttttattttcggttcgttatgttttttcgtcggcgttcgcgcgtattgttttcgcgcgttttgtcgtcgcgtttcgtgttttaggttttttttttcgtttttcggttttttttcggtttttgtcgtttcgggtttttcggtttgtcgtcgttcgttgttttggcgttcgtcgttagcgttttttgttcggcgttattgtttcgttttcgtttgggttttattcgcggtttcgtgtcgttgcggttgttttcgttttcgtttgtcggttttttcgtcgattaggttgggttttcgttttcgtcgttttgtttttttttcgtttttttatgttttcgcgtttttcgcgtttgtgttttcgtttttttttttttttatcgtagagttttttttcgattttgtttttataattgtttttatttgttttgttttatcgtagggggggtt

SEQ ID NO: 12548 - DNA, 558 bp, Artificial Sequence
  chemically treated genomic DNA (Homo sapiens) CpG-island No: 12548
aaccccccctacgataaaacaaaacaaataaaaacaattataaaaacaaaatcgaaaaaaaactctacgataaaaaaaaaaaaaaacgaaaacacaaacgcgaaaaacgcgaaaacataaaaaaacgaaaaaaaaacaaaacgacgaaaacgaaaacccaacctaatcgacgaaaaaaccgacaaacgaaaacgaaaacaaccgcaacgacacgaaaccgcgaataaaacccaaacgaaaacgaaacaataacgccgaacaaaaaacgctaacgacgaacgccaaaacaacgaacgacgacaaaccgaaaaacccgaaacgacaaaaaccgaaaaaaaaccgaaaaacgaaaaaaaaaacctaaaacacgaaacgcgacgacaaaacgcgcgaaaacaatacgcgcgaacgccgacgaaaaaacataacgaaccgaaaataaaaaaaacaaacgaaacgcaaacgacacaaaaaacaaaacacacgacgacgcaaaaaaacgaacgaaacgaacgaaaaccgtaaaataaaacgcgaaaaaaaaaacaacgacgacga

SEQ ID NO: 12549 - DNA, 650 bp, Artificial Sequence
  chemically treated genomic DNA (Homo sapiens) CpG-island No: 12549
ttcgttttatttaatatatatatttatttatacgcgcgcgcgtaaatatatatatatatattttaacgttttatttaggtttgggtttcgtttgattaagttttcggggttagataatcggtttttttgcggatgttgattacggggttagttagtaatcgggttttaatttaggttaagcgcggggtttttggaggtgtgggcgtattcgattttcgtatagattttcgtttacgttagtttcggttttttgtttacgtataatatcgatttagtttttcgcgtttcgtcgtttcggtagtcgtcggcgtcgtcgtcgtttttatttttcgcgggtttttaggacgtcgtcgttcgagtgtttattttttcgtcgttgcgtggtcggcgttaggtttaggtttattttttttgttcggagggattcgcgtttggtgttcgtttttttgtttcggcgttttttaatcgcgcggcgaggagtatgcgtagtgggatagttcggttcggcgggtatcgtcggcgaggggcgggaggggtcgaagattcgaggattgttgcgaggtcgggttgggtaattcgagaggagggttgggtaatttgagattagcgagggtgggattttagagttagtcgagattcgggtttatagt

SEQ ID NO: 12550 - DNA, 650 bp, Artificial Sequence
  chemically treated genomic DNA (Homo sapiens) CpG-island No: 12550
actataaacccgaatctcgactaactctaaaatcccaccctcgctaatctcaaattacccaaccctcctctcgaattacccaacccgacctcgcaacaatcctcgaatcttcgacccctcccgcccctcgccgacgatacccgccgaaccgaactatcccactacgcatactcctcgccgcgcgattaaaaaacgccgaaacaaaaaaacgaacaccaaacgcgaatccctccgaacaaaaaaaataaacctaaacctaacgccgaccacgcaacgacgaaaaaataaacactcgaacgacgacgtcctaaaaacccgcgaaaaataaaaacgacgacgacgccgacgactaccgaaacgacgaaacgcgaaaaactaaatcgatattatacgtaaacaaaaaaccgaaactaacgtaaacgaaaatctatacgaaaatcgaatacgcccacacctccaaaaaccccgcgcttaacctaaattaaaacccgattactaactaaccccgtaatcaacatccgcaaaaaaaccgattatctaaccccgaaaacttaatcaaacgaaacccaaacctaaataaaacgttaaaatatatatatatatatttacgcgcgcgcgtataaataaatatatatattaaataaaacgaa

SEQ ID NO: 12551 - DNA, 650 bp, Artificial Sequence
  chemically treated genomic DNA (Homo sapiens) CpG-island No: 12551
gttatgggttcgggtttcggttagttttaaggttttattttcgttgattttaggttatttaatttttttttcgggttatttaattcggtttcgtagtagttttcgggttttcggtttttttcgtttttcgtcggcggtgttcgtcgagtcgggttgttttattgcgtatgtttttcgtcgcgcggttggggagcgtcggggtagggaggcgggtattaggcgcgggttttttcgggtaggggaggtaggtttgggtttgacgtcggttacgtagcggcgggagagtgagtattcgggcggcggcgttttggagattcgcgagagatggaagcggcggcgacgtcggcggttgtcggggcggcgaggcgcgaggagttaggtcggtgttgtgcgtgggtagggagtcggggttgacgtgggcgggggtttgtgcgggagtcgggtgcgtttatatttttaggggtttcgcgtttggtttgagttgaggttcgattgttaattgatttcgtggttagtattcgtaaaggaatcggttatttgatttcgagaatttggttagacgaagtttaggtttgaatagggcgttaaaatatgtgtgtgtgtgtttgcgcgcgcgcgtgtgggtgagtgtgtgtgttgagtggggcggg

SEQ ID NO: 12552 - DNA, 650 bp, Artificial Sequence
  chemically treated genomic DNA (Homo sapiens) CpG-island No: 12552
cccgccccactcaacacacacactcacccacacgcgcgcgcgcaaacacacacacacatattttaacgccctattcaaacctaaacttcgtctaaccaaattctcgaaatcaaataaccgattcctttacgaatactaaccacgaaatcaattaacaatcgaacctcaactcaaaccaaacgcgaaacccctaaaaatataaacgcacccgactcccgcacaaacccccgcccacgtcaaccccgactccctacccacgcacaacaccgacctaactcctcgcgcctcgccgccccgacaaccgccgacgtcgccgccgcttccatctctcgcgaatctccaaaacgccgccgcccgaatactcactctcccgccgctacgtaaccgacgtcaaacccaaacctacctcccctacccgaaaaaacccgcgcctaatacccgcctccctaccccgacgctccccaaccgcgcgacgaaaaacatacgcaataaaacaacccgactcgacgaacaccgccgacgaaaaacgaaaaaaaccgaaaacccgaaaactactacgaaaccgaattaaataacccgaaaaaaaaattaaataacctaaaatcaacgaaaataaaaccttaaaactaaccgaaacccgaacccataac

SEQ ID NO: 12553 - DNA, 923 bp, Artificial Sequence
  chemically treated genomic DNA (Homo sapiens) CpG-island No: 12553
agacgtgaggtcgcgaggttgagggttgtgaaggcggtgggtacgtacggcgtgtcggggtcgtttggtttcgcggcgggggaggtaatattgcgatatttcgtagacgttgttagtcggggtcgcggtttcgcgtgcgttcgattatttgattgttggggagtgcgggggcgcgggagttaggcgagttagcgtaggcgcgcgttgtttttttcgtttttatcgagtttttagcgcgtgcgcggggtcgtggtcgaggtttgcgcgtcgttcggtcgtttgtattgcgcgcgcgtttatttcgcgtgggaggtagcgggaggggttcggagaggtgtggagcggcgcggcgggaggtttcgtgggcggttacgggagatagcgtcggcgggagcgcgtttttcggtttttttttcgcgttttcgcgtttttagtcggtcgtttcgagaggattcggaggaggtaggtgggtcgggggcgcgcggggttttttcgggtcgcgggttggtcggcggcggggttggggtcggggtgggcggttttgggggttcgcggggaggttagtggtttcgggagggtcgcgtagaggcgttgggggttgtggaagtttcgcggtcgtttttcgtgggtatcggtgtcgttggtcgcggggaggttttttcggggcggagcggtttattcggcggggatggggatttttcgtggcggtcgttgacggacggtttaattttaggttgaggggcgcggggtgtgcgggattcggcggcggagttgggttttgggttacgatcgttagtcgcggttgtttcgagagttttcgtacgcgtagtggttttttaacgcggtttttttttattttttatttgattttttttgcgtattaaattgtcgagaaatttttggttagtgggtttttaaagtta

SEQ ID NO: 12554 - DNA, 923 bp, Artificial Sequence
  chemically treated genomic DNA (Homo sapiens) CpG-island No: 12554
taactttaaaaacccactaaccaaaaatttctcgacaatttaatacgcaaaaaaaatcaaataaaaaataaaaaaaaaccgcgttaaaaaaccactacgcgtacgaaaactctcgaaacaaccgcgactaacgatcgtaacccaaaacccaactccgccgccgaatcccgcacaccccgcgcccctcaacctaaaattaaaccgtccgtcaacgaccgccacgaaaaatccccatccccgccgaataaaccgctccgccccgaaaaaacctccccgcgaccaacgacaccgatacccacgaaaaacgaccgcgaaacttccacaacccccaacgcctctacgcgaccctcccgaaaccactaacctccccgcgaacccccaaaaccgcccaccccgaccccaaccccgccgccgaccaacccgcgacccgaaaaaaccccgcgcgcccccgacccacctacctcctccgaatcctctcgaaacgaccgactaaaaacgcgaaaacgcgaaaaaaaaaccgaaaaacgcgctcccgccgacgctatctcccgtaaccgcccacgaaacctcccgccgcgccgctccacacctctccgaacccctcccgctacctcccacgcgaaataaacgcgcgcgcaatacaaacgaccgaacgacgcgcaaacctcgaccacgaccccgcgcacgcgctaaaaactcgataaaaacgaaaaaaacaacgcgcgcctacgctaactcgcctaactcccgcgcccccgcactccccaacaatcaaataatcgaacgcacgcgaaaccgcgaccccgactaacaacgtctacgaaatatcgcaatattacctcccccgccgcgaaaccaaacgaccccgacacgccgtacgtacccaccgccttcacaaccctcaacctcgcgacctcacgtct

SEQ ID NO: 12555 - DNA, 923 bp, Artificial Sequence
  chemically treated genomic DNA (Homo sapiens) CpG-island No: 12555
tagttttgaagatttattggttaaaggtttttcgataatttaatgcgtaaggggagttaagtgagaaatgggaagaggtcgcgttggaaagttattgcgcgtgcggggattttcggggtagtcgcggttggcggtcgtggtttagagtttagtttcgtcgtcgggtttcgtatatttcgcgttttttaatttaaagttgggtcgttcgttagcggtcgttacgaggagtttttattttcgtcgggtgggtcgtttcgtttcgagaaggttttttcgcggttagcgatatcggtgtttacgggaggcggtcgcggggtttttatagtttttagcgtttttgcgcgattttttcggggttattgattttttcgcgggtttttagggtcgtttatttcggttttaatttcgtcgtcggttagttcgcggttcgggggggtttcgcgcgttttcggtttatttgtttttttcgggttttttcggagcggtcggttggggacgcgggggcgcggaggaaaggtcgagaggcgcgttttcgtcggcgttgtttttcgtggtcgtttacggagtttttcgtcgcgtcgttttatattttttcgggtttttttcgttgttttttacgcggggtgggcgcgcgcgtagtgtaggcggtcgggcggcgcgtaggtttcggttacggtttcgcgtacgcgttggggattcggtggggacggaggaggtagcgcgcgtttgcgttggttcgtttggttttcgcgttttcgtattttttagtagttagatgatcgggcgtacgcggggtcgcgatttcggttgatagcgtttgcggggtgtcgtagtgttatttttttcgtcgcgaagttaggcggtttcggtacgtcgtgcgtgtttatcgtttttatagtttttagtttcgcggttttacgttt

SEQ ID NO: 12556 - DNA, 923 bp, Artificial Sequence
  chemically treated genomic DNA (Homo sapiens) CpG-island No: 12556
aaacgtaaaaccgcgaaactaaaaactataaaaacgataaacacgcacgacgtaccgaaaccgcctaacttcgcgacgaaaaaaataacactacgacaccccgcaaacgctatcaaccgaaatcgcgaccccgcgtacgcccgatcatctaactactaaaaaatacgaaaacgcgaaaaccaaacgaaccaacgcaaacgcgcgctacctcctccgtccccaccgaatccccaacgcgtacgcgaaaccgtaaccgaaacctacgcgccgcccgaccgcctacactacgcgcgcgcccaccccgcgtaaaaaacaacgaaaaaaacccgaaaaaatataaaacgacgcgacgaaaaactccgtaaacgaccacgaaaaacaacgccgacgaaaacgcgcctctcgacctttcctccgcgcccccgcgtccccaaccgaccgctccgaaaaaacccgaaaaaaacaaataaaccgaaaacgcgcgaaacccccccgaaccgcgaactaaccgacgacgaaattaaaaccgaaataaacgaccctaaaaacccgcgaaaaaatcaataaccccgaaaaaatcgcgcaaaaacgctaaaaactataaaaaccccgcgaccgcctcccgtaaacaccgatatcgctaaccgcgaaaaaaccttctcgaaacgaaacgacccacccgacgaaaataaaaactcctcgtaacgaccgctaacgaacgacccaactttaaattaaaaaacgcgaaatatacgaaacccgacgacgaaactaaactctaaaccacgaccgccaaccgcgactaccccgaaaatccccgcacgcgcaataactttccaacgcgacctcttcccatttctcacttaactccccttacgcattaaattatcgaaaaacctttaaccaataaatcttcaaaacta

SEQ ID NO: 12557 - DNA, 635 bp, Artificial Sequence
  chemically treated genomic DNA (Homo sapiens) CpG-island No: 12557
gtcgtggacgtattcggttagatggtgattgaggaatttttgtttgtgcgtttcggtatggcggcggtagtagtagaagtcgtattttcggtatattttttcggttttcggagtttcgtcgggttcgtattcgttatacgtgtcgtcgtgaggtagtttttcgaaggtcgcgtttattttagaggttatgtgggtgttgtgacgcggttaaggtttcggggtttcggggttcgtcgtttttttttcgcgcggttttatttttttttttcgtttcgggtttttttttagggagtcgtttttcgtttggatcgcgtcgcgtttcgaagcgggatttggggtcgcggtagtttttgttcgggcgtagtagtaaagatttttttcgtcggttcggattgtttcgttttgtttttgcgttttttttgtcgcgtaaggtattttcggcgcggttattcggcgttttcgtcggttttcgcgtcgcgtcgttcgtttagtttttcgttattagggagagatcgcggtagtcgtcggttttcgcgtcgtttcggttttatttttttttttttcgttaggaggtttttttttattttttgagttatttaaagtggtaatgatttttttttgtttttttcgcgggg

SEQ ID NO: 12558 - DNA, 635 bp, Artificial Sequence
  chemically treated genomic DNA (Homo sapiens) CpG-island No: 12558
ccccgcgaaaaaaacaaaaaaaaatcattaccactttaaataactcaaaaaataaaaaaaaacctcctaacgaaaaaaaaaaaaataaaaccgaaacgacgcgaaaaccgacgactaccgcgatctctccctaataacgaaaaactaaacgaacgacgcgacgcgaaaaccgacgaaaacgccgaataaccgcgccgaaaataccttacgcgacaaaaaaaacgcaaaaacaaaacgaaacaatccgaaccgacgaaaaaaatctttactactacgcccgaacaaaaactaccgcgaccccaaatcccgcttcgaaacgcgacgcgatccaaacgaaaaacgactccctaaaaaaaaacccgaaacgaaaaaaaaaaataaaaccgcgcgaaaaaaaaacgacgaaccccgaaaccccgaaaccttaaccgcgtcacaacacccacataacctctaaaataaacgcgaccttcgaaaaactacctcacgacgacacgtataacgaatacgaacccgacgaaactccgaaaaccgaaaaaatataccgaaaatacgacttctactactaccgccgccataccgaaacgcacaaacaaaaattcctcaatcaccatctaaccgaatacgtccacgac

SEQ ID NO: 12559 - DNA, 635 bp, Artificial Sequence
  chemically treated genomic DNA (Homo sapiens) CpG-island No: 12559
tttcgcgggaaaagtagaaaagggttattgttattttaaatgatttaggaagtaaaaggaggttttttgacggggaaagggaaagtggaatcggggcggcgcgggggtcggcggttgtcgcgatttttttttggtagcgggaggttgagcgggcggcgcgacgcgggggtcgacgggggcgtcgggtggtcgcgtcggaagtgttttgcgcggtagaagaagcgtagggatagagcggagtagttcgagtcggcggaaagggtttttgttgttgcgttcgggtaggggttgtcgcggttttaggtttcgtttcgagacgcggcgcggtttaggcgggaggcgattttttaggaagggattcggggcgggaggaggaagtgaggtcgcgcggaaggaaggcggcgagtttcggggtttcgaggttttggtcgcgttatagtatttatatggtttttggagtgggcgcggttttcgaggaattgttttacgacggtacgtgtgacgagtgcgagttcgacgaggtttcgggggtcgaggaagtgtgtcgagaatgcggtttttgttattgtcgtcgttatgtcgaggcgtataggtagaagttttttagttattatttggtcgaatacgtttacggt

SEQ ID NO: 12560 - DNA, 635 bp, Artificial Sequence
  chemically treated genomic DNA (Homo sapiens) CpG-island No: 12560
accgtaaacgtattcgaccaaataataactaaaaaacttctacctatacgcctcgacataacgacgacaataacaaaaaccgcattctcgacacacttcctcgacccccgaaacctcgtcgaactcgcactcgtcacacgtaccgtcgtaaaacaattcctcgaaaaccgcgcccactccaaaaaccatataaatactataacgcgaccaaaacctcgaaaccccgaaactcgccgccttccttccgcgcgacctcacttcctcctcccgccccgaatcccttcctaaaaaatcgcctcccgcctaaaccgcgccgcgtctcgaaacgaaacctaaaaccgcgacaacccctacccgaacgcaacaacaaaaaccctttccgccgactcgaactactccgctctatccctacgcttcttctaccgcgcaaaacacttccgacgcgaccacccgacgcccccgtcgacccccgcgtcgcgccgcccgctcaacctcccgctaccaaaaaaaaatcgcgacaaccgccgacccccgcgccgccccgattccactttccctttccccgtcaaaaaacctccttttacttcctaaatcatttaaaataacaataacccttttctacttttcccgcgaaa

SEQ ID NO: 12561 - DNA, 554 bp, Artificial Sequence
  chemically treated genomic DNA (Homo sapiens) CpG-island No: 12561
tcgtatggtcgttttcgggttttgtagtcgtgatttagttcgggaaggttggcgtttaggtttggagttcggggttgtgcgggtattaaataaagtagcgttcgtacgcgtttttttagggtcgcgttatatttgcggggtcgttttgttcgtttttttttaggagtcgcgttggttgttgcggggtaggttgggttcgttgttgttgtagttggtttcgcggtcgtttttagtcgtttttagtcgttttcgttcggtgagttattcgttttcggtcgcgtcgtcgttcggttcgtttttacgttttcgagtttgcgcgtatcgttcgtcgagttaggttttttcggtaaggggcgttcgatacgggcggggatttttagaggtcgcggttttttttggttgttagatagatagcgtttttaaggaggaaatttttgttttttcgtttcgtcgcgcgtacgggcggaaaggatatttaaattgttatcgttttgttattgtgttttttcgtttttttgatgttggttatatttttttgcgttggttttgtttcg

SEQ ID NO: 12562 - DNA, 554 bp, Artificial Sequence
  chemically treated genomic DNA (Homo sapiens) CpG-island No: 12562
cgaaacaaaaccaacgcaaaaaaatataaccaacatcaaaaaaacgaaaaaacacaataacaaaacgataacaatttaaatatcctttccgcccgtacgcgcgacgaaacgaaaaaacaaaaatttcctccttaaaaacgctatctatctaacaaccaaaaaaaaccgcgacctctaaaaatccccgcccgtatcgaacgccccttaccgaaaaaacctaactcgacgaacgatacgcgcaaactcgaaaacgtaaaaacgaaccgaacgacgacgcgaccgaaaacgaataactcaccgaacgaaaacgactaaaaacgactaaaaacgaccgcgaaaccaactacaacaacaacgaacccaacctaccccgcaacaaccaacgcgactcctaaaaaaaaacgaacaaaacgaccccgcaaatataacgcgaccctaaaaaaacgcgtacgaacgctactttatttaatacccgcacaaccccgaactccaaacctaaacgccaaccttcccgaactaaatcacgactacaaaacccgaaaacgaccatacga

SEQ ID NO: 12563 - DNA, 554 bp, Artificial Sequence
  chemically treated genomic DNA (Homo sapiens) CpG-island No: 12563
cgagatagagttagcgtaggagggtgtgattagtattagggaggcggggagatatagtgataggacggtgatagtttgggtgtttttttcgttcgtgcgcgcgacgggacggaggggtaggggttttttttttgggaacgttgtttgtttggtagttaaggaaggtcgcggtttttggggattttcgttcgtatcgagcgttttttgtcgagggaatttggttcggcgagcggtgcgcgtaggttcggaggcgtgagagcgggtcgggcggcggcgcggtcgggagcgggtgatttatcgggcgggggcggttgggggcggttaggggcggtcgcggagttaattgtagtagtagcgggtttagtttgtttcgtaatagttagcgcggtttttggagggaaacgagtaaggcggtttcgtaggtgtggcgcggttttgggagggcgcgtgcgagcgttgttttgtttggtgttcgtatagtttcgggttttaggtttgagcgttaattttttcgagttgagttacggttgtagagttcgagggcggttatacgg

SEQ ID NO: 12564 - DNA, 554 bp, Artificial Sequence
  chemically treated genomic DNA (Homo sapiens) CpG-island No: 12564
ccgtataaccgccctcgaactctacaaccgtaactcaactcgaaaaaattaacgctcaaacctaaaacccgaaactatacgaacaccaaacaaaacaacgctcgcacgcgccctcccaaaaccgcgccacacctacgaaaccgccttactcgtttccctccaaaaaccgcgctaactattacgaaacaaactaaacccgctactactacaattaactccgcgaccgcccctaaccgcccccaaccgcccccgcccgataaatcacccgctcccgaccgcgccgccgcccgacccgctctcacgcctccgaacctacgcgcaccgctcgccgaaccaaattccctcgacaaaaaacgctcgatacgaacgaaaatccccaaaaaccgcgaccttccttaactaccaaacaaacaacgttcccaaaaaaaaaacccctacccctccgtcccgtcgcgcgcacgaacgaaaaaaacacccaaactatcaccgtcctatcactatatctccccgcctccctaatactaatcacaccctcctacgctaactctatctcg

SEQ ID NO: 12565 - DNA, 551 bp, Artificial Sequence
  chemically treated genomic DNA (Homo sapiens) CpG-island No: 12565
ggatttgtggggtatgatcgaattttttcgcgtagtcggtaagtttcggtttttagtcgggtcgcgattagcgtgacgtcgcggtagggggattcggcgggcgcgcggtcgtttttaaagtttcggcgtcgtcgtcgttttcgcgcgcgcgcgcgagtagtacggttcgagggggcggtttttggggcgcggtttcggcggtagttgatgcgcgtttcgtcggtcgggaggcgggagttcgcgagtcgggagcgggagtagtagaggtttagtagtcgggcgtcgcgggtcgggggtttgaggaggttataggacgggcgttttttcggttagtggagttcggcgcggggttcgttgcggtcgtatcgtgaggggaggaggtcgaggaggacgtagcgtcggttgtcggcgggaggaagcgttttattagggttttcgacggtattcgtttaattatattcgcgtttttgttggaaacgtttgttggcgtttgttatcggttttttttattttgaaagggaaaaaggttttttttatttatttttttgttt

SEQ ID NO: 12566 - DNA, 551 bp, Artificial Sequence
  chemically treated genomic DNA (Homo sapiens) CpG-island No: 12566
aaacaaaaaaataaataaaaaaaacctttttccctttcaaaataaaaaaaaccgataacaaacgccaacaaacgtttccaacaaaaacgcgaatataattaaacgaataccgtcgaaaaccctaataaaacgcttcctcccgccgacaaccgacgctacgtcctcctcgacctcctcccctcacgatacgaccgcaacgaaccccgcgccgaactccactaaccgaaaaaacgcccgtcctataacctcctcaaacccccgacccgcgacgcccgactactaaacctctactactcccgctcccgactcgcgaactcccgcctcccgaccgacgaaacgcgcatcaactaccgccgaaaccgcgccccaaaaaccgccccctcgaaccgtactactcgcgcgcgcgcgcgaaaacgacgacgacgccgaaactttaaaaacgaccgcgcgcccgccgaatccccctaccgcgacgtcacgctaatcgcgacccgactaaaaaccgaaacttaccgactacgcgaaaaaattcgatcataccccacaaatcc

SEQ ID NO: 12567 - DNA, 551 bp, Artificial Sequence
  chemically treated genomic DNA (Homo sapiens) CpG-island No: 12567
gggtaggggaatgggtggggagagttttttttttttttaaaatggagggaatcggtgataggcgttagtaagcgtttttagtagaggcgcggatgtggttaaacgagtgtcgtcgggggttttggtggagcgttttttttcgtcggtagtcggcgttgcgtttttttcggttttttttttttacggtgcggtcgtagcgggtttcgcgtcgggttttattagtcgggaagacgttcgttttgtggtttttttaggttttcggttcgcggcgttcggttgttagatttttgttgttttcgttttcggttcgcggattttcgtttttcggtcggcggggcgcgtattagttgtcgtcggagtcgcgttttagaagtcgttttttcggatcgtattattcgcgcgcgcgcgcgggggcggcggcggcgtcggggttttgaagacggtcgcgcgttcgtcggatttttttatcgcggcgttacgttggtcgcggttcgattgagggtcggggtttgtcggttgcgcggggagattcggttatattttataggttt

SEQ ID NO: 12568 - DNA, 551 bp, Artificial Sequence
  chemically treated genomic DNA (Homo sapiens) CpG-island No: 12568
aaacctataaaatataaccgaatctccccgcgcaaccgacaaaccccgaccctcaatcgaaccgcgaccaacgtaacgccgcgataaaaaaatccgacgaacgcgcgaccgtcttcaaaaccccgacgccgccgccgcccccgcgcgcgcgcgcgaataatacgatccgaaaaaacgacttctaaaacgcgactccgacgacaactaatacgcgccccgccgaccgaaaaacgaaaatccgcgaaccgaaaacgaaaacaacaaaaatctaacaaccgaacgccgcgaaccgaaaacctaaaaaaaccacaaaacgaacgtcttcccgactaataaaacccgacgcgaaacccgctacgaccgcaccgtaaaaaaaaaaaaccgaaaaaaacgcaacgccgactaccgacgaaaaaaaacgctccaccaaaacccccgacgacactcgtttaaccacatccgcgcctctactaaaaacgcttactaacgcctatcaccgattccctccattttaaaaaaaaaaaaaactctccccacccattcccctaccc

SEQ ID NO: 12569 - DNA, 593 bp, Artificial Sequence
  chemically treated genomic DNA (Homo sapiens) CpG-island No: 12569
agttttaagatcgaatttcgtaaagggtttagtcgtatttttattcggaagcggttcgaattcggggtcggaagtgattttatttttgtgcgtcgagtttcgttttacgagtatttgttttcgagcggagagcgcgggtcgtttttttttttggtgtttcgtcgcggtttgggattcggtaagatgggtaagaagggtaagaaggagaagaagggtcgcggcgcggagaagacggtcgttaagatggagaagaaggtgtttaagcgttcgcggaaggaggaggtgagcgggttagatcgggtttagcggttcgacgtcgcggtcgtgtagtttcggtcgattttttgcgtttttcggggttacgggtcggtcgtgggagtcgcgtcggttttgcgggagagttggaggtcgtaggaattgtttcggcgtcgcgttcgggtagtttagacggggttcgtttttttttgagtttttacgtgtgtttgttcgtttttcggagttgttttttttaacgtgtttgttttttttagtgtggtgttacgggcgtttttttgcgttttttttttttttttttttttttttttatttttttt

SEQ ID NO: 12570 - DNA, 593 bp, Artificial Sequence
  chemically treated genomic DNA (Homo sapiens) CpG-island No: 12570
aaaaaaaataaaaaaaaaaaaaaaaaaaaaaaaaaaacgcaaaaaaacgcccgtaacaccacactaaaaaaaacaaacacgttaaaaaaaacaactccgaaaaacgaacaaacacacgtaaaaactcaaaaaaaaacgaaccccgtctaaactacccgaacgcgacgccgaaacaattcctacgacctccaactctcccgcaaaaccgacgcgactcccacgaccgacccgtaaccccgaaaaacgcaaaaaatcgaccgaaactacacgaccgcgacgtcgaaccgctaaacccgatctaacccgctcacctcctccttccgcgaacgcttaaacaccttcttctccatcttaacgaccgtcttctccgcgccgcgacccttcttctccttcttacccttcttacccatcttaccgaatcccaaaccgcgacgaaacaccaaaaaaaaaaacgacccgcgctctccgctcgaaaacaaatactcgtaaaacgaaactcgacgcacaaaaataaaatcacttccgaccccgaattcgaaccgcttccgaataaaaatacgactaaaccctttacgaaattcgatcttaaaact

SEQ ID NO: 12571 - DNA, 593 bp, Artificial Sequence
  chemically treated genomic DNA (Homo sapiens) CpG-island No: 12571
agggagggtggagggagaagggaggagggggaggaaacgtagaaaaacgttcgtgatattatattaagaaaagtaagtacgttaaagggggtagtttcgagaagcggatagatatacgtggagatttaggagggggcgggtttcgtttgggttgttcggacgcggcgtcggggtagtttttacggtttttagttttttcgtagggtcggcgcggtttttacggtcgattcgtaatttcggggggcgtagggagtcggtcgaggttgtacggtcgcgacgtcgggtcgttaagttcggtttgattcgtttatttttttttttcgcgagcgtttagatatttttttttttattttggcggtcgtttttttcgcgtcgcggtttttttttttttttttgttttttttgtttattttgtcgggttttaagtcgcgacgggatattaggaaagaaaacggttcgcgtttttcgttcggaaataggtgttcgtggggcggagttcggcgtatagaaatggagttattttcggtttcgagttcgagtcgttttcgggtagaggtgcggttgggttttttacgaggttcggttttggagtt

SEQ ID NO: 12572 - DNA, 593 bp, Artificial Sequence
  chemically treated genomic DNA (Homo sapiens) CpG-island No: 12572
aactccaaaaccgaacctcgtaaaaaacccaaccgcacctctacccgaaaacgactcgaactcgaaaccgaaaataactccatttctatacgccgaactccgccccacgaacacctatttccgaacgaaaaacgcgaaccgttttctttcctaatatcccgtcgcgacttaaaacccgacaaaataaacaaaaaaaacaaaaaaaaaaaaaaaaaccgcgacgcgaaaaaaacgaccgccaaaataaaaaaaaaaatatctaaacgctcgcgaaaaaaaaaaataaacgaatcaaaccgaacttaacgacccgacgtcgcgaccgtacaacctcgaccgactccctacgccccccgaaattacgaatcgaccgtaaaaaccgcgccgaccctacgaaaaaactaaaaaccgtaaaaactaccccgacgccgcgtccgaacaacccaaacgaaacccgccccctcctaaatctccacgtatatctatccgcttctcgaaactaccccctttaacgtacttacttttcttaatataatatcacgaacgtttttctacgtttcctccccctcctcccttctccctccaccctccct

SEQ ID NO: 12573 - DNA, 923 bp, Artificial Sequence
  chemically treated genomic DNA (Homo sapiens) CpG-island No: 12573
  unsure (441, 464, 592, 598)
ataggtaaggcgtgggatcgggaaataggcgaggcgcggggtggggagacgggcgaggcgcggggtggggagacgggcgaggcgcggcgtggggagacgggcgaggcgcggggtggggagacgggcgaggcgcggcgtggggagacgggcgaggcgcggcgtggggagacgggcgaggcgcggggtggggagacgggcgaggcgcggcgtggggagacgggcgaggcgcggcgtggggagacgggcgaggcgcggggtggggagacgggcgaggcgcggggtggggagacgggcgaggcgcggggtggggagacgggcgaagcgcggcgtggggagacgggcgaagcgtcggggtgggagatcgtcgaggtcggcgtgggagacggcgaggttcgggtggggaaacggttaagttcgggtggggagatcgttaagttcggngtgggagacggttaagtttcgtntggggagacggttagcgtaagtcggggtggaaacgttaagtcgggtgggaacggtaaggcgcgggtgggaacgggtaggtcggggtgggaaacggtaaggcgcggcgtgggaaacgggtaggcgcggngtgggnaaacggcgaggcgcggcgtggggaaacgggcgaggcgcggggtgggaagacgggtaaggcgcggggtgggaagacgggcgaggcgcggggtgggaagacgggcgaggcgcggcgtgggaagacgggcgaggcgcggcgtcgggaaacggtcgaggcgcggcgtggggagacgggcgaggcgcggcgtggggagacggtcgaggcgcggcgtggggagacgggcgaggcgcggggtgggtagacgggtgagttgcggtttgggaaaataggcgttgttgtttgtggtttttttagttttatgaatattgaagtttttatatgggat

SEQ ID NO: 12574 - DNA, 923 bp, Artificial Sequence
  chemically treated genomic DNA (Homo sapiens) CpG-island No: 12574
  unsure (326, 332, 460, 483)
atcccatataaaaacttcaatattcataaaactaaaaaaaccacaaacaacaacgcctattttcccaaaccgcaactcacccgtctacccaccccgcgcctcgcccgtctccccacgccgcgcctcgaccgtctccccacgccgcgcctcgcccgtctccccacgccgcgcctcgaccgtttcccgacgccgcgcctcgcccgtcttcccacgccgcgcctcgcccgtcttcccaccccgcgcctcgcccgtcttcccaccccgcgccttacccgtcttcccaccccgcgcctcgcccgtttccccacgccgcgcctcgccgtttncccacnccgcgcctacccgtttcccacgccgcgccttaccgtttcccaccccgacctacccgttcccacccgcgccttaccgttcccacccgacttaacgtttccaccccgacttacgctaaccgtctccccanacgaaacttaaccgtctcccacnccgaacttaacgatctccccacccgaacttaaccgtttccccacccgaacctcgccgtctcccacgccgacctcgacgatctcccaccccgacgcttcgcccgtctccccacgccgcgcttcgcccgtctccccaccccgcgcctcgcccgtctccccaccccgcgcctcgcccgtctccccaccccgcgcctcgcccgtctccccacgccgcgcctcgcccgtctccccacgccgcgcctcgcccgtctccccaccccgcgcctcgcccgtctccccacgccgcgcctcgcccgtctccccacgccgcgcctcgcccgtctccccaccccgcgcctcgcccgtctccccacgccgcgcctcgcccgtctccccaccccgcgcctcgcccgtctccccaccccgcgcctcgcctatttcccgatcccacgccttacctat

SEQ ID NO: 12575 - DNA, 923 bp, Artificial Sequence
  chemically treated genomic DNA (Homo sapiens) CpG-island No: 12575
  unsure (326, 332, 460, 483)
attttatgtgaaagttttaatgtttatgaaattgaagagattatagatagtagcgtttatttttttaggtcgtaatttattcgtttgtttatttcgcgtttcgttcgtttttttacgtcgcgtttcggtcgtttttttacgtcgcgtttcgttcgtttttttacgtcgcgtttcggtcgtttttcgacgtcgcgtttcgttcgtttttttacgtcgcgtttcgttcgtttttttatttcgcgtttcgttcgtttttttatttcgcgttttgttcgtttttttatttcgcgtttcgttcgtttttttacgtcgcgtttcgtcgtttntttatntcgcgtttgttcgttttttacgtcgcgttttgtcgttttttatttcggtttgttcgtttttattcgcgttttgtcgtttttattcggtttggcgtttttatttcggtttgcgttggtcgtttttttangcggggtttggtcgttttttatntcgggtttggcggtttttttattcgggtttggtcgtttttttattcgggtttcgtcgttttttacgtcggtttcggcggttttttatttcggcgtttcgttcgtttttttacgtcgcgtttcgttcgtttttttatttcgcgtttcgttcgtttttttatttcgcgtttcgttcgtttttttatttcgcgtttcgttcgtttttttacgtcgcgtttcgttcgtttttttacgtcgcgtttcgttcgtttttttatttcgcgtttcgttcgtttttttacgtcgcgtttcgttcgtttttttacgtcgcgtttcgttcgtttttttatttcgcgtttcgttcgtttttttacgtcgcgtttcgttcgtttttttatttcgcgtttcgttcgtttttttatttcgcgtttcgtttgtttttcggttttacgttttgtttgt

SEQ ID NO: 12576 - DNA, 923 bp, Artificial Sequence
  chemically treated genomic DNA (Homo sapiens) CpG-island No: 12576
  unsure (441, 464, 592, 598)
acaaacaaaacgtaaaaccgaaaaacaaacgaaacgcgaaataaaaaaacgaacgaaacgcgaaataaaaaaacgaacgaaacgcgacgtaaaaaaacgaacgaaacgcgaaataaaaaaacgaacgaaacgcgacgtaaaaaaacgaacgaaacgcgacgtaaaaaaacgaacgaaacgcgaaataaaaaaacgaacgaaacgcgacgtaaaaaaacgaacgaaacgcgacgtaaaaaaacgaacgaaacgcgaaataaaaaaacgaacgaaacgcgaaataaaaaaacgaacgaaacgcgaaataaaaaaacgaacgaaacgcgacgtaaaaaaacgaacgaaacgccgaaataaaaaaccgccgaaaccgacgtaaaaaacgacgaaacccgaataaaaaaacgaccaaacccgaataaaaaaaccgccaaacccganataaaaaacgaccaaaccccgcntaaaaaaacgaccaacgcaaaccgaaataaaaacgccaaaccgaataaaaacgacaaaacgcgaataaaaacgaacaaaccgaaataaaaaacgacaaaacgcgacgtaaaaaacgaacaaacgcganataaanaaacgacgaaacgcgacgtaaaaaaacgaacgaaacgcgaaataaaaaaacgaacaaaacgcgaaataaaaaaacgaacgaaacgcgaaataaaaaaacgaacgaaacgcgacgtaaaaaaacgaacgaaacgcgacgtcgaaaaacgaccgaaacgcgacgtaaaaaaacgaacgaaacgcgacgtaaaaaaacgaccgaaacgcgacgtaaaaaaacgaacgaaacgcgaaataaacaaacgaataaattacgacctaaaaaaataaacgctactatctataatctcttcaatttcataaacattaaaactttcacataaaat

SEQ ID NO: 12577 - DNA, 521 bp, Artificial Sequence
  chemically treated genomic DNA (Homo sapiens) CpG-island No: 12577
cggcggaaatagtagagtttcgtttttttaacggttaaattttagcgtaaaatagatatatcgattaaggtttatcgtgtgttagggttaggttgggttttttttaggtggttgcggcgggcgcgtttagtttgggtgtttcggaagtttcgagtagcgtaggtcgacggcgatcgtgcgggattcgtttagtcgcgttttcgtttcgtttttggttataggcgcgaattgcgcggtcgttgttattagggggtaggttagggtagcgggaggtagggcggggacgcggtgacgcgggtattgtcgggtttcgtgattgcgcgtttcgttcggagttttcgtcgtcgttatgtagttttcggcggtgttcgttatttttaggtgagttagattttcgcgttttatatcgtatagttcgtagttcggggcgttcgggcggagaggcggggggaggtcgtcgttttttaggttagggatttggtgtaggtttttttagcgttttcggtggtttattcgggttg

SEQ ID NO: 12578 - DNA, 521 bp, Artificial Sequence
  chemically treated genomic DNA (Homo sapiens) CpG-island No: 12578
caacccgaataaaccaccgaaaacgctaaaaaaacctacaccaaatccctaacctaaaaaacgacgacctccccccgcctctccgcccgaacgccccgaactacgaactatacgatataaaacgcgaaaatctaactcacctaaaaataacgaacaccgccgaaaactacataacgacgacgaaaactccgaacgaaacgcgcaatcacgaaacccgacaatacccgcgtcaccgcgtccccgccctacctcccgctaccctaacctaccccctaataacaacgaccgcgcaattcgcgcctataaccaaaaacgaaacgaaaacgcgactaaacgaatcccgcacgatcgccgtcgacctacgctactcgaaacttccgaaacacccaaactaaacgcgcccgccgcaaccacctaaaaaaaacccaacctaaccctaacacacgataaaccttaatcgatatatctattttacgctaaaatttaaccgttaaaaaaacgaaactctactatttccgccg

SEQ ID NO: 12579 - DNA, 521 bp, Artificial Sequence
  chemically treated genomic DNA (Homo sapiens) CpG-island No: 12579
tagttcggataagttatcgagggcgttggggagatttgtattaggtttttggtttaggaggcggcggttttttttcgttttttcgttcgggcgtttcggattgcgagttgtgcggtgtggggcgcgggggtttggtttatttggaggtgacgagtatcgtcggggattgtatgacggcggcggggatttcgggcggggcgcgtagttacgggattcggtagtgttcgcgttatcgcgttttcgttttgtttttcgttgttttggtttgttttttggtggtagcggtcgcgtagttcgcgtttgtggttagaggcggggcggaagcgcggttgggcgggtttcgtacggtcgtcgtcggtttgcgttgttcggagttttcggagtatttaggttgagcgcgttcgtcgtaattatttagaagaagtttagtttggttttggtatacggtgaattttaatcggtgtgtttgttttgcgttaaagtttagtcgttagagagacgggattttgttgttttcgtcg

SEQ ID NO: 12580 - DNA, 521 bp, Artificial Sequence
  chemically treated genomic DNA (Homo sapiens) CpG-island No: 12580
cgacgaaaacaacaaaatcccgtctctctaacgactaaactttaacgcaaaacaaacacaccgattaaaattcaccgtataccaaaaccaaactaaacttcttctaaataattacgacgaacgcgctcaacctaaatactccgaaaactccgaacaacgcaaaccgacgacgaccgtacgaaacccgcccaaccgcgcttccgccccgcctctaaccacaaacgcgaactacgcgaccgctaccaccaaaaaacaaaccaaaacaacgaaaaacaaaacgaaaacgcgataacgcgaacactaccgaatcccgtaactacgcgccccgcccgaaatccccgccgccgtcatacaatccccgacgatactcgtcacctccaaataaaccaaacccccgcgccccacaccgcacaactcgcaatccgaaacgcccgaacgaaaaaacgaaaaaaaaccgccgcctcctaaaccaaaaacctaatacaaatctccccaacgccctcgataacttatccgaacta

SEQ ID NO: 12581 - DNA, 1002 bp, Artificial Sequence
  chemically treated genomic DNA (Homo sapiens) CpG-island No: 12581
  unsure (593, 598)
gggcgggtgcgcgcggtgtttcgagtttggaattacggagggcgcgttggttttgggcggatggagggggtgtcgtattgtcgcggggaggcgtgtcgggaggttggggttagtggtagtcgtttggcgagggtgggggcgtagcgttgcggtgggaggaggcggtttcggttttggtttttattttaggtcggggtggggggcgtatagcggtcgtcggagtttttagtagggggcgttgtttcgggcgttgggcgggggtggggtgggttaggagggggggtcgcggttgggcgatattttttttattattaaatattatgtttaaaaggcgtcgggggatttttcggagttacggagttcgcgtcgttcgatcgttcggtttacggagtttatggatttgagcgtcgcgtcgcgttgtgtttttggttgttgagcgtttgtcgtttcgcgacgggttggaagcggttcgtgttgcgagcggcgggggttgggtcggttcggagtttagggggcggcggcggcggcggcggcggcgggcggatttttgtttaggttgcgggtcgcggttgtttcggtcgtcgcgggtatgnttttntcgcggtcggcgcgcgcgcgggtttcggttttaggaacggttcggtggtgtcgtattattttatgatgtcgttttatcggagtttggtcgggagggtttcggtcggggtagtcgttgttttcgtttcgggttatggtcgcgcggatacgattatcggttttatagattaggcgatttaaggtatttacgttttttttgtgttcgtttatttcgttaggttttgggttgagattagtttcggagtcgtgtcgtagtttcgttatatttggagtcgcggttttatgcggtttatttttaggtgatagaaagaaatttcgtcgaggttaatattttttagttcgttgtatttggattgtggcgagagtcgcggtagttttcggggtttagttttagagggttgattg

SEQ ID NO: 12582 - DNA, 1002 bp, Artificial Sequence
  chemically treated genomic DNA (Homo sapiens) CpG-island No: 12582
  unsure (405, 410)
caatcaaccctctaaaactaaaccccgaaaactaccgcgactctcgccacaatccaaatacaacgaactaaaaaatattaacctcgacgaaatttctttctatcacctaaaaataaaccgcataaaaccgcgactccaaatataacgaaactacgacacgactccgaaactaatctcaacccaaaacctaacgaaataaacgaacacaaaaaaaacgtaaataccttaaatcgcctaatctataaaaccgataatcgtatccgcgcgaccataacccgaaacgaaaacaacgactaccccgaccgaaaccctcccgaccaaactccgataaaacgacatcataaaataatacgacaccaccgaaccgttcctaaaaccgaaacccgcgcgcgcgccgaccgcganaaaancatacccgcgacgaccgaaacaaccgcgacccgcaacctaaacaaaaatccgcccgccgccgccgccgccgccgccgccccctaaactccgaaccgacccaacccccgccgctcgcaacacgaaccgcttccaacccgtcgcgaaacgacaaacgctcaacaaccaaaaacacaacgcgacgcgacgctcaaatccataaactccgtaaaccgaacgatcgaacgacgcgaactccgtaactccgaaaaatcccccgacgccttttaaacataatatttaataataaaaaaaatatcgcccaaccgcgaccccccctcctaacccaccccacccccgcccaacgcccgaaacaacgccccctactaaaaactccgacgaccgctatacgccccccaccccgacctaaaataaaaaccaaaaccgaaaccgcctcctcccaccgcaacgctacgcccccaccctcgccaaacgactaccactaaccccaacctcccgacacgcctccccgcgacaatacgacaccccctccatccgcccaaaaccaacgcgccctccgtaattccaaactcgaaacaccgcgcgcacccgccc

SEQ ID NO: 12583 - DNA, 1002 bp, Artificial Sequence
  chemically treated genomic DNA (Homo sapiens) CpG-island No: 12583
  unsure (405, 410)
tagttagttttttgggattgggtttcgggagttgtcgcgattttcgttatagtttaggtgtagcgggttggagagtgttggtttcggcgaagtttttttttattatttgagggtgggtcgtatggggtcgcggttttaaatgtaacggagttgcggtacggtttcggggttggttttagtttaggatttgacgggatgggcgggtatagaagaggcgtaagtattttgggtcgtttggtttgtgaagtcggtgatcgtgttcgcgcgattatggttcgaggcggagatagcggttgtttcggtcggagttttttcggttaggtttcggtaaagcgatattatgaagtggtgcggtattatcgagtcgtttttgaagtcggagttcgcgcgcgcgtcggtcgcggnagaantatattcgcggcggtcgggatagtcgcgattcgtagtttgggtaagagttcgttcgtcgtcgtcgtcgtcgtcgtcgttttttgggtttcggatcggtttagttttcgtcgttcgtagtacgggtcgtttttagttcgtcgcggggcggtaggcgtttagtagttaaaggtatagcgcggcgcggcgtttaggtttatgggtttcgtgggtcgagcggtcgggcggcgcgggtttcgtggtttcgggaagtttttcggcgttttttgaatatagtgtttaataatgggggaagtgtcgtttagtcgcggtttttttttttggtttattttattttcgtttaacgttcggagtagcgttttttgttgaaagtttcggcggtcgttatgcgttttttatttcggtttagagtggagattagggtcggagtcgtttttttttatcgtagcgttacgtttttattttcgttaagcgattgttattggttttagtttttcgatacgttttttcgcggtagtgcgatattttttttattcgtttaagattaacgcgtttttcgtggttttaggttcggggtatcgcgcgtattcgttt

SEQ ID NO: 12584 - DNA, 1002 bp, Artificial Sequence
  chemically treated genomic DNA (Homo sapiens) CpG-island No: 12584
  unsure (593, 598)
aaacgaatacgcgcgataccccgaacctaaaaccacgaaaaacgcgttaatcttaaacgaataaaaaaaatatcgcactaccgcgaaaaaacgtatcgaaaaactaaaaccaataacaatcgcttaacgaaaataaaaacgtaacgctacgataaaaaaaaacgactccgaccctaatctccactctaaaccgaaataaaaaacgcataacgaccgccgaaactttcaacaaaaaacgctactccgaacgttaaacgaaaataaaataaaccaaaaaaaaaaaccgcgactaaacgacacttcccccattattaaacactatattcaaaaaacgccgaaaaacttcccgaaaccacgaaacccgcgccgcccgaccgctcgacccacgaaacccataaacctaaacgccgcgccgcgctatacctttaactactaaacgcctaccgccccgcgacgaactaaaaacgacccgtactacgaacgacgaaaactaaaccgatccgaaacccaaaaaacgacgacgacgacgacgacgacgaacgaactcttacccaaactacgaatcgcgactatcccgaccgccgcgaatatanttctnccgcgaccgacgcgcgcgcgaactccgacttcaaaaacgactcgataataccgcaccacttcataatatcgctttaccgaaacctaaccgaaaaaactccgaccgaaacaaccgctatctccgcctcgaaccataatcgcgcgaacacgatcaccgacttcacaaaccaaacgacccaaaatacttacgcctcttctatacccgcccatcccgtcaaatcctaaactaaaaccaaccccgaaaccgtaccgcaactccgttacatttaaaaccgcgaccccatacgacccaccctcaaataataaaaaaaaacttcgccgaaaccaacactctccaacccgctacacctaaactataacgaaaatcgcgacaactcccgaaacccaatcccaaaaaactaacta

SEQ ID NO: 12585 - DNA, 1063 bp, Artificial Sequence
  chemically treated genomic DNA (Homo sapiens) CpG-island No: 12585
  unsure (708)
gaatcggtagtcgaaataggttagagttttttgttcgacgtgtttagttttaacgacgtagacgaggtggtgggtgtcgagttgcgcgtgttgcgtcggggatttttagagtcgggtttaggtagttggattttttcgtcgttgttgttgttgtttacgtgttcgggcgtcgttcgagcgttacgtttgttgtattcgcgggtagttgagtttttagtcggttagcgttgggaggcgttcgacgtggcggacgtatgagggtttatcgtcgtgaatcgcgtttttttcgcgcgttttgttttttgttgcgcgtagtggtaggttcggtgtcgagttcgttggtattgcggcggttgggtttcggttggtcgggcggagggggttttgcggtagaggagcgcgcggtgttagtcgttttttttcgtacgtagaggaaagagagtttatttcgggagattcgcgtttaggttcgcgcgttcggggtcgttttggttttagagtcgttgttcgatttaggaatcggtatcgcgtcgttaagggtagttattggcggtcgtagacggaggaggacggcgttggtcgggacgcggatagcgtagggtagcggcgggggcgcggtcggggttacgggcgtaggggtcggagtcgttgtagtcgtaagtcgttgtacgtggattttaaggagttcggttgggacgattggattantcgcgtcgttggattacgaggcgtattattgcgagggtttttgcgatttttttttgcgttcgtatttcgagtttattaattatgttattatttagacgttgtttaattttatggtattagacgcggcgtcggttttttgttgtgtgttagcgcgttttagttttattagtattttttatatcgacgtcgttaataacgttgtttataagtaatacgaggatatggtggtggagcgtgcggttgtaggtagcgcgagggtcggggagggggtagttacgcggtcgaggatttttagttgatgagtagtagcgggttattttgttatcgagcgtgggtgtatgttcgatgtgattta

SEQ ID NO: 12586 - DNA, 1063 bp, Artificial Sequence
  chemically treated genomic DNA (Homo sapiens) CpG-island No: 12586
  unsure (356)
taaatcacatcgaacatacacccacgctcgataacaaaataacccgctactactcatcaactaaaaatcctcgaccgcgtaactaccccctccccgaccctcgcgctacctacaaccgcacgctccaccaccatatcctcgtattacttataaacaacgttattaacgacgtcgatataaaaaatactaataaaactaaaacgcgctaacacacaacaaaaaaccgacgccgcgtctaataccataaaattaaacaacgtctaaataataacataattaataaactcgaaatacgaacgcaaaaaaaaatcgcaaaaaccctcgcaataatacgcctcgtaatccaacgacgcgantaatccaatcgtcccaaccgaactccttaaaatccacgtacaacgacttacgactacaacgactccgacccctacgcccgtaaccccgaccgcgcccccgccgctaccctacgctatccgcgtcccgaccaacgccgtcctcctccgtctacgaccgccaataactacccttaacgacgcgataccgattcctaaatcgaacaacgactctaaaaccaaaacgaccccgaacgcgcgaacctaaacgcgaatctcccgaaataaactctctttcctctacgtacgaaaaaaaacgactaacaccgcgcgctcctctaccgcaaaaccccctccgcccgaccaaccgaaacccaaccgccgcaataccaacgaactcgacaccgaacctaccactacgcgcaacaaaaaacaaaacgcgcgaaaaaaacgcgattcacgacgataaaccctcatacgtccgccacgtcgaacgcctcccaacgctaaccgactaaaaactcaactacccgcgaatacaacaaacgtaacgctcgaacgacgcccgaacacgtaaacaacaacaacaacgacgaaaaaatccaactacctaaacccgactctaaaaatccccgacgcaacacgcgcaactcgacacccaccacctcgtctacgtcgttaaaactaaacacgtcgaacaaaaaactctaacctatttcgactaccgattc

SEQ ID NO: 12587 - DNA, 1063 bp, Artificial Sequence
  chemically treated genomic DNA (Homo sapiens) CpG-island No: 12587
  unsure (356)
tgggttatatcggatatgtatttacgttcggtgatagggtggttcgttgttgtttattagttggggattttcggtcgcgtggttgtttttttttcggttttcgcgttatttgtagtcgtacgttttattattatgttttcgtattgtttgtagataacgttgttggcggcgtcgatgtagaggatgttgatggggttgaggcgcgttggtatatagtaggaggtcggcgtcgcgtttggtgttatggagttgagtagcgtttgaatgatggtatggttggtgggttcgaggtgcgaacgtaaagggaagtcgtaaaggttttcgtagtggtacgtttcgtagtttagcggcgcgantgatttagtcgttttagtcgagttttttgaagtttacgtgtaacggtttgcggttgtagcggtttcggtttttgcgttcgtggtttcggtcgcgttttcgtcgttgttttgcgttgttcgcgtttcggttaacgtcgttttttttcgtttgcggtcgttaatgattgtttttggcgacgcggtgtcggtttttgggtcgggtagcggttttgaggttagagcggtttcgagcgcgcgggtttgggcgcggatttttcggaataagtttttttttttttgcgtgcgggaggagacgattagtatcgcgcgtttttttgtcgtagagtttttttcgttcggttagtcgaagtttagtcgtcgtagtgttaacgggttcggtatcgggtttgttattgcgcgtagtaagaggtagaacgcgcggggggggcgcggtttacgacggtgggtttttatgcgttcgttacgtcgaacgttttttagcgttgatcgattaggggtttagttgttcgcgagtatagtaggcgtggcgttcgggcggcgttcgggtacgtggatagtagtagtaacggcggagaagtttagttgtttgggttcgattttggagattttcggcgtagtacgcgtagttcggtatttattatttcgtttgcgtcgttaaggttggatacgtcgaataggaagttttggtttgtttcggttgtcgattt

SEQ ID NO: 12588 - DNA, 1063 bp, Artificial Sequence
  chemically treated genomic DNA (Homo sapiens) CpG-island No: 12588
  unsure (708)
aaatcgacaaccgaaacaaaccaaaacttcctattcgacgtatccaaccttaacgacgcaaacgaaataataaataccgaactacgcgtactacgccgaaaatctccaaaatcgaacccaaacaactaaacttctccgccgttactactactatccacgtacccgaacgccgcccgaacgccacgcctactatactcgcgaacaactaaacccctaatcgatcaacgctaaaaaacgttcgacgtaacgaacgcataaaaacccaccgtcgtaaaccgcgccccccccgcgcgttctacctcttactacgcgcaataacaaacccgataccgaacccgttaacactacgacgactaaacttcgactaaccgaacgaaaaaaactctacgacaaaaaaacgcgcgatactaatcgtctcctcccgcacgcaaaaaaaaaaaaacttattccgaaaaatccgcgcccaaacccgcgcgctcgaaaccgctctaacctcaaaaccgctacccgacccaaaaaccgacaccgcgtcgccaaaaacaatcattaacgaccgcaaacgaaaaaaaacgacgttaaccgaaacgcgaacaacgcaaaacaacgacgaaaacgcgaccgaaaccacgaacgcaaaaaccgaaaccgctacaaccgcaaaccgttacacgtaaacttcaaaaaactcgactaaaacgactaaatcantcgcgccgctaaactacgaaacgtaccactacgaaaacctttacgacttccctttacgttcgcacctcgaacccaccaaccataccatcattcaaacgctactcaactccataacaccaaacgcgacgccgacctcctactatataccaacgcgcctcaaccccatcaacatcctctacatcgacgccgccaacaacgttatctacaaacaatacgaaaacataataataaaacgtacgactacaaataacgcgaaaaccgaaaaaaaaacaaccacgcgaccgaaaatccccaactaataaacaacaacgaaccaccctatcaccgaacgtaaatacatatccgatataaccca

SEQ ID NO: 12589 - DNA, 849 bp, Artificial Sequence
  chemically treated genomic DNA (Homo sapiens) CpG-island No: 12589
  unsure (771, 807)
ggcgtggtttttgcgcgcggatattttggagagaaattacgcgtttcggtagttcgcggggcgagtgggcggagtcgggtcgggggcgggggtcgggcgtcgggcgagaggtggtattgtgtaggggagcgcggagttgtatttgtttgttttaggtgttagttaggtaggcgtacgtggtcggttagggttggaagtgttagcggcggtcgcgggttcggtagaaggtcgagtaggagggattacgcgtcgggggtcgcgatttttggtagggggcggtgtgttagcggagtattatgtatataggcgtttagcgttttaattatttttttcgaggaaaagaggtcggggtcgcgttggggcggcggagagtatgagggaggtcggggggcggttcggtttggagcgttgttagggagcggtgcgcgtcgtatattcgtttgggcgcggcggagggcggggagtcgggtaggtcgcgtttgcgggcggtagtcgatcgtcgggagttgttttgattttcgacgcgtacgttaggggttcggagtagttttcggttcgcgcgcgtcgtcgatatgggtaacgtagggagtatggattcgtagtagatcgattttagggcgtataacgtgtttttgaagttgtcgatgttagagttaggtgaattggaggagcgatttgttatcgtgttggtaagtgcgcggcggcggtcgggcgcggggattcggggtttcgggtcgggcggcgtagttgattttcgttttttttttttangtcgtgtcgggagcgattttttattttcgaggggangttttcgtttttttttttgtggttttttagtattttttttta

SEQ ID NO: 12590 - DNA, 849 bp, Artificial Sequence
  chemically treated genomic DNA (Homo sapiens) CpG-island No: 12590
  unsure (43, 79)
taaaaaaaaatactaaaaaaccacaaaaaaaaaaacgaaaacntcccctcgaaaataaaaaatcgctcccgacacgacntaaaaaaaaaaaacgaaaatcaactacgccgcccgacccgaaaccccgaatccccgcgcccgaccgccgccgcgcacttaccaacacgataacaaatcgctcctccaattcacctaactctaacatcgacaacttcaaaaacacgttatacgccctaaaatcgatctactacgaatccatactccctacgttacccatatcgacgacgcgcgcgaaccgaaaactactccgaacccctaacgtacgcgtcgaaaatcaaaacaactcccgacgatcgactaccgcccgcaaacgcgacctacccgactccccgccctccgccgcgcccaaacgaatatacgacgcgcaccgctccctaacaacgctccaaaccgaaccgccccccgacctccctcatactctccgccgccccaacgcgaccccgacctcttttcctcgaaaaaaataattaaaacgctaaacgcctatatacataatactccgctaacacaccgccccctaccaaaaatcgcgacccccgacgcgtaatccctcctactcgaccttctaccgaacccgcgaccgccgctaacacttccaaccctaaccgaccacgtacgcctacctaactaacacctaaaacaaacaaatacaactccgcgctcccctacacaataccacctctcgcccgacgcccgacccccgcccccgacccgactccgcccactcgccccgcgaactaccgaaacgcgtaatttctctccaaaatatccgcgcgcaaaaaccacgcc

SEQ ID NO: 12591 - DNA, 849 bp, Artificial Sequence
  chemically treated genomic DNA (Homo sapiens) CpG-island No: 12591
  unsure (43, 79)
tgaagaggagtgttggggggttataaaggggaaagcgggaatnttttttcgggaatggaggatcgttttcggtacggtntgaaggggaggggcgggggttagttgcgtcgttcggttcggggtttcgggttttcgcgttcgatcgtcgtcgcgtatttattagtacgatggtaaatcgtttttttagtttatttggttttggtatcggtagttttaaaggtacgttgtgcgttttgaaatcggtttgttgcgaatttatgttttttgcgttgtttatgtcggcggcgcgcgcgggtcgggggttgtttcgggtttttagcgtgcgcgtcggaaattagaatagttttcggcggtcggttgtcgttcgtaggcgcgatttgttcggtttttcgtttttcgtcgcgtttaggcgggtgtgcggcgcgtatcgttttttagtagcgttttaagtcgagtcgtttttcggttttttttatgtttttcgtcgttttagcgcggtttcggtttttttttttcgggaggggtagttggggcgttgggcgtttatgtgtatggtgtttcgttggtatatcgttttttgttagagatcgcggttttcggcgcgtggttttttttattcggttttttgtcgggttcgcggtcgtcgttgatatttttagttttagtcggttacgtgcgtttgtttggttagtatttggagtagataaatgtagtttcgcgtttttttatataatgttatttttcgttcggcgttcggttttcgttttcggttcggtttcgtttattcgtttcgcggattgtcgggacgcgtagtttttttttaaagtgttcgcgcgtagaaattacgtt

SEQ ID NO: 12592 - DNA, 849 bp, Artificial Sequence
  chemically treated genomic DNA (Homo sapiens) CpG-island No: 12592
  unsure (771, 807)
aacgtaatttctacgcgcgaacactttaaaaaaaaactacgcgtcccgacaatccgcgaaacgaataaacgaaaccgaaccgaaaacgaaaaccgaacgccgaacgaaaaataacattatataaaaaaacgcgaaactacatttatctactccaaatactaaccaaacaaacgcacgtaaccgactaaaactaaaaatatcaacgacgaccgcgaacccgacaaaaaaccgaataaaaaaaaccacgcgccgaaaaccgcgatctctaacaaaaaacgatataccaacgaaacaccatacacataaacgcccaacgccccaactacccctcccgaaaaaaaaaaaccgaaaccgcgctaaaacgacgaaaaacataaaaaaaaccgaaaaacgactcgacttaaaacgctactaaaaaacgatacgcgccgcacacccgcctaaacgcgacgaaaaacgaaaaaccgaacaaatcgcgcctacgaacgacaaccgaccgccgaaaactattctaatttccgacgcgcacgctaaaaacccgaaacaacccccgacccgcgcgcgccgccgacataaacaacgcaaaaaacataaattcgcaacaaaccgatttcaaaacgcacaacgtacctttaaaactaccgataccaaaaccaaataaactaaaaaaacgatttaccatcgtactaataaatacgcgacgacgatcgaacgcgaaaacccgaaaccccgaaccgaacgacgcaactaacccccgcccctccccttcanaccgtaccgaaaacgatcctccattcccgaaaaaanattcccgctttcccctttataaccccccaacactcctcttca

SEQ ID NO: 12593 - DNA, 575 bp, Artificial Sequence
  chemically treated genomic DNA (Homo sapiens) CpG-island No: 12593
gattcggtacggagcgtaggggtattagggaggataggggcgtatttcgagttatttgtgtcggttttcgagtcggcgtgtaatagtttgattttcggtcgttgtttgtcgttattcggtttgcgttgtattatttgtcgtaggagtagtcgtatgcgtcgcgaggtcgggtcgtcgtggttttcgggtgtttcgaggagtagaagtcgggattgtatggcgtcgggggggttgtcggggacggcgagggggttcggggatcgagcggcgtttcgtgtaggtatcgtgaggtagcgcggagaaggggataggaagcggtatttagtcgagttcgtcggaaattttttttttcgcggcgcggtcggtttagtagatttagttcggttttattcggttttgtatggtttagacgggcggaaagagtttgcggagttttagtttatagagtcggtatcgtttcgggattgttcgtatcgcgtgggtgttttaatttcggtgttgggttttgaagcgtttgtagtcggagttgttgttatttgatgatagttttatcgttttttgttttcgatttaggg

SEQ ID NO: 12594 - DNA, 575 bp, Artificial Sequence
  chemically treated genomic DNA (Homo sapiens) CpG-island No: 12594
ccctaaatcgaaaacaaaaaacgataaaactatcatcaaataacaacaactccgactacaaacgcttcaaaacccaacaccgaaattaaaacacccacgcgatacgaacaatcccgaaacgataccgactctataaactaaaactccgcaaactctttccgcccgtctaaaccatacaaaaccgaataaaaccgaactaaatctactaaaccgaccgcgccgcgaaaaaaaaaatttccgacgaactcgactaaataccgcttcctatccccttctccgcgctacctcacgatacctacacgaaacgccgctcgatccccgaaccccctcgccgtccccgacaacccccccgacgccatacaatcccgacttctactcctcgaaacacccgaaaaccacgacgacccgacctcgcgacgcatacgactactcctacgacaaataatacaacgcaaaccgaataacgacaaacaacgaccgaaaatcaaactattacacgccgactcgaaaaccgacacaaataactcgaaatacgcccctatcctccctaatacccctacgctccgtaccgaatc

SEQ ID NO: 12595 - DNA, 575 bp, Artificial Sequence
  chemically treated genomic DNA (Homo sapiens) CpG-island No: 12595
ttttgaatcgggaataggaagcggtaaagttgttattaggtgatagtagtttcgattgtaggcgttttagagtttagtatcgaagttggagtatttacgcggtgcgggtagtttcgggacggtgtcggttttatgggttggagtttcgtaggtttttttcgttcgtttgggttatgtagggtcgggtagggtcgggttgagtttattgagtcggtcgcgtcgcgggggaaggagttttcggcggattcggttaggtgtcgttttttgttttttttttcgcgttgttttacggtgtttgtacgggacgtcgttcgattttcgagttttttcgtcgttttcgatagttttttcggcgttatgtaatttcggtttttatttttcggggtattcggaggttacggcggttcggtttcgcggcgtatgcggttgtttttgcggtaggtggtgtagcgtaggtcgggtggcgataggtagcggtcggaggttagattgttgtacgtcggttcgggggtcgatataggtaattcggggtgcgtttttgttttttttggtgtttttgcgtttcgtgtcgggtt

SEQ ID NO: 12596 - DNA, 575 bp, Artificial Sequence
  chemically treated genomic DNA (Homo sapiens) CpG-island No: 12596
aacccgacacgaaacgcaaaaacaccaaaaaaaacaaaaacgcaccccgaattacctatatcgacccccgaaccgacgtacaacaatctaacctccgaccgctacctatcgccacccgacctacgctacaccacctaccgcaaaaacaaccgcatacgccgcgaaaccgaaccgccgtaacctccgaataccccgaaaaataaaaaccgaaattacataacgccgaaaaaactatcgaaaacgacgaaaaaactcgaaaatcgaacgacgtcccgtacaaacaccgtaaaacaacgcgaaaaaaaaaacaaaaaacgacacctaaccgaatccgccgaaaactccttcccccgcgacgcgaccgactcaataaactcaacccgaccctacccgaccctacataacccaaacgaacgaaaaaaacctacgaaactccaacccataaaaccgacaccgtcccgaaactacccgcaccgcgtaaatactccaacttcgatactaaactctaaaacgcctacaatcgaaactactatcacctaataacaactttaccgcttcctattcccgattcaaaa

SEQ ID NO: 12597 - DNA, 548 bp, Artificial Sequence
  chemically treated genomic DNA (Homo sapiens) CpG-island No: 12597
ttttcgtggacgcggtggttatttagtttttttggatcgtgtttttagggaagaacggcgttttttgagaatcggaagtgtttttttttattttcggggttgggtttttggacgttgttttgtagtggtcgcgggtttgatatacgtatttaagttgtttgcgtttcgcgaagttttacgtcgaggtttaagtagtaggcgtttcgtttcgcgatttttttcgaggtttatcgtttgtgtttagggcggcgcgggtagagtggaagtttttttgtagtttcggagtttttcgcgtagttgttcgcgttttcgtagagaggttcgcgtgtcgaggagattttggattttcgttttgagttttttattttttcgggtttttttttacggttgcgtgtttgtttttttagtttttttttttaggatattgtgcgattttcgtttttcgttttttttcggagtttttattacgtatcgttcgtttttttttcggatttgatttttggttttgttgggtttttattgagcggtagaggtttttttagttttgt

SEQ ID NO: 12598 - DNA, 548 bp, Artificial Sequence
  chemically treated genomic DNA (Homo sapiens) CpG-island No: 12598
acaaaactaaaaaaacctctaccgctcaataaaaacccaacaaaaccaaaaatcaaatccgaaaaaaaaacgaacgatacgtaataaaaactccgaaaaaaaacgaaaaacgaaaatcgcacaatatcctaaaaaaaaaaactaaaaaaacaaacacgcaaccgtaaaaaaaaacccgaaaaaataaaaaactcaaaacgaaaatccaaaatctcctcgacacgcgaacctctctacgaaaacgcgaacaactacgcgaaaaactccgaaactacaaaaaaacttccactctacccgcgccgccctaaacacaaacgataaacctcgaaaaaaatcgcgaaacgaaacgcctactacttaaacctcgacgtaaaacttcgcgaaacgcaaacaacttaaatacgtatatcaaacccgcgaccactacaaaacaacgtccaaaaacccaaccccgaaaataaaaaaaaacacttccgattctcaaaaaacgccgttcttccctaaaaacacgatccaaaaaaactaaataaccaccgcgtccacgaaaa

SEQ ID NO: 12599 - DNA, 548 bp, Artificial Sequence
  chemically treated genomic DNA (Homo sapiens) CpG-island No: 12599
gtagggttggaaaggtttttgtcgtttagtggggatttagtaaagttaaaaattaggttcgggggaagagcgaacggtgcgtgatggaggtttcgagggggagcgagaggcggaggtcgtatagtgttttgaggggggagattggaaaagtagatacgtaatcgtgggaagaaattcgaaggagtaaagaatttagagcgaaagtttaaaattttttcggtacgcgggtttttttgcgggggcgcgggtagttgcgcggggagtttcggagttgtagagaagtttttattttgttcgcgtcgttttgagtataggcgatgggtttcggagggagtcgcggagcgggacgtttgttgtttggatttcggcgtgagatttcgcgggacgtagataatttgaatgcgtgtgttagattcgcgattattataagataacgtttagagatttagtttcggaaatgaagaaagatattttcggtttttagagggcgtcgtttttttttgagaatacggtttagggaggttggatggttatcgcgtttacggaga

SEQ ID NO: 12600 - DNA, 548 bp, Artificial Sequence
  chemically treated genomic DNA (Homo sapiens) CpG-island No: 12600
tctccgtaaacgcgataaccatccaacctccctaaaccgtattctcaaaaaaaaacgacgccctctaaaaaccgaaaatatctttcttcatttccgaaactaaatctctaaacgttatcttataataatcgcgaatctaacacacgcattcaaattatctacgtcccgcgaaatctcacgccgaaatccaaacaacaaacgtcccgctccgcgactccctccgaaacccatcgcctatactcaaaacgacgcgaacaaaataaaaacttctctacaactccgaaactccccgcgcaactacccgcgcccccgcaaaaaaacccgcgtaccgaaaaaattttaaactttcgctctaaattctttactccttcgaatttcttcccacgattacgtatctacttttccaatctcccccctcaaaacactatacgacctccgcctctcgctccccctcgaaacctccatcacgcaccgttcgctcttcccccgaacctaatttttaactttactaaatccccactaaacgacaaaaacctttccaaccctac

SEQ ID NO: 12601 - DNA, 1047 bp, Artificial Sequence
  chemically treated genomic DNA (Homo sapiens) CpG-island No: 12601
gttcggcggggttatttatggttatttacggttttcggtacgcgtatttagtttagcgtcgtcgtatttcggggtttcgcgcggggttttcgtttttcggttgattcgttcgtcgttgcgatttcgggtagtttcgttagttttttatcgttgttttttcggtttatttttttcgtattgtttttttaatcggtaaaattttttatttttttaaatattgtcgtgcgcgcgcgcgtgtatatatatatatttatatatatatatttatatatattgacgttttttgcgtattttttgtattagagggagggagattcgttcgtatatcgatagagggagaggagatcgcgggggagcgcgggttggcgggcggcgagcgagcggtagtcgagagcggggatcggggagcgcggagggcgttcggcgtttaggaggtggggtcgcgttgagtcgtagtttttgtttcgtcgtcgcgttgcgatcgttcggtcgtggtttgcgttttcgagtcggatcgcggtcgttcggatttcgagttcgcgcggatgtgagatttcgggtttttggcgtttttcgatcgtcggtttcggcgcggcgttgtttcgtttaggaggcggcggtttcggttggtcgtggggtttgtggatttttaaaaatttggtttcgaggaggattattttttttcgatatgtattttttcggatagattgaatattttttcgtttattttttcgtttcgcgcggttagaggtaggcgttgagtgtgcgaagaggattcgggttgaaatttgttttttcggttttcgttttcgtttcgttttatcgttttatttttttttcggagtcgaaatttttcgggattatgtttcggaaaggtaggtaagcgtcggcgcggcgttcgttttttcgtagttcggagtcggagagttagcgaggcggcgaggtagttttcgcggtttgtagcggagtcgatagttcgtttttttttttggaggtgtagttggtggtcggggggagagatttgttttaaatacggatattttttag

SEQ ID NO: 12602 - DNA, 1047 bp, Artificial Sequence
  chemically treated genomic DNA (Homo sapiens) CpG-island No: 12602
ctaaaaaatatccgtatttaaaacaaatctctccccccgaccaccaactacacctccaaaaaaaaaaacgaactatcgactccgctacaaaccgcgaaaactacctcgccgcctcgctaactctccgactccgaactacgaaaaaacgaacgccgcgccgacgcttacctacctttccgaaacataatcccgaaaaatttcgactccgaaaaaaaaataaaacgataaaacgaaacgaaaacgaaaaccgaaaaaacaaatttcaacccgaatcctcttcgcacactcaacgcctacctctaaccgcgcgaaacgaaaaaataaacgaaaaaatattcaatctatccgaaaaaatacatatcgaaaaaaaataatcctcctcgaaaccaaatttttaaaaatccacaaaccccacgaccaaccgaaaccgccgcctcctaaacgaaacaacgccgcgccgaaaccgacgatcgaaaaacgccaaaaacccgaaatctcacatccgcgcgaactcgaaatccgaacgaccgcgatccgactcgaaaacgcaaaccacgaccgaacgatcgcaacgcgacgacgaaacaaaaactacgactcaacgcgaccccacctcctaaacgccgaacgccctccgcgctccccgatccccgctctcgactaccgctcgctcgccgcccgccaacccgcgctcccccgcgatctcctctccctctatcgatatacgaacgaatctccctccctctaatacaaaaaatacgcaaaaaacgtcaatatatataaatatatatatataaatatatatatatacacgcgcgcgcgcacgacaatatttaaaaaaataaaaaattttaccgattaaaaaaacaatacgaaaaaaataaaccgaaaaaacaacgataaaaaactaacgaaactacccgaaatcgcaacgacgaacgaatcaaccgaaaaacgaaaaccccgcgcgaaaccccgaaatacgacgacgctaaactaaatacgcgtaccgaaaaccgtaaataaccataaataaccccgccgaac

SEQ ID NO: 12603 - DNA, 1047 bp, Artificial Sequence
  chemically treated genomic DNA (Homo sapiens) CpG-island No: 12603
ttgggggatgttcgtgtttggagtaagttttttttttcgattattagttgtatttttagaagagaagacgagttgtcggtttcgttgtaagtcgcgggggttgtttcgtcgtttcgttggtttttcggtttcggattgcgggaaagcgggcgtcgcgtcggcgtttatttattttttcgaaatataatttcgggaaatttcgatttcgggagggggatggggcggtgggacggggcggggacgagaatcgggggagtagattttaattcggatttttttcgtatatttagcgtttgtttttgatcgcgcggggcgggggggtgaacggagggatgtttagtttattcggagggatgtatgtcgagaggaaatggtttttttcggagttaaatttttaaaaatttataagttttacggttagtcggggtcgtcgttttttgggcgaagtagcgtcgcgtcggagtcggcgatcgggaggcgttaggagttcggaattttatattcgcgcgggttcggagttcgggcggtcgcgattcggttcgggggcgtaggttacgatcgggcggtcgtagcgcggcggcggggtagggattgcgatttagcgcggttttattttttgggcgtcggacgtttttcgcgtttttcggttttcgttttcggttgtcgttcgttcgtcgttcgttagttcgcgttttttcgcggttttttttttttttgtcggtgtgcgagcgagtttttttttttttaatgtaggaaatgcgtaaaagacgttagtgtgtgtgagtgtgtgtgtgtgagtgtgtgtgtgtgtacgcgcgcgcgtacggtagtgtttggggaaatagaaagttttgtcggttgggggagtaatacggaaaaagtgagtcgaggagataacggtggagagttggcgaggttgttcggggtcgtagcggcgggcgggttagtcggggggcggggatttcgcgcgggatttcggggtgcggcggcgttgggttggatgcgcgtgtcgggggtcgtggatggttatggatggtttcgtcgggt

SEQ ID NO: 12604 - DNA, 1047 bp, Artificial Sequence
  chemically treated genomic DNA (Homo sapiens) CpG-island No: 12604
acccgacgaaaccatccataaccatccacgacccccgacacgcgcatccaacccaacgccgccgcaccccgaaatcccgcgcgaaatccccgccccccgactaacccgcccgccgctacgaccccgaacaacctcgccaactctccaccgttatctcctcgactcactttttccgtattactcccccaaccgacaaaactttctatttccccaaacactaccgtacgcgcgcgcgtacacacacacacactcacacacacacactcacacacactaacgtcttttacgcatttcctacattaaaaaaaaaaaaactcgctcgcacaccgacaaaaaaaaaaaaaaccgcgaaaaaacgcgaactaacgaacgacgaacgaacgacaaccgaaaacgaaaaccgaaaaacgcgaaaaacgtccgacgcccaaaaaataaaaccgcgctaaatcgcaatccctaccccgccgccgcgctacgaccgcccgatcgtaacctacgcccccgaaccgaatcgcgaccgcccgaactccgaacccgcgcgaatataaaattccgaactcctaacgcctcccgatcgccgactccgacgcgacgctacttcgcccaaaaaacgacgaccccgactaaccgtaaaacttataaatttttaaaaatttaactccgaaaaaaaccatttcctctcgacatacatccctccgaataaactaaacatccctccgttcacccccccgccccgcgcgatcaaaaacaaacgctaaatatacgaaaaaaatccgaattaaaatctactcccccgattctcgtccccgccccgtcccaccgccccatccccctcccgaaatcgaaatttcccgaaattatatttcgaaaaaataaataaacgccgacgcgacgcccgctttcccgcaatccgaaaccgaaaaaccaacgaaacgacgaaacaacccccgcgacttacaacgaaaccgacaactcgtcttctcttctaaaaatacaactaataatcgaaaaaaaaaacttactccaaacacgaacatcccccaa

SEQ ID NO: 12605 - DNA, 661 bp, Artificial Sequence
  chemically treated genomic DNA (Homo sapiens) CpG-island No: 12605
aatcgttcgcgttagggcgtaacgttataaggtgtagggagtgtgcggggtggggcgaaaggggatttaagagtttttgtggttcggagtgtcgggtcgtcggttttttatttttgttttcggggtagacggagtgatttcggtttttatttttcgtttcgattatggtagtgtttaatggtttttttaagattaaaatttgcgaggtcgtgagtttgaagtttatagtttggtcgttgcgttatgcggtgggatttcggtcgtagattttttttttcgatttttatattgtttttaatgtggacgattcgcgtatcggttaaacggttattaagtagaagattaatagttcggtttggtacgacgagttcgttatcgatgtgtgtaacggacgtaagatcgagttggttgttttttacgatgtttttataggttacgacgatttcgtggttaattgtattatttagtttgaggagttgttgtagaacgggagtcgttatttcgaggattgggtgagtgcggcgttttttcgtcgtttcgggaattcggttgtggggtttcggggaaagattcgttggttttgatcgtagggtttcgggatttattgacgattggggtgtgtgtgtttgtaagttttagtttttttggggaggtatatttt

SEQ ID NO: 12606 - DNA, 661 bp, Artificial Sequence
  chemically treated genomic DNA (Homo sapiens) CpG-island No: 12606
aaaatatacctccccaaaaaaactaaaacttacaaacacacacaccccaatcgtcaataaatcccgaaaccctacgatcaaaaccaacgaatctttccccgaaaccccacaaccgaattcccgaaacgacgaaaaaacgccgcactcacccaatcctcgaaataacgactcccgttctacaacaactcctcaaactaaataatacaattaaccacgaaatcgtcgtaacctataaaaacatcgtaaaaaacaaccaactcgatcttacgtccgttacacacatcgataacgaactcgtcgtaccaaaccgaactattaatcttctacttaataaccgtttaaccgatacgcgaatcgtccacattaaaaacaatataaaaatcgaaaaaaaaaatctacgaccgaaatcccaccgcataacgcaacgaccaaactataaacttcaaactcacgacctcgcaaattttaatcttaaaaaaaccattaaacactaccataatcgaaacgaaaaataaaaaccgaaatcactccgtctaccccgaaaacaaaaataaaaaaccgacgacccgacactccgaaccacaaaaactcttaaatcccctttcgccccaccccgcacactccctacaccttataacgttacgccctaacgcgaacgatt

SEQ ID NO: 12607 - DNA, 661 bp, Artificial Sequence
  chemically treated genomic DNA (Homo sapiens) CpG-island No: 12607
gaagtgtatttttttaaggaaattgagatttataggtatatatattttagtcgttaataagtttcggagttttacgattaagattagcgagttttttttcgggattttataatcgggttttcggaacgacggggaggcgtcgtatttatttagttttcgaagtggcggttttcgttttgtagtagttttttaaattggatggtgtagttggttacgaagtcgtcgtagtttatgggggtatcgtgaaagatagttagttcgattttgcgttcgttgtatatatcggtgacgaattcgtcgtgttaggtcgggttgttggttttttgtttggtggtcgtttggtcgatgcgcgagtcgtttatattgagggtaatgtaggggtcgagaaggaaagtttgcggtcggggttttatcgtatggcgtagcgattaggttgtgggttttaagtttacggtttcgtagattttgattttaagaaggttattgaatattattatggtcggggcggggagtgggggtcggggttatttcgtttgtttcgagggtaggaatgaagaatcgacggttcggtatttcgagttatagggatttttgggttttttttcgttttatttcgtatattttttatattttgtggcgttgcgttttggcgcgggcgatt

SEQ ID NO: 12608 - DNA, 661 bp, Artificial Sequence
  chemically treated genomic DNA (Homo sapiens) CpG-island No: 12608
aatcgcccgcgccaaaacgcaacgccacaaaatataaaaaatatacgaaataaaacgaaaaaaaacccaaaaatccctataactcgaaataccgaaccgtcgattcttcattcctaccctcgaaacaaacgaaataaccccgacccccactccccgccccgaccataataatattcaataaccttcttaaaatcaaaatctacgaaaccgtaaacttaaaacccacaacctaatcgctacgccatacgataaaaccccgaccgcaaactttccttctcgacccctacattaccctcaatataaacgactcgcgcatcgaccaaacgaccaccaaacaaaaaaccaacaacccgacctaacacgacgaattcgtcaccgatatatacaacgaacgcaaaatcgaactaactatctttcacgatacccccataaactacgacgacttcgtaaccaactacaccatccaatttaaaaaactactacaaaacgaaaaccgccacttcgaaaactaaataaatacgacgcctccccgtcgttccgaaaacccgattataaaatcccgaaaaaaaactcgctaatcttaatcgtaaaactccgaaacttattaacgactaaaatatatatacctataaatctcaatttccttaaaaaaatacacttc

SEQ ID NO: 12609 - DNA, 571 bp, Artificial Sequence
  chemically treated genomic DNA (Homo sapiens) CpG-island No: 12609
tttcgtttgttgcgttgtcgttttgttttttttttcgttttttttttttcgttttcgtttttttttttcgttttttttttttcgttttttttcgttttttttttttcgttttcgtttttttttttttttttttttttcgttttcgttcgcgttcgttcgttttttcgtttttgttcgttggcgttttttcgttttcgcgcgcgttttcgttcgcggttcgttttcgttcgttttttcgttttttcgttcgtttttttttttcgttttttttcggcgtcgttttcgtcgttttttttttttttttgttttttcgtttttcgttttgtttttttgtttttttttttttcgtttttttttttttcgttttttttttttttttttttttttttgtttttcgttttttttcgcgtcgcgtttttcgttcgcgtcgtgtcgtttgggttgttttcggcgggtgcgcggcggcgcgtcgtcggttcgcgtcgttttttttttgtcggggtcggtttcgggttcgcggtcgttacgttttcgttcgttttttgttgtcggttcgcgggtcggtggtttt

SEQ ID NO: 12610 - DNA, 571 bp, Artificial Sequence
  chemically treated genomic DNA (Homo sapiens) CpG-island No: 12610
aaaaccaccgacccgcgaaccgacaacaaaaaacgaacgaaaacgtaacgaccgcgaacccgaaaccgaccccgacaaaaaaaaaacgacgcgaaccgacgacgcgccgccgcgcacccgccgaaaacaacccaaacgacacgacgcgaacgaaaaacgcgacgcgaaaaaaaacgaaaaacaaaaaaaaaaaaaaaaaaaaaaaaaacgaaaaaaaaaaaaacgaaaaaaaaaaaaacaaaaaaacaaaacgaaaaacgaaaaaacaaaaaaaaaaaaaaaacgacgaaaacgacgccgaaaaaaaacgaaaaaaaaaaacgaacgaaaaaacgaaaaaacgaacgaaaacgaaccgcgaacgaaaacgcgcgcgaaaacgaaaaaacgccaacgaacaaaaacgaaaaaacgaacgaacgcgaacgaaaacgaaaaaaaaaaaaaaaaaaaaaaacgaaaacgaaaaaaaaaaaacgaaaaaaaacgaaaaaaaaaaaacgaaaaaaaaaaacgaaaacgaaaaaaaaaaaacgaaaaaaaaaacaaaacgacaacgcaacaaacgaaa

SEQ ID NO: 12611 - DNA, 571 bp, Artificial Sequence
  chemically treated genomic DNA (Homo sapiens) CpG-island No: 12611
gagattatcgattcgcgagtcggtagtaggaaacgggcggaggcgtggcggtcgcggattcggggtcggtttcggtagagggagagcggcgcggatcgacgacgcgtcgtcgcgtattcgtcggaagtagtttaggcggtacggcgcgggcgagaggcgcggcgcggaggagagcgggaggtaggagggggggagaggggggggaggacgagggaaagagaggcggagggggaggagatagggaagtagggcggagggcgggggggtaggggggggggggaggcggcggagacggcgtcggggggggacgggggggggaggcgggcggggaggcgggggggcgggcgagggcgggtcgcgggcgagagcgcgcgcgagaacggagagacgttagcgggtaggggcgagaggacgggcgggcgcgggcgagggcgaggagagggaggggggagggagacgaagacggggaggggggggcgggggggggcgggaggggaggagcggggagggggggcgagggcgaggggggggaggcgggggggagggtagagcggtagcgtagtaggcggag

SEQ ID NO: 12612 - DNA, 571 bp, Artificial Sequence
  chemically treated genomic DNA (Homo sapiens) CpG-island No: 12612
ctccgcctactacgctaccgctctaccctcccccccgcctcccccccctcgccctcgccccccctccccgctcctcccctcccgcccccccccgcccccccctccccgtcttcgtctccctcccccctccctctcctcgccctcgcccgcgcccgcccgtcctctcgcccctacccgctaacgtctctccgttctcgcgcgcgctctcgcccgcgacccgccctcgcccgcccccccgcctccccgcccgcctcccccccccgtccccccccgacgccgtctccgccgcctcccccccccccctacccccccgccctccgccctacttccctatctcctccccctccgcctctctttccctcgtcctcccccccctctccccccctcctacctcccgctctcctccgcgccgcgcctctcgcccgcgccgtaccgcctaaactacttccgacgaatacgcgacgacgcgtcgtcgatccgcgccgctctccctctaccgaaaccgaccccgaatccgcgaccgccacgcctccgcccgtttcctactaccgactcgcgaatcgataatctc

SEQ ID NO: 12613 - DNA, 605 bp, Artificial Sequence
  chemically treated genomic DNA (Homo sapiens) CpG-island No: 12613
ttacgttcggggcgttgttttttttttcggaagtttggttttgtttttgcgtttatttgtgcgggaattcggttatcgcgtgtttcgggacggttttcgcgcgggttggggcgggagagttcggcgcgttcgagggttgtttttcgtagagtcgcgtcgtttcggtagcgtttcggggttcggtcggagcgcgatttttcgtcgttaggttcgggattcgatcgggagaggcgtagggttgttttttagtattcgcgggcgttcggtcgtagggggaaggaggaggcggcgacgagggttgggagattcgtgggcgtcggtttagcgcgtcgcgttttggggttgaggtttaggggtaggggtcgtgcgggggtcggtaggcgcgggcggcggcgagcgcggtttttcggattttttttttgtatcgcggcggcggcggttgttaggggcgcgcgcggggttttttacggcgggagcgcggtcgagttcggggaagttcgttagtattttttcgttcgttcgcgtcgagtcgagttatgtcgagttcgggttcggcgtgttgtatagttatttttcgcgcggcgtcggcggtttcggggttacgt

SEQ ID NO: 12614 - DNA, 605 bp, Artificial Sequence
  chemically treated genomic DNA (Homo sapiens) CpG-island No: 12614
acgtaaccccgaaaccgccgacgccgcgcgaaaaataactatacaacacgccgaacccgaactcgacataactcgactcgacgcgaacgaacgaaaaaatactaacgaacttccccgaactcgaccgcgctcccgccgtaaaaaaccccgcgcgcgcccctaacaaccgccgccgccgcgatacaaaaaaaaaatccgaaaaaccgcgctcgccgccgcccgcgcctaccgacccccgcacgacccctacccctaaacctcaaccccaaaacgcgacgcgctaaaccgacgcccacgaatctcccaaccctcgtcgccgcctcctccttccccctacgaccgaacgcccgcgaatactaaaaaacaaccctacgcctctcccgatcgaatcccgaacctaacgacgaaaaatcgcgctccgaccgaaccccgaaacgctaccgaaacgacgcgactctacgaaaaacaaccctcgaacgcgccgaactctcccgccccaacccgcgcgaaaaccgtcccgaaacacgcgataaccgaattcccgcacaaataaacgcaaaaacaaaaccaaacttccgaaaaaaaaaacaacgccccgaacgtaa

SEQ ID NO: 12615 - DNA, 605 bp, Artificial Sequence
  chemically treated genomic DNA (Homo sapiens) CpG-island No: 12615
gcgtggtttcggagtcgtcggcgtcgcgcgaggaatagttgtgtagtacgtcgagttcggattcggtatggttcggttcggcgcgggcgggcgagaggatgttggcgggttttttcgggttcggtcgcgttttcgtcgtggagggtttcgcgcgcgtttttagtagtcgtcgtcgtcgcggtgtaggggaggggttcggagagtcgcgttcgtcgtcgttcgcgtttgtcggttttcgtacggtttttgtttttgagttttagttttagggcgcggcgcgttgggtcggcgtttacggattttttagttttcgtcgtcgttttttttttttttttgcggtcgggcgttcgcggatgttgaggggtagttttgcgtttttttcggtcggatttcgggtttgacggcgggagatcgcgtttcggtcgggtttcgaggcgttgtcggggcggcgcggttttgcggggagtagttttcgggcgcgtcgagttttttcgttttagttcgcgcggggatcgtttcggagtacgcggtggtcgagttttcgtataggtaaacgtaggggtagggttaggttttcgggggggaagatagcgtttcgagcgtgg

SEQ ID NO: 12616 - DNA, 605 bp, Artificial Sequence
  chemically treated genomic DNA (Homo sapiens) CpG-island No: 12616
ccacgctcgaaacgctatcttcccccccgaaaacctaaccctacccctacgtttacctatacgaaaactcgaccaccgcgtactccgaaacgatccccgcgcgaactaaaacgaaaaaactcgacgcgcccgaaaactactccccgcaaaaccgcgccgccccgacaacgcctcgaaacccgaccgaaacgcgatctcccgccgtcaaacccgaaatccgaccgaaaaaaacgcaaaactacccctcaacatccgcgaacgcccgaccgcaaaaaaaaaaaaaaaacgacgacgaaaactaaaaaatccgtaaacgccgacccaacgcgccgcgccctaaaactaaaactcaaaaacaaaaaccgtacgaaaaccgacaaacgcgaacgacgacgaacgcgactctccgaacccctcccctacaccgcgacgacgacgactactaaaaacgcgcgcgaaaccctccacgacgaaaacgcgaccgaacccgaaaaaacccgccaacatcctctcgcccgcccgcgccgaaccgaaccataccgaatccgaactcgacgtactacacaactattcctcgcgcgacgccgacgactccgaaaccacgc

SEQ ID NO: 12617 - DNA, 587 bp, Artificial Sequence
  chemically treated genomic DNA (Homo sapiens) CpG-island No: 12617
  unsure (27..28, 30..)
cgttagttaggtaagaaggataatttnnnnnnttcgcgatttcgtatttcgattcgcgttcgtttttttttttcgtcgtatttgttagcgttttaatacgtttcgtcgcgagcgattttttcgatttcgtatacgtttcggcgtatgggagggaggagtagcggagagtaggagggcggaagacgaggatacgtgggagtcgggagagagaaagagatttagatattattgcggggggggcggtgggagcgtaagggtaggagggaggcgggaaaggcgaggaaagaagagcggacgtggggggagcgaagaagggaagggagaagtgagaaagaggaatgtaaatgtagagggggttgtgagaggggagagataggaagtagaggttacgggggaggagggtgagatggagacgtttgggaggggataggaatggtagtaggtggatggtgaaggagggtggggttggagggtagaagggaggagggcgagcgaggggatggggatggtaggtacgtgttatagatatgcgcgtatatacgtatatatatatatatatatatatatagtttgtgtttttttttttg

SEQ ID NO: 12618 - DNA, 587 bp, Artificial Sequence
  chemically treated genomic DNA (Homo sapiens) CpG-island No: 12618
  unsure (556..557, 559..)
caaaaaaaaaaacacaaactatatatatatatatatatatatatacgtatatacgcgcatatctataacacgtacctaccatccccatcccctcgctcgccctcctcccttctaccctccaaccccaccctccttcaccatccacctactaccattcctatcccctcccaaacgtctccatctcaccctcctcccccgtaacctctacttcctatctctcccctctcacaaccccctctacatttacattcctctttctcacttctcccttcccttcttcgctccccccacgtccgctcttctttcctcgcctttcccgcctccctcctacccttacgctcccaccgccccccccgcaataatatctaaatctctttctctctcccgactcccacgtatcctcgtcttccgccctcctactctccgctactcctccctcccatacgccgaaacgtatacgaaatcgaaaaaatcgctcgcgacgaaacgtattaaaacgctaacaaatacgacgaaaaaaaaaaacgaacgcgaatcgaaatacgaaatcgcgaannnnnnaaattatccttcttacctaactaacg

SEQ ID NO: 12619 - DNA, 587 bp, Artificial Sequence
  chemically treated genomic DNA (Homo sapiens) CpG-island No: 12619
  unsure (556..557, 559..)
tagagaaagagatatagattgtgtgtgtgtgtgtgtgtgtgtgtgcgtgtgtgcgcgtatgtttgtgatacgtgtttattatttttattttttcgttcgttttttttttttttattttttaattttatttttttttattatttatttattattatttttatttttttttagacgtttttattttatttttttttttcgtaatttttattttttatttttttttttttataattttttttatatttatattttttttttttattttttttttttttttttcgttttttttacgttcgttttttttttttcgtttttttcgttttttttttgtttttgcgtttttatcgtttttttcgtaatgatatttaaatttttttttttttttcggtttttacgtgttttcgtttttcgtttttttgtttttcgttgttttttttttttatacgtcgaggcgtgtgcgaggtcggggaggtcgttcgcggcgagacgtgttggggcgttggtaggtgcggcggggggggggggcgggcgcgagtcggggtgcggagtcgcgggnnnnnngagttgttttttttgtttagttagcg

SEQ ID NO: 12620 - DNA, 587 bp, Artificial Sequence
  chemically treated genomic DNA (Homo sapiens) CpG-island No: 12620
  unsure (27..28, 30..)
cgctaactaaacaaaaaaaacaactcnnnnnncccgcgactccgcaccccgactcgcgcccgccccccccccccgccgcacctaccaacgccccaacacgtctcgccgcgaacgacctccccgacctcgcacacgcctcgacgtataaaaaaaaaaaacaacgaaaaacaaaaaaacgaaaaacgaaaacacgtaaaaaccgaaaaaaaaaaaaaaatttaaatatcattacgaaaaaaacgataaaaacgcaaaaacaaaaaaaaaacgaaaaaaacgaaaaaaaaaaaacgaacgtaaaaaaaacgaaaaaaaaaaaaaaaaaataaaaaaaaaaaatataaatataaaaaaaattataaaaaaaaaaaaataaaaaataaaaattacgaaaaaaaaaaataaaataaaaacgtctaaaaaaaaataaaaataataataaataaataataaaaaaaaataaaattaaaaaataaaaaaaaaaaaaacgaacgaaaaaataaaaataataaacacgtatcacaaacatacgcgcacacacgcacacacacacacacacacacacacaatctatatctctttctcta

SEQ ID NO: 12621 - DNA, 913 bp, Artificial Sequence
  chemically treated genomic DNA (Homo sapiens) CpG-island No: 12621
agacggagcgcggggggcggggcggggttcgcgttaagggagcgcggaagggcgggataggtcgtgggcggggtttgggtggggcggacggttgggggtggggaaaggggcgtaatcgggagaatttttcgaggcggaggacgtaggggggcggggaaggcgggttatggggcgggggcggtggggcgagttatggggcggggacggggcggggcgtagtcgggagggttttttcgaggcggaattgcgtggggggcggggcgggtcgtgggacgggcggaggcgttcgagtttcgttttttcggcgtttttttatttcgagttcgatttagttcgcggttatttgcgtttcgtttttgtcggtcgcgttcgagtttagcgtcgcgagtcgtttttcggcgggttggtttttggtttcggaagcgcgagcgtttatttagcggcgagtggtttcgttttcgcggatagagcgcgcgttttttggttcggttcgcgaggggttttcggcgcggttttcgagtatttttcgtcgggtggagcgggtcgagcgcgtaggatgattagtttcgcgtcgtttaaagtcgggagatcgattgtttgagttcggaagcgtagaagttggtaagaggaaagcgttttcgaaattttttttcgtgattgcggcggggttttaggggtttttagttcgtttcgaggttaatggtaggcgtaggtgttcgggaggcgtggggtgggttttggcgggattttagcgcggtgggagcgggcgtagtgggcgcgggttcgtgagtggttcggcgagcggcgttttttatgcgttaggaagtacgttttattgtgggacgttatttttaaggacgaaaaggtatatggttttttttcgttcgaggtgatgggttgtagataggttttg

SEQ ID NO: 12622 - DNA, 913 bp, Artificial Sequence
  chemically treated genomic DNA (Homo sapiens) CpG-island No: 12622
caaaacctatctacaacccatcacctcgaacgaaaaaaaaccatataccttttcgtccttaaaaataacgtcccacaataaaacgtacttcctaacgcataaaaaacgccgctcgccgaaccactcacgaacccgcgcccactacgcccgctcccaccgcgctaaaatcccgccaaaacccaccccacgcctcccgaacacctacgcctaccattaacctcgaaacgaactaaaaacccctaaaaccccgccgcaatcacgaaaaaaaatttcgaaaacgctttcctcttaccaacttctacgcttccgaactcaaacaatcgatctcccgactttaaacgacgcgaaactaatcatcctacgcgctcgacccgctccacccgacgaaaaatactcgaaaaccgcgccgaaaacccctcgcgaaccgaaccaaaaaacgcgcgctctatccgcgaaaacgaaaccactcgccgctaaataaacgctcgcgcttccgaaaccaaaaaccaacccgccgaaaaacgactcgcgacgctaaactcgaacgcgaccgacaaaaacgaaacgcaaataaccgcgaactaaatcgaactcgaaataaaaaaacgccgaaaaaacgaaactcgaacgcctccgcccgtcccacgacccgccccgccccccacgcaattccgcctcgaaaaaaccctcccgactacgccccgccccgtccccgccccataactcgccccaccgcccccgccccataacccgccttccccgcccccctacgtcctccgcctcgaaaaattctcccgattacgcccctttccccacccccaaccgtccgccccacccaaaccccgcccacgacctatcccgcccttccgcgctcccttaacgcgaaccccgccccgccccccgcgctccgtct

SEQ ID NO: 12623 - DNA, 913 bp, Artificial Sequence
  chemically treated genomic DNA (Homo sapiens) CpG-island No: 12623
tagagtttgtttgtagtttattatttcgggcggggagagattatgtgttttttcgtttttggaggtggcgttttataataaagcgtgttttttagcgtatgagggacgtcgttcgtcgggttatttacggattcgcgtttattgcgttcgtttttatcgcgttggggtttcgttagagtttattttacgtttttcgggtatttgcgtttgttattgatttcggaacgagttggaagtttttgaaatttcgtcgtagttacgaaagaaagtttcggaagcgttttttttttattagtttttgcgttttcgggtttaaatagtcgatttttcggttttgagcggcgcggggttggttattttgcgcgttcggttcgttttattcggcgggaaatgttcggggatcgcgtcgggagtttttcgcgggtcgggttagggggcgcgcgttttgttcgcggagacggagttattcgtcgttaagtgaacgttcgcgttttcggggttaggagttagttcgtcggggagcggttcgcggcgttgggttcgggcgcggtcgataggggcggggcgtaggtggtcgcgggttgagtcgggttcggggtggaagggcgtcggggaagcgggattcgggcgttttcgttcgttttacggttcgtttcgttttttacgtagtttcgtttcggaggggttttttcggttacgtttcgtttcgttttcgttttatgattcgttttatcgttttcgttttatgattcgtttttttcgtttttttgcgtttttcgtttcggagggttttttcggttacgtttttttttttatttttaatcgttcgttttatttaggtttcgtttacggtttgtttcgttttttcgcgtttttttaacgcgagtttcgtttcgtttttcgcgtttcgttt

SEQ ID NO: 12624 - DNA, 913 bp, Artificial Sequence
  chemically treated genomic DNA (Homo sapiens) CpG-island No: 12624
aaacgaaacgcgaaaaacgaaacgaaactcgcgttaaaaaaacgcgaaaaaacgaaacaaaccgtaaacgaaacctaaataaaacgaacgattaaaaataaaaaaaaaaacgtaaccgaaaaaaccctccgaaacgaaaaacgcaaaaaaacgaaaaaaacgaatcataaaacgaaaacgataaaacgaatcataaaacgaaaacgaaacgaaacgtaaccgaaaaaacccctccgaaacgaaactacgtaaaaaacgaaacgaaccgtaaaacgaacgaaaacgcccgaatcccgcttccccgacgcccttccaccccgaacccgactcaacccgcgaccacctacgccccgcccctatcgaccgcgcccgaacccaacgccgcgaaccgctccccgacgaactaactcctaaccccgaaaacgcgaacgttcacttaacgacgaataactccgtctccgcgaacaaaacgcgcgccccctaacccgacccgcgaaaaactcccgacgcgatccccgaacatttcccgccgaataaaacgaaccgaacgcgcaaaataaccaaccccgcgccgctcaaaaccgaaaaatcgactatttaaacccgaaaacgcaaaaactaataaaaaaaaaacgcttccgaaactttctttcgtaactacgacgaaatttcaaaaacttccaactcgttccgaaatcaataacaaacgcaaatacccgaaaaacgtaaaataaactctaacgaaaccccaacgcgataaaaacgaacgcaataaacgcgaatccgtaaataacccgacgaacgacgtccctcatacgctaaaaaacacgctttattataaaacgccacctccaaaaacgaaaaaacacataatctctccccgcccgaaataataaactacaaacaaactcta

SEQ ID NO: 12625 - DNA, 689 bp, Artificial Sequence
  chemically treated genomic DNA (Homo sapiens) CpG-island No: 12625
  unsure (96..)
gggatacgttttaaaggtttacgaggttttttttatattatttatggtttttaggattagttgtaattcgttaacgttattcggcgatataatgtnnttgtcgtaaacgcgttgtttatattggtgattacgggtttagatatagtgtggggagtggggtggcggggggcgttggaagttattttgattaattgtgacgtatagtatttgcgagaatgtcgtttacgatattcgtcgatgatacgttatcgcgttatcgattattgtacgtttgaggatttttttgatcgtatagattggatagttttgcgacgttcgttcgcgtttatatatggggtgggtgggtgggtgcggttgacgacggatgtgtttcgtgttgagtatattacggggtttatcgggtattgatattattcgtagatttaaagtatacgtgagttgtttgggtcggtttgtcgtttatggtcgtttggtttgttgttgttgtttatttgttgataggtgcggcggtttgtatcgtttttttattttatcgatgttttataggatttgttgtaaattcgttttcgataatttacgatgtttttatgtcgcgatcgcgatgattatttaaggtgttacgggttttgatatagtaggggaagtggggggaattttggtttataatttttatttattgtatttgttgg

SEQ ID NO: 12626 - DNA, 689 bp, Artificial Sequence
  chemically treated genomic DNA (Homo sapiens) CpG-island No: 12626
  unsure (593..)
ccaacaaatacaataaataaaaattataaaccaaaattccccccacttcccctactatatcaaaacccgtaacaccttaaataatcatcgcgatcgcgacataaaaacatcgtaaattatcgaaaacgaatttacaacaaatcctataaaacatcgataaaataaaaaaacgatacaaaccgccgcacctatcaacaaataaacaacaacaacaaaccaaacgaccataaacgacaaaccgacccaaacaactcacgtatactttaaatctacgaataatatcaatacccgataaaccccgtaatatactcaacacgaaacacatccgtcgtcaaccgcacccacccacccaccccatatataaacgcgaacgaacgtcgcaaaactatccaatctatacgatcaaaaaaatcctcaaacgtacaataatcgataacgcgataacgtatcatcgacgaatatcgtaaacgacattctcgcaaatactatacgtcacaattaatcaaaataacttccaacgccccccgccaccccactccccacactatatctaaacccgtaatcaccaatataaacaacgcgtttacgacaannacattatatcgccgaataacgttaacgaattacaactaatcctaaaaaccataaataatataaaaaaaacctcgtaaacctttaaaacgtatccc

SEQ ID NO: 12627 - DNA, 689 bp, Artificial Sequence
  chemically treated genomic DNA (Homo sapiens) CpG-island No: 12627
  unsure (593..)
ttagtaaatgtagtaagtgggagttgtgagttaagattttttttattttttttattatattaaaattcgtggtattttaggtaattatcgcgatcgcggtatggggatatcgtaggttgtcgaaggcgggtttatagtaaattttgtaagatatcggtgaagtgggaaggcggtataagtcgtcgtatttgttagtaggtaagtagtagtaataagttaagcggttataggcgataagtcggtttaagtaatttacgtatattttaaatttacgggtaatattagtgttcggtaaatttcgtggtgtgtttaatacggaatatattcgtcgttagtcgtatttatttatttattttatatgtaaacgcgagcgaacgtcgtaaagttatttagtttatacggttaaaaagatttttaagcgtgtagtagtcgatggcgcggtagcgtattatcggcgggtgtcgtaggcggtattttcgtaaatgttgtacgttatagttggttagggtagtttttaacgtttttcgttattttattttttatattatgtttaaattcgtggttattagtgtaagtaacgcgtttgcggtaanngtattatatcgtcgggtggcgttggcgggttatagttaattttgaaagttataggtggtgtgggaagggtttcgtgaatttttagggcgtatttt

SEQ ID NO: 12628 - DNA, 689 bp, Artificial Sequence
  chemically treated genomic DNA (Homo sapiens) CpG-island No: 12628
  unsure (96..)
aaaatacgccctaaaaattcacgaaacccttcccacaccacctataactttcaaaattaactataacccgccaacgccacccgacgatataatacnnttaccgcaaacgcgttacttacactaataaccacgaatttaaacataatataaaaaataaaataacgaaaaacgttaaaaactaccctaaccaactataacgtacaacatttacgaaaataccgcctacgacacccgccgataatacgctaccgcgccatcgactactacacgcttaaaaatctttttaaccgtataaactaaataactttacgacgttcgctcgcgtttacatataaaataaataaataaatacgactaacgacgaatatattccgtattaaacacaccacgaaatttaccgaacactaatattacccgtaaatttaaaatatacgtaaattacttaaaccgacttatcgcctataaccgcttaacttattactactacttacctactaacaaatacgacgacttataccgccttcccacttcaccgatatcttacaaaatttactataaacccgccttcgacaacctacgatatccccataccgcgatcgcgataattacctaaaataccacgaattttaatataataaaaaaaataaaaaaaatcttaactcacaactcccacttactacatttactaa

SEQ ID NO: 12629 - DNA, 586 bp, Artificial Sequence
  chemically treated genomic DNA (Homo sapiens) CpG-island No: 12629
ttgtcggttcggtatcgtcgttatcgttgatatattttttattacgtagtgttagtattagagaattgaatatcgttttgtcgaagaatttcggcgcgttgatgtcgtgtagtacggagagacgttgcgcgacggtgcggttttttttttttagcgtatcgcggttgatcgacgggttggtatttaataattagaaggtgatggtataacgttgtagcgtttcgcgcgcgtttgcggttagtagttgtagcgtgcgagaatgcgtcgggttgatatgtaatttattattttgtagggtaattagtttttgacgttgtattttatttgttagcgtattaataacgttcggtaattcgtcgcgattttagcgtaggaatagtttcgtttttagtattgggtaaagtatattgacgtgttttattaatacgtcgcgggagatgtggcgatgttgggtgacgattgtcgttattagcgaaggtagtattaatatatgcgtaatggttgttgcgatagtaggttattagtatcgtttgttcgcgcggtagaatgatgatgtcgtcgattgtgtttttttcgattttaaatt

SEQ ID NO: 12630 - DNA, 586 bp, Artificial Sequence
  chemically treated genomic DNA (Homo sapiens) CpG-island No: 12630
aatttaaaatcgaaaaaaacacaatcgacgacatcatcattctaccgcgcgaacaaacgatactaataacctactatcgcaacaaccattacgcatatattaatactaccttcgctaataacgacaatcgtcacccaacatcgccacatctcccgcgacgtattaataaaacacgtcaatatactttacccaatactaaaaacgaaactattcctacgctaaaatcgcgacgaattaccgaacgttattaatacgctaacaaataaaatacaacgtcaaaaactaattaccctacaaaataataaattacatatcaacccgacgcattctcgcacgctacaactactaaccgcaaacgcgcgcgaaacgctacaacgttataccatcaccttctaattattaaataccaacccgtcgatcaaccgcgatacgctaaaaaaaaaaaaccgcaccgtcgcgcaacgtctctccgtactacacgacatcaacgcgccgaaattcttcgacaaaacgatattcaattctctaatactaacactacgtaataaaaaatatatcaacgataacgacgataccgaaccgacaa

SEQ ID NO: 12631 - DNA, 586 bp, Artificial Sequence
  chemically treated genomic DNA (Homo sapiens) CpG-island No: 12631
agtttgaagtcgagaaagatataatcggcgatattattattttgtcgcgcgagtaagcggtgttgatgatttattatcgtaataattattgcgtatatgttggtgttgttttcgttgatggcggtaatcgttatttagtatcgttatatttttcgcgacgtattgatggagtacgttaatgtgttttatttaatgttgaaagcggagttgtttttgcgttgggatcgcgacgagttgtcggacgttattgatgcgttggtaaatgagatgtaacgttaggggttgattattttgtaagatgatgagttgtatattaattcggcgtattttcgtacgttatagttgttggtcgtaggcgcgcgcgaaacgttgtaacgttatgttattattttttggttgttgagtgttaattcgtcgattaatcgcggtacgttggagaaagagagtcgtatcgtcgcgtaacgttttttcgtgttgtacggtattaacgcgtcggagtttttcgataaggcggtgtttagttttttggtgttgatattgcgtgatgaagggtatattagcgatagcggcgatgtcgaatcggtag

SEQ ID NO: 12632 - DNA, 586 bp, Artificial Sequence
  chemically treated genomic DNA (Homo sapiens) CpG-island No: 12632
ctaccgattcgacatcgccgctatcgctaatatacccttcatcacgcaatatcaacaccaaaaaactaaacaccgccttatcgaaaaactccgacgcgttaataccgtacaacacgaaaaaacgttacgcgacgatacgactctctttctccaacgtaccgcgattaatcgacgaattaacactcaacaaccaaaaaataataacataacgttacaacgtttcgcgcgcgcctacgaccaacaactataacgtacgaaaatacgccgaattaatatacaactcatcatcttacaaaataatcaacccctaacgttacatctcatttaccaacgcatcaataacgtccgacaactcgtcgcgatcccaacgcaaaaacaactccgctttcaacattaaataaaacacattaacgtactccatcaatacgtcgcgaaaaatataacgatactaaataacgattaccgccatcaacgaaaacaacaccaacatatacgcaataattattacgataataaatcatcaacaccgcttactcgcgcgacaaaataataatatcgccgattatatctttctcgacttcaaact

SEQ ID NO: 12633 - DNA, 531 bp, Artificial Sequence
  chemically treated genomic DNA (Homo sapiens) CpG-island No: 12633
ttcgtcgaacgcgtttagtatattcgcgatcgtatgagcgcggatgggattaagtaaagtttggtggtgtcgaacgtaggttagataaggcgtttacgtcgtatttgtatgattggtatatttgttattttgtgcgtattgtcggatgcgatgttggcgtattttattcggtttacgggtgtcgaacgtaggtcggataaggcgtttacgtcgtattcgatattaatggtacgttttattcgtgcgtatcgtatttggtgtttattcgttttttttcgtcgtttgaatatatagtatttttagcgttagcgttgtcgttgttagagtagtgattttcgattgatcgtatgtcggagttatttttattacgtttattttaataatgttgagattttttaggtcgcgtattagtttaatagcgcgatcggaggttaggtcgttaattattggcgtatcggtgtttggtgtaaaagtaggatttagggtagtcgatattaaaagttagggtaattcgggtatattattttataa

SEQ ID NO: 12634 - DNA, 531 bp, Artificial Sequence
  chemically treated genomic DNA (Homo sapiens) CpG-island No: 12634
ttataaaataatatacccgaattaccctaacttttaatatcgactaccctaaatcctacttttacaccaaacaccgatacgccaataattaacgacctaacctccgatcgcgctattaaactaatacgcgacctaaaaaatctcaacattattaaaataaacgtaataaaaataactccgacatacgatcaatcgaaaatcactactctaacaacgacaacgctaacgctaaaaatactatatattcaaacgacgaaaaaaaacgaataaacaccaaatacgatacgcacgaataaaacgtaccattaatatcgaatacgacgtaaacgccttatccgacctacgttcgacacccgtaaaccgaataaaatacgccaacatcgcatccgacaatacgcacaaaataacaaatataccaatcatacaaatacgacgtaaacgccttatctaacctacgttcgacaccaccaaactttacttaatcccatccgcgctcatacgatcgcgaatatactaaacgcgttcgacgaa

SEQ ID NO: 12635 - DNA, 531 bp, Artificial Sequence
  chemically treated genomic DNA (Homo sapiens) CpG-island No: 12635
ttgtggggtgatatgttcgggttattttgatttttgatatcgattgttttggattttgtttttgtattaggtatcggtacgttagtgattggcggtttgattttcgatcgcgttattaaattggtacgcggtttgaaagattttaatattgttgggatggacgtagtggaagtggtttcggtatacgattagtcggaaattattgttttggtagcggtaacgttggcgttggaaatgttgtatatttaggcggcgaaaaagggcgagtaagtattagatgcgatgcgtacgggtaaaacgtgttattaatgtcggatgcggcgtgaacgttttattcgatttacgttcggtattcgtaggtcggataagatgcgttagtatcgtattcggtaatgcgtataaggtaataaatgtgttaattatgtagatgcggcgtgaacgttttatttgatttacgttcgatattattaggttttatttaattttattcgcgtttatgcgatcgcgaatatgttgggcgcgttcggcgga

SEQ ID NO: 12636 - DNA, 531 bp, Artificial Sequence
  chemically treated genomic DNA (Homo sapiens) CpG-island No: 12636
tccgccgaacgcgcccaacatattcgcgatcgcataaacgcgaataaaattaaataaaacctaataatatcgaacgtaaatcaaataaaacgttcacgccgcatctacataattaacacatttattaccttatacgcattaccgaatacgatactaacgcatcttatccgacctacgaataccgaacgtaaatcgaataaaacgttcacgccgcatccgacattaataacacgttttacccgtacgcatcgcatctaatacttactcgccctttttcgccgcctaaatatacaacatttccaacgccaacgttaccgctaccaaaacaataatttccgactaatcgtataccgaaaccacttccactacgtccatcccaacaatattaaaatctttcaaaccgcgtaccaatttaataacgcgatcgaaaatcaaaccgccaatcactaacgtaccgatacctaatacaaaaacaaaatccaaaacaatcgatatcaaaaatcaaaataacccgaacatatcaccccacaa

SEQ ID NO: 12637 - DNA, 525 bp, Artificial Sequence
  chemically treated genomic DNA (Homo sapiens) CpG-island No: 12637
gtgggcgtcggtcgttcgtttttttatcgtggcgttttttattcggttattcggggtacggttaggggttttatcgagtttcgggtttatcgtggtcgcggtcgtcggtcgtcgggagttcggagtcgggacgcgagggttgggggttggggatgggttttagtgtcgcgcgggagtttaaagttcggtattggtacggggtttcgtcgtcgtagtcgttggagttttgggtttttcgtcgcggggagagcggggggagggcgtttgtttcggagtgattcggcggcggaggaagggcgggtcgtaggcggcgggttcgggggattttgagcgggcgggcgaggagcgggtgagatcgaggtcgatagagtgggggttttacgaggttcgcgtttggtcgggaagagagtaggagattttttcgcgagtttagattcggtattgagggaagagatatttcgagttttgcgtttttaagttttgttttaatgtttttgatattgaatgtatgtgtggcgtttattt

SEQ ID NO: 12638 - DNA, 525 bp, Artificial Sequence
  chemically treated genomic DNA (Homo sapiens) CpG-island No: 12638
aaataaacgccacacatacattcaatatcaaaaacattaaaacaaaacttaaaaacgcaaaactcgaaatatctcttccctcaataccgaatctaaactcgcgaaaaaatctcctactctcttcccgaccaaacgcgaacctcgtaaaacccccactctatcgacctcgatctcacccgctcctcgcccgcccgctcaaaatcccccgaacccgccgcctacgacccgcccttcctccgccgccgaatcactccgaaacaaacgccctccccccgctctccccgcgacgaaaaacccaaaactccaacgactacgacgacgaaaccccgtaccaataccgaactttaaactcccgcgcgacactaaaacccatccccaacccccaaccctcgcgtcccgactccgaactcccgacgaccgacgaccgcgaccacgataaacccgaaactcgataaaacccctaaccgtaccccgaataaccgaataaaaaacgccacgataaaaaaacgaacgaccgacgcccac

SEQ ID NO: 12639 - DNA, 525 bp, Artificial Sequence
  chemically treated genomic DNA (Homo sapiens) CpG-island No: 12639
ggatagacgttatatatgtatttaatgttaagggtattggagtaaaatttggagacgtaggattcggagtgtttttttttttagtgtcgggtttgagttcgcgggggaattttttatttttttttcgattaggcgcgggtttcgtggggtttttattttgtcgatttcggttttattcgtttttcgttcgttcgtttaaggtttttcgggttcgtcgtttgcggttcgtttttttttcgtcgtcgggttatttcgggataggcgtttttttttcgtttttttcgcggcggggagtttaaggttttagcggttgcggcggcggagtttcgtgttagtgtcgggttttgaattttcgcgcgatattgggatttatttttaatttttaattttcgcgtttcggtttcgggttttcggcgatcggcggtcgcgattacggtggattcggggttcggtgaagtttttggtcgtgtttcgggtggtcgagtaaagggcgttacggtgaggagacggacggtcggcgtttat

SEQ ID NO: 12640 - DNA, 525 bp, Artificial Sequence
  chemically treated genomic DNA (Homo sapiens) CpG-island No: 12640
ataaacgccgaccgtccgtctcctcaccgtaacgccctttactcgaccacccgaaacacgaccaaaaacttcaccgaaccccgaatccaccgtaatcgcgaccgccgatcgccgaaaacccgaaaccgaaacgcgaaaattaaaaattaaaaataaatcccaatatcgcgcgaaaattcaaaacccgacactaacacgaaactccgccgccgcaaccgctaaaaccttaaactccccgccgcgaaaaaaacgaaaaaaaaacgcctatcccgaaataacccgacgacgaaaaaaaaacgaaccgcaaacgacgaacccgaaaaaccttaaacgaacgaacgaaaaacgaataaaaccgaaatcgacaaaataaaaaccccacgaaacccgcgcctaatcgaaaaaaaaataaaaaattcccccgcgaactcaaacccgacactaaaaaaaaaaacactccgaatcctacgtctccaaattttactccaatacccttaacattaaatacatatataacgtctatcc

SEQ ID NO: 12641 - DNA, 633 bp, Artificial Sequence
  chemically treated genomic DNA (Homo sapiens) CpG-island No: 12641
  unsure (124, 287, 303, 322)
gtattggcggcggattttatcgtttcgacgggattcgtttcgaggaaattcgttttcgtatcggtaagttgtcgagtcgtaatattatcgttttgttggtaatcgacgatggcgatttttggtnttgtttttatgacggttagatcgcgcgtcgacgcggtcgttttcggggagttcggcgggcgtcggcgcgttttttttatttttattttacgtttcgtcgcgcgcgcgttcgttgggggcggggagcggtcgggcggcggcggtcggcgggcggcggggcgggngcggttcgtttttcgntttattttttcggtttcgntcgtttttcgggttttttttttttttcgcgcgcggcggtcggcggcggcgtcggtcggcggcggcggggtcgcgggttcggttttttcgtcgggttttttttcggggtttcggttttcgtcgggggtttgtttcggtcggcgttttttcgttcgttgtgtttttgggcggtttcggggttttcggttgttttttggcgcgcgtgttttcgggtgggtttcgcgtttttgtggtgcgtttcgttgggttgttgcggtttcggggttgtggggtggggcgggtgggcggtttgttcgtcggtttcggcgggtt

SEQ ID NO: 12642 - DNA, 633 bp, Artificial Sequence
  chemically treated genomic DNA (Homo sapiens) CpG-island No: 12642
  unsure (312, 331, 347, 510)
aacccgccgaaaccgacgaacaaaccgcccacccgccccaccccacaaccccgaaaccgcaacaacccaacgaaacgcaccacaaaaacgcgaaacccacccgaaaacacgcgcgccaaaaaacaaccgaaaaccccgaaaccgcccaaaaacacaacgaacgaaaaaacgccgaccgaaacaaacccccgacgaaaaccgaaaccccgaaaaaaaacccgacgaaaaaaccgaacccgcgaccccgccgccgccgaccgacgccgccgccgaccgccgcgcgcgaaaaaaaaaaaaaacccgaaaaacgancgaaaccgaaaaaataaancgaaaaacgaaccgcncccgccccgccgcccgccgaccgccgccgcccgaccgctccccgcccccaacgaacgcgcgcgcgacgaaacgtaaaataaaaataaaaaaaacgcgccgacgcccgccgaactccccgaaaacgaccgcgtcgacgcgcgatctaaccgtcataaaaacaanaccaaaaatcgccatcgtcgattaccaacaaaacgataatattacgactcgacaacttaccgatacgaaaacgaatttcctcgaaacgaatcccgtcgaaacgataaaatccgccgccaatac

SEQ ID NO: 12643 - DNA, 633 bp, Artificial Sequence
  chemically treated genomic DNA (Homo sapiens) CpG-island No: 12643
  unsure (312, 331, 347, 510)
agttcgtcggggtcggcgaataagtcgtttattcgttttattttatagtttcggggtcgtagtagtttaacggggcgtattataggagcgcgaggtttattcgagagtacgcgcgttaaaaggtagtcgaaaatttcggggtcgtttaagggtatagcgagcgagaaggcgtcggtcgaggtaagttttcggcggaaatcgaggtttcgggaagggattcggcgggggggtcgggttcgcggtttcgtcgtcgtcggtcggcgtcgtcgtcggtcgtcgcgcgcggaggaggaggggggttcggggggcggncggggtcgggggggtaggncgggggacgaatcgtnttcgtttcgtcgttcgtcgatcgtcgtcgttcgatcgtttttcgtttttagcggacgcgcgcgcgacgagacgtggggtgggggtggggggggcgcgtcggcgttcgtcgggtttttcgggggcggtcgcgtcgacgcgcgatttggtcgttataggagtagngttagagatcgttatcgtcggttgttagtaaggcggtgatgttgcggttcggtagtttgtcgatgcggggacgaattttttcgaagcggatttcgtcgaagcgatagagttcgtcgttagtgt

SEQ ID NO: 12644 - DNA, 633 bp, Artificial Sequence
  chemically treated genomic DNA (Homo sapiens) CpG-island No: 12644
  unsure (124, 287, 303, 322)
acactaacgacgaactctatcgcttcgacgaaatccgcttcgaaaaaattcgtccccgcatcgacaaactaccgaaccgcaacatcaccgccttactaacaaccgacgataacgatctctaacnctactcctataacgaccaaatcgcgcgtcgacgcgaccgcccccgaaaaacccgacgaacgccgacgcgccccccccacccccaccccacgtctcgtcgcgcgcgcgtccgctaaaaacgaaaaacgatcgaacgacgacgatcgacgaacgacgaaacgaanacgattcgtcccccgncctacccccccgaccccgnccgccccccgaacccccctcctcctccgcgcgcgacgaccgacgacgacgccgaccgacgacgacgaaaccgcgaacccgacccccccgccgaatcccttcccgaaacctcgatttccgccgaaaacttacctcgaccgacgccttctcgctcgctatacccttaaacgaccccgaaattttcgactaccttttaacgcgcgtactctcgaataaacctcgcgctcctataatacgccccgttaaactactacgaccccgaaactataaaataaaacgaataaacgacttattcgccgaccccgacgaact

SEQ ID NO: 12645 - DNA, 505 bp, Artificial Sequence
  chemically treated genomic DNA (Homo sapiens) CpG-island No: 12645
tcgtcggtttgaattttgggttcgtcgcgtgggggcgttggcgtgtagattcggcggagttatggggttcgggacgcgtaatttttttaaagttttattgtaaaataattcggcggtggagtttcgcggttttttgaatttaaagtcgcgagttcgttttttcgtttcgtggttttgttcgtcgcgttcgcgttttttcgtatttaggcgaaggggtttaggaagggattttaggattaaggcgggatcgcgggcggggacgtagggtcgggggtcgtagggaggttgttagcgttcgggttcggatattcgttttaaatttcgtttggtttcggcgttattcgggtcgattcgtttttgtgtcggtttttaggttggtttcgagtttttgtgttcgtttttttcgtttgaataagatttttcgtgagttcgcggtttttaaatcgtttgtttttgtgggttttttaggttgtcgcgtgggttttaaggtgaaggtttggagggt

SEQ ID NO: 12646 - DNA, 505 bp, Artificial Sequence
  chemically treated genomic DNA (Homo sapiens) CpG-island No: 12646
accctccaaaccttcaccttaaaacccacgcgacaacctaaaaaacccacaaaaacaaacgatttaaaaaccgcgaactcacgaaaaatcttattcaaacgaaaaaaacgaacacaaaaactcgaaaccaacctaaaaaccgacacaaaaacgaatcgacccgaataacgccgaaaccaaacgaaatttaaaacgaatatccgaacccgaacgctaacaacctccctacgacccccgaccctacgtccccgcccgcgatcccgccttaatcctaaaatcccttcctaaaccccttcgcctaaatacgaaaaaacgcgaacgcgacgaacaaaaccacgaaacgaaaaaacgaactcgcgactttaaattcaaaaaaccgcgaaactccaccgccgaattattttacaataaaactttaaaaaaattacgcgtcccgaaccccataactccgccgaatctacacgccaacgcccccacgcgacgaacccaaaattcaaaccgacga

SEQ ID NO: 12647 - DNA, 505 bp, Artificial Sequence
  chemically treated genomic DNA (Homo sapiens) CpG-island No: 12647
gttttttaggtttttattttgagatttacgcggtagtttggagggtttataagagtaaacggtttagaggtcgcgggtttacgagggattttgtttaaacgaaaagaacgagtataggggttcggggttagtttggaggtcggtatagaggcgagtcggttcgggtggcgtcgggattaggcgggatttggggcgggtattcgggttcgggcgttggtagtttttttgcgattttcggttttgcgttttcgttcgcggtttcgttttagttttggagtttttttttgggttttttcgtttgggtgcggaggggcgcgggcgcggcgggtagggttacggggcgaggggacgggttcgcggttttgggtttagggagtcgcggagttttatcgtcgggttgttttgtaatggggttttggagaggttgcgcgtttcgggttttatggtttcgtcgggtttgtacgttagcgtttttacgcggcgggtttagagtttaggtcggcgg

SEQ ID NO: 12648 - DNA, 505 bp, Artificial Sequence
  chemically treated genomic DNA (Homo sapiens) CpG-island No: 12648
ccgccgacctaaactctaaacccgccgcgtaaaaacgctaacgtacaaacccgacgaaaccataaaacccgaaacgcgcaacctctccaaaaccccattacaaaacaacccgacgataaaactccgcgactccctaaacccaaaaccgcgaacccgtcccctcgccccgtaaccctacccgccgcgcccgcgcccctccgcacccaaacgaaaaaacccaaaaaaaaactccaaaactaaaacgaaaccgcgaacgaaaacgcaaaaccgaaaatcgcaaaaaaactaccaacgcccgaacccgaatacccgccccaaatcccgcctaatcccgacgccacccgaaccgactcgcctctataccgacctccaaactaaccccgaacccctatactcgttcttttcgtttaaacaaaatccctcgtaaacccgcgacctctaaaccgtttactcttataaaccctccaaactaccgcgtaaatctcaaaataaaaacctaaaaaac

SEQ ID NO: 12649 - DNA, 556 bp, Artificial Sequence
  chemically treated genomic DNA (Homo sapiens) CpG-island No: 12649
ggcgcgggcgacgtcgcggttcgcgcggttttaagagtgcgatcgttcggagtttagcgttttttaattttgttcgggttcggaacgtcgcggggcgtgtttttcgatatagagaattcgtgtgagtcgattggtttcgttttgatttgttttttttaggataatacggaaaatcgttggtgtagggtttgcgagtagttggttgcgttcgtcgggattcgatagatcggtaggtacgaggggtaggtggggaggtatcggagttttagcgtagtttcgttcggtattatttgttcgtttttaacgaaatacgtcgtttaggtttagagaatttcgggattgtttggggaacgcgttaggtttatgtcggttggggcgttcggagttgggagagggcggagagtttttatttaggtcggagtattttagagttcgaggtgcggagtagtatggagcgttcgaggcgggcggcgttagggttagagtttatttaggggatttttgtcgtttttataggttggaaaaataaagattaaaaataaatcgaaaaaaaaaa

SEQ ID NO: 12650 - DNA, 556 bp, Artificial Sequence
  chemically treated genomic DNA (Homo sapiens) CpG-island No: 12650
ttttttttttcgatttatttttaatctttatttttccaacctataaaaacgacaaaaatcccctaaataaactctaaccctaacgccgcccgcctcgaacgctccatactactccgcacctcgaactctaaaatactccgacctaaataaaaactctccgccctctcccaactccgaacgccccaaccgacataaacctaacgcgttccccaaacaatcccgaaattctctaaacctaaacgacgtatttcgttaaaaacgaacaaataataccgaacgaaactacgctaaaactccgatacctccccacctacccctcgtacctaccgatctatcgaatcccgacgaacgcaaccaactactcgcaaaccctacaccaacgattttccgtattatcctaaaaaaaacaaatcaaaacgaaaccaatcgactcacacgaattctctatatcgaaaaacacgccccgcgacgttccgaacccgaacaaaattaaaaaacgctaaactccgaacgatcgcactcttaaaaccgcgcgaaccgcgacgtcgcccgcgcc

SEQ ID NO: 12651 - DNA, 556 bp, Artificial Sequence
  chemically treated genomic DNA (Homo sapiens) CpG-island No: 12651
ttttttttttcggtttgtttttgatttttatttttttagtttataaaggcggtagaaattttttgggtagattttggttttggcgtcgttcgtttcgggcgttttatgttgtttcgtatttcgggttttgggatgtttcggtttggatggaggtttttcgtttttttttagtttcgagcgttttagtcgatatgggtttggcgcgttttttagatagtttcggagttttttgggtttgggcgacgtgtttcgttgaaagcgggtaggtggtgtcgggcggggttgcgttgaggtttcggtgtttttttatttgtttttcgtatttgtcggtttgtcgggtttcggcggacgtaattagttattcgtaaattttgtattagcggtttttcgtgttgttttaagaggggtaggttagggcgaggttagtcggtttatacgaattttttgtgtcggagaatacgtttcgcgacgtttcgagttcgggtaaggttgagaggcgttgggtttcgggcggtcgtatttttggaatcgcgcgaatcgcggcgtcgttcgcgtt

SEQ ID NO: 12652 - DNA, 556 bp, Artificial Sequence
  chemically treated genomic DNA (Homo sapiens) CpG-island No: 12652
aacgcgaacgacgccgcgattcgcgcgattccaaaaatacgaccgcccgaaacccaacgcctctcaaccttacccgaactcgaaacgtcgcgaaacgtattctccgacacaaaaaattcgtataaaccgactaacctcgccctaacctacccctcttaaaacaacacgaaaaaccgctaatacaaaatttacgaataactaattacgtccgccgaaacccgacaaaccgacaaatacgaaaaacaaataaaaaaacaccgaaacctcaacgcaaccccgcccgacaccacctacccgctttcaacgaaacacgtcgcccaaacccaaaaaactccgaaactatctaaaaaacgcgccaaacccatatcgactaaaacgctcgaaactaaaaaaaaacgaaaaacctccatccaaaccgaaacatcccaaaacccgaaatacgaaacaacataaaacgcccgaaacgaacgacgccaaaaccaaaatctacccaaaaaatttctaccgcctttataaactaaaaaaataaaaatcaaaaacaaaccgaaaaaaaaaa

SEQ ID NO: 12653 - DNA, 1378 bp, Artificial Sequence
  chemically treated genomic DNA (Homo sapiens) CpG-island No: 12653
tcgatttattttttttcgttttcgttcgtttttttcgtttttttgttttttttttttttttttttttgggtattcgtttcgttaattttcgtcgtcgtcggttttaattcggttttttttcgttttttaggtttttagagcgttttaggttttagtagagtcgtttttagttttgcgcggagcggggcgatttgttagcggagtcggtcggggggagtcgttcggttcgtcgaggttcgggttattagtgattgatagcgtttttatggcgaataatttgatttcgattattgtttggcgttggtaggtttcgggttagataatcggattaattagggcgcgggtcgtcgcgttttatgttcgtttagaataatattattaagaaagttgagagttagttagacgggagggagaacgagtgagaagcgagcgagggaacggcgggcgggcgcggagtatgcggagcggcgtttcgggcggttttcgggtttgggcgagggtttgggttaggcgcgcgggtcgttggggttcggagtttcgtgggattcgcggtcggcgcggggacgtacggtagtgattcggggtttatcgggggttagtgtcgggttagggggttagtttcgttcgcgtttcggttcggacggttcggcgaggaagtttttatgcgggatcgcgcggttcggtgagggcgcgcgcgggcgggcggggacgtagtcggtattatgtttatgttgtttattttcggttttacgtaggagtaagtggcgtgcgtgtgcgaggtgttgtagtagggcggtaatatcgagcggttgggtcgttttttgtggtcgttgttcgtttgcgagtatttttataagaatgaaagcgtgtttaaggttaaggtcgtggtggttttttatcgcggtaattttcgcgagttttataagattttggagagttattagttttcgtcgtataattacgttaagttgtagtagttgtggtttaaggtatattatatcgaggcggagaagttgcgcggtcgatttttgggcgtcgtgggtaaatatcgcgtgcgtcgtaaattttcgttgtcgcgttttatttgggacggcgaggagattagttattgttttaaggaaaagagtcgtagcgtgttgcgcgagtggtacgcgtataatttttattttttatttcgcgagaagcgtgagttggcggaggttacgggttttattattatataggttagtaattggtttaagaatcggcggtagcgcgatcgggcggtcgaggttaaggaaaggtacgagtaagtagatttttttcggcgttagtttttcggggtttaagggaggggttcgtagggtttttgtcggtttttcggagaggtttaaattgg

SEQ ID NO: 12654 - DNA, 1378 bp, Artificial Sequence
  chemically treated genomic DNA (Homo sapiens) CpG-island No: 12654
ccaatttaaacctctccgaaaaaccgacaaaaaccctacgaacccctcccttaaaccccgaaaaactaacgccgaaaaaaatctacttactcgtacctttccttaacctcgaccgcccgatcgcgctaccgccgattcttaaaccaattactaacctatataataataaaacccgtaacctccgccaactcacgcttctcgcgaaataaaaaataaaaattatacgcgtaccactcgcgcaacacgctacgactcttttccttaaaacaataactaatctcctcgccgtcccaaataaaacgcgacaacgaaaatttacgacgcacgcgatatttacccacgacgcccaaaaatcgaccgcgcaacttctccgcctcgatataatataccttaaaccacaactactacaacttaacgtaattatacgacgaaaactaataactctccaaaatcttataaaactcgcgaaaattaccgcgataaaaaaccaccacgaccttaaccttaaacacgctttcattcttataaaaatactcgcaaacgaacaacgaccacaaaaaacgacccaaccgctcgatattaccgccctactacaacacctcgcacacgcacgccacttactcctacgtaaaaccgaaaataaacaacataaacataataccgactacgtccccgcccgcccgcgcgcgccctcaccgaaccgcgcgatcccgcataaaaacttcctcgccgaaccgtccgaaccgaaacgcgaacgaaactaaccccctaacccgacactaacccccgataaaccccgaatcactaccgtacgtccccgcgccgaccgcgaatcccacgaaactccgaaccccaacgacccgcgcgcctaacccaaaccctcgcccaaacccgaaaaccgcccgaaacgccgctccgcatactccgcgcccgcccgccgttccctcgctcgcttctcactcgttctccctcccgtctaactaactctcaactttcttaataatattattctaaacgaacataaaacgcgacgacccgcgccctaattaatccgattatctaacccgaaacctaccaacgccaaacaataatcgaaatcaaattattcgccataaaaacgctatcaatcactaataacccgaacctcgacgaaccgaacgactccccccgaccgactccgctaacaaatcgccccgctccgcgcaaaactaaaaacgactctactaaaacctaaaacgctctaaaaacctaaaaaacgaaaaaaaaccgaattaaaaccgacgacgacgaaaattaacgaaacgaatacccaaaaaaaaaaaaaaaaaaaaaacaaaaaaacgaaaaaaacgaacgaaaacgaaaaaaaataaatcga

SEQ ID NO: 12655 - DNA, 1378 bp, Artificial Sequence
  chemically treated genomic DNA (Homo sapiens) CpG-island No: 12655
ttagtttaggttttttcgggggatcggtagaagttttgcgaattttttttttgggtttcggggagttggcgtcgaagaaggtttatttattcgtatttttttttggtttcggtcgttcggtcgcgttgtcgtcggtttttgaattagttgttgatttgtgtggtggtgaggttcgtggttttcgttagtttacgtttttcgcggggtgaagggtaggggttgtgcgcgtattattcgcgtagtacgttgcgatttttttttttgaagtagtagttggttttttcgtcgttttagatggagcgcggtagcgggaatttgcggcgtacgcggtatttgtttacggcgtttaggggtcggtcgcgtagttttttcgtttcgatgtagtgtgttttgagttatagttgttgtagtttggcgtggttgtgcggcgagaattggtggttttttaggattttgtagagttcgcggaagttgtcgcggtggaaggttattacggttttggttttgagtacgtttttatttttgtgaaggtgttcgtaggcgggtagcgattataggaagcggtttagtcgttcgatgttgtcgttttgttgtagtatttcgtatacgtacgttatttgtttttgcgtgaagtcgaaggtgggtagtatggatatggtgtcggttgcgttttcgttcgttcgcgcgcgtttttatcgggtcgcgcggtttcgtatgggagttttttcgtcgggtcgttcgggtcgagacgcgggcggggttggttttttggttcggtattggttttcggtgagtttcgagttattgtcgtacgttttcgcgtcggtcgcgggttttacgaagtttcgaattttaacggttcgcgcgtttggtttaagttttcgtttaagttcgggggtcgttcggggcgtcgtttcgtatgtttcgcgttcgttcgtcgttttttcgttcgttttttattcgttttttttttcgtttagttggtttttagtttttttaataatattattttaagcgggtatgaggcgcggcggttcgcgttttgattggttcggttatttgattcggggtttgttagcgttagataatagtcggagttaaattattcgttatggagacgttgttagttattggtaattcgagtttcggcgggtcgggcggtttttttcggtcggtttcgttgatagatcgtttcgtttcgcgtagaattgagggcggttttattggagtttggggcgttttgagagtttgggaggcggagaggggtcgggttggggtcggcggcggcggagattgacggggcggatgtttaaagagggagggaggaggaggataggagagcggggggagcgggcgaagacgaaaaggggtggatcga

SEQ ID NO: 12656 - DNA, 1378 bp, Artificial Sequence
  chemically treated genomic DNA (Homo sapiens) CpG-island No: 12656
tcgatccaccccttttcgtcttcgcccgctccccccgctctcctatcctcctcctccctccctctttaaacatccgccccgtcaatctccgccgccgccgaccccaacccgacccctctccgcctcccaaactctcaaaacgccccaaactccaataaaaccgccctcaattctacgcgaaacgaaacgatctatcaacgaaaccgaccgaaaaaaaccgcccgacccgccgaaactcgaattaccaataactaacaacgtctccataacgaataatttaactccgactattatctaacgctaacaaaccccgaatcaaataaccgaaccaatcaaaacgcgaaccgccgcgcctcatacccgcttaaaataatattattaaaaaaactaaaaaccaactaaacgaaaaaaaaaacgaataaaaaacgaacgaaaaaacgacgaacgaacgcgaaacatacgaaacgacgccccgaacgacccccgaacttaaacgaaaacttaaaccaaacgcgcgaaccgttaaaattcgaaacttcgtaaaacccgcgaccgacgcgaaaacgtacgacaataactcgaaactcaccgaaaaccaataccgaaccaaaaaaccaaccccgcccgcgtctcgacccgaacgacccgacgaaaaaactcccatacgaaaccgcgcgacccgataaaaacgcgcgcgaacgaacgaaaacgcaaccgacaccatatccatactacccaccttcgacttcacgcaaaaacaaataacgtacgtatacgaaatactacaacaaaacgacaacatcgaacgactaaaccgcttcctataatcgctacccgcctacgaacaccttcacaaaaataaaaacgtactcaaaaccaaaaccgtaataaccttccaccgcgacaacttccgcgaactctacaaaatcctaaaaaaccaccaattctcgccgcacaaccacgccaaactacaacaactataactcaaaacacactacatcgaaacgaaaaaactacgcgaccgacccctaaacgccgtaaacaaataccgcgtacgccgcaaattcccgctaccgcgctccatctaaaacgacgaaaaaaccaactactacttcaaaaaaaaaaatcgcaacgtactacgcgaataatacgcgcacaacccctacccttcaccccgcgaaaaacgtaaactaacgaaaaccacgaacctcaccaccacacaaatcaacaactaattcaaaaaccgacgacaacgcgaccgaacgaccgaaaccaaaaaaaaatacgaataaataaaccttcttcgacgccaactccccgaaacccaaaaaaaaaattcgcaaaacttctaccgatcccccgaaaaaacctaaactaa

SEQ ID NO: 12657 - DNA, 891 bp, Artificial Sequence
  chemically treated genomic DNA (Homo sapiens) CpG-island No: 12657
cgtttaggtatttaacggagatacggcgtgaatattttattattttttgggaatttagaggcggtcggcgtggcggcgcgaatttgtttagcgcgtgcgcgcggcgcgtagggaggcggtttggaatcgagggagcgcgcgttttttacgtgattcgattcgcgggcggcgacgtacgcgtcgcgtcgcgtcgtttacgtggttcgtttttagtttcgtcgtcggcggaggcgggcgcgggcgcgtttttgtggttagttattcggaggagttggtcgtataattatgaaagattcggtttttgttgttagcgtcggagttgagttagttttgagaaggtttttttgggcgttttttgttcggcggtttttgttgtcgttttcggagacgtttttcgatagatggttataggtcgcggaggaggaggaggtggagttgttgttttttcggagttcgtttcgtgaggagaatggtattggatttacgtaggttcgggcggggaatggttttggggttgcgggcggtaaaggagagatttggtaggtaagtgtgtggggagtcgcgttttatgcggcgaaggattttcgaattgttttgaggttttcggatttgttttttcgggacgggtgtgtagttcgttttggggtgaggggcgggagtaggtagtaagttagaggcgatattttttcgcgggaattttttgagtcgagattcggtttttagcgagggtttttttaggcggtagaggcgcgagttcgggattatttggttgggtttagttgagcggttttagcgcgttcgacgtagggtttagtttataagtttcgtattttttgggagtacggtttttttggcgttagttgttggtagataagggaattaaatgttttg

SEQ ID NO: 12658 - DNA, 891 bp, Artificial Sequence
  chemically treated genomic DNA (Homo sapiens) CpG-island No: 12658
caaaacatttaattcccttatctaccaacaactaacgccaaaaaaaccgtactcccaaaaaatacgaaacttataaactaaaccctacgtcgaacgcgctaaaaccgctcaactaaacccaaccaaataatcccgaactcgcgcctctaccgcctaaaaaaaccctcgctaaaaaccgaatctcgactcaaaaaattcccgcgaaaaaatatcgcctctaacttactacctactcccgcccctcaccccaaaacgaactacacacccgtcccgaaaaaacaaatccgaaaacctcaaaacaattcgaaaatccttcgccgcataaaacgcgactccccacacacttacctaccaaatctctcctttaccgcccgcaaccccaaaaccattccccgcccgaacctacgtaaatccaataccattctcctcacgaaacgaactccgaaaaaacaacaactccacctcctcctcctccgcgacctataaccatctatcgaaaaacgtctccgaaaacgacaacaaaaaccgccgaacaaaaaacgcccaaaaaaaccttctcaaaactaactcaactccgacgctaacaacaaaaaccgaatctttcataattatacgaccaactcctccgaataactaaccacaaaaacgcgcccgcgcccgcctccgccgacgacgaaactaaaaacgaaccacgtaaacgacgcgacgcgacgcgtacgtcgccgcccgcgaatcgaatcacgtaaaaaacgcgcgctccctcgattccaaaccgcctccctacgcgccgcgcgcacgcgctaaacaaattcgcgccgccacgccgaccgcctctaaattcccaaaaaataataaaatattcacgccgtatctccgttaaatacctaaacg

SEQ ID NO: 12659 - DNA, 891 bp, Artificial Sequence
  chemically treated genomic DNA (Homo sapiens) CpG-island No: 12659
tagagtatttggtttttttatttgttagtaattggcgttaggaggatcgtgtttttaggagatgcggagtttgtaggttgagttttgcgtcgggcgcgttgaggtcgtttagttgagtttagttaggtagtttcgggttcgcgtttttgtcgtttggagaggttttcgttgggagtcgagtttcggtttaggggattttcgcgaagaggtgtcgtttttaatttgttatttgttttcgttttttattttagaacgaattgtatattcgtttcgagaggataaattcggaagttttaaggtaattcgagggtttttcgtcgtatggaacgcggttttttatatatttgtttgttaagttttttttttatcgttcgtaattttagaattatttttcgttcgggtttgcgtgggtttagtattattttttttacggggcggatttcggaagggtagtaattttatttttttttttttcgcggtttgtagttatttatcgggaagcgttttcggaggcggtagtagaggtcgtcggataaggaacgtttagggaaatttttttagaattaatttagtttcggcgttagtagtagaagtcgagttttttataattgtgcgattaattttttcgggtgattggttatagggacgcgttcgcgttcgttttcgtcggcgacggggttggggacggattacgtgagcggcgcggcgcggcgcgtgcgtcgtcgttcgcgggtcgggttacgtgaagggcgcgcgttttttcgattttaggtcgtttttttgcgcgtcgcgcgtacgcgttgggtaggttcgcgtcgttacgtcgatcgtttttgggtttttagaaagtggtggggtgtttacgtcgtattttcgttgggtatttaggcg

SEQ ID NO: 12660 - DNA, 891 bp, Artificial Sequence
  chemically treated genomic DNA (Homo sapiens) CpG-island No: 12660
cgcctaaatacccaacgaaaatacgacgtaaacaccccaccactttctaaaaacccaaaaacgatcgacgtaacgacgcgaacctacccaacgcgtacgcgcgacgcgcaaaaaaacgacctaaaatcgaaaaaacgcgcgcccttcacgtaacccgacccgcgaacgacgacgcacgcgccgcgccgcgccgctcacgtaatccgtccccaaccccgtcgccgacgaaaacgaacgcgaacgcgtccctataaccaatcacccgaaaaaattaatcgcacaattataaaaaactcgacttctactactaacgccgaaactaaattaattctaaaaaaatttccctaaacgttccttatccgacgacctctactaccgcctccgaaaacgcttcccgataaataactacaaaccgcgaaaaaaaaaaaaataaaattactacccttccgaaatccgccccgtaaaaaaaataatactaaacccacgcaaacccgaacgaaaaataattctaaaattacgaacgataaaaaaaaaacttaacaaacaaatatataaaaaaccgcgttccatacgacgaaaaaccctcgaattaccttaaaacttccgaatttatcctctcgaaacgaatatacaattcgttctaaaataaaaaacgaaaacaaataacaaattaaaaacgacacctcttcgcgaaaatcccctaaaccgaaactcgactcccaacgaaaacctctccaaacgacaaaaacgcgaacccgaaactacctaactaaactcaactaaacgacctcaacgcgcccgacgcaaaactcaacctacaaactccgcatctcctaaaaacacgatcctcctaacgccaattactaacaaataaaaaaaccaaatactcta

SEQ ID NO: 12661 - DNA, 532 bp, Artificial Sequence
  chemically treated genomic DNA (Homo sapiens) CpG-island No: 12661
ggatatacggggacggtttttttttaaggaggttcggggtcgtttttgcgtcgggatagtttgggaagtcgcgtaggtttggtcgattttttttttttagtttcgttgcgttttgcggggttttgtcggcggtgggggttgcggattcgggagcgcgcggtcgcgttgtacgtgtagggatcggtaggcgtcggggttagcgttagcgtttgatgtgcggcggggagcgggtcgagtttcgggaggtcgtttcgtattttttagtgtgttcgggttgagcgcgaggttaggaggggacgtagagtttacggcgaagacggatcgcgggggttcgtttcgttcgggttgcgcgtagcgggggtcgcgtgatggatgggtcgggtcgggtattcgggaattcgcgagcgcggggttgggttttgggttgcgttcgggggtttcgatttggttattgatcggtttaagcgtaggagaattgattttataatgtatcgtttgattaggaaaagtgtttgtttttgtgggagtaaaa

SEQ ID NO: 12662 - DNA, 532 bp, Artificial Sequence
  chemically treated genomic DNA (Homo sapiens) CpG-island No: 12662
ttttactcccacaaaaacaaacacttttcctaatcaaacgatacattataaaatcaattctcctacgcttaaaccgatcaataaccaaatcgaaacccccgaacgcaacccaaaacccaaccccgcgctcgcgaattcccgaatacccgacccgacccatccatcacgcgacccccgctacgcgcaacccgaacgaaacgaacccccgcgatccgtcttcgccgtaaactctacgtcccctcctaacctcgcgctcaacccgaacacactaaaaaatacgaaacgacctcccgaaactcgacccgctccccgccgcacatcaaacgctaacgctaaccccgacgcctaccgatccctacacgtacaacgcgaccgcgcgctcccgaatccgcaacccccaccgccgacaaaaccccgcaaaacgcaacgaaactaaaaaaaaaaaatcgaccaaacctacgcgacttcccaaactatcccgacgcaaaaacgaccccgaacctccttaaaaaaaaaccgtccccgtatatcc

SEQ ID NO: 12663 - DNA, 532 bp, Artificial Sequence
  chemically treated genomic DNA (Homo sapiens) CpG-island No: 12663
ttttgtttttataaaagtaaatattttttttggttaggcgatgtattatagagttagtttttttgcgtttgggtcgattaataattaagtcggggttttcggacgtagtttagagtttagtttcgcgttcgcgggttttcgggtgttcggttcggtttatttattacgcggttttcgttgcgcgtaattcgggcgggacgagttttcgcgattcgttttcgtcgtgaattttgcgtttttttttgatttcgcgtttaattcggatatattgggaggtgcgaagcggtttttcggggttcggttcgtttttcgtcgtatattaaacgttggcgttgatttcggcgtttatcggtttttgtacgtgtagcgcggtcgcgcgttttcgggttcgtagtttttatcgtcgatagggtttcgtagggcgtagcggggttgggaaggggaagtcggttaggtttgcgcggttttttaggttgtttcggcgtagaggcggtttcgggtttttttggaaaggaatcgttttcgtgtattt

SEQ ID NO: 12664 - DNA, 532 bp, Artificial Sequence
  chemically treated genomic DNA (Homo sapiens) CpG-island No: 12664
aaatacacgaaaacgattcctttccaaaaaaacccgaaaccgcctctacgccgaaacaacctaaaaaaccgcgcaaacctaaccgacttccccttcccaaccccgctacgccctacgaaaccctatcgacgataaaaactacgaacccgaaaacgcgcgaccgcgctacacgtacaaaaaccgataaacgccgaaatcaacgccaacgtttaatatacgacgaaaaacgaaccgaaccccgaaaaaccgcttcgcacctcccaatatatccgaattaaacgcgaaatcaaaaaaaaacgcaaaattcacgacgaaaacgaatcgcgaaaactcgtcccgcccgaattacgcgcaacgaaaaccgcgtaataaataaaccgaaccgaacacccgaaaacccgcgaacgcgaaactaaactctaaactacgtccgaaaaccccgacttaattattaatcgacccaaacgcaaaaaaactaactctataatacatcgcctaaccaaaaaaaatatttacttttataaaaacaaaa

SEQ ID NO: 12665 - DNA, 746 bp, Artificial Sequence
  chemically treated genomic DNA (Homo sapiens) CpG-island No: 12665
ttcgttttcggtttcgtttattcgtcgcggtatcggtttcgttcgttaatttaggtcgcggtaggtttcgtttttcgtcgcggtgttcggtttcgtttattttttttgggtcgtcgtcgcggtcgggggcggggcggggcggtcgggggcggggcggggcggtcgggggcggggcggggcggtcgggggcggggcggggcgggaggagtcgcgtttttaagcgggagggagattcgtcgcggagttacgggaaagttggttcgagtttttagagtttttttttgtggtgttttaggttcggtcggtcggtgtttcggtttttttttttttttcggttttcgtcgtttattaggtttttttttttgttttcggtcgttatggagtagtcgtcggcgtttaagaggtaacgaatcggggagcgggaagaaggagggaagcggcgtcggcggtcgcggggcgggggtggttaggttaggttttgttgcgagttttttttcgttcgtcgggtttcgagtcgggcgcgttgaggtcgggaggcgggttcgagtgtttcgtcgcgtttgtttacgggcgaggggatttgaggggagcgggagtcggagttttttttgcggtcggtaggtttggcgcgtggaaagtcgggtgggtagcgtcgggttttttgcggtttgatttttcggggcgggaggaattaaatattaatagttatatagtttgtaaaatattgtggatgtgttgttttgata

SEQ ID NO: 12666 - DNA, 746 bp, Artificial Sequence
  chemically treated genomic DNA (Homo sapiens) CpG-island No: 12666
tatcaaaacaacacatccacaatattttacaaactatataactattaatatttaattcctcccgccccgaaaaatcaaaccgcaaaaaacccgacgctacccacccgactttccacgcgccaaacctaccgaccgcaaaaaaaactccgactcccgctcccctcaaatcccctcgcccgtaaacaaacgcgacgaaacactcgaacccgcctcccgacctcaacgcgcccgactcgaaacccgacgaacgaaaaaaaactcgcaacaaaacctaacctaaccacccccgccccgcgaccgccgacgccgcttccctccttcttcccgctccccgattcgttacctcttaaacgccgacgactactccataacgaccgaaaacaaaaaaaaaaacctaataaacgacgaaaaccgaaaaaaaaaaaaaaaccgaaacaccgaccgaccgaacctaaaacaccacaaaaaaaaactctaaaaactcgaaccaactttcccgtaactccgcgacgaatctccctcccgcttaaaaacgcgactcctcccgccccgccccgcccccgaccgccccgccccgcccccgaccgccccgccccgcccccgaccgccccgccccgcccccgaccgcgacgacgacccaaaaaaaataaacgaaaccgaacaccgcgacgaaaaacgaaacctaccgcgacctaaattaacgaacgaaaccgataccgcgacgaataaacgaaaccgaaaacgaa

SEQ ID NO: 12667 - DNA, 746 bp, Artificial Sequence
  chemically treated genomic DNA (Homo sapiens) CpG-island No: 12667
tgttagagtagtatatttataatgttttatagattgtgtagttattaatatttaatttttttcgtttcgggaggttaggtcgtagggagttcggcgttgtttattcgattttttacgcgttaggtttgtcggtcgtaggggaggtttcggttttcgttttttttaggttttttcgttcgtggatagacgcggcgggatattcggattcgtttttcgattttagcgcgttcggttcggggttcggcgggcggggagaggttcgtagtagggtttggtttagttattttcgtttcgcggtcgtcggcgtcgttttttttttttttttcgtttttcgattcgttattttttaggcgtcggcggttgttttatggcggtcggggatagagagagggatttggtggacggcgaaggtcgaaaggaggaaaggagtcggggtatcggtcggtcgagtttagggtattatagagggaaattttgggaattcggattaattttttcgtaatttcgcggcggatttttttttcgtttaggagcgcggtttttttcgtttcgtttcgttttcggtcgtttcgtttcgttttcggtcgtttcgtttcgttttcggtcgtttcgtttcgttttcggtcgcggcggcggtttagagaaggtggacggagtcgggtatcgcggcggggggcggagtttgtcgcggtttgggttggcgggcggggtcggtgtcgcggcgggtgggcggggtcggggacgaa

SEQ ID NO: 12668 - DNA, 746 bp, Artificial Sequence
  chemically treated genomic DNA (Homo sapiens) CpG-island No: 12668
ttcgtccccgaccccgcccacccgccgcgacaccgaccccgcccgccaacccaaaccgcgacaaactccgccccccgccgcgatacccgactccgtccaccttctctaaaccgccgccgcgaccgaaaacgaaacgaaacgaccgaaaacgaaacgaaacgaccgaaaacgaaacgaaacgaccgaaaacgaaacgaaacgaaaaaaaccgcgctcctaaacgaaaaaaaaatccgccgcgaaattacgaaaaaattaatccgaattcccaaaatttccctctataataccctaaactcgaccgaccgataccccgactcctttcctcctttcgaccttcgccgtccaccaaatccctctctctatccccgaccgccataaaacaaccgccgacgcctaaaaaataacgaatcgaaaaacgaaaaaaaaaaaaaaaacgacgccgacgaccgcgaaacgaaaataactaaaccaaaccctactacgaacctctccccgcccgccgaaccccgaaccgaacgcgctaaaatcgaaaaacgaatccgaatatcccgccgcgtctatccacgaacgaaaaaacctaaaaaaaacgaaaaccgaaacctcccctacgaccgacaaacctaacgcgtaaaaaatcgaataaacaacgccgaactccctacgacctaacctcccgaaacgaaaaaaattaaatattaataactacacaatctataaaacattataaatatactactctaaca

SEQ ID NO: 12669 - DNA, 588 bp, Artificial Sequence
  chemically treated genomic DNA (Homo sapiens) CpG-island No: 12669
cgcggtagttcgtacggaagtagttggggagtatttagttcgattttttttataggtttagggtcgggatatcgagggaaggcgcggcgcgcgcggtaaggttaggggcgcggggttgggttcggtcggtataagtgttcggatcgcggagcgttttcggtgaggcgttcggtatggattgggtaggagcggttttgggcgatgggtttgacgtcggtgggcgtagttgaggttattgtaaggtcgttggatttcggattcgtattcgagacggagcgggggttatacgggataatcgagggggcgaacgggagtttcgggttttcgtttttttttcgggtgggggataggtcgtcgagttcgaggtcgggcgcgaaggttattcgtattttttcgtttttcgcgagtaatttaggggttttgcgggaggaggagagggtttcgggagttcgtttttttttgcgttttcgggatcggtaggaggcgttgcgcgggcgaattaaaagaaaaggaaaagttcgtagtggaggtgttatcgtattttgtttttggacgttatttttagttgagtgattcgattcggatttt

SEQ ID NO: 12670 - DNA, 588 bp, Artificial Sequence
  chemically treated genomic DNA (Homo sapiens) CpG-island No: 12670
aaaatccgaatcgaatcactcaactaaaaataacgtccaaaaacaaaatacgataacacctccactacgaacttttccttttcttttaattcgcccgcgcaacgcctcctaccgatcccgaaaacgcaaaaaaaaacgaactcccgaaaccctctcctcctcccgcaaaacccctaaattactcgcgaaaaacgaaaaaatacgaataaccttcgcgcccgacctcgaactcgacgacctatcccccacccgaaaaaaaaacgaaaacccgaaactcccgttcgccccctcgattatcccgtataacccccgctccgtctcgaatacgaatccgaaatccaacgaccttacaataacctcaactacgcccaccgacgtcaaacccatcgcccaaaaccgctcctacccaatccataccgaacgcctcaccgaaaacgctccgcgatccgaacacttataccgaccgaacccaaccccgcgcccctaaccttaccgcgcgcgccgcgccttccctcgatatcccgaccctaaacctataaaaaaaatcgaactaaatactccccaactacttccgtacgaactaccgcg

SEQ ID NO: 12671 - DNA, 588 bp, Artificial Sequence
  chemically treated genomic DNA (Homo sapiens) CpG-island No: 12671
aaggttcgaatcgggttatttaattaagagtagcgtttaaaggtaggatgcggtaatatttttattacgagttttttttttttttttaattcgttcgcgtagcgttttttgtcggtttcgaaggcgtagggaagggcggattttcgggattttttttttttttcgtagggtttttgggttgttcgcggaaggcgggaaaatgcgagtggttttcgcgttcgatttcggattcggcgatttgttttttattcggagagggagcggaggttcgaaattttcgttcgttttttcggttatttcgtgtggttttcgtttcgtttcgggtgcggattcgggatttagcggttttgtagtggttttaattgcgtttatcgacgttaggtttatcgtttagggtcgtttttatttaatttatatcgaacgttttatcgaggacgtttcgcggttcgagtatttgtgtcggtcgagtttagtttcgcgtttttggttttgtcgcgcgcgtcgcgttttttttcggtgtttcgattttgggtttgtggggagggtcgagttggatgttttttagttgttttcgtgcggattgtcgcg

SEQ ID NO: 12672 - DNA, 588 bp, Artificial Sequence
  chemically treated genomic DNA (Homo sapiens) CpG-island No: 12672
cgcgacaatccgcacgaaaacaactaaaaaacatccaactcgaccctccccacaaacccaaaatcgaaacaccgaaaaaaaacgcgacgcgcgcgacaaaaccaaaaacgcgaaactaaactcgaccgacacaaatactcgaaccgcgaaacgtcctcgataaaacgttcgatataaattaaataaaaacgaccctaaacgataaacctaacgtcgataaacgcaattaaaaccactacaaaaccgctaaatcccgaatccgcacccgaaacgaaacgaaaaccacacgaaataaccgaaaaaacgaacgaaaatttcgaacctccgctccctctccgaataaaaaacaaatcgccgaatccgaaatcgaacgcgaaaaccactcgcattttcccgccttccgcgaacaacccaaaaaccctacgaaaaaaaaaaaaaatcccgaaaatccgcccttccctacgccttcgaaaccgacaaaaaacgctacgcgaacgaattaaaaaaaaaaaaaaaactcgtaataaaaatattaccgcatcctacctttaaacgctactcttaattaaataacccgattcgaacctt

SEQ ID NO: 12673 - DNA, 845 bp, Artificial Sequence
  chemically treated genomic DNA (Homo sapiens) CpG-island No: 12673
cgggtcgattttttttttagtttttttcgttttgtcgtcgtttattgcgtgttgttttcgttcgtttttttttttttcgttttttttttttttttttttgttttcgcgtcgtttcgcgtttttcgttcgttgtagtcggcgaggagcgtcgtacgttggtttcggcgcgaggagttttcgggttttcgggcgggtattggagtaaggagttgcgagcgtagttcgaggcggggtacggcggaaggcgcggcgagagcggggtttttgcgagcgtagtcggaagggcgtttaggagaagggggacgtcgttttcgtttttgtacggtgttcggttttttcgggtttcgcgcgcggttataattcggattgggcgcgttttcggtatttcgtatttttgcgcgcgttttatatttcgtattcggtattttagcggtcgggtatgtagtagcggtagtaacggcggaatatgggcgggaattatttttataagtttttcgtgtttgacgagaatgaggaaggtaagagagcgagaggtgcgaattttcgtttcgcggggtattttttttttttattattttcggtcgagttttgcggggtatcgtatgttgttcggcgcggggatttaggtatggttatttcgtttagcgaatgtagtgtgtgttcgattcgtgttaggcgcggcgtttttgttgaggtaatttttaggtatttagtgtcgtttagtagtcgggacggtgtttagcgcgggattggggaggcggttttagagagttgaattcgaaatttgtatttgggggtgtggaagggaggagttgatttcggaggttagtcgggatggttttagg

SEQ ID NO: 12674 - DNA, 845 bp, Artificial Sequence
  chemically treated genomic DNA (Homo sapiens) CpG-island No: 12674
cctaaaaccatcccgactaacctccgaaatcaactcctcccttccacacccccaaatacaaatttcgaattcaactctctaaaaccgcctccccaatcccgcgctaaacaccgtcccgactactaaacgacactaaatacctaaaaattacctcaacaaaaacgccgcgcctaacacgaatcgaacacacactacattcgctaaacgaaataaccatacctaaatccccgcgccgaacaacatacgataccccgcaaaactcgaccgaaaataataaaaaaaaaaaataccccgcgaaacgaaaattcgcacctctcgctctcttaccttcctcattctcgtcaaacacgaaaaacttataaaaataattcccgcccatattccgccgttactaccgctactacatacccgaccgctaaaataccgaatacgaaatataaaacgcgcgcaaaaatacgaaataccgaaaacgcgcccaatccgaattataaccgcgcgcgaaacccgaaaaaaccgaacaccgtacaaaaacgaaaacgacgtcccccttctcctaaacgcccttccgactacgctcgcaaaaaccccgctctcgccgcgccttccgccgtaccccgcctcgaactacgctcgcaactccttactccaatacccgcccgaaaacccgaaaactcctcgcgccgaaaccaacgtacgacgctcctcgccgactacaacgaacgaaaaacgcgaaacgacgcgaaaacaaaaaaaaaaaaaaaaaaaacgaaaaaaaaaaaaacgaacgaaaacaacacgcaataaacgacgacaaaacgaaaaaaactaaaaaaaaaatcgacccg

SEQ ID NO: 12675 - DNA, 845 bp, Artificial Sequence
  chemically treated genomic DNA (Homo sapiens) CpG-island No: 12675
tttagaattatttcgattggttttcgaagttaattttttttttttatatttttaagtgtaggtttcgggtttaattttttgaagtcgtttttttagtttcgcgttaggtatcgtttcgattattaaacggtattgggtatttaggagttgttttagtagaagcgtcgcgtttggtacgggtcgggtatatattgtattcgttgggcgaagtggttatgtttgggttttcgcgtcgggtagtatgcggtgtttcgtagggttcggtcgagggtggtggaggaaggggatgtttcgcgaagcgggaattcgtatttttcgtttttttattttttttattttcgttaaatacggggggtttgtgggagtggttttcgtttatatttcgtcgttgttgtcgttgttatatgttcggtcgttgggatgtcggatgcgggatgtgggacgcgcgtagagatgcgggatgtcgggggcgcgtttagttcgggttgtagtcgcgcgcggagttcgagggggtcgagtatcgtgtaggggcggggacggcgtttttttttttttggacgttttttcgattgcgttcgtagggatttcgttttcgtcgcgtttttcgtcgtgtttcgtttcgggttgcgttcgtagttttttattttagtgttcgttcgggaattcgggagtttttcgcgtcggggttaacgtgcggcgtttttcgtcggttatagcgggcgggagacgcgaggcggcgcgggagtaggggaaggaggggaaggagcgggggaggaggggacggacgaaggtagtacgtagtgggcggcggtagggcggaaggagttgagaaagggatcggttcg

SEQ ID NO: 12676 - DNA, 845 bp, Artificial Sequence
  chemically treated genomic DNA (Homo sapiens) CpG-island No: 12676
cgaaccgatccctttctcaactccttccgccctaccgccgcccactacgtactaccttcgtccgtcccctcctcccccgctccttcccctccttcccctactcccgcgccgcctcgcgtctcccgcccgctataaccgacgaaaaacgccgcacgttaaccccgacgcgaaaaactcccgaattcccgaacgaacactaaaataaaaaactacgaacgcaacccgaaacgaaacacgacgaaaaacgcgacgaaaacgaaatccctacgaacgcaatcgaaaaaacgtccaaaaaaaaaaaaacgccgtccccgcccctacacgatactcgaccccctcgaactccgcgcgcgactacaacccgaactaaacgcgcccccgacatcccgcatctctacgcgcgtcccacatcccgcatccgacatcccaacgaccgaacatataacaacgacaacaacgacgaaatataaacgaaaaccactcccacaaaccccccgtatttaacgaaaataaaaaaaataaaaaaacgaaaaatacgaattcccgcttcgcgaaacatccccttcctccaccaccctcgaccgaaccctacgaaacaccgcatactacccgacgcgaaaacccaaacataaccacttcgcccaacgaatacaatatatacccgacccgtaccaaacgcgacgcttctactaaaacaactcctaaatacccaataccgtttaataatcgaaacgatacctaacgcgaaactaaaaaaacgacttcaaaaaattaaacccgaaacctacacttaaaaatataaaaaaaaaaaattaacttcgaaaaccaatcgaaataattctaaa

SEQ ID NO: 12677 - DNA, 749 bp, Artificial Sequence
  chemically treated genomic DNA (Homo sapiens) CpG-island No: 12677
gggcgtcgggggcgtcggtcggggcgcgggggatttttttttcgggcggtagcggtagcggcgattcgatttcgcgggttgcgtcgttcgggttgttaagcgcggggggcgggcgggaggaaggggtggaggtgcgaggggaggagggttggtatcggagcgtcgcggcgtcggtgtaataaaaatgtatcgtatggaattgttcgtggagaaggacgggacggagtcggggtagttagaagaggtgggaaaagcggaggaggacgtttaggaggaggcggcggcggcggtcgggaagtgaaaggtttcgtaaagtttagcggcggttgcgggcgttcgagtttcgggttagcggtagacgagttcgtagggtcgtttcgcggggtagcgtagttaggtcggttatggtttcggggttttcgtcgttttttaggtgttcgggattcgttaggtcggtgcgcgagggttattttattttttcgcgcggtttcggtttttggtttttagttgtcggcgatcgttgatcgagttcggcgttttaggaggaggaagaaattagggtttcgttttttttcgaggacggcggcgttttatttcgtagtttagaggtttcggtttttttcggtattcgttcggttcggttgttttcggtttttttcggttatggggagttgcgcgcggttgttgttgttttgggtttgtttttttattataaatttttataaatataatttttaggttaaaaggta

SEQ ID NO: 12678 - DNA, 749 bp, Artificial Sequence
  chemically treated genomic DNA (Homo sapiens) CpG-island No: 12678
taccttttaacctaaaaattatatttataaaaatttataataaaaaaacaaacccaaaacaacaacaaccgcgcgcaactccccataaccgaaaaaaaccgaaaacaaccgaaccgaacgaataccgaaaaaaaccgaaacctctaaactacgaaataaaacgccgccgtcctcgaaaaaaaacgaaaccctaatttcttcctcctcctaaaacgccgaactcgatcaacgatcgccgacaactaaaaaccaaaaaccgaaaccgcgcgaaaaaataaaataaccctcgcgcaccgacctaacgaatcccgaacacctaaaaaacgacgaaaaccccgaaaccataaccgacctaactacgctaccccgcgaaacgaccctacgaactcgtctaccgctaacccgaaactcgaacgcccgcaaccgccgctaaactttacgaaacctttcacttcccgaccgccgccgccgcctcctcctaaacgtcctcctccgcttttcccacctcttctaactaccccgactccgtcccgtccttctccacgaacaattccatacgatacatttttattacaccgacgccgcgacgctccgataccaaccctcctcccctcgcacctccaccccttcctcccgcccgccccccgcgcttaacaacccgaacgacgcaacccgcgaaatcgaatcgccgctaccgctaccgcccgaaaaaaaaatcccccgcgccccgaccgacgcccccgacgccc

SEQ ID NO: 12679 - DNA, 749 bp, Artificial Sequence
  chemically treated genomic DNA (Homo sapiens) CpG-island No: 12679
tgttttttaatttaggaattatatttgtaagaatttatggtaaagaagtaggtttagagtagtagtagtcgcgcgtagttttttatggtcgggaggagtcgggagtagtcgggtcgggcgggtgtcggagggagtcgagatttttgggttgcgggatgaagcgtcgtcgttttcgggagggaacggggttttggtttttttttttttttggggcgtcgggttcggttagcggtcgtcggtagttgggagttaggggtcgggatcgcgcggggaggtggggtgattttcgcgtatcggtttggcgggtttcgggtatttggggggcggcgggagtttcgggattatagtcggtttggttgcgttgtttcgcggagcggttttgcgggttcgtttgtcgttagttcggggttcgggcgttcgtagtcgtcgttgaattttgcgagattttttatttttcggtcgtcgtcgtcgtttttttttgggcgttttttttcgttttttttattttttttggttgtttcggtttcgtttcgtttttttttacgggtagttttatgcgatgtatttttattgtatcgacgtcgcggcgtttcggtgttagttttttttttttcgtatttttatttttttttttcgttcgtttttcgcgtttgatagttcgggcggcgtagttcgcgggatcggatcgtcgttgtcgttgtcgttcggggggggggtttttcgcgtttcgatcgacgttttcgacgttt

SEQ ID NO: 12680 - DNA, 749 bp, Artificial Sequence
  chemically treated genomic DNA (Homo sapiens) CpG-island No: 12680
aaacgtcgaaaacgtcgatcgaaacgcgaaaaaccccccccccgaacgacaacgacaacgacgatccgatcccgcgaactacgccgcccgaactatcaaacgcgaaaaacgaacgaaaaaaaaaaataaaaatacgaaaaaaaaaaaactaacaccgaaacgccgcgacgtcgatacaataaaaatacatcgcataaaactacccgtaaaaaaaaacgaaacgaaaccgaaacaaccaaaaaaaataaaaaaaacgaaaaaaaacgcccaaaaaaaaacgacgacgacgaccgaaaaataaaaaatctcgcaaaattcaacgacgactacgaacgcccgaaccccgaactaacgacaaacgaacccgcaaaaccgctccgcgaaacaacgcaaccaaaccgactataatcccgaaactcccgccgccccccaaatacccgaaacccgccaaaccgatacgcgaaaatcaccccacctccccgcgcgatcccgacccctaactcccaactaccgacgaccgctaaccgaacccgacgccccaaaaaaaaaaaaaaaccaaaaccccgttccctcccgaaaacgacgacgcttcatcccgcaacccaaaaatctcgactccctccgacacccgcccgacccgactactcccgactcctcccgaccataaaaaactacgcgcgactactactactctaaacctacttctttaccataaattcttacaaatataattcctaaattaaaaaaca

SEQ ID NO: 12681 - DNA, 568 bp, Artificial Sequence
  chemically treated genomic DNA (Homo sapiens) CpG-island No: 12681
cgtagttcggattgtagggcggggagcgttcgggggtttcgttatttcgggtggtaacggcgtttggcgtgttcgttatgtttttggacgagaggtgagtagtgtcggttcgtaggcgaaggagagcgtaggaacggttttattttcgtttcgtttattttttttttttttcgatcgggattttttaggttttttttttcgtttcgtcgttttttcgacgatatcggttcggattttgttgttttttgagggtacgtagagtcgtagggtttgcgtgaaggggcgggtagtttttttgagtaatatcggttcggtttcgtgcgtttcggatatgagttatatttagtttcgggatcggttttttgtggtcgtttgtttgtttttgggggagcgggtcgcggggatttcgtttgttgcggaagagttttcgtagtcgttgcgtatcgcgatagtaggcggcgttcgagtttcgggtcgtgggttgtttttaggtggcgaggcggggagttggggatttttgggttgcgttttcgtcgatggtttcgagatatttttttatttgttaagt

SEQ ID NO: 12682 - DNA, 568 bp, Artificial Sequence
  chemically treated genomic DNA (Homo sapiens) CpG-island No: 12682
acttaacaaataaaaaaatatctcgaaaccatcgacgaaaacgcaacccaaaaatccccaactccccgcctcgccacctaaaaacaacccacgacccgaaactcgaacgccgcctactatcgcgatacgcaacgactacgaaaactcttccgcaacaaacgaaatccccgcgacccgctcccccaaaaacaaacaaacgaccacaaaaaaccgatcccgaaactaaatataactcatatccgaaacgcacgaaaccgaaccgatattactcaaaaaaactacccgccccttcacgcaaaccctacgactctacgtaccctcaaaaaacaacaaaatccgaaccgatatcgtcgaaaaaacgacgaaacgaaaaaaaaaacctaaaaaatcccgatcgaaaaaaaaaaaaaataaacgaaacgaaaataaaaccgttcctacgctctccttcgcctacgaaccgacactactcacctctcgtccaaaaacataacgaacacgccaaacgccgttaccacccgaaataacgaaacccccgaacgctccccgccctacaatccgaactacg

SEQ ID NO: 12683 - DNA, 568 bp, Artificial Sequence
  chemically treated genomic DNA (Homo sapiens) CpG-island No: 12683
atttaatagatgaggaagtgtttcggggttatcggcggaggcgtagtttaggggtttttagtttttcgtttcgttatttggggatagtttacggttcggggttcgggcgtcgtttgttgtcgcggtgcgtagcgattacgggaattttttcgtagtagacggggttttcgcggttcgtttttttaggggtaagtaagcgattataggggatcggtttcggggttggatgtggtttatgttcgaagcgtacggagtcgagtcggtgttgtttagggaggttgttcgtttttttacgtagattttgcggttttgcgtgtttttagggaatagtaaggttcgagtcggtgtcgtcgagggggcgacgggacggagggaggagtttgaggggtttcggtcgagggaggggaggagtgggcggggcgggggtggggtcgtttttgcgttttttttcgtttgcgggtcggtattgtttatttttcgtttagggatatgacgggtacgttaggcgtcgttgttattcgggatggcgaggttttcgagcgtttttcgttttgtagttcgagttacg

SEQ ID NO: 12684 - DNA, 568 bp, Artificial Sequence
  chemically treated genomic DNA (Homo sapiens) CpG-island No: 12684
cgtaactcgaactacaaaacgaaaaacgctcgaaaacctcgccatcccgaataacaacgacgcctaacgtacccgtcatatccctaaacgaaaaataaacaataccgacccgcaaacgaaaaaaaacgcaaaaacgaccccacccccgccccgcccactcctcccctccctcgaccgaaacccctcaaactcctccctccgtcccgtcgccccctcgacgacaccgactcgaaccttactattccctaaaaacacgcaaaaccgcaaaatctacgtaaaaaaacgaacaacctccctaaacaacaccgactcgactccgtacgcttcgaacataaaccacatccaaccccgaaaccgatcccctataatcgcttacttacccctaaaaaaacgaaccgcgaaaaccccgtctactacgaaaaaattcccgtaatcgctacgcaccgcgacaacaaacgacgcccgaaccccgaaccgtaaactatccccaaataacgaaacgaaaaactaaaaacccctaaactacgcctccgccgataaccccgaaacacttcctcatctattaaat

SEQ ID NO: 12685 - DNA, 621 bp, Artificial Sequence
  chemically treated genomic DNA (Homo sapiens) CpG-island No: 12685
cggcgggtttattcgtttagaatcgggaattcggcgagtttcgtttttgttattttagcgtcggtcgttcggtaataaatatttttattttttgagcgttagttttcgttcgtcgcggggcgtcgcgtcgagcgtaggtttcgtttcgcgcgtttttaatggtcggcgtcgtttattcggtcggagcgtttaggtttgtagttttttattggttcgcggaggtttttatttttagcgcggtttcgttttcggggtaaggagtcggggcggattttgggacgtttagacgtcgcgcggggcggggattggtttgtggttttttttcggtttttcgcggttcgcggcggtcgacggtttttgggatatttgtttgtttggttcgttcggcggtttagggtttttttgttgcgttttcggttcgttggacgggaagaagggttgggtcgtttcgtttcgtttttatcggaattttaagtcgcgtcgttgattcgtcgtagggcgagatgagcgcggacgtagcggtcggggcgtttttgtttcggttttgttgtttggagaagggttcgaacggttacggtttttatttgtacggggagaagggtaagttgggttagtatattt

SEQ ID NO: 12686 - DNA, 621 bp, Artificial Sequence
  chemically treated genomic DNA (Homo sapiens) CpG-island No: 12686
aaatatactaacccaacttacccttctccccgtacaaataaaaaccgtaaccgttcgaacccttctccaaacaacaaaaccgaaacaaaaacgccccgaccgctacgtccgcgctcatctcgccctacgacgaatcaacgacgcgacttaaaattccgataaaaacgaaacgaaacgacccaacccttcttcccgtccaacgaaccgaaaacgcaacaaaaaaaccctaaaccgccgaacgaaccaaacaaacaaatatcccaaaaaccgtcgaccgccgcgaaccgcgaaaaaccgaaaaaaaaccacaaaccaatccccgccccgcgcgacgtctaaacgtcccaaaatccgccccgactccttaccccgaaaacgaaaccgcgctaaaaataaaaacctccgcgaaccaataaaaaactacaaacctaaacgctccgaccgaataaacgacgccgaccattaaaaacgcgcgaaacgaaacctacgctcgacgcgacgccccgcgacgaacgaaaactaacgctcaaaaaataaaaatatttattaccgaacgaccgacgctaaaataacaaaaacgaaactcgccgaattcccgattctaaacgaataaacccgccg

SEQ ID NO: 12687 - DNA, 621 bp, Artificial Sequence
  chemically treated genomic DNA (Homo sapiens) CpG-island No: 12687
ggatgtattggtttaatttgttttttttttcgtgtaggtggaagtcgtagtcgttcggatttttttttaggtagtagagtcggggtaggggcgtttcggtcgttgcgttcgcgtttatttcgttttgcgacgggttagcggcgcgatttggggtttcgatggggacgggacgggacggtttagttttttttttcgtttagcgaatcgggagcgtagtagagaagttttgagtcgtcggacgggttaagtaagtaggtgttttaggaatcgtcggtcgtcgcgagtcgcgaggagtcgagagaggattatagattaattttcgtttcgcgcggcgtttgagcgttttagagttcgtttcggttttttatttcgggggcggggtcgcgttgagggtggggattttcgcgggttaatagggggttgtaggtttgggcgtttcggtcgggtgaacggcgtcggttattgggaacgcgcggggcggggtttgcgttcggcgcggcgtttcgcggcgggcgaagattagcgtttaggaagtggaagtgtttgttatcgagcggtcggcgttggggtggtaggggcggggttcgtcgaattttcggttttgggcgggtgggttcgtcg

SEQ ID NO: 12688 - DNA, 621 bp, Artificial Sequence
  chemically treated genomic DNA (Homo sapiens) CpG-island No: 12688
cgacgaacccacccgcccaaaaccgaaaattcgacgaaccccgcccctaccaccccaacgccgaccgctcgataacaaacacttccacttcctaaacgctaatcttcgcccgccgcgaaacgccgcgccgaacgcaaaccccgccccgcgcgttcccaataaccgacgccgttcacccgaccgaaacgcccaaacctacaaccccctattaacccgcgaaaatccccaccctcaacgcgaccccgcccccgaaataaaaaaccgaaacgaactctaaaacgctcaaacgccgcgcgaaacgaaaattaatctataatcctctctcgactcctcgcgactcgcgacgaccgacgattcctaaaacacctacttacttaacccgtccgacgactcaaaacttctctactacgctcccgattcgctaaacgaaaaaaaaaactaaaccgtcccgtcccgtccccatcgaaaccccaaatcgcgccgctaacccgtcgcaaaacgaaataaacgcgaacgcaacgaccgaaacgcccctaccccgactctactacctaaaaaaaaatccgaacgactacgacttccacctacacgaaaaaaaaaacaaattaaaccaatacatcc

SEQ ID NO: 12689 - DNA, 657 bp, Artificial Sequence
  chemically treated genomic DNA (Homo sapiens) CpG-island No: 12689
ggacgttaggggacgaattacgttgatttcgttagatacgcgatttcggggtcggcgttggcgtttgtattcgcgcgatttcgtcgttttttttgggagcgtcgtttaatcgttttcggcgacgattttttagagcgtcggggagttagtgtttacgcggggtagagttgcggcgcggttcgcgggtcgggttttttttttttaacgtcgggcggggttcgcggttttcgattcggtcgtttcgtcgtcgttttttttcgcgtttatttgttcgttttttttcggtcgttgttcgcgtcgtcgcgggttcgtttcgggattttattcggtttttgtcgtttttcgtttcgttagcgcgttttcgttttcgtcgcgtttttcgtcgtcgtcgtttcgtagtagtttttcggttgagtatatttcgtagttaatttttatcgtttcggatagtcgtcggaggattacgtcgcgacgtattaggtagcgtcgtcgttcgaaggttgttttgggattcgtcgtattcgtcgttgataggagtcgtcggagcgcgtttcgtcggtttgggcgtttgaagtattagttcggttttttttgttattggttcgtttaattttcggtcgtcggggcggagtcgtataggggaggggttaagatagg

SEQ ID NO: 12690 - DNA, 657 bp, Artificial Sequence
  chemically treated genomic DNA (Homo sapiens) CpG-island No: 12690
cctatcttaacccctcccctatacgactccgccccgacgaccgaaaattaaacgaaccaataacaaaaaaaaccgaactaatacttcaaacgcccaaaccgacgaaacgcgctccgacgactcctatcaacgacgaatacgacgaatcccaaaacaaccttcgaacgacgacgctacctaatacgtcgcgacgtaatcctccgacgactatccgaaacgataaaaattaactacgaaatatactcaaccgaaaaactactacgaaacgacgacgacgaaaaacgcgacgaaaacgaaaacgcgctaacgaaacgaaaaacgacaaaaaccgaataaaatcccgaaacgaacccgcgacgacgcgaacaacgaccgaaaaaaaacgaacaaataaacgcgaaaaaaaacgacgacgaaacgaccgaatcgaaaaccgcgaaccccgcccgacgttaaaaaaaaaaaacccgacccgcgaaccgcgccgcaactctaccccgcgtaaacactaactccccgacgctctaaaaaatcgtcgccgaaaacgattaaacgacgctcccaaaaaaaacgacgaaatcgcgcgaatacaaacgccaacgccgaccccgaaatcgcgtatctaacgaaatcaacgtaattcgtcccctaacgtcc

SEQ ID NO: 12691 - DNA, 657 bp, Artificial Sequence
  chemically treated genomic DNA (Homo sapiens) CpG-island No: 12691
tttgttttggttttttttttgtacggtttcgtttcgacggtcgggggttgggcgagttagtgataggaggggtcgggttggtattttaggcgtttaggtcggcggggcgcgtttcggcggtttttgttagcggcgggtgcggcggattttagggtagttttcgggcggcggcgttgtttggtgcgtcgcggcgtggtttttcggcggttgttcggggcggtaggagttggttgcgggatgtgtttagtcggggagttgttgcggggcggcgacggcggggaacgcgacgaggacggggacgcgttggcggagcgggaggcggtagggatcgggtgggatttcggggcgagttcgcggcggcgcggatagcggtcgaaggagagcgagtaggtgagcgcggggaggggcggcggcgaagcggtcgggtcgggggtcgcgagtttcgttcggcgttggagggaaggggttcggttcgcgggtcgcgtcgtagttttgtttcgcgtgggtattggtttttcggcgttttgggaagtcgtcgtcgggagcggttagacggcgtttttaggaggagcggcggggtcgcgcgagtgtagacgttagcgtcggtttcggggtcgcgtgtttggcggggttagcgtggttcgttttttggcgttt

SEQ ID NO: 12692 - DNA, 657 bp, Artificial Sequence
  chemically treated genomic DNA (Homo sapiens) CpG-island No: 12692
aaacgccaaaaaacgaaccacgctaaccccgccaaacacgcgaccccgaaaccgacgctaacgtctacactcgcgcgaccccgccgctcctcctaaaaacgccgtctaaccgctcccgacgacgacttcccaaaacgccgaaaaaccaatacccacgcgaaacaaaactacgacgcgacccgcgaaccgaaccccttccctccaacgccgaacgaaactcgcgacccccgacccgaccgcttcgccgccgcccctccccgcgctcacctactcgctctccttcgaccgctatccgcgccgccgcgaactcgccccgaaatcccacccgatccctaccgcctcccgctccgccaacgcgtccccgtcctcgtcgcgttccccgccgtcgccgccccgcaacaactccccgactaaacacatcccgcaaccaactcctaccgccccgaacaaccgccgaaaaaccacgccgcgacgcaccaaacaacgccgccgcccgaaaactaccctaaaatccgccgcacccgccgctaacaaaaaccgccgaaacgcgccccgccgacctaaacgcctaaaataccaacccgacccctcctatcactaactcgcccaacccccgaccgtcgaaacgaaaccgtacaaaaaaaaaaccaaaacaaa

SEQ ID NO: 12693 - DNA, 772 bp, Artificial Sequence
  chemically treated genomic DNA (Homo sapiens) CpG-island No: 12693
gaaattggcgtgggggaggggagggttgtttattcgagtaggacgcggttgtttatttagtcggaggtgaggaacgatttttttatttcgttgtcgggtttaagcggggttcgagagtcgtcggggagagttaaagggaggggatcgatggattttttagagtgaaattgtgcgttttggagagtttcgaggtagtttcgcgagttttcgaggaggtcgttgtcgtttggtaaatataaataataataaaaggaaggaaatttaggcggtagtgcgtagaacgagtatagggttttgtgagggcgcgtagggtttacgcgggtgtttttaatagggttttttacgtaggcggcgcgggtacggggtcgggggcgcgcggcgtttttagcgggagggcgtttggattaggggtttcgtttttttttagcgtattttcgtttttttttagcgtattttcgtttcgcgttaggtttattcgtagggttttttttagtacgttcgcggtcgtagtagttagtttagtatttattttcgaagttcgaaatgattttatttagttgcgcgttgatcgcggggttcgatatgatggttggtgggtagcgggtcgcgcggagggtagcggcgaggaagcgttttcggcggggttcgggttttgcgcgttggttggggcgtcgcgttcgcgtttttgtagtgtagagttagtcgtcggaggagtttttaggttttttggtttagttgaatgaatgggggaggaaggcgggcgtcggttttt

SEQ ID NO: 12694 - DNA, 772 bp, Artificial Sequence
  chemically treated genomic DNA (Homo sapiens) CpG-island No: 12694
aaaaaccgacgcccgccttcctcccccattcattcaactaaaccaaaaaacctaaaaactcctccgacgactaactctacactacaaaaacgcgaacgcgacgccccaaccaacgcgcaaaacccgaaccccgccgaaaacgcttcctcgccgctaccctccgcgcgacccgctacccaccaaccatcatatcgaaccccgcgatcaacgcgcaactaaataaaatcatttcgaacttcgaaaataaatactaaactaactactacgaccgcgaacgtactaaaaaaaaccctacgaataaacctaacgcgaaacgaaaatacgctaaaaaaaaacgaaaatacgctaaaaaaaaacgaaacccctaatccaaacgccctcccgctaaaaacgccgcgcgcccccgaccccgtacccgcgccgcctacgtaaaaaaccctattaaaaacacccgcgtaaaccctacgcgccctcacaaaaccctatactcgttctacgcactaccgcctaaatttccttccttttattattatttatatttaccaaacgacaacgacctcctcgaaaactcgcgaaactacctcgaaactctccaaaacgcacaatttcactctaaaaaatccatcgatcccctccctttaactctccccgacgactctcgaaccccgcttaaacccgacaacgaaataaaaaaatcgttcctcacctccgactaaataaacaaccgcgtcctactcgaataaacaaccctcccctcccccacgccaatttc

SEQ ID NO: 12695 - DNA, 772 bp, Artificial Sequence
  chemically treated genomic DNA (Homo sapiens) CpG-island No: 12695
aggggtcggcgttcgttttttttttttatttatttagttgagttagggggtttaggggttttttcggcggttagttttgtattgtaggagcgcgggcgcggcgttttagttagcgcgtagggttcgggtttcgtcgggggcgttttttcgtcgttgtttttcgcgcgattcgttgtttattagttattatgtcggatttcgcggttaacgcgtagttggatgggattatttcggatttcgaaggtgggtgttgggttggttgttgcggtcgcggacgtgttggagaggattttgcgggtgggtttggcgcgggacgggggtgcgttgaggggagacgggagtgcgttgaggggagacgggatttttaatttaggcgttttttcgttgagagcgtcgcgcgttttcggtttcgtgttcgcgtcgtttacgtgggggattttgttaggggtattcgcgtagattttgcgcgtttttataggattttgtgttcgttttgcgtattgtcgtttgggtttttttttttttattgttgtttgtgtttgttaagcgatagcgattttttcgagggttcgcgaggttgtttcggaattttttaggacgtatagttttattttgggaaatttatcggttttttttttttggtttttttcggcggttttcgggtttcgtttggattcggtaacgggatagggaggtcgttttttattttcgattgagtggatagtcgcgttttgttcgggtggatagttttttttttttttacgttagtttt

SEQ ID NO: 12696 - DNA, 772 bp, Artificial Sequence
  chemically treated genomic DNA (Homo sapiens) CpG-island No: 12696
aaaactaacgtaaaaaaaaaaaaaactatccacccgaacaaaacgcgactatccactcaatcgaaaataaaaaacgacctccctatcccgttaccgaatccaaacgaaacccgaaaaccgccgaaaaaaaccaaaaaaaaaaaaccgataaatttcccaaaataaaactatacgtcctaaaaaattccgaaacaacctcgcgaaccctcgaaaaaatcgctatcgcttaacaaacacaaacaacaataaaaaaaaaaaaacccaaacgacaatacgcaaaacgaacacaaaatcctataaaaacgcgcaaaatctacgcgaatacccctaacaaaatcccccacgtaaacgacgcgaacacgaaaccgaaaacgcgcgacgctctcaacgaaaaaacgcctaaattaaaaatcccgtctcccctcaacgcactcccgtctcccctcaacgcacccccgtcccgcgccaaacccacccgcaaaatcctctccaacacgtccgcgaccgcaacaaccaacccaacacccaccttcgaaatccgaaataatcccatccaactacgcgttaaccgcgaaatccgacataataactaataaacaacgaatcgcgcgaaaaacaacgacgaaaaaacgcccccgacgaaacccgaaccctacgcgctaactaaaacgccgcgcccgcgctcctacaatacaaaactaaccgccgaaaaaacccctaaaccccctaactcaactaaataaataaaaaaaaaaaacgaacgccgacccct

SEQ ID NO: 12697 - DNA, 729 bp, Artificial Sequence
  chemically treated genomic DNA (Homo sapiens) CpG-island No: 12697
ggtattcgttttcgtcgttcgggtcgtttcgttcggtttcgtagagcgtcgcgtttaggttgcgattttttttttttattttgttcggttgcgtagtgcgtttttcgtttagtttgtagagttcgcgtcgcggtagtttagtcgttcggtttcgtcgcgttcgtagaggtcgttatgggatcgcgcgttggttcgcgttgggtagttttttcgttttggttgggttgttggaaggtcggttcgtgggcgaggaggaagtcggttttggcgaatgtgataagtttttttacgtcgggatttcgtttgcggggttggcggtcgatttttacgtgaagatttgttagcgcgcggagggtgttgagcgtttcgttattttttatagtattcgggatcgtattttcgtgtatttcgcgtttcggtttcgcgtttgtcgtcggcggcgtcgagtagcgatggttggtggagtcgtaggtaagcgaagtggttttcgagtcgggttgcgggcgtcggagatcgtgtcgttggatttgtttttagttgtagttatcgcgaggggcgggtcgggaatagtaatttttacgttttcggtgttttgggttaagaaattcgggttttaggtttattttgttgcgttttcggagtttagtttgtttcgttttttgtcgaggttataataagagtttggcgatttgcgagtttttattttatgagttgtaggggcgggaggtt

SEQ ID NO: 12698 - DNA, 729 bp, Artificial Sequence
  chemically treated genomic DNA (Homo sapiens) CpG-island No: 12698
aacctcccgcccctacaactcataaaataaaaactcgcaaatcgccaaactcttattataacctcgacaaaaaacgaaacaaactaaactccgaaaacgcaacaaaataaacctaaaacccgaatttcttaacccaaaacaccgaaaacgtaaaaattactattcccgacccgcccctcgcgataactacaactaaaaacaaatccaacgacacgatctccgacgcccgcaacccgactcgaaaaccacttcgcttacctacgactccaccaaccatcgctactcgacgccgccgacgacaaacgcgaaaccgaaacgcgaaatacacgaaaatacgatcccgaatactataaaaaataacgaaacgctcaacaccctccgcgcgctaacaaatcttcacgtaaaaatcgaccgccaaccccgcaaacgaaatcccgacgtaaaaaaacttatcacattcgccaaaaccgacttcctcctcgcccacgaaccgaccttccaacaacccaaccaaaacgaaaaaactacccaacgcgaaccaacgcgcgatcccataacgacctctacgaacgcgacgaaaccgaacgactaaactaccgcgacgcgaactctacaaactaaacgaaaaacgcactacgcaaccgaacaaaataaaaaaaaaaaatcgcaacctaaacgcgacgctctacgaaaccgaacgaaacgacccgaacgacgaaaacgaatacc

SEQ ID NO: 12699 - DNA, 729 bp, Artificial Sequence
  chemically treated genomic DNA (Homo sapiens) CpG-island No: 12699
gatttttcgtttttgtagtttatgaagtgaaggttcgtagatcgttaggtttttattgtagtttcgatagggggcgaggtaggttaaatttcggggacgtaatagggtggatttggaattcgggttttttggtttaaggtatcgaaggcgtagggattgttgttttcggttcgtttttcgcggtagttgtaattgggggtaagtttagcggtacggttttcggcgttcgtagttcggttcgggaattatttcgtttatttgcggttttattagttatcgttgttcggcgtcgtcggcggtaggcgcggggtcggaacgcggagtatacggggatgcggtttcgggtgttgtagagggtggcgaagcgtttagtatttttcgcgcgttgatagatttttacgtgggaatcggtcgttagtttcgtaggcggggtttcggcgtagaagaatttgttatattcgttaaagtcggtttttttttcgtttacgagtcggttttttagtagtttagttagggcgaagaggttgtttagcgcgagttagcgcgcggttttatggcggtttttgcgagcgcggcggggtcgagcggttgggttgtcgcggcgcgagttttgtaggttgggcggggagcgtattacgtagtcgagtagggtagggaagggaagtcgtagtttaggcgcggcgttttgcggagtcgggcggggcggttcgggcggcgggggcgggtatt

SEQ ID NO: 12700 - DNA, 729 bp, Artificial Sequence
  chemically treated genomic DNA (Homo sapiens) CpG-island No: 12700
aatacccgcccccgccgcccgaaccgccccgcccgactccgcaaaacgccgcgcctaaactacgacttcccttccctaccctactcgactacgtaatacgctccccgcccaacctacaaaactcgcgccgcgacaacccaaccgctcgaccccgccgcgctcgcaaaaaccgccataaaaccgcgcgctaactcgcgctaaacaacctcttcgccctaactaaactactaaaaaaccgactcgtaaacgaaaaaaaaaccgactttaacgaatataacaaattcttctacgccgaaaccccgcctacgaaactaacgaccgattcccacgtaaaaatctatcaacgcgcgaaaaatactaaacgcttcgccaccctctacaacacccgaaaccgcatccccgtatactccgcgttccgaccccgcgcctaccgccgacgacgccgaacaacgataactaataaaaccgcaaataaacgaaataattcccgaaccgaactacgaacgccgaaaaccgtaccgctaaacttacccccaattacaactaccgcgaaaaacgaaccgaaaacaacaatccctacgccttcgataccttaaaccaaaaaacccgaattccaaatccaccctattacgtccccgaaatttaacctacctcgccccctatcgaaactacaataaaaacctaacgatctacgaaccttcacttcataaactacaaaaacgaaaaatc

SEQ ID NO: 12701 - DNA, 944 bp, Artificial Sequence
  chemically treated genomic DNA (Homo sapiens) CpG-island No: 12701
cgttcgttttttcgttcggtttttttcggcgtttttacgcgggcgtaatcgcgagaaagaaacgtaggtcgtatcgttagcgtttagagtagcgttagttttcgggttcgggttgttttcggagttatgagttgcggtcgtttttttttcgacgtggacggtatgattatttttaaggtggataatttgatttatcgtatttttttcgatagtttgaggcgcgtgttcgagaagtacgggcgcgtgggcgacgtgtatatttcgcgggagttttatattaaggcgtttcggggtttcgttttcgttcgtttttacgatcggcgcgacgtttaagacgtcgaggtcgttatggacggggcggagttggacggacgcgagttgcgggtgtaggtggcgcgttatggtcgtcgggatttgtttcgtagtcgttagggagagttacgcggtaggtttagaggcggcggttacggacggcggagtcgtagttacgggcggcggagtcgtagttttaggcggcgatatcgtagtcgatttcggggttttagttgttttaggtttcgtagtcgatttcgttataggggttttcgttatagtcggtttttttatagtcgatttttttatagtcggtcgcgttatagtcgttttttttatagtagatttcgttatagggaatttcgttacggcggattttattatagtttatttggttatagtaattttcgttatagtcgatattatagtagtcggttttattcgaagtttgggttttttattagttttcgttttgtattaatttttaaatcgagttttgcgcgacgatttaagtttttttcggtttttaggtttcgttcgcggtttaggtttttatttatgattaggagtttttttcgggtatttaagaggaaatttaagttaaggtcgcgatttaagaggttttttaagtt

SEQ ID NO: 12702 - DNA, 944 bp, Artificial Sequence
  chemically treated genomic DNA (Homo sapiens) CpG-island No: 12702
aacttaaaaaacctcttaaatcgcgaccttaacttaaatttcctcttaaatacccgaaaaaaactcctaatcataaataaaaacctaaaccgcgaacgaaacctaaaaaccgaaaaaaacttaaatcgtcgcgcaaaactcgatttaaaaattaatacaaaacgaaaactaataaaaaacccaaacttcgaataaaaccgactactataatatcgactataacgaaaattactataaccaaataaactataataaaatccgccgtaacgaaattccctataacgaaatctactataaaaaaaacgactataacgcgaccgactataaaaaaatcgactataaaaaaaccgactataacgaaaacccctataacgaaatcgactacgaaacctaaaacaactaaaaccccgaaatcgactacgatatcgccgcctaaaactacgactccgccgcccgtaactacgactccgccgtccgtaaccgccgcctctaaacctaccgcgtaactctccctaacgactacgaaacaaatcccgacgaccataacgcgccacctacacccgcaactcgcgtccgtccaactccgccccgtccataacgacctcgacgtcttaaacgtcgcgccgatcgtaaaaacgaacgaaaacgaaaccccgaaacgccttaatataaaactcccgcgaaatatacacgtcgcccacgcgcccgtacttctcgaacacgcgcctcaaactatcgaaaaaaatacgataaatcaaattatccaccttaaaaataatcataccgtccacgtcgaaaaaaaaacgaccgcaactcataactccgaaaacaacccgaacccgaaaactaacgctactctaaacgctaacgatacgacctacgtttctttctcgcgattacgcccgcgtaaaaacgccgaaaaaaaccgaacgaaaaaacgaacg

SEQ ID NO: 12703 - DNA, 944 bp, Artificial Sequence
  chemically treated genomic DNA (Homo sapiens) CpG-island No: 12703
gatttggggggttttttggatcgcgattttgatttggatttttttttggatattcggggaggatttttggttatagatgaagatttggatcgcgagcgagatttggagatcgaggaggatttggatcgtcgcgtagagttcgatttggaggttgatgtagagcgagagttagtggaggatttagatttcgagtgagatcggttgttgtgatatcggttgtagcgagagttattgtaattagatgagttgtagtgagattcgtcgtagcgagattttttgtagcgagatttgttgtagggagagcggttgtagcgcgatcggttgtaaggagatcggttgtagggagatcggttatagcgagaatttttatagcgagatcggttgcgggatttggagtagttgggatttcgggatcggttgcggtgtcgtcgtttggggttgcggtttcgtcgttcgtagttgcggtttcgtcgttcgtagtcgtcgtttttggatttgtcgcgtggttttttttggcggttgcggggtaggtttcggcggttatagcgcgttatttgtattcgtagttcgcgttcgtttagtttcgtttcgtttatggcggtttcggcgttttgggcgtcgcgtcggtcgtgaaagcggacgaaagcgaagtttcggggcgttttggtgtggggttttcgcgggatgtatacgtcgtttacgcgttcgtatttttcgaatacgcgttttaagttgtcgggagaggtgcggtaggttaggttgtttattttgagggtgattatgtcgtttacgtcgggaggggggcggtcgtagtttatggtttcgagagtagttcgggttcggaaattggcgttgttttgggcgttgacggtgcgatttgcgtttttttttcgcggttgcgttcgcgtggggacgtcgggaaaggtcgggcggagaggcgggcg

SEQ ID NO: 12704 - DNA, 944 bp, Artificial Sequence
  chemically treated genomic DNA (Homo sapiens) CpG-island No: 12704
cgcccgcctctccgcccgacctttcccgacgtccccacgcgaacgcaaccgcgaaaaaaaaacgcaaatcgcaccgtcaacgcccaaaacaacgccaatttccgaacccgaactactctcgaaaccataaactacgaccgcccccctcccgacgtaaacgacataatcaccctcaaaataaacaacctaacctaccgcacctctcccgacaacttaaaacgcgtattcgaaaaatacgaacgcgtaaacgacgtatacatcccgcgaaaaccccacaccaaaacgccccgaaacttcgctttcgtccgctttcacgaccgacgcgacgcccaaaacgccgaaaccgccataaacgaaacgaaactaaacgaacgcgaactacgaatacaaataacgcgctataaccgccgaaacctaccccgcaaccgccaaaaaaaaccacgcgacaaatccaaaaacgacgactacgaacgacgaaaccgcaactacgaacgacgaaaccgcaaccccaaacgacgacaccgcaaccgatcccgaaatcccaactactccaaatcccgcaaccgatctcgctataaaaattctcgctataaccgatctccctacaaccgatctccttacaaccgatcgcgctacaaccgctctccctacaacaaatctcgctacaaaaaatctcgctacgacgaatctcactacaactcatctaattacaataactctcgctacaaccgatatcacaacaaccgatctcactcgaaatctaaatcctccactaactctcgctctacatcaacctccaaatcgaactctacgcgacgatccaaatcctcctcgatctccaaatctcgctcgcgatccaaatcttcatctataaccaaaaatcctccccgaatatccaaaaaaaaatccaaatcaaaatcgcgatccaaaaaaccccccaaatc

SEQ ID NO: 12705 - DNA, 808 bp, Artificial Sequence
  chemically treated genomic DNA (Homo sapiens) CpG-island No: 12705
  unsure (497)
cggacgtttcggatttgttggtgtcgatcgtgtattaggatattaaggtggcgatttcgggattcgtttttaagcgttcgttatgtgagcgattcgtggttcggtttgttgagttcgcgttttttaataagcgttattgttttagtttcgattttttggaggcgttggatcggtcgattacggagattttgtcggagttatcgttttcggagttcgttgtgtcgcgcgttcggattcgcgaggtcgagttacgtcgtcgcgttcgttttaagagcgcgttttcgggtttgacgttcgcgttcgttttgtcgttcgtgttgtttcgtcgagggcgggaggtttagcgtgcggcgcgggtcgaggtatcgtcgcgtttttgttaattagttgcgttttattaagttgtagtcgtagttgggtggttaggtttatatcgcgttatgtgcgtcgtcgcgggtcgtcgcgtatttttcgagttattcgcgggtttttatttntacgtgcgtttttttcggatattaagttagacgacgtagtgttttagtacgtcgtatggggtttacggttatgcgggttcgtcgaggtagcgttatgggttcgttttcgtttcgtagttttacggttttacggtgttcgggtttcgttatatggcgttgtcgtatatttcgacgttaagcgatttatattgtgcggattttcgggcgttttattgcgacgggtttttgtatgggtttcgggattacgttaagcgtcgtagtttgttttttattattttttcgggttttatttagtttttttatatagagga

SEQ ID NO: 12706 - DNA, 808 bp, Artificial Sequence
  chemically treated genomic DNA (Homo sapiens) CpG-island No: 12706
  unsure (312)
tcctctatataaaaaaactaaataaaacccgaaaaaataataaaaaacaaactacgacgcttaacgtaatcccgaaacccatacaaaaacccgtcgcaataaaacgcccgaaaatccgcacaatataaatcgcttaacgtcgaaatatacgacaacgccatataacgaaacccgaacaccgtaaaaccgtaaaactacgaaacgaaaacgaacccataacgctacctcgacgaacccgcataaccgtaaaccccatacgacgtactaaaacactacgtcgtctaacttaatatccgaaaaaaacgcacgtanaaataaaaacccgcgaataactcgaaaaatacgcgacgacccgcgacgacgcacataacgcgatataaacctaaccacccaactacgactacaacttaataaaacgcaactaattaacaaaaacgcgacgatacctcgacccgcgccgcacgctaaacctcccgccctcgacgaaacaacacgaacgacaaaacgaacgcgaacgtcaaacccgaaaacgcgctcttaaaacgaacgcgacgacgtaactcgacctcgcgaatccgaacgcgcgacacaacgaactccgaaaacgataactccgacaaaatctccgtaatcgaccgatccaacgcctccaaaaaatcgaaactaaaacaataacgcttattaaaaaacgcgaactcaacaaaccgaaccacgaatcgctcacataacgaacgcttaaaaacgaatcccgaaatcgccaccttaatatcctaatacacgatcgacaccaacaaatccgaaacgtccg

SEQ ID NO: 12707 - DNA, 808 bp, Artificial Sequence
  chemically treated genomic DNA (Homo sapiens) CpG-island No: 12707
  unsure (312)
ttttttgtatagaagaattgggtggggttcggaggggtgatgaagggtagattgcggcgtttggcgtagtttcggggtttatgtaggggttcgtcgtagtagaacgttcggggattcgtatagtatgagtcgtttggcgtcggggtgtgcgatagcgttatatggcggggttcgggtatcgtgaggtcgtggaattgcggggcgggggcgggtttatggcgttgtttcggcgggttcgtatgatcgtgagttttatgcggcgtgttggagtattgcgtcgtttggtttgatgttcggaaggagcgtacgtanggatagggattcgcgggtggttcgggaagtgcgcggcggttcgcggcggcgtatatggcgcgatgtgggtttggttatttagttgcggttgtaatttgatgggacgtagttagttggtaagggcgcggcgatgtttcggttcgcgtcgtacgttgggtttttcgttttcggcggggtaatacgggcggtaaggcgggcgcgggcgttaggttcgggggcgcgtttttggagcgggcgcggcggcgtggttcggtttcgcgggttcgggcgcgcggtatagcgggtttcgggggcggtggtttcggtagggttttcgtggtcggtcggtttagcgtttttaggaagtcgaagttggggtagtggcgtttgttgaaaggcgcgggtttagtaggtcgggttacggatcgtttatatggcgagcgtttggaagcgggtttcggggtcgttattttgatgttttggtatacggtcgatattagtaggttcggagcgttcg

SEQ ID NO: 12708 - DNA, 808 bp, Artificial Sequence
  chemically treated genomic DNA (Homo sapiens) CpG-island No: 12708
  unsure (497)
cgaacgctccgaacctactaatatcgaccgtataccaaaacatcaaaataacgaccccgaaacccgcttccaaacgctcgccatataaacgatccgtaacccgacctactaaacccgcgcctttcaacaaacgccactaccccaacttcgacttcctaaaaacgctaaaccgaccgaccacgaaaaccctaccgaaaccaccgcccccgaaacccgctataccgcgcgcccgaacccgcgaaaccgaaccacgccgccgcgcccgctccaaaaacgcgcccccgaacctaacgcccgcgcccgccttaccgcccgtattaccccgccgaaaacgaaaaacccaacgtacgacgcgaaccgaaacatcgccgcgcccttaccaactaactacgtcccatcaaattacaaccgcaactaaataaccaaacccacatcgcgccatatacgccgccgcgaaccgccgcgcacttcccgaaccacccgcgaatccctatccntacgtacgctccttccgaacatcaaaccaaacgacgcaatactccaacacgccgcataaaactcacgatcatacgaacccgccgaaacaacgccataaacccgcccccgccccgcaattccacgacctcacgatacccgaaccccgccatataacgctatcgcacaccccgacgccaaacgactcatactatacgaatccccgaacgttctactacgacgaacccctacataaaccccgaaactacgccaaacgccgcaatctacccttcatcacccctccgaaccccacccaattcttctatacaaaaaa

SEQ ID NO: 12709 - DNA, 555 bp, Artificial Sequence
  chemically treated genomic DNA (Homo sapiens) CpG-island No: 12709
cgatgggtcgtgggtttgttgtttaattttttgagatcggcgggttgaatagagtttcgaagtgtagcgttattttgagtagaggaaggggcgttcgaaggtcgcgtagcgggcggtagggcgggaggaagtagtagttgttgtttttcgtttatttttttcgcgtgtgttttttcgttttattgttcgtcggtgagttaggtggcgcgagagcggaggggagaaaagatagcggttgtaggagtcgaaggtcgcggttcgaggtggggtaggggcgggtacgcgagcgtgcgtgcgtgggcgcggtttatagtacgtcgcgcgcggggcggatgttcgggtcggttgggtcggggtcgcggaggagatggcggaaggtggaggttgtcgtgagcgatcggatgcggagatttagaagttcgagtttggatttttaatgaggattatattttaacgcggggcgtagtggtgagttttcggttcgttttttttttatgtagaattaggggtcgagaaaaaggggttttttttttttcggttagagtaggggttggg

SEQ ID NO: 12710 - DNA, 555 bp, Artificial Sequence
  chemically treated genomic DNA (Homo sapiens) CpG-island No: 12710
cccaacccctactctaaccgaaaaaaaaaaaacccctttttctcgacccctaattctacataaaaaaaaaacgaaccgaaaactcaccactacgccccgcgttaaaatataatcctcattaaaaatccaaactcgaacttctaaatctccgcatccgatcgctcacgacaacctccaccttccgccatctcctccgcgaccccgacccaaccgacccgaacatccgccccgcgcgcgacgtactataaaccgcgcccacgcacgcacgctcgcgtacccgcccctaccccacctcgaaccgcgaccttcgactcctacaaccgctatcttttctcccctccgctctcgcgccacctaactcaccgacgaacaataaaacgaaaaaacacacgcgaaaaaaataaacgaaaaacaacaactactacttcctcccgccctaccgcccgctacgcgaccttcgaacgccccttcctctactcaaaataacgctacacttcgaaactctattcaacccgccgatctcaaaaaattaaacaacaaacccacgacccatcg

SEQ ID NO: 12711 - DNA, 555 bp, Artificial Sequence
  chemically treated genomic DNA (Homo sapiens) CpG-island No: 12711
tttagtttttattttagtcgagaaaaaggaggtttttttttttcggtttttggttttgtatagaggaagagcgagtcgggagtttattattgcgtttcgcgttggagtgtggtttttattaagggtttaagttcggatttttgagttttcgtattcggtcgtttacggtagtttttatttttcgttatttttttcgcggtttcggtttagtcggttcggatattcgtttcgcgcgcggcgtgttatagatcgcgtttacgtacgtacgttcgcgtgttcgtttttgttttatttcgagtcgcggttttcggtttttgtagtcgttgttttttttttttttcgttttcgcgttatttagtttatcggcgaatagtggagcggaaaggtatacgcgagaggggtgggcggggagtagtagttgttattttttttcgttttgtcgttcgttacgcggttttcgggcgtttttttttttgtttaggatggcgttatatttcgaagttttgtttagttcgtcgattttagggagttaggtagtaagtttacgatttatcg

SEQ ID NO: 12712 - DNA, 555 bp, Artificial Sequence
  chemically treated genomic DNA (Homo sapiens) CpG-island No: 12712
cgataaatcgtaaacttactacctaactccctaaaatcgacgaactaaacaaaacttcgaaatataacgccatcctaaacaaaaaaaaaaacgcccgaaaaccgcgtaacgaacgacaaaacgaaaaaaaataacaactactactccccgcccacccctctcgcgtatacctttccgctccactattcgccgataaactaaataacgcgaaaacgaaaaaaaaaaaaaacaacgactacaaaaaccgaaaaccgcgactcgaaataaaacaaaaacgaacacgcgaacgtacgtacgtaaacgcgatctataacacgccgcgcgcgaaacgaatatccgaaccgactaaaccgaaaccgcgaaaaaaataacgaaaaataaaaactaccgtaaacgaccgaatacgaaaactcaaaaatccgaacttaaacccttaataaaaaccacactccaacgcgaaacgcaataataaactcccgactcgctcttcctctatacaaaaccaaaaaccgaaaaaaaaaaacctcctttttctcgactaaaataaaaactaaa

SEQ ID NO: 12713 - DNA, 688 bp, Artificial Sequence
  chemically treated genomic DNA (Homo sapiens) CpG-island No: 12713
attaatttagacgttgtgtgtcgcgagcgttcgaggtattttttttattatggtgacggtcgtagagtcgttaggagtagtcgttggagtgcgaaaacgtttttaattttcgggttttaaagatttataagtttatattacgtaggtcgggataggaaagagttattttttaaaacggtcgagtgaagagtaagaattacgtagcggtttcgagtttttgtttttcgtttttagttaggaggacggaagttgttggtaggcggtatttggtcggtatatcgtcggaagtgtggaggtgtggttgttcgaggcggtagagcggagaaagtttatttttttttcgtttagatatattgttttttgtttaggttggcgtcgagatttgaggtcgttgtagattttggcgcggttcgcgttttttgttttaagagtttagcggtgagagttggtttgcggtacgcggtttaatgttaggtgagtattgtttcgagttgtgagatatcgcgcgtttgtgattttgttatagcgttgggtatcgttgattttttaggttgcgacggatatagttagttacggaagaggataatagggttttcggatttttttcggtgttcgtttagtatggaagtttttttttattattcggcgaagtcgatttatttttgtttcggttattttgtgtaatgtg

SEQ ID NO: 12714 - DNA, 688 bp, Artificial Sequence
  chemically treated genomic DNA (Homo sapiens) CpG-island No: 12714
cacattacacaaaataaccgaaacaaaaataaatcgacttcgccgaataataaaaaaaaacttccatactaaacgaacaccgaaaaaaatccgaaaaccctattatcctcttccgtaactaactatatccgtcgcaacctaaaaaatcaacgatacccaacgctataacaaaatcacaaacgcgcgatatctcacaactcgaaacaatactcacctaacattaaaccgcgtaccgcaaaccaactctcaccgctaaactcttaaaacaaaaaacgcgaaccgcgccaaaatctacaacgacctcaaatctcgacgccaacctaaacaaaaaacaatatatctaaacgaaaaaaaaataaactttctccgctctaccgcctcgaacaaccacacctccacacttccgacgatataccgaccaaataccgcctaccaacaacttccgtcctcctaactaaaaacgaaaaacaaaaactcgaaaccgctacgtaattcttactcttcactcgaccgttttaaaaaataactctttcctatcccgacctacgtaatataaacttataaatctttaaaacccgaaaattaaaaacgttttcgcactccaacgactactcctaacgactctacgaccgtcaccataataaaaaaaatacctcgaacgctcgcgacacacaacgtctaaattaat

SEQ ID NO: 12715 - DNA, 688 bp, Artificial Sequence
  chemically treated genomic DNA (Homo sapiens) CpG-island No: 12715
tatattatatagagtgatcggaataaagatgagtcgatttcgtcgaatgatagagaaaaatttttatattgagcgaatatcgaggggagttcggaggttttgttgttttttttcgtggttggttgtgttcgtcgtagtttgaaaggttagcggtatttagcgttgtgatagggttataggcgcgcgatgttttatagttcggagtagtatttatttggtattaggtcgcgtgtcgtaggttagtttttatcgttgggtttttgaagtaggaggcgcgagtcgcgttaaagtttgtaacggttttaagtttcgacgttagtttaggtaaaaggtaatgtatttaaacgaaaagaaaataggtttttttcgttttatcgtttcgggtagttatatttttatattttcggcggtgtatcggttaaatgtcgtttgttagtaattttcgtttttttagttaaaagcggaaaatagaggttcggaatcgttgcgtggtttttgttttttattcggtcgttttaaagggtgatttttttttgtttcggtttgcgtggtgtgggtttgtgggtttttgagattcgaaaattgagagcgttttcgtattttagcggttgtttttggcggttttgcggtcgttattatggtaaggaggatgtttcggacgttcgcgatatatagcgtttgagttagt

SEQ ID NO: 12716 - DNA, 688 bp, Artificial Sequence
  chemically treated genomic DNA (Homo sapiens) CpG-island No: 12716
actaactcaaacgctatatatcgcgaacgtccgaaacatcctccttaccataataacgaccgcaaaaccgccaaaaacaaccgctaaaatacgaaaacgctctcaattttcgaatctcaaaaacccacaaacccacaccacgcaaaccgaaacaaaaaaaaatcaccctttaaaacgaccgaataaaaaacaaaaaccacgcaacgattccgaacctctattttccgcttttaactaaaaaaacgaaaattactaacaaacgacatttaaccgatacaccgccgaaaatataaaaatataactacccgaaacgataaaacgaaaaaaacctattttcttttcgtttaaatacattaccttttacctaaactaacgtcgaaacttaaaaccgttacaaactttaacgcgactcgcgcctcctacttcaaaaacccaacgataaaaactaacctacgacacgcgacctaataccaaataaatactactccgaactataaaacatcgcgcgcctataaccctatcacaacgctaaataccgctaacctttcaaactacgacgaacacaaccaaccacgaaaaaaaacaacaaaacctccgaactcccctcgatattcgctcaatataaaaatttttctctatcattcgacgaaatcgactcatctttattccgatcactctatataatata

SEQ ID NO: 12717 - DNA, 512 bp, Artificial Sequence
  chemically treated genomic DNA (Homo sapiens) CpG-island No: 12717
tcgcgtcgcgtttattttttttcgggtttttaggtatcgttgtagcgtttgttgggtgagttcgtcgacgcgtagttggttttttttgtagggtattacgatgttcgttttgtcgaagtatacggttatttttattttggttttcggcgattacgtcgggtcgggtcgaataggtgtttgatttcgcggcgtagtttttattttcggaggacgttcggggcgggtgggtttagagattcggggcgtcgtttttcggaatattttgaggttcggaggttcgcgtagcgttttttttatttggttaggcggtaggtggcgggaatcggggaggggcggtcgcggaaaggggttattttttaggtgttcggcggttcgggacgcggtagttcgcggttcggtttttttttttttttttttcgtttttatttttgttcggtttaggcggttgtttcgcgtttattaaagcgaaattgtcggttttgttttgtcgttggttttggttttggttttgg

SEQ ID NO: 12718 - DNA, 512 bp, Artificial Sequence
  chemically treated genomic DNA (Homo sapiens) CpG-island No: 12718
ccaaaaccaaaaccaaaaccaacgacaaaacaaaaccgacaatttcgctttaataaacgcgaaacaaccgcctaaaccgaacaaaaataaaaacgaaaaaaaaaaaaaaaaaaaccgaaccgcgaactaccgcgtcccgaaccgccgaacacctaaaaaataacccctttccgcgaccgcccctccccgattcccgccacctaccgcctaaccaaataaaaaaaacgctacgcgaacctccgaacctcaaaatattccgaaaaacgacgccccgaatctctaaacccacccgccccgaacgtcctccgaaaataaaaactacgccgcgaaatcaaacacctattcgacccgacccgacgtaatcgccgaaaaccaaaataaaaataaccgtatacttcgacaaaacgaacatcgtaataccctacaaaaaaaaccaactacgcgtcgacgaactcacccaacaaacgctacaacgatacctaaaaacccgaaaaaaaataaacgcgacgcga

SEQ ID NO: 12719 - DNA, 512 bp, Artificial Sequence
  chemically treated genomic DNA (Homo sapiens) CpG-island No: 12719
ttagggttagggttaggattagcgatagggtagggtcggtagtttcgttttggtgggcgcggagtagtcgtttgggtcgggtaggagtaggagcgggaggaggaggaggaggagtcgggtcgcggattgtcgcgtttcgggtcgtcgggtatttgggaggtaattttttttcgcggtcgttttttttcgattttcgttatttgtcgtttggttaggtggaaggggcgttgcgcgagttttcgggttttagggtgtttcggggagcggcgtttcgggtttttgggtttattcgtttcgggcgtttttcgagagtgggggttgcgtcgcggggttagatatttgttcggttcggttcggcgtggtcgtcgggggttaggatgaaagtgatcgtgtgtttcggtaggacgggtatcgtggtgttttgtaaggagggttagttgcgcgtcggcgagtttatttagtaggcgttgtagcggtatttgaagattcgggagaaggtgagcgcggcgcgg

SEQ ID NO: 12720 - DNA, 512 bp, Artificial Sequence
  chemically treated genomic DNA (Homo sapiens) CpG-island No: 12720
ccgcgccgcgctcaccttctcccgaatcttcaaataccgctacaacgcctactaaataaactcgccgacgcgcaactaaccctccttacaaaacaccacgatacccgtcctaccgaaacacacgatcactttcatcctaacccccgacgaccacgccgaaccgaaccgaacaaatatctaaccccgcgacgcaacccccactctcgaaaaacgcccgaaacgaataaacccaaaaacccgaaacgccgctccccgaaacaccctaaaacccgaaaactcgcgcaacgccccttccacctaaccaaacgacaaataacgaaaatcgaaaaaaaacgaccgcgaaaaaaaattacctcccaaatacccgacgacccgaaacgcgacaatccgcgacccgactcctcctcctcctcctcccgctcctactcctacccgacccaaacgactactccgcgcccaccaaaacgaaactaccgaccctaccctatcgctaatcctaaccctaaccctaa

SEQ ID NO: 12721 - DNA, 587 bp, Artificial Sequence
  chemically treated genomic DNA (Homo sapiens) CpG-island No: 12721
gttttttcgttgtttttgagtagggggtcgtggggggagttggtcggcggtcggtatggggtttttattttttttttttaacggtcgcgggtgtaggtgtcgcgggtcgagtttcgtaggcggggcggattttgtggatacgttttcgtggcgaggtcgggttgttttgagggaggaagcgttagagcggcggtcggtttcgcgcggagttcggcgtttttttagttcgagttaggacgtcgtcggtttcggtttcggtttcgggtacgtagcgagttagggatgtgagcggcgtttcgcggtatggtagttttaggtgggtaggtaggcgtcgcgggttttcgggttttcggtttttttttcgtatttcgtattttttgaggcgcgttttttcgtttgtttttgtttgcgttttttgtgcggggattttgttttttttttgtttttttttatgttttttgtcgtaaattttttattttaatttttttacgtttttcgttttagtttgtggcgcgattttttttagtttttgtttggttcgatttttttttatttttttagggtttttttcgttttttttatttttg

SEQ ID NO: 12722 - DNA, 587 bp, Artificial Sequence
  chemically treated genomic DNA (Homo sapiens) CpG-island No: 12722
caaaaataaaaaaaacgaaaaaaaccctaaaaaaataaaaaaaaatcgaaccaaacaaaaactaaaaaaaatcgcgccacaaactaaaacgaaaaacgtaaaaaaattaaaataaaaaatttacgacaaaaaacataaaaaaaaacaaaaaaaaaacaaaatccccgcacaaaaaacgcaaacaaaaacaaacgaaaaaacgcgcctcaaaaaatacgaaatacgaaaaaaaaaccgaaaacccgaaaacccgcgacgcctacctacccacctaaaactaccataccgcgaaacgccgctcacatccctaactcgctacgtacccgaaaccgaaaccgaaaccgacgacgtcctaactcgaactaaaaaaacgccgaactccgcgcgaaaccgaccgccgctctaacgcttcctccctcaaaacaacccgacctcgccacgaaaacgtatccacaaaatccgccccgcctacgaaactcgacccgcgacacctacacccgcgaccgttaaaaaaaaaaaataaaaaccccataccgaccgccgaccaactccccccacgaccccctactcaaaaacaacgaaaaaac

SEQ ID NO: 12723 - DNA, 587 bp, Artificial Sequence
  chemically treated genomic DNA (Homo sapiens) CpG-island No: 12723
tagaggtggagggagcgaaggagattttgaagaagtgggagggggtcgggttaggtaggggttgaagagaatcgcgttataggttgggacgggaaacgtgggaaagttggagtgggaagtttgcgatagggaatatagaaaagagtagaaagagggtaagattttcgtatagaggacgtaaatagaagtaagcgggggagcgcgttttaagggatgcggggtacgagagaggggtcgggagttcggggattcgcggcgtttgtttatttatttgaggttgttatgtcgcggggcgtcgtttatatttttggttcgttgcgtgttcggggtcgggatcggggtcggcggcgttttggttcgggttggaggggcgtcgggtttcgcgcgggatcggtcgtcgttttggcgtttttttttttagggtagttcggtttcgttacgagggcgtgtttatagagttcgtttcgtttgcgggattcggttcgcggtatttgtattcgcggtcgttggggaggggaagtgagaattttatgtcggtcgtcggttagttttttttacggttttttgtttaggggtagcgagaaggt

SEQ ID NO: 12724 - DNA, 587 bp, Artificial Sequence
  chemically treated genomic DNA (Homo sapiens) CpG-island No: 12724
accttctcgctacccctaaacaaaaaaccgtaaaaaaaactaaccgacgaccgacataaaattctcacttcccctccccaacgaccgcgaatacaaataccgcgaaccgaatcccgcaaacgaaacgaactctataaacacgccctcgtaacgaaaccgaactaccctaaaaaaaaaaacgccaaaacgacgaccgatcccgcgcgaaacccgacgcccctccaacccgaaccaaaacgccgccgaccccgatcccgaccccgaacacgcaacgaaccaaaaatataaacgacgccccgcgacataacaacctcaaataaataaacaaacgccgcgaatccccgaactcccgacccctctctcgtaccccgcatcccttaaaacgcgctcccccgcttacttctatttacgtcctctatacgaaaatcttaccctctttctactcttttctatattccctatcgcaaacttcccactccaactttcccacgtttcccgtcccaacctataacgcgattctcttcaacccctacctaacccgaccccctcccacttcttcaaaatctccttcgctccctccacctcta

SEQ ID NO: 12725 - DNA, 839 bp, Artificial Sequence
  chemically treated genomic DNA (Homo sapiens) CpG-island No: 12725
gaatcgagtttaatgaaatttttagacgtataaagtatagggtgtcggtttatcgagttgcgtttttttttcgggggtgttcgagagagagtacgcgagttcggcgtagttaaattcgggtaggggtgggtttttatcgcgtgtgcgtgtgttagtttgggagtgtcggcgcgagcgtggcgggtgcgtgtcggtgtgtgtgcgtgatagcgcgcgcgtggtagggagttcgcgcgttagggtgcgcgtgttagcgcgggtgtgcgagggagtgcgcgcgggtgggagcgttaggggttggcggggttcgcgttttgggacgagtttttcgtgtttcggttttgcgttttcgtagcgtttacgtagtcgagaggagtgggtgatgatttcgtgattttaacgttttttttcgtttttcgatatgttttcgcgtttgaaaggtgtagaaaattttttttatcgttttggacgagattgagttaggcgtcgagggcgggcgtcgtcgtagatcggagttcgggttcgttggtcgtttaggcgtagcggtgtggagggaacggacgcgcggtaaggcgattcgttttgggtaacgcgggcgtagttgtttcgacgtaaggtattagttggtcgggggttcgggcgagtcggggtcggcgtgttcggggcgtgcgttttttcggtaggcgagcgtcgggtttcgcggaggtttttgcgtttattgtttgttttttcgttcggcgattcggagtttttaggttgcggtgcgttaggttagatttgatcgagggcggaagattcgagcggtagggaggtagaaagaaaagaggtagtaagtttta

SEQ ID NO: 12726 - DNA, 839 bp, Artificial Sequence
  chemically treated genomic DNA (Homo sapiens) CpG-island No: 12726
taaaacttactacctcttttctttctacctccctaccgctcgaatcttccgccctcgatcaaatctaacctaacgcaccgcaacctaaaaactccgaatcgccgaacgaaaaaacaaacaataaacgcaaaaacctccgcgaaacccgacgctcgcctaccgaaaaaacgcacgccccgaacacgccgaccccgactcgcccgaacccccgaccaactaataccttacgtcgaaacaactacgcccgcgttacccaaaacgaatcgccttaccgcgcgtccgttccctccacaccgctacgcctaaacgaccaacgaacccgaactccgatctacgacgacgcccgccctcgacgcctaactcaatctcgtccaaaacgataaaaaaaattttctacacctttcaaacgcgaaaacatatcgaaaaacgaaaaaaaacgttaaaatcacgaaatcatcacccactcctctcgactacgtaaacgctacgaaaacgcaaaaccgaaacacgaaaaactcgtcccaaaacgcgaaccccgccaacccctaacgctcccacccgcgcgcactccctcgcacacccgcgctaacacgcgcaccctaacgcgcgaactccctaccacgcgcgcgctatcacgcacacacaccgacacgcacccgccacgctcgcgccgacactcccaaactaacacacgcacacgcgataaaaacccacccctacccgaatttaactacgccgaactcgcgtactctctctcgaacacccccgaaaaaaaaacgcaactcgataaaccgacaccctatactttatacgtctaaaaatttcattaaactcgattc

SEQ ID NO: 12727 - DNA, 839 bp, Artificial Sequence
  chemically treated genomic DNA (Homo sapiens) CpG-island No: 12727
tggggtttgttattttttttttttttgtttttttgtcgttcgggtttttcgttttcggttaggtttggtttggcgtatcgtagtttggggatttcgggtcgtcgggcggagaagtaggtagtgggcgtagggattttcgcggagttcggcgttcgtttgtcgagagagcgtacgtttcgggtacgtcggtttcggttcgttcgagttttcgattagttagtgttttgcgtcggggtagttgcgttcgcgttgtttagagcgggtcgttttgtcgcgcgttcgttttttttatatcgttgcgtttgagcggttagcgagttcgagtttcggtttgcggcggcgttcgttttcgacgtttagtttagtttcgtttagagcggtggggggagttttttgtattttttaggcgcgggaatatgtcgagggacgggggaggacgttgaggttacgaagttattatttatttttttcggttgcgtgggcgttgcgggagcgtagagtcggagtacgaggggttcgttttagggcgcgggtttcgttagtttttggcgtttttattcgcgcgtattttttcgtatattcgcgttggtacgcgtattttggcgcgcgaattttttgttacgcgcgcgttgttacgtatatatatcggtacgtattcgttacgttcgcgtcgatatttttaggttggtatacgtatacgcggtggggatttatttttgttcgggtttggttgcgtcgggttcgcgtgttttttttcgggtattttcgggaagggagcgtagttcggtgggtcggtattttgtgttttatgcgtttgaggattttattgaattcggttt

SEQ ID NO: 12728 - DNA, 839 bp, Artificial Sequence
  chemically treated genomic DNA (Homo sapiens) CpG-island No: 12728
aaaccgaattcaataaaatcctcaaacgcataaaacacaaaataccgacccaccgaactacgctcccttcccgaaaatacccgaaaaaaaacacgcgaacccgacgcaaccaaacccgaacaaaaataaatccccaccgcgtatacgtataccaacctaaaaatatcgacgcgaacgtaacgaatacgtaccgatatatatacgtaacaacgcgcgcgtaacaaaaaattcgcgcgccaaaatacgcgtaccaacgcgaatatacgaaaaaatacgcgcgaataaaaacgccaaaaactaacgaaacccgcgccctaaaacgaacccctcgtactccgactctacgctcccgcaacgcccacgcaaccgaaaaaaataaataataacttcgtaacctcaacgtcctcccccgtccctcgacatattcccgcgcctaaaaaatacaaaaaactccccccaccgctctaaacgaaactaaactaaacgtcgaaaacgaacgccgccgcaaaccgaaactcgaactcgctaaccgctcaaacgcaacgatataaaaaaaacgaacgcgcgacaaaacgacccgctctaaacaacgcgaacgcaactaccccgacgcaaaacactaactaatcgaaaactcgaacgaaccgaaaccgacgtacccgaaacgtacgctctctcgacaaacgaacgccgaactccgcgaaaatccctacgcccactacctacttctccgcccgacgacccgaaatccccaaactacgatacgccaaaccaaacctaaccgaaaacgaaaaacccgaacgacaaaaaaacaaaaaaaaaaaaaataacaaacccca

SEQ ID NO: 12729 - DNA, 517 bp, Artificial Sequence
  chemically treated genomic DNA (Homo sapiens) CpG-island No: 12729
gtttggaagttaattcgaaatagttttcggattttggtttacgtttggcggaaattaaagcgtaaattttgattgtttgggggcgtaacgatcgttttgtgtcgatggatgcgggtttgcgtttgttgttcggtattgtcggttttgaattgtatatttttcgcgattgtggttattgggcgtagtgggaatatgtcgacgtttttaattaattggtgttgaattttttcgtacgtttttaaggaatggttatgacgaagtatatttttgagtaattggcggcggatttacgtcgcgtcgtagagtagggcgaagcgattgtatcgttgcgcgatttgattggtatcgataacgttgaagcggtttacgttatttagtatataaatgtgtaatatgacgttgcgtaggggcgtcgcgtggtagggcgtaaagtgggtttgatatattcgaaagtgtattaataattgggcgttgatggggtttgagggttaatggaacgagaacgtacgtttatggt

SEQ ID NO: 12730 - DNA, 517 bp, Artificial Sequence
  chemically treated genomic DNA (Homo sapiens) CpG-island No: 12730
accataaacgtacgttctcgttccattaaccctcaaaccccatcaacgcccaattattaatacactttcgaatatatcaaacccactttacgccctaccacgcgacgcccctacgcaacgtcatattacacatttatatactaaataacgtaaaccgcttcaacgttatcgataccaatcaaatcgcgcaacgatacaatcgcttcgccctactctacgacgcgacgtaaatccgccgccaattactcaaaaatatacttcgtcataaccattccttaaaaacgtacgaaaaaattcaacaccaattaattaaaaacgtcgacatattcccactacgcccaataaccacaatcgcgaaaaatatacaattcaaaaccgacaataccgaacaacaaacgcaaacccgcatccatcgacacaaaacgatcgttacgcccccaaacaatcaaaatttacgctttaatttccgccaaacgtaaaccaaaatccgaaaactatttcgaattaacttccaaac

SEQ ID NO: 12731 - DNA, 517 bp, Artificial Sequence
  chemically treated genomic DNA (Homo sapiens) CpG-island No: 12731
attataaacgtacgttttcgttttattggtttttaaattttattaacgtttagttgttgatgtattttcggatgtgttaggtttattttacgttttattacgcgacgtttttgcgtaacgttatgttgtatatttatgtgttgaatggcgtaagtcgttttagcgttatcgatattaattagatcgcgtagcggtgtaatcgtttcgttttgttttgcggcgcggcgtaaattcgtcgttagttgtttaagagtatgtttcgttatgattattttttaagggcgtgcgaggaaatttagtattagttgattgaaagcgtcggtatgtttttattgcgtttagtgattatagtcgcggaagatatgtagtttagaatcggtaatgtcggatagtagacgtagattcgtatttatcggtataaagcggtcgttgcgtttttagataattagggtttgcgttttgattttcgttagacgtgggttaaaattcgggaattgtttcggattagtttttaggt

SEQ ID NO: 12732 - DNA, 517 bp, Artificial Sequence
  chemically treated genomic DNA (Homo sapiens) CpG-island No: 12732
acctaaaaactaatccgaaacaattcccgaattttaacccacgtctaacgaaaatcaaaacgcaaaccctaattatctaaaaacgcaacgaccgctttataccgataaatacgaatctacgtctactatccgacattaccgattctaaactacatatcttccgcgactataatcactaaacgcaataaaaacataccgacgctttcaatcaactaatactaaatttcctcgcacgcccttaaaaaataatcataacgaaacatactcttaaacaactaacgacgaatttacgccgcgccgcaaaacaaaacgaaacgattacaccgctacgcgatctaattaatatcgataacgctaaaacgacttacgccattcaacacataaatatacaacataacgttacgcaaaaacgtcgcgtaataaaacgtaaaataaacctaacacatccgaaaatacatcaacaactaaacgttaataaaatttaaaaaccaataaaacgaaaacgtacgtttataat

SEQ ID NO: 12733 - DNA, 656 bp, Artificial Sequence
  chemically treated genomic DNA (Homo sapiens) CpG-island No: 12733
gcgcggcgggggttaaggtgggcgttcgcgtttcgcgtttcgcgttttttcgtcgggatgagagcgtagttcgcgtcgttagttcgttcgttcgtttcgaggcggtatcgggagaaagtggcggttagggatggagttgttgttatgataatttcggcggtcggggttcgcgcgcgtcggggttgttttcgggaggaaggcggcgcggaggtcgggggcggtcgttgagtttggcgttcgcgcggtttcggtgcgggttgcgtcgcgttttttttagcgagttatcgagtttggggtcgtcgcggttcgttttcgtcgttcggttttttttttttcggttatcgtcgtagtttttgtttcgtcgagtttcgtcggatagcggcggtcgtagcgcgtatttgggtttcgaggaagttgatcgaggcggttgtcgtaggatttcgggttcggatcgtacgaagttcgcgcggtcgtttttttcgcgcgttatttttgcgtttttcgcgagttttattttttatttgttattgttttcgattgtttttcggtggcgagttcggtttcgaaatttataaagtgttggatgtttttcgttcgaattgagggattgtagatcgtttttgggtagttggatgaagtttatttcgttttttttt

SEQ ID NO: 12734 - DNA, 656 bp, Artificial Sequence
  chemically treated genomic DNA (Homo sapiens) CpG-island No: 12734
aaaaaaaaacgaaataaacttcatccaactacccaaaaacgatctacaatccctcaattcgaacgaaaaacatccaacactttataaatttcgaaaccgaactcgccaccgaaaaacaatcgaaaacaataacaaataaaaaataaaactcgcgaaaaacgcaaaaataacgcgcgaaaaaaacgaccgcgcgaacttcgtacgatccgaacccgaaatcctacgacaaccgcctcgatcaacttcctcgaaacccaaatacgcgctacgaccgccgctatccgacgaaactcgacgaaacaaaaactacgacgataaccgaaaaaaaaaaaaccgaacgacgaaaacgaaccgcgacgaccccaaactcgataactcgctaaaaaaaacgcgacgcaacccgcaccgaaaccgcgcgaacgccaaactcaacgaccgcccccgacctccgcgccgccttcctcccgaaaacaaccccgacgcgcgcgaaccccgaccgccgaaattatcataacaacaactccatccctaaccgccactttctcccgataccgcctcgaaacgaacgaacgaactaacgacgcgaactacgctctcatcccgacgaaaaaacgcgaaacgcgaaacgcgaacgcccaccttaacccccgccgcgc

SEQ ID NO: 12735 - DNA, 656 bp, Artificial Sequence
  chemically treated genomic DNA (Homo sapiens) CpG-island No: 12735
agaaggggacggggtgggttttatttagttatttagaggcggtttgtagttttttagttcgaacgggggatatttaatattttgtaagtttcggagtcgggttcgttatcggaaaataatcggaaataatagtagatgggaagtggagttcgcgggaggcgtaggggtggcgcgcggaggagacggtcgcgcgggtttcgtgcgattcgggttcgggattttgcggtagtcgtttcggttaattttttcggagtttaaatgcgcgttgcggtcgtcgttgttcggcggggttcggcggggtaggggttgcggcggtggtcgaggagggagaggtcgggcggcgggagcggatcgcggcggttttaagttcggtagttcgttggggaaggcgcggcgtagttcgtatcggagtcgcgcggacgttaagtttagcggtcgttttcggttttcgcgtcgtttttttttcgggagtagtttcgacgcgcgcgggtttcgatcgtcggggttgttatggtagtagttttatttttgatcgttattttttttcggtgtcgtttcggagcgagcgggcgggttggcggcgcggattgcgtttttatttcggcgggagggcgcggggcgcggggcgcgggcgtttattttaattttcgtcgcgt

SEQ ID NO: 12736 - DNA, 656 bp, Artificial Sequence
  chemically treated genomic DNA (Homo sapiens) CpG-island No: 12736
acgcgacgaaaattaaaataaacgcccgcgccccgcgccccgcgccctcccgccgaaataaaaacgcaatccgcgccgccaacccgcccgctcgctccgaaacgacaccgaaaaaaaataacgatcaaaaataaaactactaccataacaaccccgacgatcgaaacccgcgcgcgtcgaaactactcccgaaaaaaaaacgacgcgaaaaccgaaaacgaccgctaaacttaacgtccgcgcgactccgatacgaactacgccgcgccttccccaacgaactaccgaacttaaaaccgccgcgatccgctcccgccgcccgacctctccctcctcgaccaccgccgcaacccctaccccgccgaaccccgccgaacaacgacgaccgcaacgcgcatttaaactccgaaaaaattaaccgaaacgactaccgcaaaatcccgaacccgaatcgcacgaaacccgcgcgaccgtctcctccgcgcgccacccctacgcctcccgcgaactccacttcccatctactattatttccgattattttccgataacgaacccgactccgaaacttacaaaatattaaatatcccccgttcgaactaaaaaactacaaaccgcctctaaataactaaataaaacccaccccgtccccttct

SEQ ID NO: 12737 - DNA, 1294 bp, Artificial Sequence
  chemically treated genomic DNA (Homo sapiens) CpG-island No: 12737
tcgtgataggtaatttcgcgtaggggagagtgcgcgaggcggaggatgcggaggaggagggggggcggtttggtagtagcggcgggttgtttcgtcgggttggaagtatttttggtttcggttttttttatcgtcgtatttagtttcggagcggcggggacgggtgcgggtgcgcgtgcgttgcgggggtcgtgcgggaagtcggcgcgttattgttatagagttgtagggttgttgcggcggcggcgtgacgggtagtttcgggcgcgaagtgatagtcgtagtaagtgggattgatggtttcgttcgtcgttgtcgtcgtcgtagtcgtcgttttgtatttggagtatagcgggtttacgaagtacgaatttattggggcgttacggcggtcggttcggcggggcggggcgcgttaagtagttatagagcgagtttcgatttggtcgtattgtcgcgggggtttgtggggcgttgttttcgtcgtcgggatcgtcgggttacgtcgttcgtgtcgttttagttacgttcgcgcgtcgtttttgagagtataggatagtcgcggtgcgttttagattatttgggcgattatatcgttcgcgtttttatgcgtatcgacgatattcggtttagcgatcgatattttttttgcgggagtcgcggggtttacgttatagtttatacgcgcgtcgtcgttttttcggtttttttcggcgcgtttcggttcggtcgtaatataatcgtcgacgttttaggtgatttgtttcgttgtttttattgtttttttttaggtattagtgattgagcgtattcggataagaaaaaagtgcgttcggtttacggggatattttggtttcggtttataaattttagttttggagggaaaagaaaaaaaatattttttgttcgtcgttattttttatcgcgtttttttcgcgtttttttttcgttaatttcgttttcgtcgtcgaggttgtcgattcggtgcgtatcggcgaggtattttcgtattatagtattgtacggaaagttagcgtgacggggacgaggagtttcgcggagggattcgcgcgtagtttagtcgttacggtcgacggacggagcgtcgcgttcggttcgagatgttttcgtcggttttaaagggggtttataaagacgtattgttaagggtttcgtgtgtttcggggtcgcgggaatgcggatcgtagtcggtagggaggggtcgcggcggagttttagatttgggggagttaaggaggttatttttaggaggttgcggagtaaatgattgtt

SEQ ID NO: 12738 - DNA, 1294 bp, Artificial Sequence
  chemically treated genomic DNA (Homo sapiens) CpG-island No: 12738
aacaatcatttactccgcaacctcctaaaaataacctccttaactcccccaaatctaaaactccgccgcgacccctccctaccgactacgatccgcattcccgcgaccccgaaacacacgaaacccttaacaatacgtctttataaaccccctttaaaaccgacgaaaacatctcgaaccgaacgcgacgctccgtccgtcgaccgtaacgactaaactacgcgcgaatccctccgcgaaactcctcgtccccgtcacgctaactttccgtacaatactataatacgaaaatacctcgccgatacgcaccgaatcgacaacctcgacgacgaaaacgaaattaacgaaaaaaaaacgcgaaaaaaacgcgataaaaaataacgacgaacaaaaaatattttttttcttttccctccaaaactaaaatttataaaccgaaaccaaaatatccccgtaaaccgaacgcacttttttcttatccgaatacgctcaatcactaatacctaaaaaaaaacaataaaaacaacgaaacaaatcacctaaaacgtcgacgattatattacgaccgaaccgaaacgcgccgaaaaaaaccgaaaaaacgacgacgcgcgtataaactataacgtaaaccccgcgactcccgcaaaaaaaatatcgatcgctaaaccgaatatcgtcgatacgcataaaaacgcgaacgatataatcgcccaaataatctaaaacgcaccgcgactatcctatactctcaaaaacgacgcgcgaacgtaactaaaacgacacgaacgacgtaacccgacgatcccgacgacgaaaacaacgccccacaaacccccgcgacaatacgaccaaatcgaaactcgctctataactacttaacgcgccccgccccgccgaaccgaccgccgtaacgccccaataaattcgtacttcgtaaacccgctatactccaaatacaaaacgacgactacgacgacgacaacgacgaacgaaaccatcaatcccacttactacgactatcacttcgcgcccgaaactacccgtcacgccgccgccgcaacaaccctacaactctataacaataacgcgccgacttcccgcacgacccccgcaacgcacgcgcacccgcacccgtccccgccgctccgaaactaaatacgacgataaaaaaaaccgaaaccaaaaatacttccaacccgacgaaacaacccgccgctactaccaaaccgccccccctcctcctccgcatcctccgcctcgcgcactctcccctacgcgaaattacctatcacga

SEQ ID NO: 12739 - DNA, 1294 bp, Artificial Sequence
  chemically treated genomic DNA (Homo sapiens) CpG-island No: 12739
ggtagttatttgtttcgtagttttttgggagtggtttttttggtttttttaagtttaaggtttcgtcgcggtttttttttgtcggttgcgattcgtattttcgcggtttcggggtatacggagtttttggtagtgcgtttttatgggttttttttaaggtcggcggaggtatttcgggtcgggcgcggcgtttcgttcgtcggtcgtagcgattgaattgcgcgcggattttttcgcggggtttttcgttttcgttacgttgatttttcgtgtagtgttgtggtgcgaaaatgtttcgtcggtgcgtatcgggtcggtagtttcggcggcgggggcgagattggcgggaggggggcgcggggggggcgcggtaagaggtggcggcgggtagagggtgtttttttttttttttttttagagttggggtttgtaaatcgaggttagagtgttttcgtgggtcgagcgtattttttttttgttcgggtgcgtttagttattggtgtttgagaggaaatagtggaggtagcggggtaggttatttggggcgtcggcgattatattgcggtcgagtcggggcgcgtcgggaaaggtcgggagggcggcggcgcgcgtgtgggttgtggcgtaggtttcgcgattttcgtagagggagtgtcggtcgttgaatcgagtgtcgtcggtgcgtatagaagcgcgggcgatgtagtcgtttagatagtttagagcgtatcgcggttgttttgtgtttttagaagcgacgcgcgagcgtggttgaggcggtacgagcgacgtagttcggcggtttcggcggcgagagtagcgttttataggttttcgcggtagtgcggttaagtcgaggttcgttttatggttgtttagcgcgtttcgtttcgtcgggtcggtcgtcgtgacgttttaatgagttcgtatttcgtgaattcgttgtattttaagtataaggcggcggttgcggcggcggtagcggcgggcgaggttattaattttatttattacgattgttatttcgcgttcgaggttgttcgttacgtcgtcgtcgtagtagttttgtagttttatggtaatagcgcgtcggtttttcgtacggttttcgtagcgtacgcgtattcgtattcgttttcgtcgtttcgggattgggtgcggcggtagggaaggtcggggttaggagtatttttagttcggcggggtagttcgtcgttgttattaggtcgtttttttttttttttcgtatttttcgtttcgcgtatttttttttgcgcgggattgtttgttacgg

SEQ ID NO: 12740 - DNA, 1294 bp, Artificial Sequence
  chemically treated genomic DNA (Homo sapiens) CpG-island No: 12740
ccgtaacaaacaatcccgcgcaaaaaaaaatacgcgaaacgaaaaatacgaaaaaaaaaaaaaaacgacctaataacaacgacgaactaccccgccgaactaaaaatactcctaaccccgaccttccctaccgccgcacccaatcccgaaacgacgaaaacgaatacgaatacgcgtacgctacgaaaaccgtacgaaaaaccgacgcgctattaccataaaactacaaaactactacgacgacgacgtaacgaacaacctcgaacgcgaaataacaatcgtaataaataaaattaataacctcgcccgccgctaccgccgccgcaaccgccgccttatacttaaaatacaacgaattcacgaaatacgaactcattaaaacgtcacgacgaccgacccgacgaaacgaaacgcgctaaacaaccataaaacgaacctcgacttaaccgcactaccgcgaaaacctataaaacgctactctcgccgccgaaaccgccgaactacgtcgctcgtaccgcctcaaccacgctcgcgcgtcgcttctaaaaacacaaaacaaccgcgatacgctctaaactatctaaacgactacatcgcccgcgcttctatacgcaccgacgacactcgattcaacgaccgacactccctctacgaaaatcgcgaaacctacgccacaacccacacgcgcgccgccgccctcccgacctttcccgacgcgccccgactcgaccgcaatataatcgccgacgccccaaataacctaccccgctacctccactatttcctctcaaacaccaataactaaacgcacccgaacaaaaaaaaaatacgctcgacccacgaaaacactctaacctcgatttacaaaccccaactctaaaaaaaaaaaaaaaaaaacaccctctacccgccgccacctcttaccgcgccccccccgcgcccccctcccgccaatctcgcccccgccgccgaaactaccgacccgatacgcaccgacgaaacattttcgcaccacaacactacacgaaaaatcaacgtaacgaaaacgaaaaaccccgcgaaaaaatccgcgcgcaattcaatcgctacgaccgacgaacgaaacgccgcgcccgacccgaaatacctccgccgaccttaaaaaaaacccataaaaacgcactaccaaaaactccgtataccccgaaaccgcgaaaatacgaatcgcaaccgacaaaaaaaaaccgcgacgaaaccttaaacttaaaaaaaccaaaaaaaccactcccaaaaaactacgaaacaaataactacc

SEQ ID NO: 12741 - DNA, 662 bp, Artificial Sequence
  chemically treated genomic DNA (Homo sapiens) CpG-island No: 12741
ttgtagtttgcgaattagtcggtggttcgggcgtcggcggggagttgttcggcggcggatagtgtaatgttgggtgggagtgcgggacgttttaaaatgttttttagtggtatttttagtaattattacgtggattcgtttataggttatgagggcgacgaggtgttcgcggcgcgtttcgggtcgtcggggttaggcgcgtagggtcggtttgtaggtgtggttgatggttcggtcgttatcgtcgtcgagttcgtttcgtgtagttttgtttttagatcggtcgtgttttttgtttcgtggttcgcggtgtttttttagttttcggtagcggcggcgatgagcggtttttattattcgtacgttttttcgtcgtttttggtcgtttttgttttcgagttcggtcgttacgtgcgtttttggatggagtcgttgttcggtttttcgggcggtgcgggcggtggcggtggtggtggaggcggcggttcgggtcgcggttttagttttggttttagcggtttagttaacgggcgttattacgggattaagtttgaaattcgagcggtttcggttttcgttacggtagtttttattattttttttttttttatttttttattttttttttttaaacggattgagtgtttcgtggttcgggagtt

SEQ ID NO: 12742 - DNA, 662 bp, Artificial Sequence
  chemically treated genomic DNA (Homo sapiens) CpG-island No: 12742
aactcccgaaccacgaaacactcaatccgtttaaaaaaaaaaaataaaaaaataaaaaaaaaaaaaataataaaaactaccgtaacgaaaaccgaaaccgctcgaatttcaaacttaatcccgtaataacgcccgttaactaaaccgctaaaaccaaaactaaaaccgcgacccgaaccgccgcctccaccaccaccgccaccgcccgcaccgcccgaaaaaccgaacaacgactccatccaaaaacgcacgtaacgaccgaactcgaaaacaaaaacgaccaaaaacgacgaaaaaacgtacgaataataaaaaccgctcatcgccgccgctaccgaaaactaaaaaaacaccgcgaaccacgaaacaaaaaacacgaccgatctaaaaacaaaactacacgaaacgaactcgacgacgataacgaccgaaccatcaaccacacctacaaaccgaccctacgcgcctaaccccgacgacccgaaacgcgccgcgaacacctcgtcgccctcataacctataaacgaatccacgtaataattactaaaaataccactaaaaaacattttaaaacgtcccgcactcccacccaacattacactatccgccgccgaacaactccccgccgacgcccgaaccaccgactaattcgcaaactacaa

SEQ ID NO: 12743 - DNA, 662 bp, Artificial Sequence
  chemically treated genomic DNA (Homo sapiens) CpG-island No: 12743
gattttcgggttacggagtatttagttcgtttggaggaggaggataaggaagtggaggaggaggaggtggtggaggttgtcgtggcgggggtcggggtcgttcgggttttaggtttaatttcgtagtggcgttcgttggttgggtcgttggggttagggttgggatcgcggttcggatcgtcgtttttattattatcgttatcgttcgtatcgttcgggaagtcgggtagcggttttatttaggagcgtacgtagcggtcgggttcggaggtagaggcggttaggggcggcgggggaacgtacgggtggtagaggtcgtttatcgtcgtcgttgtcgggggttgggagggtatcgcggattacgaggtagagaatacggtcgatttgggggtaaaattatacgaggcgaattcggcggcggtggcggtcgggttattagttatatttgtaggtcggttttgcgcgtttggtttcggcggttcgaagcgcgtcgcgaatatttcgtcgtttttatggtttataagcgagtttacgtagtagttgttgagggtgttattggaagatattttgaggcgtttcgtatttttatttaatattatattgttcgtcgtcgagtagtttttcgtcggcgttcgagttatcgattagttcgtaggttgtag

SEQ ID NO: 12744 - DNA, 662 bp, Artificial Sequence
  chemically treated genomic DNA (Homo sapiens) CpG-island No: 12744
ctacaacctacgaactaatcgataactcgaacgccgacgaaaaactactcgacgacgaacaatataatattaaataaaaatacgaaacgcctcaaaatatcttccaataacaccctcaacaactactacgtaaactcgcttataaaccataaaaacgacgaaatattcgcgacgcgcttcgaaccgccgaaaccaaacgcgcaaaaccgacctacaaatataactaataacccgaccgccaccgccgccgaattcgcctcgtataattttacccccaaatcgaccgtattctctacctcgtaatccgcgataccctcccaacccccgacaacgacgacgataaacgacctctaccacccgtacgttcccccgccgcccctaaccgcctctacctccgaacccgaccgctacgtacgctcctaaataaaaccgctacccgacttcccgaacgatacgaacgataacgataataataaaaacgacgatccgaaccgcgatcccaaccctaaccccaacgacccaaccaacgaacgccactacgaaattaaacctaaaacccgaacgaccccgacccccgccacgacaacctccaccacctcctcctcctccacttccttatcctcctcctccaaacgaactaaatactccgtaacccgaaaatc

SEQ ID NO: 12745 - DNA, 654 bp, Artificial Sequence
  chemically treated genomic DNA (Homo sapiens) CpG-island No: 12745
tacgtaatggtacgcggcgggggtttcggggcggaggcgtttttcgatcggttaggtttttttttaatttgaatttcgtttttataaacgtttcgcgatgagttaatttgttggagggtaggcgggcggaggcgggaggtttatagagggagagagggttagaggaagagggcgggagcgagcgaattagagagaaaggagaggagggaggaggcgcgcgttatggtgttttgcgcgggtatagggtagggcggggtcgggttaggtcgggttatgagtcgcgtcggagttgggatatggacgggttgcgggtaagaacgcggcggggtggcgtttcggttttttttttttttttatcggtggcggcggcggcggcgttaggttagtgtcgcggtttttttttcgcgtttgtgttcgtcgggacgtattcggggcgggcggcgcggttgtacgcggttcggcggcggtagcggtagtttttcggttttgcgtatttcgggatttttgagcgtacgggttttttttcgtcgtcgtttttttttgtcgttgtagtcgcgttcggagtttttttagttaaagagtgtttagtattacgtttgtagcggtttgtaggttcgagtttagcgttgggttacggttattattttggtaacg

SEQ ID NO: 12746 - DNA, 654 bp, Artificial Sequence
  chemically treated genomic DNA (Homo sapiens) CpG-island No: 12746
cgttaccaaaataataaccgtaacccaacgctaaactcgaacctacaaaccgctacaaacgtaatactaaacactctttaactaaaaaaactccgaacgcgactacaacgacaaaaaaaaacgacgacgaaaaaaaacccgtacgctcaaaaatcccgaaatacgcaaaaccgaaaaactaccgctaccgccgccgaaccgcgtacaaccgcgccgcccgccccgaatacgtcccgacgaacacaaacgcgaaaaaaaaaccgcgacactaacctaacgccgccgccgccgccaccgataaaaaaaaaaaaaaaaccgaaacgccaccccgccgcgttcttacccgcaacccgtccatatcccaactccgacgcgactcataacccgacctaacccgaccccgccctaccctatacccgcgcaaaacaccataacgcgcgcctcctccctcctctcctttctctctaattcgctcgctcccgccctcttcctctaaccctctctccctctataaacctcccgcctccgcccgcctaccctccaacaaattaactcatcgcgaaacgtttataaaaacgaaattcaaattaaaaaaaaacctaaccgatcgaaaaacgcctccgccccgaaacccccgccgcgtaccattacgta

SEQ ID NO: 12747 - DNA, 654 bp, Artificial Sequence
  chemically treated genomic DNA (Homo sapiens) CpG-island No: 12747
cgttgttaaagtggtagtcgtagtttagcgttggattcgggtttgtaggtcgttgtaggcgtggtgttgggtattttttggttgggggagtttcgggcgcggttataacggtagaagaggacgacgacgaggaagagttcgtgcgtttagaggtttcggggtacgtaaagtcggaaggttgtcgttgtcgtcgtcgagtcgcgtgtagtcgcgtcgttcgtttcgaatgcgtttcggcgaatataggcgcggagagaaagtcgcggtattggtttgacgtcgtcgtcgtcgttatcgatgaggaggaggaagaggtcggggcgttatttcgtcgcgtttttgttcgtagttcgtttatgttttagtttcggcgcggtttatggttcggtttggttcggtttcgttttgttttgtgttcgcgtaggatattatggcgcgcgttttttttttttttttttttttttttggttcgttcgttttcgttttttttttttagttttttttttttttgtgagtttttcgttttcgttcgtttgttttttaataggttagtttatcgcgggacgtttataaaaacgaagtttaggttgggagggggtttggtcggtcggggggcgttttcgtttcgaggttttcgtcgcgtgttattgcgtg

SEQ ID NO: 12748 - DNA, 654 bp, Artificial Sequence
  chemically treated genomic DNA (Homo sapiens) CpG-island No: 12748
cacgcaataacacgcgacgaaaacctcgaaacgaaaacgccccccgaccgaccaaaccccctcccaacctaaacttcgtttttataaacgtcccgcgataaactaacctattaaaaaacaaacgaacgaaaacgaaaaactcacaaaaaaaaaaaaaactaaaaaaaaaaaacgaaaacgaacgaaccaaaaaaaaaaaaaaaaaaaaaaaaaacgcgcgccataatatcctacgcgaacacaaaacaaaacgaaaccgaaccaaaccgaaccataaaccgcgccgaaactaaaacataaacgaactacgaacaaaaacgcgacgaaataacgccccgacctcttcctcctcctcatcgataacgacgacgacgacgtcaaaccaataccgcgactttctctccgcgcctatattcgccgaaacgcattcgaaacgaacgacgcgactacacgcgactcgacgacgacaacgacaaccttccgactttacgtaccccgaaacctctaaacgcacgaactcttcctcgtcgtcgtcctcttctaccgttataaccgcgcccgaaactcccccaaccaaaaaatacccaacaccacgcctacaacgacctacaaacccgaatccaacgctaaactacgactaccactttaacaacg

SEQ ID NO: 12749 - DNA, 739 bp, Artificial Sequence
  chemically treated genomic DNA (Homo sapiens) CpG-island No: 12749
ggtttaggttgttgcgcggggagcggttagaggttgtttgggcgtacgtcgcggagttatgaacgattttgacgagtgcggttagagcgtagttagtatgtatttgtcgggttgcgtttattatgtggtttcgtttgatttcgttagtaagttttcgttttttttttaatcgtcgttttgttagatgatttttttttatttttttaatttggtttttacgtttagttcgtgcgcgaagtggtttttcgcgattacggtttggagcgcgttaagtggtcgtatcgcggcggcggcggcggcggtagcgcggggggcggtagtagcgggggcgttcggcgggcggtcggtgggggggggttacgttttttattacgcggcggcgcggcgcggttgcgtcggcgtaggaggcgtttatgtaacgcgagttttttttcgtcgcggtcgtcggtcggacgtgttttttaaggcgtttgagcggttgtgcgttgcgtcggggtcgtcgtacggtcgggcgtcgtttttaatttttatagcgcggtgggtcgtaatggtattttgttatagggtttcgattagttttacgaggtagcgttcgggttttcgttcgtcgggtcgtagtttcgtcgttattcgcgtcgttatagttcgagggcgtagtcgataagggcgattttaggatcggggttggtggcggcgggggtagtttttgtattaaggcgatttttggttcggagtttaa

SEQ ID NO: 12750 - DNA, 739 bp, Artificial Sequence
  chemically treated genomic DNA (Homo sapiens) CpG-island No: 12750
ttaaactccgaaccaaaaatcgccttaatacaaaaactacccccgccgccaccaaccccgatcctaaaatcgcccttatcgactacgccctcgaactataacgacgcgaataacgacgaaactacgacccgacgaacgaaaacccgaacgctacctcgtaaaactaatcgaaaccctataacaaaataccattacgacccaccgcgctataaaaattaaaaacgacgcccgaccgtacgacgaccccgacgcaacgcacaaccgctcaaacgccttaaaaaacacgtccgaccgacgaccgcgacgaaaaaaaactcgcgttacataaacgcctcctacgccgacgcaaccgcgccgcgccgccgcgtaataaaaaacgtaacccccccccaccgaccgcccgccgaacgcccccgctactaccgccccccgcgctaccgccgccgccgccgccgcgatacgaccacttaacgcgctccaaaccgtaatcgcgaaaaaccacttcgcgcacgaactaaacgtaaaaaccaaattaaaaaaataaaaaaaaatcatctaacaaaacgacgattaaaaaaaaaacgaaaacttactaacgaaatcaaacgaaaccacataataaacgcaacccgacaaatacatactaactacgctctaaccgcactcgtcaaaatcgttcataactccgcgacgtacgcccaaacaacctctaaccgctccccgcgcaacaacctaaacc

SEQ ID NO: 12751 - DNA, 739 bp, Artificial Sequence
  chemically treated genomic DNA (Homo sapiens) CpG-island No: 12751
ttgggtttcgagttaggggtcgttttggtgtagggattgttttcgtcgttattagtttcggttttggggtcgtttttgtcggttgcgttttcgggttgtggcggcgcgggtggcggcggggttgcggttcggcgaacgggggttcgggcgttgtttcgtagaattggtcgaagttttgtggtaagatgttattgcggtttatcgcgttgtagaagttggaggcggcgttcggtcgtgcggcggtttcggcgtagcgtataatcgtttaggcgttttgaagagtacgttcggtcggcggtcgcggcggaagaaagttcgcgttgtatgagcgttttttgcgtcggcgtagtcgcgtcgcgtcgtcgcgtagtagggagcgtagtttttttttatcgatcgttcgtcgggcgttttcgttgttgtcgtttttcgcgttgtcgtcgtcgtcgtcgtcgcggtacggttatttggcgcgttttaggtcgtagtcgcggaaggttatttcgcgtacgggttggacgtgggagttaggttggaagagtaggggaaagttatttggtaggacgacggttgggaaaggaacgaaggtttgttagcgaagttagacggggttatatagtaggcgtagttcggtaggtatatgttggttgcgttttggtcgtattcgttaaagtcgtttatgatttcgcggcgtgcgtttaggtagtttttggtcgtttttcgcgtagtaatttgagtt

SEQ ID NO: 12752 - DNA, 739 bp, Artificial Sequence
  chemically treated genomic DNA (Homo sapiens) CpG-island No: 12752
aactcaaattactacgcgaaaaacgaccaaaaactacctaaacgcacgccgcgaaatcataaacgactttaacgaatacgaccaaaacgcaaccaacatatacctaccgaactacgcctactatataaccccgtctaacttcgctaacaaaccttcgttcctttcccaaccgtcgtcctaccaaataactttcccctactcttccaacctaactcccacgtccaacccgtacgcgaaataaccttccgcgactacgacctaaaacgcgccaaataaccgtaccgcgacgacgacgacgacgacaacgcgaaaaacgacaacaacgaaaacgcccgacgaacgatcgataaaaaaaaactacgctccctactacgcgacgacgcgacgcgactacgccgacgcaaaaaacgctcatacaacgcgaactttcttccgccgcgaccgccgaccgaacgtactcttcaaaacgcctaaacgattatacgctacgccgaaaccgccgcacgaccgaacgccgcctccaacttctacaacgcgataaaccgcaataacatcttaccacaaaacttcgaccaattctacgaaacaacgcccgaacccccgttcgccgaaccgcaaccccgccgccacccgcgccgccacaacccgaaaacgcaaccgacaaaaacgaccccaaaaccgaaactaataacgacgaaaacaatccctacaccaaaacgacccctaactcgaaacccaa

SEQ ID NO: 12753 - DNA, 734 bp, Artificial Sequence
  chemically treated genomic DNA (Homo sapiens) CpG-island No: 12753
ttgtttaatatgtattcgtattttttgattgcggtgagttcgatgtagacggtacggggaggcgcggcggttattttttcgggaggcgcggcgggttattttttcgggaggcgcggcggttattttttcgggtttcgcgattttttcgtaaagttttaagttttggttaaggtaggagcgcgtcgtaggcgggggtcggggtagggatcgggcggaggcgacgttttatggacgtttggggtcgggttcgttcgttggtagggtcggttgggggtgtgattttttttggcggtcgtttttatcgtttcgttttcgcgggttttaagttcgtttggttcgttacgaagattgtagattgcgtagtttgttttgtttcgttttagttgtatgcgggttgtaggttcggggatttttacgggattttttaaagttacgtgattttttttgggtcgggttgcgaagtgcgtttagtcggtcgttagagggcgtagggggcgaggggcgcgcgcggttttcgttcgatcgggtttgcgggtttcgtttcgttttttttttttgtttcgtttcgttgtttcgtttcgttcggtttttgtaggcgttcggagaaattttttcgtttcgtttcggggtgttttcgcgtgagttatttgggtatttcggaagttggggttacgttatatttatgtggaaatcgcggtgatgggaattggaaatgaaataggttttttttcgta

SEQ ID NO: 12754 - DNA, 734 bp, Artificial Sequence
  chemically treated genomic DNA (Homo sapiens) CpG-island No: 12754
tacgaaaaaaaacctatttcatttccaattcccatcaccgcgatttccacataaatataacgtaaccccaacttccgaaatacccaaataactcacgcgaaaacaccccgaaacgaaacgaaaaaatttctccgaacgcctacaaaaaccgaacgaaacgaaacaacgaaacgaaacaaaaaaaaaaaacgaaacgaaacccgcaaacccgatcgaacgaaaaccgcgcgcgcccctcgccccctacgccctctaacgaccgactaaacgcacttcgcaacccgacccaaaaaaaatcacgtaactttaaaaaatcccgtaaaaatccccgaacctacaacccgcatacaactaaaacgaaacaaaacaaactacgcaatctacaatcttcgtaacgaaccaaacgaacttaaaacccgcgaaaacgaaacgataaaaacgaccgccaaaaaaaatcacacccccaaccgaccctaccaacgaacgaacccgaccccaaacgtccataaaacgtcgcctccgcccgatccctaccccgacccccgcctacgacgcgctcctaccttaaccaaaacttaaaactttacgaaaaaatcgcgaaacccgaaaaaataaccgccgcgcctcccgaaaaaataacccgccgcgcctcccgaaaaaataaccgccgcgcctccccgtaccgtctacatcgaactcaccgcaatcaaaaaatacgaatacatattaaacaa

SEQ ID NO: 12755 - DNA, 734 bp, Artificial Sequence
  chemically treated genomic DNA (Homo sapiens) CpG-island No: 12755
tgcgaaaaagaatttattttatttttagtttttattatcgcgatttttatatggatgtgacgtgattttagttttcgaaatgtttaggtgatttacgcggggatatttcggggcggggcgagggagttttttcgggcgtttgtagggatcgggcggggcggggtagcggggcggggtagggaaagggggcggggcggggttcgtaggttcggtcgggcggaggtcgcgcgcgtttttcgttttttgcgttttttggcggtcggttggacgtatttcgtagttcgatttagagagagttacgtgattttggaaagtttcgtggaaattttcgggtttataattcgtatataattgaaacggggtaaagtagattgcgtagtttgtagttttcgtggcgggttaagcgagtttggagttcgcgggggcggagcggtgagagcggtcgttaagagagattatatttttagtcgattttgttagcgagcgagttcgattttaggcgtttatggagcgtcgttttcgttcggtttttgtttcgattttcgtttgcggcgcgtttttgttttgattaggatttgggattttgcgaaaggatcgcggggttcggagaggtaatcgtcgcgtttttcggagaggtaattcgtcgcgtttttcggagaggtaatcgtcgcgttttttcgtgtcgtttgtatcgggtttatcgtagttaagggatgcgggtgtatgttgggtag

SEQ ID NO: 12756 - DNA, 734 bp, Artificial Sequence
  chemically treated genomic DNA (Homo sapiens) CpG-island No: 12756
ctacccaacatacacccgcatcccttaactacgataaacccgatacaaacgacacgaaaaaacgcgacgattacctctccgaaaaacgcgacgaattacctctccgaaaaacgcgacgattacctctccgaaccccgcgatcctttcgcaaaatcccaaatcctaatcaaaacaaaaacgcgccgcaaacgaaaatcgaaacaaaaaccgaacgaaaacgacgctccataaacgcctaaaatcgaactcgctcgctaacaaaatcgactaaaaatataatctctcttaacgaccgctctcaccgctccgcccccgcgaactccaaactcgcttaacccgccacgaaaactacaaactacgcaatctactttaccccgtttcaattatatacgaattataaacccgaaaatttccacgaaactttccaaaatcacgtaactctctctaaatcgaactacgaaatacgtccaaccgaccgccaaaaaacgcaaaaaacgaaaaacgcgcgcgacctccgcccgaccgaacctacgaaccccgccccgccccctttccctaccccgccccgctaccccgccccgcccgatccctacaaacgcccgaaaaaactccctcgccccgccccgaaatatccccgcgtaaatcacctaaacatttcgaaaactaaaatcacgtcacatccatataaaaatcgcgataataaaaactaaaaataaaataaattctttttcgca

SEQ ID NO: 12757 - DNA, 1259 bp, Artificial Sequence
  chemically treated genomic DNA (Homo sapiens) CpG-island No: 12757
ttcgttcgcgaatttcgcgcgcgtaaggttagggattttgcgcggtggttgtaatttcgagtttcggttcggcgttcgcgcggagtttttacggcggttattttcgttcgttcggagttcgtcgttgtcgtcgttgtcgtcgttgtcgtcgttttattttcgtcgttatcggagcgtttaggttaggaagtcgttcgttcggtcgttggcgttgttcgggtgtttattgtttcggttgtcgtcgtcgttgttgttgttttcggggtcgcgtcgtatgttagttcggagtcgtcgcgtttcgtcgtacgcggcgttcggtttcgtttcggttcgtttcggttcgtttttcgtagttttcgttttttgtttcgttttcgtcgttcgggcgggggtcgtttattgacgtcgttttgacgttagagcgacgcgcggtcgagcgtcgggcggagggagagcgggagatcgggcggttgttaagagattggcggttttgacgcgcgcgggatgaggtcgttgttttggcgatcgcgggtcggtgacgttaggggcgttcgtcgttcgaggttcgttcgtttgcgtttcgtcgggcgttttttttcgggcgttgggggtattgcgggcggttttatcgtcgagggcgcgttcgtttttttacgttcgggtattcgggtcgggtttcgcgggcgttttgtgttcgttttttttaggaggggacggttttcgggtaggggtcgtcggtttttttacgcggtttgcgttcgtttagatttagagtttcgggacgtgcgggggttcgggggtttcgcgggttcgcgcgtggggttggcggcgcggatgttttggggcgttgtagatttcgagaggtcgtttgttcgcggggacgttagtcgtttttgttgttaaaatttgaaatgtttagtaagttagaaatttgaaatttaaggaagcgtgatcggtcgttttggaagttttcgtcgcgcggtcggtttcggtttcggtttttagcggcgttggcgtttgcgcgtttcggggttgttttcgtagtatgtggggttgggatttttttttcgcgcgggtttcgggcggacgttgcgggcggtgacggagttaggtcggtcgtttgggtaggggacgggggcgcgggattatttgtttgttcgtggtcgatgttttattcgaacggaaaacgttttttttaggggagatagaggttgtgggcgaaggtattttttaagtttgaggatttatttgggagttag

SEQ ID NO: 12758 - DNA, 1259 bp, Artificial Sequence
  chemically treated genomic DNA (Homo sapiens) CpG-island No: 12758
ctaactcccaaataaatcctcaaacttaaaaaataccttcgcccacaacctctatctcccctaaaaaaaacgttttccgttcgaataaaacatcgaccacgaacaaacaaataatcccgcgcccccgtcccctacccaaacgaccgacctaactccgtcaccgcccgcaacgtccgcccgaaacccgcgcgaaaaaaaaatcccaaccccacatactacgaaaacaaccccgaaacgcgcaaacgccaacgccgctaaaaaccgaaaccgaaaccgaccgcgcgacgaaaacttccaaaacgaccgatcacgcttccttaaatttcaaatttctaacttactaaacatttcaaattttaacaacaaaaacgactaacgtccccgcgaacaaacgacctctcgaaatctacaacgccccaaaacatccgcgccgccaaccccacgcgcgaacccgcgaaacccccgaacccccgcacgtcccgaaactctaaatctaaacgaacgcaaaccgcgtaaaaaaaccgacgacccctacccgaaaaccgtcccctcctaaaaaaaacgaacacaaaacgcccgcgaaacccgacccgaatacccgaacgtaaaaaaacgaacgcgccctcgacgataaaaccgcccgcaatacccccaacgcccgaaaaaaaacgcccgacgaaacgcaaacgaacgaacctcgaacgacgaacgcccctaacgtcaccgacccgcgatcgccaaaacaacgacctcatcccgcgcgcgtcaaaaccgccaatctcttaacaaccgcccgatctcccgctctccctccgcccgacgctcgaccgcgcgtcgctctaacgtcaaaacgacgtcaataaacgacccccgcccgaacgacgaaaacgaaacaaaaaacgaaaactacgaaaaacgaaccgaaacgaaccgaaacgaaaccgaacgccgcgtacgacgaaacgcgacgactccgaactaacatacgacgcgaccccgaaaacaacaacaacgacgacgacaaccgaaacaataaacacccgaacaacgccaacgaccgaacgaacgacttcctaacctaaacgctccgataacgacgaaaataaaacgacgacaacgacgacaacgacgacaacgacgaactccgaacgaacgaaaataaccgccgtaaaaactccgcgcgaacgccgaaccgaaactcgaaattacaaccaccgcgcaaaatccctaaccttacgcgcgcgaaattcgcgaacgaa

SEQ ID NO: 12759 - DNA, 1259 bp, Artificial Sequence
  chemically treated genomic DNA (Homo sapiens) CpG-island No: 12759
ttaatttttaaatgggtttttaggtttaaaaaatattttcgtttatagtttttgttttttttgaagaaaacgtttttcgttcggatgaggtatcggttacgggtaagtaagtggtttcgcgttttcgttttttatttaggcggtcggtttggtttcgttatcgttcgtagcgttcgttcggggttcgcgcgggaagagggttttagttttatatgttgcgggggtagtttcgggacgcgtagacgttagcgtcgttgagggtcggggtcgggatcggtcgcgcggcgggggtttttagagcggtcggttacgtttttttaggttttaagtttttaatttgttgaatattttagattttaatagtaaaagcggttgacgttttcgcgggtaagcggtttttcggggtttgtagcgttttagggtattcgcgtcgttagttttacgcgcgagttcgcgaggttttcgggttttcgtacgtttcgaggttttgagtttggacgaacgtaggtcgcgtggaggggtcggcgatttttgttcgagagtcgtttttttttggagggagcgagtataaggcgttcgcgggattcggttcgagtgttcgagcgtggaggggcgggcgcgttttcggcggtggggtcgttcgtagtgtttttagcgttcgggagggggcgttcggcggagcgtaggcgggcgggtttcgggcggcgggcgtttttgacgttatcggttcgcggtcgttagggtaacggttttatttcgcgcgcgttagagtcgttagttttttggtaatcgttcgatttttcgtttttttttcgttcggcgttcggtcgcgcgtcgttttggcgttaaagcgacgttaatgggcggttttcgttcgggcggcgggggcggggtagggggcggggattacggggggcgggtcggggcgggtcggggcggggtcgggcgtcgcgtgcggcggagcgcggcggtttcgggttgatatgcggcgcggtttcggaggtagtagtagcggcggcggtagtcggagtagtaggtattcgagtagcgttagcggtcgagcgggcggttttttggtttgggcgtttcggtggcggcggaggtgaggcggcggtagcggcggtagcggcggtagcggcgggtttcgggcgggcggaggtggtcgtcgtgggggtttcgcgcgggcgtcgggtcggggttcggggttgtagttatcgcgtagggtttttggttttgcgcgcgcggggttcgcgggcggg

SEQ ID NO: 12760 - DNA, 1259 bp, Artificial Sequence
  chemically treated genomic DNA (Homo sapiens) CpG-island No: 12760
cccgcccgcgaaccccgcgcgcgcaaaaccaaaaaccctacgcgataactacaaccccgaaccccgacccgacgcccgcgcgaaacccccacgacgaccacctccgcccgcccgaaacccgccgctaccgccgctaccgccgctaccgccgcctcacctccgccgccaccgaaacgcccaaaccaaaaaaccgcccgctcgaccgctaacgctactcgaatacctactactccgactaccgccgccgctactactacctccgaaaccgcgccgcatatcaacccgaaaccgccgcgctccgccgcacgcgacgcccgaccccgccccgacccgccccgacccgccccccgtaatccccgccccctaccccgcccccgccgcccgaacgaaaaccgcccattaacgtcgctttaacgccaaaacgacgcgcgaccgaacgccgaacgaaaaaaaaacgaaaaatcgaacgattaccaaaaaactaacgactctaacgcgcgcgaaataaaaccgttaccctaacgaccgcgaaccgataacgtcaaaaacgcccgccgcccgaaacccgcccgcctacgctccgccgaacgccccctcccgaacgctaaaaacactacgaacgaccccaccgccgaaaacgcgcccgcccctccacgctcgaacactcgaaccgaatcccgcgaacgccttatactcgctccctccaaaaaaaaacgactctcgaacaaaaatcgccgacccctccacgcgacctacgttcgtccaaactcaaaacctcgaaacgtacgaaaacccgaaaacctcgcgaactcgcgcgtaaaactaacgacgcgaataccctaaaacgctacaaaccccgaaaaaccgcttacccgcgaaaacgtcaaccgcttttactattaaaatctaaaatattcaacaaattaaaaacttaaaacctaaaaaaacgtaaccgaccgctctaaaaacccccgccgcgcgaccgatcccgaccccgaccctcaacgacgctaacgtctacgcgtcccgaaactacccccgcaacatataaaactaaaaccctcttcccgcgcgaaccccgaacgaacgctacgaacgataacgaaaccaaaccgaccgcctaaataaaaaacgaaaacgcgaaaccacttacttacccgtaaccgatacctcatccgaacgaaaaacgttttcttcaaaaaaaacaaaaactataaacgaaaatattttttaaacctaaaaacccatttaaaaattaa

SEQ ID NO: 12761 - DNA, 617 bp, Artificial Sequence
  chemically treated genomic DNA (Homo sapiens) CpG-island No: 12761
ttatttagcgtatggtgcgaaatagttttcgtagtttaggaggcgtagatacggaagagttttcgtgtgttattagtcgttatgatgagttggtgatggtattaatgtttcggtgtggagaattggagacgcggttcgttatgttattatcgtcgtcgtcgtcgtcgtcgtttaatgcgaatattattgtcgttaatgttttttagatgttttaggttgtatttatcgttgtttcgcggattattaaggttcgtgagacgtggttagcggtggtgaagtgcgacgattttgcgttatcggggaaagttatagtcgaaaaggtgcggacgatggttgtattttttttcggagttagagtatacgaggtacgtgagtttcgtcgaggtggtggtgcgattattcgtattttttcggttggagagttgtagaaggtgatggtatcgaaaagattcgtagaatttggattgaatgtggtacggaacgcggtcgagaagtcgaaggttatagtttatgacgtcgatatagttatcggtttagaagagtttatgtaggagttttacgagaataatttcgatagtgaaatgattttggtttagtttaaaaagtcggtgtatttg

SEQ ID NO: 12762 - DNA, 617 bp, Artificial Sequence
  chemically treated genomic DNA (Homo sapiens) CpG-island No: 12762
caaatacaccgactttttaaactaaaccaaaatcatttcactatcgaaattattctcgtaaaactcctacataaactcttctaaaccgataactatatcgacgtcataaactataaccttcgacttctcgaccgcgttccgtaccacattcaatccaaattctacgaatcttttcgataccatcaccttctacaactctccaaccgaaaaaatacgaataatcgcaccaccacctcgacgaaactcacgtacctcgtatactctaactccgaaaaaaaatacaaccatcgtccgcaccttttcgactataactttccccgataacgcaaaatcgtcgcacttcaccaccgctaaccacgtctcacgaaccttaataatccgcgaaacaacgataaatacaacctaaaacatctaaaaaacattaacgacaataatattcgcattaaacgacgacgacgacgacgacgataataacataacgaaccgcgtctccaattctccacaccgaaacattaataccatcaccaactcatcataacgactaataacacacgaaaactcttccgtatctacgcctcctaaactacgaaaactatttcgcaccatacgctaaataa

SEQ ID NO: 12763 - DNA, 617 bp, Artificial Sequence
  chemically treated genomic DNA (Homo sapiens) CpG-island No: 12763
taggtgtatcgattttttgaattgggttagagttattttattgtcgaagttgttttcgtgaagtttttgtatgaatttttttgggtcgatggttgtgtcgacgttatagattatgattttcggtttttcggtcgcgtttcgtgttatatttagtttaagttttgcgaattttttcgatgttattattttttgtagttttttaatcgaaggagtacgaatgatcgtattattatttcgacggagtttacgtatttcgtgtattttgatttcgagggagggtgtaattatcgttcgtattttttcggttatggtttttttcgatagcgtagggtcgtcgtattttattatcgttgattacgttttacgaattttggtggttcgcggggtagcgatgggtgtaatttgaggtatttggggagtattggcggtagtagtgttcgtattggacggcggcggcggcggcggcggtggtggtatagcgagtcgcgtttttagttttttatatcggagtattaatgttattattagtttattatagcggttgatggtatacgagagttttttcgtgtttacgttttttaggttgcggaaattgtttcgtattatgcgttgggtgg

SEQ ID NO: 12764 - DNA, 617 bp, Artificial Sequence
  chemically treated genomic DNA (Homo sapiens) CpG-island No: 12764
ccacccaacgcataatacgaaacaatttccgcaacctaaaaaacgtaaacacgaaaaaactctcgtataccatcaaccgctataataaactaataataacattaatactccgatataaaaaactaaaaacgcgactcgctataccaccaccgccgccgccgccgccgccgtccaatacgaacactactaccgccaatactccccaaatacctcaaattacacccatcgctaccccgcgaaccaccaaaattcgtaaaacgtaatcaacgataataaaatacgacgaccctacgctatcgaaaaaaaccataaccgaaaaaatacgaacgataattacaccctccctcgaaatcaaaatacacgaaatacgtaaactccgtcgaaataataatacgatcattcgtactccttcgattaaaaaactacaaaaaataataacatcgaaaaaattcgcaaaacttaaactaaatataacacgaaacgcgaccgaaaaaccgaaaatcataatctataacgtcgacacaaccatcgacccaaaaaaattcatacaaaaacttcacgaaaacaacttcgacaataaaataactctaacccaattcaaaaaatcgatacaccta

SEQ ID NO: 12765 - DNA, 624 bp, Artificial Sequence
  chemically treated genomic DNA (Homo sapiens) CpG-island No: 12765
gcggcgtcgcgatttcgggtcgttgggcggcgttgtgggtttggcggcggagtggaaattttaggttttagggagcgttgcggacggaagtagggaaattgtgagggcggtatcggaagtggcgagtagtttgcgcgcggatggtcgtagcggcgatggcggtagcggtaggtggaggggttggcgcggttcgttttttttcgcgttttcgaggttgtttggttggcgcgttgttcggggattgcgtgggttttttttacgaggtttacgatatcgtcgatttgacgttagttttgcgttatgtttagagtttggagtcggatttcggtacgttcgggagtgagcggataggtgggcggggtcgggcgtaagttagaggtcgtgcgggagggaggtcgaaggggcgcggagttttcgggggcgacgggtcgggggtgcgcggggatgaggttgtcgagggtatcggggttagagtcggatgattcgtagatagtttgagtttagcgagtgttagtgcgattttcggttttatagacgtttcgtttcgaatatttcgtgttcggggcgtggtagtatcggggttttaatcgtgtagggtgtggataaatttatcgtaagttgaaa

SEQ ID NO: 12766 - DNA, 624 bp, Artificial Sequence
  chemically treated genomic DNA (Homo sapiens) CpG-island No: 12766
tttcaacttacgataaatttatccacaccctacacgattaaaaccccgatactaccacgccccgaacacgaaatattcgaaacgaaacgtctataaaaccgaaaatcgcactaacactcgctaaactcaaactatctacgaatcatccgactctaaccccgataccctcgacaacctcatccccgcgcacccccgacccgtcgcccccgaaaactccgcgccccttcgacctccctcccgcacgacctctaacttacgcccgaccccgcccacctatccgctcactcccgaacgtaccgaaatccgactccaaactctaaacataacgcaaaactaacgtcaaatcgacgatatcgtaaacctcgtaaaaaaaacccacgcaatccccgaacaacgcgccaaccaaacaacctcgaaaacgcgaaaaaaaacgaaccgcgccaacccctccacctaccgctaccgccatcgccgctacgaccatccgcgcgcaaactactcgccacttccgataccgccctcacaatttccctacttccgtccgcaacgctccctaaaacctaaaatttccactccgccgccaaacccacaacgccgcccaacgacccgaaatcgcgacgccgc

SEQ ID NO: 12767 - DNA, 624 bp, Artificial Sequence
  chemically treated genomic DNA (Homo sapiens) CpG-island No: 12767
ttttaatttacgatgggtttatttatattttgtacggttgaggtttcggtgttgttacgtttcgagtacgggatgttcggggcgagacgtttataaggtcggagatcgtattggtattcgttgagtttaagttgtttgcgggttattcggttttggtttcggtgttttcggtagttttattttcgcgtattttcgattcgtcgttttcggaggtttcgcgttttttcggtttttttttcgtacggtttttgatttgcgttcggtttcgtttatttgttcgtttattttcgggcgtgtcggggttcggttttagattttggatatgacgtaggattgacgttaggtcgacggtgtcgtgggtttcgtagaaggagtttacgtagttttcgagtagcgcgttagttaggtagtttcggaagcgcgagagggagcgggtcgcgttagtttttttatttgtcgttgtcgttatcgtcgttgcggttattcgcgcgtagattgttcgttattttcggtgtcgtttttatagtttttttattttcgttcgtagcgttttttggggtttagagtttttatttcgtcgttaggtttatagcgtcgtttagcggttcggagtcgcggcgtcgt

SEQ ID NO: 12768 - DNA, 624 bp, Artificial Sequence
  chemically treated genomic DNA (Homo sapiens) CpG-island No: 12768
acgacgccgcgactccgaaccgctaaacgacgctataaacctaacgacgaaataaaaactctaaaccccaaaaaacgctacgaacgaaaataaaaaaactataaaaacgacaccgaaaataacgaacaatctacgcgcgaataaccgcaacgacgataacgacaacgacaaataaaaaaactaacgcgacccgctccctctcgcgcttccgaaactacctaactaacgcgctactcgaaaactacgtaaactccttctacgaaacccacgacaccgtcgacctaacgtcaatcctacgtcatatccaaaatctaaaaccgaaccccgacacgcccgaaaataaacgaacaaataaacgaaaccgaacgcaaatcaaaaaccgtacgaaaaaaaaaccgaaaaaacgcgaaacctccgaaaacgacgaatcgaaaatacgcgaaaataaaactaccgaaaacaccgaaaccaaaaccgaataacccgcaaacaacttaaactcaacgaataccaatacgatctccgaccttataaacgtctcgccccgaacatcccgtactcgaaacgtaacaacaccgaaacctcaaccgtacaaaatataaataaacccatcgtaaattaaaa

SEQ ID NO: 12769 - DNA, 522 bp, Artificial Sequence
  chemically treated genomic DNA (Homo sapiens) CpG-island No: 12769
cgtacgtttttgtaaattcgatgttagtggcgaaggtataagatagaagaggggattttaataggtattatggtttcgattaaagtgggtttcggaagttagaaggcgcggaagtttagcgggttcgtagtagagcgcgcggggtaattgggtatggcgcgcgggggtgtacggggcggacgcgtagttttgggggcgtacggttttggattttgtttatttacgcggtttttttttcgttttcgatttcgtcgtagtttggatcggttttcgcggtttttcgatagttaacgatggtttataaatatatatgtatttcgttgaaggatgtttgggtaatttcgtttttcgttcggcgtttttggcgacgttttgtattaggatttgtttcgaggttacgtagaaaagataaaagggtagtcgggtcgtcgtagtcgggtagaaatatttattagttagtatttcggcgaggaattttaagaggttaagtggaggatgagagttgttgcgaagattgagtgg

SEQ ID NO: 12770 - DNA, 522 bp, Artificial Sequence
  chemically treated genomic DNA (Homo sapiens) CpG-island No: 12770
ccactcaatcttcgcaacaactctcatcctccacttaacctcttaaaattcctcgccgaaatactaactaataaatatttctacccgactacgacgacccgactacccttttatcttttctacgtaacctcgaaacaaatcctaatacaaaacgtcgccaaaaacgccgaacgaaaaacgaaattacccaaacatccttcaacgaaatacatatatatttataaaccatcgttaactatcgaaaaaccgcgaaaaccgatccaaactacgacgaaatcgaaaacgaaaaaaaaaccgcgtaaataaacaaaatccaaaaccgtacgcccccaaaactacgcgtccgccccgtacacccccgcgcgccatacccaattaccccgcgcgctctactacgaacccgctaaacttccgcgccttctaacttccgaaacccactttaatcgaaaccataatacctattaaaatcccctcttctatcttataccttcgccactaacatcgaatttacaaaaacgtacg

SEQ ID NO: 12771 - DNA, 522 bp, Artificial Sequence
  chemically treated genomic DNA (Homo sapiens) CpG-island No: 12771
ttatttagttttcgtagtagtttttattttttatttggttttttggagtttttcgtcggagtgttgattagtggatatttttgttcggttgcggcggttcgattgtttttttgttttttttgcgtgatttcggggtaggttttggtgtagagcgtcgttaaggacgtcgagcgggaggcgggattgtttagatattttttagcgaagtgtatgtgtgtttgtaaattatcgttggttgtcgggagatcgcgaggatcggtttaggttgcggcggagtcgagggcgagggagaggtcgcgtgagtgagtagagtttagagtcgtgcgtttttagaattgcgcgttcgtttcgtgtattttcgcgcgttatgtttagttgtttcgcgcgttttgttacgggttcgttgggttttcgcgttttttagttttcggagtttattttgatcggggttataatatttattgagatttttttttttgttttgtattttcgttattggtatcggatttgtagaagcgtgcg

SEQ ID NO: 12772 - DNA, 522 bp, Artificial Sequence
  chemically treated genomic DNA (Homo sapiens) CpG-island No: 12772
cgcacgcttctacaaatccgataccaataacgaaaatacaaaacaaaaaaaaaaatctcaataaatattataaccccgatcaaaataaactccgaaaactaaaaaacgcgaaaacccaacgaacccgtaacaaaacgcgcgaaacaactaaacataacgcgcgaaaatacacgaaacgaacgcgcaattctaaaaacgcacgactctaaactctactcactcacgcgacctctccctcgccctcgactccgccgcaacctaaaccgatcctcgcgatctcccgacaaccaacgataatttacaaacacacatacacttcgctaaaaaatatctaaacaatcccgcctcccgctcgacgtccttaacgacgctctacaccaaaacctaccccgaaatcacgcaaaaaaaacaaaaaaacaatcgaaccgccgcaaccgaacaaaaatatccactaatcaacactccgacgaaaaactccaaaaaaccaaataaaaaataaaaactactacgaaaactaaataa

SEQ ID NO: 12773 - DNA, 546 bp, Artificial Sequence
  chemically treated genomic DNA (Homo sapiens) CpG-island No: 12773
cggggattcggtggttttgtcgatttcggagtttttggtaagtgtttaaataataggacggacgtagtagtttaagtttcgtttgtttggaaggaaggtgggttgttgtcgtaattggagttgttcgttggggttgattggcgtttagcgtagttaaataaaaattcggttcgcgttttcggagtcggttgcgggttttcggcgtttttttttttgtttagtattttcgtcgtgtttagaaagcgcggtagtttcggtttgcgtttgggcgtttcggcgtttttatgtttcgtagttgttttcgttttcgtcgtcgtcgtcgtcgtcgtttttttttttttaattatagtttgcggtagttattattatcgtcgtcgttaagtttcgtcgttcgggcgttttttaaataaataatattaagttcgaagttgagtcggcgcgggttttatatagtcgttcgagttttcgttttttgatttcgtttttcgaggtttaggttcgttttttggtttcgttttgggagttcgtatttcgttggggagaggg

SEQ ID NO: 12774 - DNA, 546 bp, Artificial Sequence
  chemically treated genomic DNA (Homo sapiens) CpG-island No: 12774
ccctctccccaacgaaatacgaactcccaaaacgaaaccaaaaaacgaacctaaacctcgaaaaacgaaatcaaaaaacgaaaactcgaacgactatataaaacccgcgccgactcaacttcgaacttaatattatttatttaaaaaacgcccgaacgacgaaacttaacgacgacgataataataactaccgcaaactataattaaaaaaaaaaaaacgacgacgacgacgacgacgaaaacgaaaacaactacgaaacataaaaacgccgaaacgcccaaacgcaaaccgaaactaccgcgctttctaaacacgacgaaaatactaaacaaaaaaaaaaacgccgaaaacccgcaaccgactccgaaaacgcgaaccgaatttttatttaactacgctaaacgccaatcaaccccaacgaacaactccaattacgacaacaacccaccttccttccaaacaaacgaaacttaaactactacgtccgtcctattatttaaacacttaccaaaaactccgaaatcgacaaaaccaccgaatccccg

SEQ ID NO: 12775 - DNA, 546 bp, Artificial Sequence
  chemically treated genomic DNA (Homo sapiens) CpG-island No: 12775
ttttttttttagcgaggtgcgggtttttagagcggagttagggggcgggtttgggtttcgaggggcggggttagggggcggaggttcgggcggttatataaggttcgcgtcggtttaatttcggatttggtgttatttatttgggaagcgttcggacggcggagtttggcggcggcggtggtggtggttgtcgtagattgtggttaaaaaaaagaaggcggcggcggcggcggcggcggaggcggaggtagttgcgaggtatgggagcgtcgaagcgtttaggcgtaggtcgaagttgtcgcgttttttgggtacggcgggagtgttgagtagaaaggggagcgtcgggggttcgtagtcggtttcggaggcgcgggtcgggtttttgtttggttacgttgagcgttagttagttttagcgaataattttagttacgataataatttattttttttttagataagcgagatttgggttgttgcgttcgttttattgtttagatatttgttaggggtttcggagtcggtagagttatcgagttttcg

SEQ ID NO: 12776 - DNA, 546 bp, Artificial Sequence
  chemically treated genomic DNA (Homo sapiens) CpG-island No: 12776
cgaaaactcgataactctaccgactccgaaacccctaacaaatatctaaacaataaaacgaacgcaacaacccaaatctcgcttatctaaaaaaaaaataaattattatcgtaactaaaattattcgctaaaactaactaacgctcaacgtaaccaaacaaaaacccgacccgcgcctccgaaaccgactacgaacccccgacgctcccctttctactcaacactcccgccgtacccaaaaaacgcgacaacttcgacctacgcctaaacgcttcgacgctcccatacctcgcaactacctccgcctccgccgccgccgccgccgccgccttcttttttttaaccacaatctacgacaaccaccaccaccgccgccgccaaactccgccgtccgaacgcttcccaaataaataacaccaaatccgaaattaaaccgacgcgaaccttatataaccgcccgaacctccgccccctaaccccgcccctcgaaacccaaacccgccccctaactccgctctaaaaacccgcacctcgctaaaaaaaaaa

SEQ ID NO: 12777 - DNA, 502 bp, Artificial Sequence
  chemically treated genomic DNA (Homo sapiens) CpG-island No: 12777
acgcgacgtaacgtaggtagcgtagcgcgggtattacgggtaatttaaatttttttttatatataatcgcggagttgtttgttaggtttgtttattgtagagtcgtcgttgtttgcgggacgggtaaaagttaagtcgttaggtggatttcggggaagtcgtcgttaatatttattttataggattaggaggttttatcggggcgttgtcgcgaatcgcgttatttatagtttttattttaggggtaggtttgcgtttgcgtaggtcgtagtttcggtttttaatttttagaatttttttcgtcgtcggttttcgttcgcggattttggtttaggcgcgtgggcgttgtcgagaggttgggagttcgggaatcggtttttggatttgagcggagcgagaaagagcgcgtcgtttgtacgattggattggagcggtcgggtgttttggaggtttttgggaattgtagtttttgcgtaggtggagagtgagtttttgtaagcgg

SEQ ID NO: 12778 - DNA, 502 bp, Artificial Sequence
  chemically treated genomic DNA (Homo sapiens) CpG-island No: 12778
ccgcttacaaaaactcactctccacctacgcaaaaactacaattcccaaaaacctccaaaacacccgaccgctccaatccaatcgtacaaacgacgcgctctttctcgctccgctcaaatccaaaaaccgattcccgaactcccaacctctcgacaacgcccacgcgcctaaaccaaaatccgcgaacgaaaaccgacgacgaaaaaaattctaaaaattaaaaaccgaaactacgacctacgcaaacgcaaacctacccctaaaataaaaactataaataacgcgattcgcgacaacgccccgataaaacctcctaatcctataaaataaatattaacgacgacttccccgaaatccacctaacgacttaacttttacccgtcccgcaaacaacgacgactctacaataaacaaacctaacaaacaactccgcgattatatataaaaaaaaatttaaattacccgtaatacccgcgctacgctacctacgttacgtcgcgt

SEQ ID NO: 12779 - DNA, 502 bp, Artificial Sequence
  chemically treated genomic DNA (Homo sapiens) CpG-island No: 12779
tcgtttataagggtttattttttatttgcgtaaggattgtaatttttaggggtttttagggtattcggtcgttttagtttagtcgtgtaggcggcgcgttttttttcgtttcgtttaagtttaggaatcggttttcgggtttttagtttttcggtagcgtttacgcgtttgggttaaagttcgcgaacggaagtcggcggcgaggaggattttgggagttggaggtcgaggttgcgatttgcgtaggcgtaaatttgtttttggggtgagggttgtaagtggcgcgattcgcggtagcgtttcgatggaattttttggttttgtgaggtgagtgttggcggcggttttttcgaggtttatttggcggtttggtttttgttcgtttcgtaggtagcggcggttttgtagtgagtaggtttggtaggtagtttcgcggttgtgtgtggagaggggtttgggttgttcgtggtgttcgcgttgcgttatttgcgttgcgtcgcgt

SEQ ID NO: 12780 - DNA, 502 bp, Artificial Sequence
  chemically treated genomic DNA (Homo sapiens) CpG-island No: 12780
acgcgacgcaacgcaaataacgcaacgcgaacaccacgaacaacccaaacccctctccacacacaaccgcgaaactacctaccaaacctactcactacaaaaccgccgctacctacgaaacgaacaaaaaccaaaccgccaaataaacctcgaaaaaaccgccgccaacactcacctcacaaaaccaaaaaattccatcgaaacgctaccgcgaatcgcgccacttacaaccctcaccccaaaaacaaatttacgcctacgcaaatcgcaacctcgacctccaactcccaaaatcctcctcgccgccgacttccgttcgcgaactttaacccaaacgcgtaaacgctaccgaaaaactaaaaacccgaaaaccgattcctaaacttaaacgaaacgaaaaaaaacgcgccgcctacacgactaaactaaaacgaccgaataccctaaaaacccctaaaaattacaatccttacgcaaataaaaaataaacccttataaacga

SEQ ID NO: 12781 - DNA, 688 bp, Artificial Sequence
  chemically treated genomic DNA (Homo sapiens) CpG-island No: 12781
ggattggcggtttagtttttcggggatatagttcgggcgtatttcgcgtcgtttttggttattgaggcggttttcgaggcgtcgggttagggaaagttttttcggtcgttaaggttgggatagcgtcgggggatcggggcggggtgcgtgcgtcgaaagggttttaaagttgtagggttggacggtataaaggggcgtaaggtacggaggttaggtagaggggatagttagcggcgcggcgggacgggcgggtttcgacgtttagttttaaatgcgtggtcgttgtgggagttcgtttttaggcgtttattagttttttttttattcgacgttattttggcggtcgcgtttatgttgttttcgttttaattagtagttaggaggggtcgcgggtagcgttcgagacgtttattgagaggatttttcgtttgcgggttttttgttcgacgttattttcggtttcgtttcgggcggttttttttattattttcggtttcgttttcggcggttcgttttattattttcggtttttcggggtttaggttcgtattatcgagtcgaatcgagtttttatgtttttttagataagtcgttgggggagaggggcggggttttgggcgttttcggaggtttttttcgtgtgttttcggggggggttcgggggggtatttgggggtaaattaatggg

SEQ ID NO: 12782 - DNA, 688 bp, Artificial Sequence
  chemically treated genomic DNA (Homo sapiens) CpG-island No: 12782
cccattaatttacccccaaatacccccccgaaccccccccgaaaacacacgaaaaaaacctccgaaaacgcccaaaaccccgcccctctcccccaacgacttatctaaaaaaacataaaaactcgattcgactcgataatacgaacctaaaccccgaaaaaccgaaaataataaaacgaaccgccgaaaacgaaaccgaaaataataaaaaaaaccgcccgaaacgaaaccgaaaataacgtcgaacaaaaaacccgcaaacgaaaaatcctctcaataaacgtctcgaacgctacccgcgacccctcctaactactaattaaaacgaaaacaacataaacgcgaccgccaaaataacgtcgaataaaaaaaaaactaataaacgcctaaaaacgaactcccacaacgaccacgcatttaaaactaaacgtcgaaacccgcccgtcccgccgcgccgctaactatcccctctacctaacctccgtaccttacgcccctttataccgtccaaccctacaactttaaaaccctttcgacgcacgcaccccgccccgatcccccgacgctatcccaaccttaacgaccgaaaaaactttccctaacccgacgcctcgaaaaccgcctcaataaccaaaaacgacgcgaaatacgcccgaactatatccccgaaaaactaaaccgccaatcc

SEQ ID NO: 12783 - DNA, 688 bp, Artificial Sequence
  chemically treated genomic DNA (Homo sapiens) CpG-island No: 12783
tttattgatttgtttttaaatgttttttcgaatttttttcggaaatatacggggggagttttcggggacgtttaaaatttcgttttttttttttagcggtttgtttaggaaaatatgaggattcggttcgattcgatggtgcgggtttaagtttcgggaagtcgggagtggtgaggcgggtcgtcgggagcggggtcgggagtggtgaggggggtcgttcggagcggggtcgggagtggcgtcgagtagagagttcgtaggcgggaagtttttttaatgagcgtttcgagcgttgttcgcggttttttttgattgttagttggagcggggatagtatgggcgcggtcgttaaggtagcgtcgagtgaggggaagattgatgggcgtttggagacgagtttttatagcggttacgtatttggagttgggcgtcggggttcgttcgtttcgtcgcgtcgttagttgttttttttgtttggttttcgtgttttgcgtttttttgtgtcgtttagttttatagttttgaggttttttcggcgtacgtatttcgtttcgatttttcggcgttattttagttttgacggtcggggaggttttttttagttcggcgtttcgaggatcgttttagtggttaaaggcggcgcggggtgcgttcgggttgtgttttcgggaggttggatcgttagttt

SEQ ID NO: 12784 - DNA, 688 bp, Artificial Sequence
  chemically treated genomic DNA (Homo sapiens) CpG-island No: 12784
aaactaacgatccaacctcccgaaaacacaacccgaacgcaccccgcgccgcctttaaccactaaaacgatcctcgaaacgccgaactaaaaaaaacctccccgaccgtcaaaactaaaataacgccgaaaaatcgaaacgaaatacgtacgccgaaaaaacctcaaaactataaaactaaacgacacaaaaaaacgcaaaacacgaaaaccaaacaaaaaaaacaactaacgacgcgacgaaacgaacgaaccccgacgcccaactccaaatacgtaaccgctataaaaactcgtctccaaacgcccatcaatcttcccctcactcgacgctaccttaacgaccgcgcccatactatccccgctccaactaacaatcaaaaaaaaccgcgaacaacgctcgaaacgctcattaaaaaaacttcccgcctacgaactctctactcgacgccactcccgaccccgctccgaacgacccccctcaccactcccgaccccgctcccgacgacccgcctcaccactcccgacttcccgaaacttaaacccgcaccatcgaatcgaaccgaatcctcatattttcctaaacaaaccgctaaaaaaaaaaaacgaaattttaaacgtccccgaaaactccccccgtatatttccgaaaaaaattcgaaaaaacatttaaaaacaaatcaataaa

SEQ ID NO: 12785 - DNA, 665 bp, Artificial Sequence
  chemically treated genomic DNA (Homo sapiens) CpG-island No: 12785
ggtcgcgtaaacggttttcgcgggaatgcgaagcggattttcgagtttttgagtttagagtaatgtttggggagcgatacgagggcgtagagcggtagatcgcggagcgggaagtttattttcggagtcgttttaggaaattcggaggatttaggtcgttaatgatttcggggttgaagtgggtatcgacgggtgtattttgttgttttagggaagtcgttcggtaggcggcggcgacgtggaatttgggttagggttagaatcggcgaaaagtaagtcggaaaaggtaagggggcgtcggtgcgttgattatttgtttttttagcggagtgcgacgcgcgtcgattggttggagtgtcgttcgggtattcggaagtggtcgatgttcgtcgttagtgatatcgggataatagttgcgggttttgtgcgagcggtttagtagcgcggagttttagcggagtgagcgagcgcggggtagtagcggtttgcggtgagattttatttcgtcgcggttgtgggggtaggcgggggttgggtttttagttttttagagagtcgagcggaaattttacgtttaggttcgttttgatcggggttcgttgtgtgattttgaagtttatgtttttttttatttttttcgtttttaggtttttatttttatttgt

SEQ ID NO: 12786 - DNA, 665 bp, Artificial Sequence
  chemically treated genomic DNA (Homo sapiens) CpG-island No: 12786
acaaataaaaataaaaacctaaaaacgaaaaaaataaaaaaaaacataaacttcaaaatcacacaacgaaccccgatcaaaacgaacctaaacgtaaaatttccgctcgactctctaaaaaactaaaaacccaacccccgcctacccccacaaccgcgacgaaataaaatctcaccgcaaaccgctactaccccgcgctcgctcactccgctaaaactccgcgctactaaaccgctcgcacaaaacccgcaactattatcccgatatcactaacgacgaacatcgaccacttccgaatacccgaacgacactccaaccaatcgacgcgcgtcgcactccgctaaaaaaacaaataatcaacgcaccgacgcccccttaccttttccgacttacttttcgccgattctaaccctaacccaaattccacgtcgccgccgcctaccgaacgacttccctaaaacaacaaaatacacccgtcgatacccacttcaaccccgaaatcattaacgacctaaatcctccgaatttcctaaaacgactccgaaaataaacttcccgctccgcgatctaccgctctacgccctcgtatcgctccccaaacattactctaaactcaaaaactcgaaaatccgcttcgcattcccgcgaaaaccgtttacgcgacc

SEQ ID NO: 12787 - DNA, 665 bp, Artificial Sequence
  chemically treated genomic DNA (Homo sapiens) CpG-island No: 12787
gtaggtggaaatgaaggtttgggggcggggggaatggagggaggtataaattttaaggttatatagcgaatttcggttagaacgggtttaaacgtagggttttcgttcggttttttagggagttgggagtttagttttcgtttatttttatagtcgcgacggaatgaggttttatcgtaggtcgttattgtttcgcgttcgtttatttcgttgaggtttcgcgttgttgggtcgttcgtatagagttcgtagttgttgtttcggtgttattggcgacgggtatcggttattttcgggtattcgggcggtattttagttaatcggcgcgcgtcgtatttcgttggaggaataggtggttagcgtatcgacgtttttttgtttttttcggtttgtttttcgtcggttttagttttagtttaagttttacgtcgtcgtcgtttgtcgagcggtttttttggaatagtaaagtgtattcgtcgatgtttattttagtttcggaattattgacgatttgagtttttcgggttttttagaacggtttcggggatgaatttttcgtttcgcgatttgtcgttttgcgttttcgtgtcgttttttaagtattgttttaggtttaagaattcgagaattcgtttcgtattttcgcggggatcgtttgcgcgatt

SEQ ID NO: 12788 - DNA, 665 bp, Artificial Sequence
  chemically treated genomic DNA (Homo sapiens) CpG-island No: 12788
aatcgcgcaaacgatccccgcgaaaatacgaaacgaattctcgaattcttaaacctaaaacaatacttaaaaaacgacacgaaaacgcaaaacgacaaatcgcgaaacgaaaaattcatccccgaaaccgttctaaaaaacccgaaaaactcaaatcgtcaataattccgaaactaaaataaacatcgacgaatacactttactattccaaaaaaaccgctcgacaaacgacgacgacgtaaaacttaaactaaaactaaaaccgacgaaaaacaaaccgaaaaaaacaaaaaaacgtcgatacgctaaccacctattcctccaacgaaatacgacgcgcgccgattaactaaaataccgcccgaatacccgaaaataaccgatacccgtcgccaataacaccgaaacaacaactacgaactctatacgaacgacccaacaacgcgaaacctcaacgaaataaacgaacgcgaaacaataacgacctacgataaaacctcattccgtcgcgactataaaaataaacgaaaactaaactcccaactccctaaaaaaccgaacgaaaaccctacgtttaaacccgttctaaccgaaattcgctatataaccttaaaatttatacctccctccattccccccgcccccaaaccttcatttccacctac

SEQ ID NO: 12789 - DNA, 650 bp, Artificial Sequence
  chemically treated genomic DNA (Homo sapiens) CpG-island No: 12789
tcgttttcgagaggtgggttgcgggcgttcgaggtttagtcgtcgtcgtcgtcgtcgtcgtcgtcgttcgcgttcgtcgtcggttcgtcgttcgtttagaggcggttttttatcggaagtgaaatcgaaacggagttgagcgtttgattgaggtcgaattttcggttcgttgcgggtgtaatattgaaattacgttacgtgattaacgttgtttttttttttcgcgggtttagtttttcggtttcgtttttttttttaagtggtttgggagcgcgcgtatgcgcgttgttgggaatcggtcggggtgtcgggtcgaaagatagacgcgcgggtcgggcgtgcgcgggtttggtggagggcgggaaggttgaagggcggtgataggtcgtattgtttcgcgagggttagaacgttatttttgtagaggtgtatttagtggcgtgggaaattaaatgtattcggttattttagttcggtttttttgggatttcgcgggagggggtgtttggtttggtttggtttggtttggtttggtttggtttggttcggtttaaagtagcgtagtttgattgagcgggaggtggagtggaaggcgagaataggggtgaaggattagatagaagaagattttgaattaggaatagtggtaa

SEQ ID NO: 12790 - DNA, 650 bp, Artificial Sequence
  chemically treated genomic DNA (Homo sapiens) CpG-island No: 12790
ttaccactattcctaattcaaaatcttcttctatctaatccttcacccctattctcgccttccactccacctcccgctcaatcaaactacgctactttaaaccgaaccaaaccaaaccaaaccaaaccaaaccaaaccaaaccaaacaccccctcccgcgaaatcccaaaaaaaccgaactaaaataaccgaatacatttaatttcccacgccactaaatacacctctacaaaaataacgttctaaccctcgcgaaacaatacgacctatcaccgcccttcaaccttcccgccctccaccaaacccgcgcacgcccgacccgcgcgtctatctttcgacccgacaccccgaccgattcccaacaacgcgcatacgcgcgctcccaaaccacttaaaaaaaaaaacgaaaccgaaaaactaaacccgcgaaaaaaaaaaacaacgttaatcacgtaacgtaatttcaatattacacccgcaacgaaccgaaaattcgacctcaatcaaacgctcaactccgtttcgatttcacttccgataaaaaaccgcctctaaacgaacgacgaaccgacgacgaacgcgaacgacgacgacgacgacgacgacgacgactaaacctcgaacgcccgcaacccacctctcgaaaacga

SEQ ID NO: 12791 - DNA, 650 bp, Artificial Sequence
  chemically treated genomic DNA (Homo sapiens) CpG-island No: 12791
ttgttattgtttttagtttaaagtttttttttgtttaattttttatttttattttcgttttttattttatttttcgtttagttagattgcgttattttgaatcggattaaattaaattaaattaaattaaattaaattagattagatattttttttcgcggaattttagagaggtcgaattgggataatcgaatgtatttgattttttacgttattgagtgtatttttgtagaaatgacgttttggttttcgcgaggtagtgcgatttgttatcgttttttagttttttcgttttttattaagttcgcgtacgttcggttcgcgcgtttgtttttcgattcggtatttcggtcggtttttagtagcgcgtatgcgcgcgtttttaggttatttaagagagagggcggggtcgaggggttgagttcgcggggggagggaatagcgttgattacgtgacgtggttttagtgttatattcgtagcgggtcgggggttcggttttagttaggcgtttagtttcgtttcggttttattttcggtggagggtcgtttttgagcgggcggcgggtcgacggcgagcgcgggcggcggcggcggcggcggcggcggcggttgggtttcgagcgttcgtagtttatttttcgggggcgg

SEQ ID NO: 12792 - DNA, 650 bp, Artificial Sequence
  chemically treated genomic DNA (Homo sapiens) CpG-island No: 12792
ccgcccccgaaaaataaactacgaacgctcgaaacccaaccgccgccgccgccgccgccgccgccgcccgcgctcgccgtcgacccgccgcccgctcaaaaacgaccctccaccgaaaataaaaccgaaacgaaactaaacgcctaactaaaaccgaacccccgacccgctacgaatataacactaaaaccacgtcacgtaatcaacgctattccctccccccgcgaactcaacccctcgaccccgccctctctcttaaataacctaaaaacgcgcgcatacgcgctactaaaaaccgaccgaaataccgaatcgaaaaacaaacgcgcgaaccgaacgtacgcgaacttaataaaaaacgaaaaaactaaaaaacgataacaaatcgcactacctcgcgaaaaccaaaacgtcatttctacaaaaatacactcaataacgtaaaaaatcaaatacattcgattatcccaattcgacctctctaaaattccgcgaaaaaaaatatctaatctaatttaatttaatttaatttaatttaatttaatccgattcaaaataacgcaatctaactaaacgaaaaataaaataaaaaacgaaaataaaaataaaaaattaaacaaaaaaaaactttaaactaaaaacaataacaa

SEQ ID NO: 12793 - DNA, 608 bp, Artificial Sequence
  chemically treated genomic DNA (Homo sapiens) CpG-island No: 12793
  unsure (289, 303, 328, 336..337, 478, 491, 587..588, 591..592, 594..595)
  unsure (597)
attttgggttacggtcgttagtatcgttttcgttcggtagcggggaagttatttgttaggttcgagttttatttggtaggaaagaggaagcgattgttcggtagttcgttcgacgcgagggcggtgagcgtggaattcgttttttttgttgtagcggttagattttcgtcggtacgtgggttttatttaggtttcggtagttttgataggcgggtcgttcgcggatttcggttcgtcgtttcgcgtaggttttcggggtaggattttcgtttttttcgtaattattttngtcgagcgggcgtnttagcggtttatatcgtcggttcgntttggttnntttttttttttgacggcgcgatttcgttttgtagttttttatttatttggttacggagtttgaggaaagttatggcggtcgtttttttttttattttaggttttttttttttcggcggtgacgttgtcgtcgtcgattcgntttattgtttttngttttaatagttttaggtcgttgttcgggattaatcgtgttcggcgggtcgaatgcgatggaaaagatcgaagataaggggtgtaaatattatttnntannnnnnntttttttttat

SEQ ID NO: 12794 - DNA, 608 bp, Artificial Sequence
  chemically treated genomic DNA (Homo sapiens) CpG-island No: 12794
  unsure (12..13, 15..16, 18, 21..22, 118, 131, 272..273, 281, 306)
  unsure (320)
ataaaaaaaaannnnnnntannaaataatatttacaccccttatcttcgatcttttccatcgcattcgacccgccgaacacgattaatcccgaacaacgacctaaaactattaaaacnaaaaacaataaancgaatcgacgacgacaacgtcaccgccgaaaaaaaaaaaacctaaaataaaaaaaaaaacgaccgccataactttcctcaaactccgtaaccaaataaataaaaaactacaaaacgaaatcgcgccgtcaaaaaaaaaaannaaccaaancgaaccgacgatataaaccgctaanacgcccgctcgacnaaaataattacgaaaaaaacgaaaatcctaccccgaaaacctacgcgaaacgacgaaccgaaatccgcgaacgacccgcctatcaaaactaccgaaacctaaataaaacccacgtaccgacgaaaatctaaccgctacaacaaaaaaaacgaattccacgctcaccgccctcgcgtcgaacgaactaccgaacaatcgcttcctctttcctaccaaataaaactcgaacctaacaaataacttccccgctaccgaacgaaaacgatactaacgaccgtaacccaaaat

SEQ ID NO: 12795 - DNA, 608 bp, Artificial Sequence
  chemically treated genomic DNA (Homo sapiens) CpG-island No: 12795
  unsure (12..13, 15..16, 18, 21..22, 118, 131, 272..273, 281, 306)
  unsure (320)
gtgagagagaannnnnnntgnngaatgatatttgtattttttgttttcggttttttttatcgtattcggttcgtcggatacggttggtttcgggtaacggtttaaggttattggggtngaaaataatgggncgggtcggcggcggtaacgttatcgtcggaggaggagaagtttggagtggggggagaggcgatcgttatggttttttttaaatttcgtgattaggtaggtgaggggttgtagggcgggatcgcgtcgttagggaaggaagnnaattaggncggatcggcggtgtgggtcgttggnacgttcgttcggtnggggtggttgcgagggaaacgggggttttgtttcggggatttgcgcgagacggcgggtcggggttcgcgggcgattcgtttgttagagttgtcggggtttgggtgaagtttacgtgtcgacgggggtttagtcgttgtagtaagaggggcgggttttacgtttatcgttttcgcgtcgggcgagttgtcgggtaatcgtttttttttttttgttaggtgaggttcgggtttaataggtggttttttcgttgtcgggcgggagcggtattggcggtcgtgatttagggt

SEQ ID NO: 12796 - DNA, 608 bp, Artificial Sequence
  chemically treated genomic DNA (Homo sapiens) CpG-island No: 12796
  unsure (289, 303, 328, 336..337, 478, 491, 587..588, 591..592, 594..595)
  unsure (597)
accctaaatcacgaccgccaataccgctcccgcccgacaacgaaaaaaccacctattaaacccgaacctcacctaacaaaaaaaaaaaaacgattacccgacaactcgcccgacgcgaaaacgataaacgtaaaacccgcccctcttactacaacgactaaacccccgtcgacacgtaaacttcacccaaaccccgacaactctaacaaacgaatcgcccgcgaaccccgacccgccgtctcgcgcaaatccccgaaacaaaacccccgtttccctcgcaaccaccccnaccgaacgaacgtnccaacgacccacaccgccgatccgncctaattnncttccttccctaacgacgcgatcccgccctacaacccctcacctacctaatcacgaaatttaaaaaaaaccataacgatcgcctctccccccactccaaacttctcctcctccgacgataacgttaccgccgccgacccgncccattattttcnaccccaataaccttaaaccgttacccgaaaccaaccgtatccgacgaaccgaatacgataaaaaaaaccgaaaacaaaaaatacaaatatcattcnncannnnnnnttctctctcac

SEQ ID NO: 12797 - DNA, 851 bp, Artificial Sequence
  chemically treated genomic DNA (Homo sapiens) CpG-island No: 12797
atgacgaggggatatcgatttcgggtttcgtcgtttcgggtttggtttttttatattagcggaaaagggagttggcgggatttttaaattcgaggttgagtttggggtatatagggaattcggttatgatgtagcgcggtaattgtagttcggtgaaggcgggcgggttgcgttttattttgtatttaatatcgtcgatttgtagtatcgcgtcgttttgttaggtatttacgttgagtacgtttttagttattgttttttttcggtagtatagttttattacgggttcgtagaatatagtcggtttaggtttcggttttgaataggtcgtatcgtcgttagtattcggtcggttttttttgttttttttggcggcggtcgttttagcgtgattttttagggtattggtagcgatgcggttgaggattcgatttagcggttcgttttggtcgcgttgtatgtttttgtggttattattagttaaagcgaatgataggtttagtttgggtttcgaaggtacgtagcgtattatagcgcgttttatcgttttcgtcgttgtttggtttttcgttttagttcggtttagtttttttatcgtcgttcggattattcgaagcgcggcgcgggcgtttgggagtttttatatgaatttggtggtttagcggtcgataagattcgcggtcgattagcggtttattgttaggtggagttgaggagtcgaggtcgtcggttttgatttatttagatttcgcgattttcggttagcgaagagagggaatgaagtgttttcgattcgtattttcgtttagcgcgtgggtacgtatgtttgtaatattttgaagattaatttt

SEQ ID NO: 12798 - DNA, 851 bp, Artificial Sequence
  chemically treated genomic DNA (Homo sapiens) CpG-island No: 12798
aaaattaatcttcaaaatattacaaacatacgtacccacgcgctaaacgaaaatacgaatcgaaaacacttcattccctctcttcgctaaccgaaaatcgcgaaatctaaataaatcaaaaccgacgacctcgactcctcaactccacctaacaataaaccgctaatcgaccgcgaatcttatcgaccgctaaaccaccaaattcatataaaaactcccaaacgcccgcgccgcgcttcgaataatccgaacgacgataaaaaaactaaaccgaactaaaacgaaaaaccaaacaacgacgaaaacgataaaacgcgctataatacgctacgtaccttcgaaacccaaactaaacctatcattcgctttaactaataataaccacaaaaacatacaacgcgaccaaaacgaaccgctaaatcgaatcctcaaccgcatcgctaccaataccctaaaaaatcacgctaaaacgaccgccgccaaaaaaaacaaaaaaaaccgaccgaatactaacgacgatacgacctattcaaaaccgaaacctaaaccgactatattctacgaacccgtaataaaactatactaccgaaaaaaaacaataactaaaaacgtactcaacgtaaatacctaacaaaacgacgcgatactacaaatcgacgatattaaatacaaaataaaacgcaacccgcccgccttcaccgaactacaattaccgcgctacatcataaccgaattccctatataccccaaactcaacctcgaatttaaaaatcccgccaactcccttttccgctaatataaaaaaaccaaacccgaaacgacgaaacccgaaatcgatatcccctcgtcat

SEQ ID NO: 12799 - DNA, 851 bp, Artificial Sequence
  chemically treated genomic DNA (Homo sapiens) CpG-island No: 12799
aaaattaatttttagagtattatagatatgcgtgtttacgcgttaggcgaaagtgcgagtcggaagtattttatttttttttttcgttagtcggaagtcgcgagatttgaatgagttaaagtcggcggtttcggttttttagttttatttgatagtaggtcgttgatcggtcgcgggttttgtcgatcgttaggttattaggtttatgtggaggtttttaggcgttcgcgtcgcgtttcgggtgattcggacggcggtggagaagttgagtcgggttgaagcggggagttagatagcggcgggagcgatggagcgcgttgtagtgcgttgcgtattttcggaatttaagttgagtttgttattcgttttggttgatggtagttataagaatatgtagcgcgattagagcgagtcgttgggtcgagtttttagtcgtatcgttattaatgttttaaagggttacgttaaggcggtcgtcgttaagaagagtaggaagagtcggtcgaatgttagcggcggtgcggtttgtttagggtcggggtttgagtcggttgtgttttgcgagttcgtggtgaagttgtattatcgggaagaggtagtggttgaggacgtgtttaacgtggatgtttggtaagacggcgcggtgttgtagatcggcgatgttaagtataaggtggagcgtaattcgttcgtttttatcgaattgtagttgtcgcgttatattatggtcgggttttttgtgtgttttaaatttagtttcgaatttggggatttcgttagttttttttttcgttggtataaggaagttaagttcggagcggcggagttcgaggtcggtgttttttcgttat

SEQ ID NO: 12800 - DNA, 851 bp, Artificial Sequence
  chemically treated genomic DNA (Homo sapiens) CpG-island No: 12800
ataacgaaaaaacaccgacctcgaactccgccgctccgaacttaacttccttataccaacgaaaaaaaaaactaacgaaatccccaaattcgaaactaaatttaaaacacacaaaaaacccgaccataatataacgcgacaactacaattcgataaaaacgaacgaattacgctccaccttatacttaacatcgccgatctacaacaccgcgccgtcttaccaaacatccacgttaaacacgtcctcaaccactacctcttcccgataatacaacttcaccacgaactcgcaaaacacaaccgactcaaaccccgaccctaaacaaaccgcaccgccgctaacattcgaccgactcttcctactcttcttaacgacgaccgccttaacgtaaccctttaaaacattaataacgatacgactaaaaactcgacccaacgactcgctctaatcgcgctacatattcttataactaccatcaaccaaaacgaataacaaactcaacttaaattccgaaaatacgcaacgcactacaacgcgctccatcgctcccgccgctatctaactccccgcttcaacccgactcaacttctccaccgccgtccgaatcacccgaaacgcgacgcgaacgcctaaaaacctccacataaacctaataacctaacgatcgacaaaacccgcgaccgatcaacgacctactatcaaataaaactaaaaaaccgaaaccgccgactttaactcattcaaatctcgcgacttccgactaacgaaaaaaaaaaataaaatacttccgactcgcactttcgcctaacgcgtaaacacgcatatctataatactctaaaaattaatttt

SEQ ID NO: 12801 - DNA, 582 bp, Artificial Sequence
  chemically treated genomic DNA (Homo sapiens) CpG-island No: 12801
gaagaacgcgatgaggaggtaacgtgtgagcgaggaaaattaagcgtttttgtgggttacggcgtttttgatttttttttcggaattgtagggcgatcggtagtattaagaaggagcgtgttggggcgtttacgtcggttgatttttgcgggggcgacggttggtttttaggcgagggcgcggcgttcgaggatttttatttcggagagttgttttttttgcggtcgtttcggtttttcggttttagagcgttcgtattttcgggagaggcgatgtgggggttcgggttttgtttagttacgtagaaagtagtcggggtcgcggcggcggtagaaaggggacgtttagggtcgtttttcgggagttcgaggggtgttttgcgtgttcgtttagttttcgtcgttcggcgaaggatttcgcggggcggggatttttagtgcgtttgcgcgagcgcggcgggcggaggtagacgttcgcggaggttacgttttttaaggttcggtcgagtttaggaggagtcggagttggttcggggttgtttttattcgttagcgtcggttgtttagtttggtagtggatcgg

SEQ ID NO: 12802 - DNA, 582 bp, Artificial Sequence
  chemically treated genomic DNA (Homo sapiens) CpG-island No: 12802
ccgatccactaccaaactaaacaaccgacgctaacgaataaaaacaaccccgaaccaactccgactcctcctaaactcgaccgaaccttaaaaaacgtaacctccgcgaacgtctacctccgcccgccgcgctcgcgcaaacgcactaaaaatccccgccccgcgaaatccttcgccgaacgacgaaaactaaacgaacacgcaaaacacccctcgaactcccgaaaaacgaccctaaacgtcccctttctaccgccgccgcgaccccgactactttctacgtaactaaacaaaacccgaacccccacatcgcctctcccgaaaatacgaacgctctaaaaccgaaaaaccgaaacgaccgcaaaaaaaacaactctccgaaataaaaatcctcgaacgccgcgccctcgcctaaaaaccaaccgtcgcccccgcaaaaatcaaccgacgtaaacgccccaacacgctccttcttaatactaccgatcgccctacaattccgaaaaaaaaatcaaaaacgccgtaacccacaaaaacgcttaattttcctcgctcacacgttacctcctcatcgcgttcttc

SEQ ID NO: 12803 - DNA, 582 bp, Artificial Sequence
  chemically treated genomic DNA (Homo sapiens) CpG-island No: 12803
tcggtttattgttaggttgggtagtcggcgttggcgggtgggagtagtttcgagttagtttcggttttttttaggttcggtcgagttttaggaggcgtggttttcgcgagcgtttgttttcgttcgtcgcgttcgcgtaggcgtattaggggttttcgtttcgcgaggtttttcgtcgggcggcgggagttagacgagtacgtagggtatttttcgggttttcgggaggcggttttgggcgttttttttttgtcgtcgtcgcggtttcggttgttttttgcgtagttgggtagggttcgggtttttatatcgtttttttcgggaatgcgggcgttttggagtcggggagtcggggcgatcgtagggagggtagtttttcggggtggaggttttcgggcgtcgcgttttcgtttggaaattagtcgtcgttttcgtaggagttagtcggcgtggacgttttagtacgtttttttttggtgttgtcggtcgttttgtaatttcgagaagaaagttagagacgtcgtggtttatagaggcgtttagtttttttcgtttatacgttgtttttttatcgcgtttttt

SEQ ID NO: 12804 - DNA, 582 bp, Artificial Sequence
  chemically treated genomic DNA (Homo sapiens) CpG-island No: 12804
aaaaaacgcgataaaaaaacaacgtataaacgaaaaaaactaaacgcctctataaaccacgacgtctctaactttcttctcgaaattacaaaacgaccgacaacaccaaaaaaaaacgtactaaaacgtccacgccgactaactcctacgaaaacgacgactaatttccaaacgaaaacgcgacgcccgaaaacctccaccccgaaaaactaccctccctacgatcgccccgactccccgactccaaaacgcccgcattcccgaaaaaaacgatataaaaacccgaaccctacccaactacgcaaaaaacaaccgaaaccgcgacgacgacaaaaaaaaaacgcccaaaaccgcctcccgaaaacccgaaaaataccctacgtactcgtctaactcccgccgcccgacgaaaaacctcgcgaaacgaaaacccctaatacgcctacgcgaacgcgacgaacgaaaacaaacgctcgcgaaaaccacgcctcctaaaactcgaccgaacctaaaaaaaaccgaaactaactcgaaactactcccacccgccaacgccgactacccaacctaacaataaaccga

SEQ ID NO: 12805 - DNA, 566 bp, Artificial Sequence
  chemically treated genomic DNA (Homo sapiens) CpG-island No: 12805
ttttaggtcgggagatcggcgtgggtttaaggcggttgttttggggtttcgtcgttattttggacgcgattcggggtgggattttgcgtgggtcgttttagcgtcgcgatcggattttaggaatatagacgtttacgttgatagggtcggtagttgattcgagacgcggtaagcgcgaaggtagttttttcgatttaagtttgaagtttgattaatttatatcgtttttttcggcgtatttagtgcgcggttatttgttaatgtaggcgtcgtttcgtcgtattttttcgcgcgtcgtcgcgttcggcgttcgttcgttgggttcgttttttattttttttcgcgcgtcgttgtcgtgtttattgcgtaagcgcgaggtttcgtattatcgagatttggcggatttcgttgttagagaaatagattgcggtttaagcgtttgagaaaatttaggttggggtcgagagttcgtaatagtggtatttggagttagatttatcgttttttggtgtcgcgttttttaattcgggggggtaggaagttttttgttgtttcgtataattgtg

SEQ ID NO: 12806 - DNA, 566 bp, Artificial Sequence
  chemically treated genomic DNA (Homo sapiens) CpG-island No: 12806
cacaattatacgaaacaacaaaaaacttcctacccccccgaattaaaaaacgcgacaccaaaaaacgataaatctaactccaaataccactattacgaactctcgaccccaacctaaattttctcaaacgcttaaaccgcaatctatttctctaacaacgaaatccgccaaatctcgataatacgaaacctcgcgcttacgcaataaacacgacaacgacgcgcgaaaaaaaataaaaaacgaacccaacgaacgaacgccgaacgcgacgacgcgcgaaaaaatacgacgaaacgacgcctacattaacaaataaccgcgcactaaatacgccgaaaaaaacgatataaattaatcaaacttcaaacttaaatcgaaaaaactaccttcgcgcttaccgcgtctcgaatcaactaccgaccctatcaacgtaaacgtctatattcctaaaatccgatcgcgacgctaaaacgacccacgcaaaatcccaccccgaatcgcgtccaaaataacgacgaaaccccaaaacaaccgccttaaacccacgccgatctcccgacctaaaa

SEQ ID NO: 12807 - DNA, 566 bp, Artificial Sequence
  chemically treated genomic DNA (Homo sapiens) CpG-island No: 12807
tatagttatgcggagtaatagaaagttttttattttttcgggttgaaaggcgcgatattagaaagcggtgggtttggttttaggtgttattgttgcggattttcgattttagtttagatttttttagacgtttgagtcgtaatttgtttttttagtaacggggttcgttaggtttcggtggtgcggggtttcgcgtttgcgtagtgggtacggtagcggcgcgcggaggagggtgaggggcgggtttagcgagcggacgtcgggcgcggcggcgcgcggagaagtgcggcggagcggcgtttgtattagtaggtaatcgcgtattgggtgcgtcggggagggcggtgtgggttagttaggttttaggtttgggtcgaggaggttgttttcgcgtttatcgcgtttcgggttagttatcgattttgttagcgtgagcgtttgtgtttttgaagttcggtcgcgacgttggggcggtttacgtagagttttatttcggatcgcgtttaaggtggcggcgaagttttaggatagtcgttttggatttacgtcgatttttcgatttgaaa

SEQ ID NO: 12808 - DNA, 566 bp, Artificial Sequence
  chemically treated genomic DNA (Homo sapiens) CpG-island No: 12808
tttcaaatcgaaaaatcgacgtaaatccaaaacgactatcctaaaacttcgccgccaccttaaacgcgatccgaaataaaactctacgtaaaccgccccaacgtcgcgaccgaacttcaaaaacacaaacgctcacgctaacaaaatcgataactaacccgaaacgcgataaacgcgaaaacaacctcctcgacccaaacctaaaacctaactaacccacaccgccctccccgacgcacccaatacgcgattacctactaatacaaacgccgctccgccgcacttctccgcgcgccgccgcgcccgacgtccgctcgctaaacccgcccctcaccctcctccgcgcgccgctaccgtacccactacgcaaacgcgaaaccccgcaccaccgaaacctaacgaaccccgttactaaaaaaacaaattacgactcaaacgtctaaaaaaatctaaactaaaatcgaaaatccgcaacaataacacctaaaaccaaacccaccgctttctaatatcgcgcctttcaacccgaaaaaataaaaaactttctattactccgcataactata

SEQ ID NO: 12809 - DNA, 566 bp, Artificial Sequence
  chemically treated genomic DNA (Homo sapiens) CpG-island No: 12809
tgcgcgttgttacgggacgtcggtgttattgcggggaagcgacggtagttatgggggagagggtcgggttcgttgatttcgttcgggggagtaatgggcgtttttcggcgggtaggtttttgtggtaaggaggttaaggtgtcgggggattcggggattcgggtcgggcgcgcgttatttttttcgcgttgtagtagcgagttcgggttcgtttgttggtttgagagcgtattttgtgcggcgcgtcgttttttcgagtgtacgattagtagtatgtcgatagatatagcgttgatgtttttttttagttttatgatgtcgtttttttttcgatttgggcgtcgcggtcgtacgttaggttgtttgcgttgtaaatggtttcgtgcgcgtagttgttttatacgggagagggcgagggcgcggaagagggcgttttttcgtcgttggagtcgtagggcgttgtttttcgttgattttgttaaatacgttattagggttcgtttgggagggcgttattttaatgaagcggttttaagttatttttgaaaggaaattttcgggtttaa

SEQ ID NO: 12810 - DNA, 566 bp, Artificial Sequence
  chemically treated genomic DNA (Homo sapiens) CpG-island No: 12810
ttaaacccgaaaatttcctttcaaaaataacttaaaaccgcttcattaaaataacgccctcccaaacgaaccctaataacgtatttaacaaaatcaacgaaaaacaacgccctacgactccaacgacgaaaaaacgccctcttccgcgccctcgccctctcccgtataaaacaactacgcgcacgaaaccatttacaacgcaaacaacctaacgtacgaccgcgacgcccaaatcgaaaaaaaaacgacatcataaaactaaaaaaaaacatcaacgctatatctatcgacatactactaatcgtacactcgaaaaaacgacgcgccgcacaaaatacgctctcaaaccaacaaacgaacccgaactcgctactacaacgcgaaaaaaataacgcgcgcccgacccgaatccccgaatcccccgacaccttaacctccttaccacaaaaacctacccgccgaaaaacgcccattactcccccgaacgaaatcaacgaacccgaccctctcccccataactaccgtcgcttccccgcaataacaccgacgtcccgtaacaacgcgca

SEQ ID NO: 12811 - DNA, 566 bp, Artificial Sequence
  chemically treated genomic DNA (Homo sapiens) CpG-island No: 12811
ttgggttcggggatttttttttaaaggtgatttagagtcgttttattagggtagcgtttttttaggcgggttttaatggcgtgtttggtagagttagcgaaaagtagcgttttgcggttttagcggcgggggagcgttttttttcgcgttttcgttttttttcgtgtggggtagttgcgcgtacggggttatttgtagcgtaagtagtttagcgtgcggtcgcggcgtttaggtcggaaaggaggcggtattatggagttgaagaaggatattaacgttgtatttatcgatatgttgttgatcgtgtattcggagaagcggcgcgtcgtatagggtacgtttttagattagtaggcgaattcgagttcgttgttgtagcgcggaggaggtaacgcgcgttcgattcgggttttcgggtttttcggtattttggtttttttgttataagggtttgttcgtcggggggcgtttattgttttttcgaacgaggttagcgaattcgatttttttttttatggttgtcgtcgttttttcgtagtggtatcggcgtttcgtggtaacgcgta

SEQ ID NO: 12812 - DNA, 566 bp, Artificial Sequence
  chemically treated genomic DNA (Homo sapiens) CpG-island No: 12812
tacgcgttaccacgaaacgccgataccactacgaaaaaacgacgacaaccataaaaaaaaaaatcgaattcgctaacctcgttcgaaaaaacaataaacgccccccgacgaacaaacccttataacaaaaaaaccaaaataccgaaaaacccgaaaacccgaatcgaacgcgcgttacctcctccgcgctacaacaacgaactcgaattcgcctactaatctaaaaacgtaccctatacgacgcgccgcttctccgaatacacgatcaacaacatatcgataaatacaacgttaatatccttcttcaactccataataccgcctcctttccgacctaaacgccgcgaccgcacgctaaactacttacgctacaaataaccccgtacgcgcaactaccccacacgaaaaaaaacgaaaacgcgaaaaaaaacgctcccccgccgctaaaaccgcaaaacgctacttttcgctaactctaccaaacacgccattaaaacccgcctaaaaaaacgctaccctaataaaacgactctaaatcacctttaaaaaaaaatccccgaacccaa

SEQ ID NO: 12813 - DNA, 590 bp, Artificial Sequence
  chemically treated genomic DNA (Homo sapiens) CpG-island No: 12813
tagtttttataatggttggtagagaacgtcgttcgtgcggtggagttaggtttttggggcgtggattttaattgcggttgttcgtcgaatatcggttaacggtagcggcggcggggcgacgttatttaaagattttgaatttatttattagggtgtaaaagcgatgcgtgaagttgtatcggcgtatttgttcgttagcgtgaaagtgcgtttgggttgggatagcggtgagaagaaatttgaaatcgtcgatgcggtttaataggttggcgttacggagttggtggtgtatgggcggacgaaagagtagggttatcgcgcggagtatattgattggtaggcgattggcgatattcgttagcggttgaatatttcggtgattgttaacggtgaaatttgggattggtagagcgcgtaataatgtatggcgattagcggttgcgacgtagtgatgattggtcgcggggcgtttaatatttttaatttgagtcgggtggtaaaatataacgaatcgcgaatgtcgtggtcggaggtggttgttttgttgtaaaaatatattcgtttggaaaagtagggcgatatcgggttat

SEQ ID NO: 12814 - DNA, 590 bp, Artificial Sequence
  chemically treated genomic DNA (Homo sapiens) CpG-island No: 12814
ataacccgatatcgccctacttttccaaacgaatatatttttacaacaaaacaaccacctccgaccacgacattcgcgattcgttatattttaccacccgactcaaattaaaaatattaaacgccccgcgaccaatcatcactacgtcgcaaccgctaatcgccatacattattacgcgctctaccaatcccaaatttcaccgttaacaatcaccgaaatattcaaccgctaacgaatatcgccaatcgcctaccaatcaatatactccgcgcgataaccctactctttcgtccgcccatacaccaccaactccgtaacgccaacctattaaaccgcatcgacgatttcaaatttcttctcaccgctatcccaacccaaacgcactttcacgctaacgaacaaatacgccgatacaacttcacgcatcgcttttacaccctaataaataaattcaaaatctttaaataacgtcgccccgccgccgctaccgttaaccgatattcgacgaacaaccgcaattaaaatccacgccccaaaaacctaactccaccgcacgaacgacgttctctaccaaccattataaaaacta

SEQ ID NO: 12815 - DNA, 590 bp, Artificial Sequence
  chemically treated genomic DNA (Homo sapiens) CpG-island No: 12815
ataattcggtatcgttttgtttttttagacgggtatatttttgtagtaaagtaattattttcggttacggtattcgcggttcgttatattttattattcggtttaggttgggaatattgagcgtttcgcgattaattattattgcgtcgtagtcgttgatcgttatgtattgttgcgcgttttgttagttttagattttatcgttggtaattatcggaatatttagtcgttggcgaatatcgttaatcgtttgttagttaatatgtttcgcgcggtaattttgttttttcgttcgtttatgtattattagtttcgtagcgttagtttgttgaatcgtatcggcgattttaaatttttttttatcgttgttttagtttagacgtatttttacgttgacgggtaaatgcgtcggtatagttttacgtatcgtttttgtattttggtagatgagtttaggatttttgagtaacgtcgtttcgtcgtcgttatcgttaatcgatattcgacgggtagtcgtaattgagatttacgttttaggaatttaattttatcgtacgggcggcgttttttgttagttattgtgggaattg

SEQ ID NO: 12816 - DNA, 590 bp, Artificial Sequence
  chemically treated genomic DNA (Homo sapiens) CpG-island No: 12816
caattcccacaataactaacaaaaaacgccgcccgtacgataaaattaaattcctaaaacgtaaatctcaattacgactacccgtcgaatatcgattaacgataacgacgacgaaacgacgttactcaaaaatcctaaactcatctaccaaaatacaaaaacgatacgtaaaactataccgacgcatttacccgtcaacgtaaaaatacgtctaaactaaaacaacgataaaaaaaaatttaaaatcgccgatacgattcaacaaactaacgctacgaaactaataatacataaacgaacgaaaaaacaaaattaccgcgcgaaacatattaactaacaaacgattaacgatattcgccaacgactaaatattccgataattaccaacgataaaatctaaaactaacaaaacgcgcaacaatacataacgatcaacgactacgacgcaataataattaatcgcgaaacgctcaatattcccaacctaaaccgaataataaaatataacgaaccgcgaataccgtaaccgaaaataattactttactacaaaaatatacccgtctaaaaaaacaaaacgataccgaattat

SEQ ID NO: 12817 - DNA, 653 bp, Artificial Sequence
  chemically treated genomic DNA (Homo sapiens) CpG-island No: 12817
tggggtcggttaagtcgaatatcggttatacgtaagcggcggcgggtgtggttggtgtgattaagatggtgatggcgatgcggtacgggtagttgttacgtacgttgtacgtggaatcgtcgtcgtcggaggtggattggtcggcggggacggtttaattttttacggagaatacgttttggtttaggagtggtcgtgttcgtcgggtgggggtgtcgtcgttcgggattagtggtattaacgcgtacgttattttcgaatagttttcgggagtgtcgagttagtttgcggggtcgggttcgggttttgtcgtggatgtttcggtggtgtcgtggatggtgtcgggtaaaatattcgaagcgttattcgcgtaggtaacggcgttgatgatttatttggacgagcgatttgatgttttttcgttggatgttgggtattcgttggcggtgatatcgttcgcgttggatgaacgaatcggtggtgtttggggttcggaatcgtgaaaacgttggttgtgcggtggtgaaaagtcgttgttttggtcgttttatgaaggtttttttggggttgcgggattcgggattttggggggggtttggggggtttcgtaattcgggtttttggggttttttttcgggttcgggtgtggttat

SEQ ID NO: 12818 - DNA, 653 bp, Artificial Sequence
  chemically treated genomic DNA (Homo sapiens) CpG-island No: 12818
ataaccacacccgaacccgaaaaaaaaccccaaaaacccgaattacgaaaccccccaaaccccccccaaaatcccgaatcccgcaaccccaaaaaaaccttcataaaacgaccaaaacaacgacttttcaccaccgcacaaccaacgttttcacgattccgaaccccaaacaccaccgattcgttcatccaacgcgaacgatatcaccgccaacgaatacccaacatccaacgaaaaaacatcaaatcgctcgtccaaataaatcatcaacgccgttacctacgcgaataacgcttcgaatattttacccgacaccatccacgacaccaccgaaacatccacgacaaaacccgaacccgaccccgcaaactaactcgacactcccgaaaactattcgaaaataacgtacgcgttaataccactaatcccgaacgacgacacccccacccgacgaacacgaccactcctaaaccaaaacgtattctccgtaaaaaattaaaccgtccccgccgaccaatccacctccgacgacgacgattccacgtacaacgtacgtaacaactacccgtaccgcatcgccatcaccatcttaatcacaccaaccacacccgccgccgcttacgtataaccgatattcgacttaaccgacccca

SEQ ID NO: 12819 - DNA, 653 bp, Artificial Sequence
  chemically treated genomic DNA (Homo sapiens) CpG-island No: 12819
gtgattatattcgggttcgggaaaaaattttaaaagttcgaattgcggggttttttaggttttttttaaaatttcgggtttcgtaattttaagaaagtttttatggaacggttagaatagcggttttttattatcgtataattaacgtttttacggtttcgaattttaagtattatcggttcgtttatttagcgcggacggtgttatcgttagcgagtatttaatatttagcgaggagatattaggtcgttcgtttagataggttattaacgtcgttgtttgcgcggatagcgtttcgggtgttttgttcgatattatttacggtattatcggaatatttacgatagaattcgaattcggtttcgtagattgattcggtattttcgggggttgttcgaggatgacgtgcgcgttagtattattgatttcgaacgacgatatttttattcgacgaatacgattatttttgggttagggcgtgtttttcgtaaggagttgaatcgttttcgtcgattaatttattttcggcgacggcgattttacgtgtaacgtgcgtggtagttgttcgtgtcgtatcgttattattattttgattatattagttatattcgtcgtcgtttgcgtatgatcgatgttcgatttgatcgatttta

SEQ ID NO: 12820 - DNA, 653 bp, Artificial Sequence
  chemically treated genomic DNA (Homo sapiens) CpG-island No: 12820
taaaatcgatcaaatcgaacatcgatcatacgcaaacgacgacgaatataactaatataatcaaaataataataacgatacgacacgaacaactaccacgcacgttacacgtaaaatcgccgtcgccgaaaataaattaatcgacgaaaacgattcaactccttacgaaaaacacgccctaacccaaaaataatcgtattcgtcgaataaaaatatcgtcgttcgaaatcaataatactaacgcgcacgtcatcctcgaacaacccccgaaaataccgaatcaatctacgaaaccgaattcgaattctatcgtaaatattccgataataccgtaaataatatcgaacaaaacacccgaaacgctatccgcgcaaacaacgacgttaataacctatctaaacgaacgacctaatatctcctcgctaaatattaaatactcgctaacgataacaccgtccgcgctaaataaacgaaccgataatacttaaaattcgaaaccgtaaaaacgttaattatacgataataaaaaaccgctattctaaccgttccataaaaactttcttaaaattacgaaacccgaaattttaaaaaaaacctaaaaaaccccgcaattcgaacttttaaaattttttcccgaacccgaatataatcac

SEQ ID NO: 12821 - DNA, 1126 bp, Artificial Sequence
  chemically treated genomic DNA (Homo sapiens) CpG-island No: 12821
gtcgtgatcgtgattttggtcggtcgttgtggttggggtcggttaagtcgaatatcggttatacgtaagcggcggcgggtgtggttggtgtgattaagatggtgatggcgatgcggtacgggtagttgttacgtacgttgtacgtggaatcgtcgacgtcggaggtggattggtcggcggggacggtttaattttttacggagaatacgttttggtttaggagtggtcgtgttcgtcgggtgggggtgtcgtcgttcgggattagtggtattaacgcgtacgttattttcgaatagttttcgggagtgtcgagttagtttgcggggtcgggttcgggttttgtcgtggatgtttcggtggtgtcgtggatggtgtcgggtaaaatattcgaagcgttattcgcgtaggtaacggcgttgatgatttatttggacgagcgatttgaagattttacggaggaagaagagtatttattggcggatgatacgggtcggcgttggaagagagaatcgggggggttcggaggcggaatcgagaaacggcggttgaggcggagtgaaagtatttgatttgtcggaataaggaaggatttcgggtagggagaatcgaaaaatacggcggcgttggcgggtacggaaaggggaatggcgattattaggagtaaaagtacggaaaacggtatcgtcgtacgtattagggtgggtttaaaattcgtacgtatatttcgcggaagaacgagtcgggttatttataaattaaatataacgcgttttatatacgatatagtaataatatatcgaattttaagtaaatatatcgattcgtaataggtattattacgatagtcgttataagacgagagcgagattataacgtttaacgatgttatatagcgcgttaatataaatagcgtatataacgagggcgtataattatcggattcgtattgagataataataagttcggatttttagtatataagatacgttatatatatagtaggtaagttatacgagtaatcgagtttatcgtacgttacgtcgtagtaagggtcgcgataaaacggcgattaataacgagtacgttatttacgtcgatttgttatacgtaacgcgtattattatt

SEQ ID NO: 12822 - DNA, 1126 bp, Artificial Sequence
  chemically treated genomic DNA (Homo sapiens) CpG-island No: 12822
aataataatacgcgttacgtataacaaatcgacgtaaataacgtactcgttattaatcgccgttttatcgcgacccttactacgacgtaacgtacgataaactcgattactcgtataacttacctactatatatataacgtatcttatatactaaaaatccgaacttattattatctcaatacgaatccgataattatacgccctcgttatatacgctatttatattaacgcgctatataacatcgttaaacgttataatctcgctctcgtcttataacgactatcgtaataatacctattacgaatcgatatatttacttaaaattcgatatattattactatatcgtatataaaacgcgttatatttaatttataaataacccgactcgttcttccgcgaaatatacgtacgaattttaaacccaccctaatacgtacgacgataccgttttccgtacttttactcctaataatcgccattcccctttccgtacccgccaacgccgccgtatttttcgattctccctacccgaaatccttccttattccgacaaatcaaatactttcactccgcctcaaccgccgtttctcgattccgcctccgaacccccccgattctctcttccaacgccgacccgtatcatccgccaataaatactcttcttcctccgtaaaatcttcaaatcgctcgtccaaataaatcatcaacgccgttacctacgcgaataacgcttcgaatattttacccgacaccatccacgacaccaccgaaacatccacgacaaaacccgaacccgaccccgcaaactaactcgacactcccgaaaactattcgaaaataacgtacgcgttaataccactaatcccgaacgacgacacccccacccgacgaacacgaccactcctaaaccaaaacgtattctccgtaaaaaattaaaccgtccccgccgaccaatccacctccgacgtcgacgattccacgtacaacgtacgtaacaactacccgtaccgcatcgccatcaccatcttaatcacaccaaccacacccgccgccgcttacgtataaccgatattcgacttaaccgaccccaaccacaacgaccgaccaaaatcacgatcacgac

SEQ ID NO: 12823 - DNA, 1126 bp, Artificial Sequence
  chemically treated genomic DNA (Homo sapiens) CpG-island No: 12823
ggtggtgatgcgcgttgcgtgtggtaagtcggcgtgggtagcgtgttcgttgttggtcgtcgttttgtcgcggtttttgttgcggcgtagcgtgcggtagattcggttgttcgtgtagtttgtttgttgtgtgtgtaacgtgttttgtgtgttgggggttcgagtttgttgttgttttagtgcgagttcgatagttgtgcgttttcgttgtgtacgttgtttgtgttggcgcgttgtgtggtatcgttgggcgttgtggtttcgttttcgttttatggcggttatcgtggtggtgtttgttgcgggtcggtatgtttgtttgggattcgatgtgttgttgttatgtcgtatgtgaggcgcgttgtgtttgatttgtagatggttcggttcgttttttcgcggggtgtacgtgcgggttttgagtttattttggtgcgtgcggcggtgtcgtttttcgtgtttttgtttttgatagtcgttattttttttttcgtgttcgttagcgtcgtcgtatttttcggttttttttgttcgggatttttttttgtttcggtaggttaggtgtttttatttcgttttaatcgtcgtttttcggtttcgttttcgagttttttcggtttttttttttagcgtcggttcgtgttattcgttagtgagtgttttttttttttcgtggagtttttaggtcgttcgtttagataggttattaacgtcgttgtttgcgcggatagcgtttcgggtgttttgttcgatattatttacggtattatcggaatatttacgatagaattcgaattcggtttcgtagattgattcggtattttcgggggttgttcgaggatgacgtgcgcgttagtattattgatttcgaacgacgatatttttattcgacgaatacgattatttttgggttagggcgtgtttttcgtaaggagttgaatcgttttcgtcgattaatttattttcggcgtcggcgattttacgtgtaacgtgcgtggtagttgttcgtgtcgtatcgttattattattttgattatattagttatattcgtcgtcgtttgcgtatgatcgatgttcgatttgatcgattttaattataacggtcggttaggattacgattacggt

SEQ ID NO: 12824 - DNA, 1126 bp, Artificial Sequence
  chemically treated genomic DNA (Homo sapiens) CpG-island No: 12824
accgtaatcgtaatcctaaccgaccgttataattaaaatcgatcaaatcgaacatcgatcatacgcaaacgacgacgaatataactaatataatcaaaataataataacgatacgacacgaacaactaccacgcacgttacacgtaaaatcgccgacgccgaaaataaattaatcgacgaaaacgattcaactccttacgaaaaacacgccctaacccaaaaataatcgtattcgtcgaataaaaatatcgtcgttcgaaatcaataatactaacgcgcacgtcatcctcgaacaacccccgaaaataccgaatcaatctacgaaaccgaattcgaattctatcgtaaatattccgataataccgtaaataatatcgaacaaaacacccgaaacgctatccgcgcaaacaacgacgttaataacctatctaaacgaacgacctaaaaactccacgaaaaaaaaaaaacactcactaacgaataacacgaaccgacgctaaaaaaaaaaaccgaaaaaactcgaaaacgaaaccgaaaaacgacgattaaaacgaaataaaaacacctaacctaccgaaacaaaaaaaaatcccgaacaaaaaaaaccgaaaaatacgacgacgctaacgaacacgaaaaaaaaaataacgactatcaaaaacaaaaacacgaaaaacgacaccgccgcacgcaccaaaataaactcaaaacccgcacgtacaccccgcgaaaaaacgaaccgaaccatctacaaatcaaacacaacgcgcctcacatacgacataacaacaacacatcgaatcccaaacaaacataccgacccgcaacaaacaccaccacgataaccgccataaaacgaaaacgaaaccacaacgcccaacgataccacacaacgcgccaacacaaacaacgtacacaacgaaaacgcacaactatcgaactcgcactaaaacaacaacaaactcgaacccccaacacacaaaacacgttacacacacaacaaacaaactacacgaacaaccgaatctaccgcacgctacgccgcaacaaaaaccgcgacaaaacgacgaccaacaacgaacacgctacccacgccgacttaccacacgcaacgcgcatcaccacc

SEQ ID NO: 12825 - DNA, 510 bp, Artificial Sequence
  chemically treated genomic DNA (Homo sapiens) CpG-island No: 12825
  unsure (411)
cggtcggtcgttataatacgatcgggaaaggtttttttatcgtggacgtattttaatttgtttttcgcgatcggcgtttttatcgtcgttttcgtagattttgtcgtttttattgcgcgatttttatcgacgatgattttcgtttatcgattcgttgttcgcgatttcgttttttttttacgttgcgagtttttttttttggcgtatcggtatttttttttcgttcgtatttttcgtagcggaggttgatcgatattatatttgtacggcgcgcgtttttcgttcgatttttgttattttcgatcggacgtttttttattacgtttcgagcgtatttcggcgtacgggatttgattttcgtcgtcgtttttcgttagtcgattatgtaagtattttttcgcgatcgggttnggtcgcgtttatatcgattttattttcgcgcggacgtatattagtcgttgatttttttagttttatggagaagatttttgttgtttatttttttataat

SEQ ID NO: 12826 - DNA, 510 bp, Artificial Sequence
  chemically treated genomic DNA (Homo sapiens) CpG-island No: 12826
  unsure (100)
attataaaaaaataaacaacaaaaatcttctccataaaactaaaaaaatcaacgactaatatacgtccgcgcgaaaataaaatcgatataaacgcgaccnaacccgatcgcgaaaaaatacttacataatcgactaacgaaaaacgacgacgaaaatcaaatcccgtacgccgaaatacgctcgaaacgtaataaaaaaacgtccgatcgaaaataacaaaaatcgaacgaaaaacgcgcgccgtacaaatataatatcgatcaacctccgctacgaaaaatacgaacgaaaaaaaaataccgatacgccaaaaaaaaaaactcgcaacgtaaaaaaaaaacgaaatcgcgaacaacgaatcgataaacgaaaatcatcgtcgataaaaatcgcgcaataaaaacgacaaaatctacgaaaacgacgataaaaacgccgatcgcgaaaaacaaattaaaatacgtccacgataaaaaaacctttcccgatcgtattataacgaccgaccg

SEQ ID NO: 12827 - DNA, 510 bp, Artificial Sequence
  chemically treated genomic DNA (Homo sapiens) CpG-island No: 12827
  unsure (100)
attgtagggagataagtaataagagttttttttatggggttggaaggattagcggttggtgtacgttcgcgcgggagtggggtcgatatgagcgcggttnagttcggtcgcgagggagtgtttgtatgatcgattaacgaggagcggcggcgggagttaagtttcgtgcgtcggagtgcgttcggggcgtggtggggaggcgttcggtcggaggtggtagagatcgagcgaggagcgcgcgtcgtgtagatgtggtgtcggttagttttcgttacgaggggtacggacggaagggggatgtcgatacgttaggggagagagttcgtagcgtgaaggagaggcggggtcgcgggtaacggatcgataagcggaggttatcgtcggtggggatcgcgtagtggaggcggtagggtttacgggggcgacggtaagggcgtcgatcgcggggggtagattaggatgcgtttacggtaggagagtttttttcggtcgtattgtggcggtcggtcg

SEQ ID NO: 12828 - DNA, 510 bp, Artificial Sequence
  chemically treated genomic DNA (Homo sapiens) CpG-island No: 12828
  unsure (411)
cgaccgaccgccacaatacgaccgaaaaaaactctcctaccgtaaacgcatcctaatctaccccccgcgatcgacgcccttaccgtcgcccccgtaaaccctaccgcctccactacgcgatccccaccgacgataacctccgcttatcgatccgttacccgcgaccccgcctctccttcacgctacgaactctctcccctaacgtatcgacatcccccttccgtccgtacccctcgtaacgaaaactaaccgacaccacatctacacgacgcgcgctcctcgctcgatctctaccacctccgaccgaacgcctccccaccacgccccgaacgcactccgacgcacgaaacttaactcccgccgccgctcctcgttaatcgatcatacaaacactccctcgcgaccgaactnaaccgcgctcatatcgaccccactcccgcgcgaacgtacaccaaccgctaatccttccaaccccataaaaaaaactcttattacttatctccctacaat

SEQ ID NO: 12829 - DNA, 812 bp, Artificial Sequence
  chemically treated genomic DNA (Homo sapiens) CpG-island No: 12829
cggagaatggagggttcgtagcggcgtagaagaggatggaatcgagacgaagaagttgggatattaatgagggatagtaagtagaaaagaatggggtttttttggggtaggacggggttcgcggtcgggttttttcggtcgtggtcgggtaggggttgaaagtatcgggtacgggaggaggaagcgggcgggcgtcgaggtcgattgttttgtttggggatcgtttgtattcgtagggaggttcgggtaggcgttcgggttttcgggttgtagtatttcgttcgtcgtgttttttcggagtcgaatattagttcgcgttcgagttcgtagcgcggattttcgggggcgttaacgacgtcgttttatttcgggttgaagttttggaagaggttttttaggtttatggcggagaattttatcgcggcgtttttttttttttttttcgtatttcgtgttgtatagtttgcgttttatagcgggtttatggcgttagcgttagtcgcgtttacgttgttgttttcgttattgttgtcgttttcgttgtcgtcgtcgtcgtcgtcgtcgtcgtcgtcgtcgtcgtcgttcggagaaatttgagttatcgttttttgttttttttttcgggttttcgtacgagggtcgcgtatgcgttcggagtttcgtttagagcgtttttcgttgggaggtttttatttttgtgttcgtacgcgatcggcggaggagatggtagggggatggaggttgggagtgagtagggtttcgaggaaggggatgttgacgggttgaaggtttgtagggagggagcgcgtcgt

SEQ ID NO: 12830 - DNA, 812 bp, Artificial Sequence
  chemically treated genomic DNA (Homo sapiens) CpG-island No: 12830
acgacgcgctccctccctacaaaccttcaacccgtcaacatccccttcctcgaaaccctactcactcccaacctccatccccctaccatctcctccgccgatcgcgtacgaacacaaaaataaaaacctcccaacgaaaaacgctctaaacgaaactccgaacgcatacgcgaccctcgtacgaaaacccgaaaaaaaaaacaaaaaacgataactcaaatttctccgaacgacgacgacgacgacgacgacgacgacgacgacgacgacaacgaaaacgacaacaataacgaaaacaacaacgtaaacgcgactaacgctaacgccataaacccgctataaaacgcaaactatacaacacgaaatacgaaaaaaaaaaaaaaaaacgccgcgataaaattctccgccataaacctaaaaaacctcttccaaaacttcaacccgaaataaaacgacgtcgttaacgcccccgaaaatccgcgctacgaactcgaacgcgaactaatattcgactccgaaaaaacacgacgaacgaaatactacaacccgaaaacccgaacgcctacccgaacctccctacgaatacaaacgatccccaaacaaaacaatcgacctcgacgcccgcccgcttcctcctcccgtacccgatactttcaacccctacccgaccacgaccgaaaaaacccgaccgcgaaccccgtcctaccccaaaaaaaccccattcttttctacttactatccctcattaatatcccaacttcttcgtctcgattccatcctcttctacgccgctacgaaccctccattctccg

SEQ ID NO: 12831 - DNA, 812 bp, Artificial Sequence
  chemically treated genomic DNA (Homo sapiens) CpG-island No: 12831
gcggcgcgttttttttttgtaggtttttagttcgttagtattttttttttcggggttttgtttatttttagtttttatttttttgttatttttttcgtcggtcgcgtgcggatataaggatggggattttttagcgaggagcgttttgggcggggtttcggacgtatgcgcggttttcgtacggaagttcggaaggaggggtagggggcggtggtttaggttttttcgggcggcggcggcggcggcggcggcgacggcgacggcgacggtagcggggacggtagtagtagcgggagtagtagcgtggacgcggttggcgttggcgttatgaattcgttgtaaggcgtaggttgtgtagtacggggtgcgggggaggaggaggaggacgtcgcggtgaagtttttcgttatgaatttgaggggttttttttaggattttaattcgaggtgaggcggcgtcgttggcgttttcgggagttcgcgttgcgggttcgggcgcgggttggtgttcggtttcggggaggtacggcgggcgagatgttgtagttcgaggattcgggcgtttgttcgagtttttttgcgggtgtaagcggtttttaggtaaaatagtcggtttcggcgttcgttcgtttttttttttcgtgttcggtgtttttagtttttgttcggttacggtcggaagggttcggtcgcgagtttcgttttgttttaagggaattttatttttttttgtttgttgttttttattggtgttttaattttttcgtttcggttttatttttttttgcgtcgttgcgggttttttatttttcg

SEQ ID NO: 12832 - DNA, 812 bp, Artificial Sequence
  chemically treated genomic DNA (Homo sapiens) CpG-island No: 12832
cgaaaaataaaaaacccgcaacgacgcaaaaaaaaataaaaccgaaacgaaaaaattaaaacaccaataaaaaacaacaaacaaaaaaaaataaaattcccttaaaacaaaacgaaactcgcgaccgaacccttccgaccgtaaccgaacaaaaactaaaaacaccgaacacgaaaaaaaaaaacgaacgaacgccgaaaccgactattttacctaaaaaccgcttacacccgcaaaaaaactcgaacaaacgcccgaatcctcgaactacaacatctcgcccgccgtacctccccgaaaccgaacaccaacccgcgcccgaacccgcaacgcgaactcccgaaaacgccaacgacgccgcctcacctcgaattaaaatcctaaaaaaaacccctcaaattcataacgaaaaacttcaccgcgacgtcctcctcctcctcccccgcaccccgtactacacaacctacgccttacaacgaattcataacgccaacgccaaccgcgtccacgctactactcccgctactactaccgtccccgctaccgtcgccgtcgccgtcgccgccgccgccgccgccgccgcccgaaaaaacctaaaccaccgccccctacccctccttccgaacttccgtacgaaaaccgcgcatacgtccgaaaccccgcccaaaacgctcctcgctaaaaaatccccatccttatatccgcacgcgaccgacgaaaaaaataacaaaaaaataaaaactaaaaataaacaaaaccccgaaaaaaaaaatactaacgaactaaaaacctacaaaaaaaaaacgcgccgc

SEQ ID NO: 12833 - DNA, 618 bp, Artificial Sequence
  chemically treated genomic DNA (Homo sapiens) CpG-island No: 12833
cggggtttttggtttcgtttatttcgcgggggtcggcggggtcggtttgggcgttcgcgtcgtcgttgcgttttgttcgttgggtatattgtttttgggaggggcgggtagatatggtggcgtcgtcgtttttttttcggttttagtatgtcgcggtcgtttcgcggttattcggtttgtcggtttcgagcggtagtttcggggtggcgatggggtcgcgtcgaggtagcggaggttttgcgggcgattggaggttggtagtgggcgggagaaagaggaaggtaggcgcggttgggtttcggtttttggcgtcgcggtattttttgtttcggtagtttgacggtttcgtcgggtttttcggagaggggaacgggcggcgagggtggcgggttttgggcgttttgtgttgcggggtcgagaggcgttcgggtcgcggcgggatcggtcggattagatagggttaatggaagagtttggttagtttcgcgcggggttttcgtagcgatagttttggtcgcggggattggagttttgagggggagaagtttgtcgttttgaaggttcgggatttttgttttaaagatttcgtcgtcgagaattgcgggtgtattgttttag

SEQ ID NO: 12834 - DNA, 618 bp, Artificial Sequence
  chemically treated genomic DNA (Homo sapiens) CpG-island No: 12834
ctaaaacaatacacccgcaattctcgacgacgaaatctttaaaacaaaaatcccgaaccttcaaaacgacaaacttctccccctcaaaactccaatccccgcgaccaaaactatcgctacgaaaaccccgcgcgaaactaaccaaactcttccattaaccctatctaatccgaccgatcccgccgcgacccgaacgcctctcgaccccgcaacacaaaacgcccaaaacccgccaccctcgccgcccgttcccctctccgaaaaacccgacgaaaccgtcaaactaccgaaacaaaaaataccgcgacgccaaaaaccgaaacccaaccgcgcctaccttcctctttctcccgcccactaccaacctccaatcgcccgcaaaacctccgctacctcgacgcgaccccatcgccaccccgaaactaccgctcgaaaccgacaaaccgaataaccgcgaaacgaccgcgacatactaaaaccgaaaaaaaaacgacgacgccaccatatctacccgcccctcccaaaaacaatatacccaacgaacaaaacgcaacgacgacgcgaacgcccaaaccgaccccgccgacccccgcgaaataaacgaaaccaaaaaccccg

SEQ ID NO: 12835 - DNA, 618 bp, Artificial Sequence
  chemically treated genomic DNA (Homo sapiens) CpG-island No: 12835
ttgaggtagtgtattcgtagttttcggcggcgaagtttttggggtagaagtttcgagtttttagaacggtaggttttttttttttaggattttagttttcgcggttaaggttgtcgttgcgggggtttcgcgcgggattggttaggtttttttattaattttgtttggttcggtcgatttcgtcgcgattcgagcgtttttcggtttcgtagtatagggcgtttaggattcgttattttcgtcgttcgttttttttttcggagagttcggcggggtcgttaggttgtcgagataaagggtatcgcggcgttagaggtcgaggtttagtcgcgtttgtttttttttttttttcgtttattgttaatttttagtcgttcgtagaattttcgttgtttcggcgcgattttatcgttatttcggggttgtcgttcgggatcggtaagtcgggtagtcgcgaggcggtcgcggtatgttagggtcgaggagggggcggcggcgttattatgtttgttcgttttttttagaagtagtgtgtttagcggataaagcgtagcggcggcgcgggcgtttaggtcgatttcgtcgattttcgcggaataagcggggttaggagtttcg

SEQ ID NO: 12836 - DNA, 618 bp, Artificial Sequence
  chemically treated genomic DNA (Homo sapiens) CpG-island No: 12836
cgaaactcctaaccccgcttattccgcgaaaatcgacgaaatcgacctaaacgcccgcgccgccgctacgctttatccgctaaacacactacttctaaaaaaaacgaacaaacataataacgccgccgccccctcctcgaccctaacataccgcgaccgcctcgcgactacccgacttaccgatcccgaacgacaaccccgaaataacgataaaatcgcgccgaaacaacgaaaattctacgaacgactaaaaattaacaataaacgaaaaaaaaaaaaaaacaaacgcgactaaacctcgacctctaacgccgcgataccctttatctcgacaacctaacgaccccgccgaactctccgaaaaaaaaaacgaacgacgaaaataacgaatcctaaacgccctatactacgaaaccgaaaaacgctcgaatcgcgacgaaatcgaccgaaccaaacaaaattaataaaaaaacctaaccaatcccgcgcgaaacccccgcaacgacaaccttaaccgcgaaaactaaaatcctaaaaaaaaaaaacctaccgttctaaaaactcgaaacttctaccccaaaaacttcgccgccgaaaactacgaatacactacctcaa

SEQ ID NO: 12837 - DNA, 504 bp, Artificial Sequence
  chemically treated genomic DNA (Homo sapiens) CpG-island No: 12837
gcgttcgtcgatacgttcgagaagcgcgtatcggtgatgagcgatatcgttttgttttacgagatatgttttagcgcggaggtgagttggtaggttttttttatgtcggtgtcggacggttcgtcgtcgattattattatgatatcgttttgtataattttttgtcgtttgatcgttttgatcgtttgcgttttcgagataaatattcgtattcggtcggtgtggtggtatacgttattttcgtttattatcgacgggtcgatcgtcgtggttttgattatcgaaatttttcggcgcgatgttgttcgttcggaagtagatcgtcgatgttagttttttcgttttttgtttttttcggcgggaggattacgttattcggttattatatcgttttgttttcgtaagtatttgcggaagttttttcgggggttatggaattttttattatataaaggttttcgttatttgtttggtagtttagggttttgcgttttaaattcgtag

SEQ ID NO: 12838 - DNA, 504 bp, Artificial Sequence
  chemically treated genomic DNA (Homo sapiens) CpG-island No: 12838
ctacgaatttaaaacgcaaaaccctaaactaccaaacaaataacgaaaacctttatataataaaaaattccataacccccgaaaaaacttccgcaaatacttacgaaaacaaaacgatataataaccgaataacgtaatcctcccgccgaaaaaaacaaaaaacgaaaaaactaacatcgacgatctacttccgaacgaacaacatcgcgccgaaaaatttcgataatcaaaaccacgacgatcgacccgtcgataataaacgaaaataacgtataccaccacaccgaccgaatacgaatatttatctcgaaaacgcaaacgatcaaaacgatcaaacgacaaaaaattatacaaaacgatatcataataataatcgacgacgaaccgtccgacaccgacataaaaaaaacctaccaactcacctccgcgctaaaacatatctcgtaaaacaaaacgatatcgctcatcaccgatacgcgcttctcgaacgtatcgacgaacgc

SEQ ID NO: 12839 - DNA, 504 bp, Artificial Sequence
  chemically treated genomic DNA (Homo sapiens) CpG-island No: 12839
ttacggatttggaacgtaagattttggattgttaaataggtggcgaaaatttttatatggtggaaggttttatagttttcgggggggttttcgtaagtgtttgcgaaagtaagacggtgtaatagtcgaatgacgtgattttttcgtcggagaaggtaaaaagcgaaagggttgatatcgacggtttgttttcggacgagtaatatcgcgtcgaaaggtttcggtgattaaggttacggcgatcgattcgtcggtggtgggcgaagatggcgtatattattatatcggtcgggtgcgggtgtttgtttcggaagcgtaggcgattaaggcgattaagcggtaagagattgtgtagggcgatattatggtggtgatcggcggcgggtcgttcggtatcggtatggaagagatttattagtttattttcgcgttaaagtatatttcgtggggtaagacggtgtcgtttattatcgatgcgcgtttttcgggcgtgtcgacgggcgt

SEQ ID NO: 12840 - DNA, 504 bp, Artificial Sequence
  chemically treated genomic DNA (Homo sapiens) CpG-island No: 12840
acgcccgtcgacacgcccgaaaaacgcgcatcgataataaacgacaccgtcttaccccacgaaatatactttaacgcgaaaataaactaataaatctcttccataccgataccgaacgacccgccgccgatcaccaccataatatcgccctacacaatctcttaccgcttaatcgccttaatcgcctacgcttccgaaacaaacacccgcacccgaccgatataataatatacgccatcttcgcccaccaccgacgaatcgatcgccgtaaccttaatcaccgaaacctttcgacgcgatattactcgtccgaaaacaaaccgtcgatatcaaccctttcgctttttaccttctccgacgaaaaaatcacgtcattcgactattacaccgtcttactttcgcaaacacttacgaaaacccccccgaaaactataaaaccttccaccatataaaaattttcgccacctatttaacaatccaaaatcttacgttccaaatccgtaa

SEQ ID NO: 12841 - DNA, 622 bp, Artificial Sequence
  chemically treated genomic DNA (Homo sapiens) CpG-island No: 12841
  unsure (268)
ttcgttttcgatagcgacgtaagtatatttattattcgaagcgtttttggttttcgattttaagtttttttatatatgtatgttttttaacggtatttacgtattttatttatggttagtttttttttttaatttgtacgttttttatatatattgttgtcgggttatattttttttattttttttttacggttttttatttttacgtaatggtattttttcgttacggtatgttagcgttttttttttttatgtgtcgtttattttnatttttttttattttatgttcgattttatttttttttttattcgtagggtttagttaattatacgttgagtttttttttttttttagtttcgttttggttttttcgtaaacgttacgtttttttttttttttttggttttagagtcgtcgttacgttttagcgatatgttttcgcgatagcgcgatttttattggttaaggttattgcgtatatttttttttttggtttttgtttttatttgttacgttttacgtgatatcgtttcgtttttattggtttttttttattcgttttatttttgtcggaaatgaaatagagggacgagagagggggatggaggagagaaggagaga

SEQ ID NO: 12842 - DNA, 622 bp, Artificial Sequence
  chemically treated genomic DNA (Homo sapiens) CpG-island No: 12842
  unsure (355)
tctctccttctctcctccatccccctctctcgtccctctatttcatttccgacaaaaataaaacgaataaaaaaaaaccaataaaaacgaaacgatatcacgtaaaacgtaacaaataaaaacaaaaaccaaaaaaaaaaatatacgcaataaccttaaccaataaaaatcgcgctatcgcgaaaacatatcgctaaaacgtaacgacgactctaaaaccaaaaaaaaaaaaaaaaacgtaacgtttacgaaaaaaccaaaacgaaactaaaaaaaaaaaaaaactcaacgtataattaactaaaccctacgaataaaaaaaaaaataaaatcgaacataaaataaaaaaaaatnaaaataaacgacacataaaaaaaaaaaacgctaacataccgtaacgaaaaaataccattacgtaaaaataaaaaaccgtaaaaaaaaaataaaaaaaatataacccgacaacaatatatataaaaaacgtacaaattaaaaaaaaaaactaaccataaataaaatacgtaaataccgttaaaaaacatacatatataaaaaaacttaaaatcgaaaaccaaaaacgcttcgaataataaatatacttacgtcgctatcgaaaacgaa

SEQ ID NO: 12843 - DNA, 622 bp, Artificial Sequence
  chemically treated genomic DNA (Homo sapiens) CpG-island No: 12843
  unsure (355)
ttttttttttttttttttatttttttttttcgtttttttattttattttcggtaagagtgagacgaatggggggggattagtgagagcgaggcgatattacgtgagacgtaatagatagaggtaaaggttaagagagggagtatacgtaatggttttggttagtaggaatcgcgttatcgcgggagtatgtcgttgaggcgtgacgacgattttaagattaagaggggagagggaggcgtaacgtttgcgaggagattaaggcggaattgggggagagggggagtttagcgtgtagttagttgaattttgcgggtaggaagagaggtaaaatcgagtatggggtagaggaaggtngggataaacgatatatagaagggggggacgttagtatatcgtgacgggggggtattattgcgtaagggtaggaggtcgtaaggaaagaataggggaggtgtggttcgataatagtgtgtgtgaggggcgtgtaaattaggagaggagattgattataggtgggatacgtgggtatcgttagggaatatgtatatgtggggggatttggggtcgggagttaagggcgtttcgggtgatgagtatgtttgcgtcgttgtcggggacggg

SEQ ID NO: 12844 - DNA, 622 bp, Artificial Sequence
  chemically treated genomic DNA (Homo sapiens) CpG-island No: 12844
  unsure (268)
cccgtccccgacaacgacgcaaacatactcatcacccgaaacgcccttaactcccgaccccaaatccccccacatatacatattccctaacgatacccacgtatcccacctataatcaatctcctctcctaatttacacgcccctcacacacactattatcgaaccacacctcccctattctttccttacgacctcctacccttacgcaataatacccccccgtcacgatatactaacgtcccccccttctatatatcgtttatcccnaccttcctctaccccatactcgattttacctctcttcctacccgcaaaattcaactaactacacgctaaactccccctctcccccaattccgccttaatctcctcgcaaacgttacgcctccctctcccctcttaatcttaaaatcgtcgtcacgcctcaacgacatactcccgcgataacgcgattcctactaaccaaaaccattacgtatactccctctcttaacctttacctctatctattacgtctcacgtaatatcgcctcgctctcactaatccccccccattcgtctcactcttaccgaaaataaaataaaaaaacgaaaaaaaaaaataaaaaaaaaaaaaaaaaa

SEQ ID NO: 12845 - DNA, 610 bp, Artificial Sequence
  chemically treated genomic DNA (Homo sapiens) CpG-island No: 12845
gcgtgtgagtgttgcgtggcgcggtttggtcgtatggttaagcgtgtgagtgttgtgtggcgcggtttggtcgtatggttaagcgtgtgagtgttgcgtggcgcggtttggtcgtatggttaagcgtgtgagtgttgcgtggtttggtttggtcgtatggttaagcgtgttagtgttgcgtggtttggtttggtcgtatggttaagcgtgtgagtgttgtgtggcgtagtttggtcgtatggttaaacgtgtgagtgttgcgtggtttggtttggtcgtatggtttagcgtgttagtgttgcgtggtttggtttggtcgtatggttaagcgtgtgagtgttgtgtggcgtagtttggtcgtatggttaagcgtgtgagtgttgcgtggtttggtttggtcgtatggttaagcgtgttagcgttgcgtggcgcggtttggtcgtatgattaagcgtgtgagtgttgcgtggcgtggtttggtcgtatggttaagtgtgtgagtgttgtgtggcgcggtttggtcgcgtgttaggtatgtgagtgggttttatatgtgtacgttttttttgtgtttcggaatgaggttaggtttttttcgttttttttttag

SEQ ID NO: 12846 - DNA, 610 bp, Artificial Sequence
  chemically treated genomic DNA (Homo sapiens) CpG-island No: 12846
ctaaaaaaaaaacgaaaaaaacctaacctcattccgaaacacaaaaaaaacgtacacatataaaacccactcacatacctaacacgcgaccaaaccgcgccacacaacactcacacacttaaccatacgaccaaaccacgccacgcaacactcacacgcttaatcatacgaccaaaccgcgccacgcaacgctaacacgcttaaccatacgaccaaaccaaaccacgcaacactcacacgcttaaccatacgaccaaactacgccacacaacactcacacgcttaaccatacgaccaaaccaaaccacgcaacactaacacgctaaaccatacgaccaaaccaaaccacgcaacactcacacgtttaaccatacgaccaaactacgccacacaacactcacacgcttaaccatacgaccaaaccaaaccacgcaacactaacacgcttaaccatacgaccaaaccaaaccacgcaacactcacacgcttaaccatacgaccaaaccgcgccacgcaacactcacacgcttaaccatacgaccaaaccgcgccacacaacactcacacgcttaaccatacgaccaaaccgcgccacgcaacactcacacgc

SEQ ID NO: 12847 - DNA, 610 bp, Artificial Sequence
  chemically treated genomic DNA (Homo sapiens) CpG-island No: 12847
ttagagggaggacggaggagatttggttttatttcgggatataaggaggacgtgtatatgtggagtttatttatatgtttaatacgcgattaggtcgcgttatatagtatttatatatttaattatgcgattaggttacgttacgtagtatttatacgtttaattatgcgattaggtcgcgttacgtagcgttaatacgtttaattatgcgattaggttaggttacgtagtatttatacgtttaattatgcgattaggttgcgttatatagtatttatacgtttaattatgcgattaggttaggttacgtagtattaatacgttaaattatgcgattaggttaggttacgtagtatttatacgtttaattatgcgattaggttgcgttatatagtatttatacgtttaattatgcgattaggttaggttacgtagtattaatacgtttaattatgcgattaggttaggttacgtagtatttatacgtttaattatgcgattaggtcgcgttacgtagtatttatacgtttaattatgcgattaggtcgcgttatatagtatttatacgtttaattatgcgattaggtcgcgttacgtagtatttatacgt

SEQ ID NO: 12848 - DNA, 610 bp, Artificial Sequence
  chemically treated genomic DNA (Homo sapiens) CpG-island No: 12848
acgtataaatactacgtaacgcgacctaatcgcataattaaacgtataaatactatataacgcgacctaatcgcataattaaacgtataaatactacgtaacgcgacctaatcgcataattaaacgtataaatactacgtaacctaacctaatcgcataattaaacgtattaatactacgtaacctaacctaatcgcataattaaacgtataaatactatataacgcaacctaatcgcataattaaacgtataaatactacgtaacctaacctaatcgcataatttaacgtattaatactacgtaacctaacctaatcgcataattaaacgtataaatactatataacgcaacctaatcgcataattaaacgtataaatactacgtaacctaacctaatcgcataattaaacgtattaacgctacgtaacgcgacctaatcgcataattaaacgtataaatactacgtaacgtaacctaatcgcataattaaatatataaatactatataacgcgacctaatcgcgtattaaacatataaataaactccacatatacacgtcctccttatatcccgaaataaaaccaaatctcctccgtcctccctctaa

SEQ ID NO: 12849 - DNA, 530 bp, Artificial Sequence
  chemically treated genomic DNA (Homo sapiens) CpG-island No: 12849
taggtcgaattttttttggaagtcgtgtacggtggtcgattggggttttaggtttcggcgtaggcgggcgttataggttataatgcggtcgtaggcgtagtttgagttgtttatcgtggtgtcggcgttgttagggatgagttatttgaagattttattgttttttagacggatggcggtttagttttgcgttcgtatatagttgtagtcggcgttgaagtcgtttaggaatagtatgttttgcgggcgtcgcggagtcgcgtttgagtcgtcgtaggagtcgtcgaggtttcgtttttatgaattagattttcggggcgcgtttgtagggatttcgggatcgaggggtgggtttacgtcggtgttttatttgtcgattacgtttaggtatacgtcgtagagcgcgtcgattttcgttacggtttgatgcggcgtcgcgtgtagcgggattagtattaggttttgtgttgttgcgggaaggggtgggggcgttagagttcggcgggaggggagggtttttttttattttt

SEQ ID NO: 12850 - DNA, 530 bp, Artificial Sequence
  chemically treated genomic DNA (Homo sapiens) CpG-island No: 12850
aaaaataaaaaaaaaccctcccctcccgccgaactctaacgcccccaccccttcccgcaacaacacaaaacctaatactaatcccgctacacgcgacgccgcatcaaaccgtaacgaaaatcgacgcgctctacgacgtatacctaaacgtaatcgacaaataaaacaccgacgtaaacccacccctcgatcccgaaatccctacaaacgcgccccgaaaatctaattcataaaaacgaaacctcgacgactcctacgacgactcaaacgcgactccgcgacgcccgcaaaacatactattcctaaacgacttcaacgccgactacaactatatacgaacgcaaaactaaaccgccatccgtctaaaaaacaataaaatcttcaaataactcatccctaacaacgccgacaccacgataaacaactcaaactacgcctacgaccgcattataacctataacgcccgcctacgccgaaacctaaaaccccaatcgaccaccgtacacgacttccaaaaaaaattcgaccta

SEQ ID NO: 12851 - DNA, 530 bp, Artificial Sequence
  chemically treated genomic DNA (Homo sapiens) CpG-island No: 12851
aagagtggggaggagtttttttttttcgtcgagttttgacgtttttattttttttcgtagtagtatagaatttggtgttgatttcgttgtacgcggcgtcgtattaagtcgtggcggagatcgacgcgttttacgacgtgtatttggacgtgatcgataagtggggtatcgacgtaagtttatttttcggtttcggggtttttgtaggcgcgtttcgggggtttggtttatgagggcgggatttcgacggtttttgcggcggtttagacgcggtttcgcggcgttcgtaggatatgttgtttttgggcgattttaacgtcgattgtagttatgtgcgggcgtaggattgggtcgttattcgtttgaggagtagtgaggtttttaagtggtttatttttgatagcgtcgatattacggtgggtaatttagattgcgtttacgatcgtattgtggtttgtggcgttcgtttgcgtcggagtttgaagttttagtcggttatcgtgtacgatttttaggaggaattcggtttg

SEQ ID NO: 12852 - DNA, 530 bp, Artificial Sequence
  chemically treated genomic DNA (Homo sapiens) CpG-island No: 12852
caaaccgaattcctcctaaaaatcgtacacgataaccgactaaaacttcaaactccgacgcaaacgaacgccacaaaccacaatacgatcgtaaacgcaatctaaattacccaccgtaatatcgacgctatcaaaaataaaccacttaaaaacctcactactcctcaaacgaataacgacccaatcctacgcccgcacataactacaatcgacgttaaaatcgcccaaaaacaacatatcctacgaacgccgcgaaaccgcgtctaaaccgccgcaaaaaccgtcgaaatcccgccctcataaaccaaacccccgaaacgcgcctacaaaaaccccgaaaccgaaaaataaacttacgtcgataccccacttatcgatcacgtccaaatacacgtcgtaaaacgcgtcgatctccgccacgacttaatacgacgccgcgtacaacgaaatcaacaccaaattctatactactacgaaaaaaaataaaaacgtcaaaactcgacgaaaaaaaaaaactcctccccactctt

SEQ ID NO: 12853 - DNA, 619 bp, Artificial Sequence
  chemically treated genomic DNA (Homo sapiens) CpG-island No: 12853
tttcgcgtcgtattggtcgttaaggggcggtcgcggagggaaggggtgggtcggtgggtttgatagcgggtttgcgtaggcggtagcgtttgttttttttagtttttcgtttcgcgttatgggcgggtttcgggttttgttggtcgtattttgggcgttggaagtcgtcgggatcgtcgcgtttcgtatcggagtttttaatatttagagtttcggtgatagtaaagtgtcggatttcgtttgcggtagtattatcgcgaaggtggggttcgggtcggggcggggcggcgtttaggggtgttgatcgcgttgattttcgtattcgtcgtttttttttagattttggttggttatgatttcgcgttggtgtaggaggtgcgagatttagattttagcgtcgtgttcgcgtttatggagtagattaataggtgtggtgggtagggtttttcgtcgcgatttttcgtcgggatttcgtttcggcgcggcgtttcgattttgagcgggtttttgttttcgtagcgtgttcgagtacgagtatagttttgtgagtagttagtttttgggtcgggattagtataaggagatgtatttgttcgtgtataggtgaggggcgggtcgt

SEQ ID NO: 12854 - DNA, 619 bp, Artificial Sequence
  chemically treated genomic DNA (Homo sapiens) CpG-island No: 12854
acgacccgcccctcacctatacacgaacaaatacatctccttatactaatcccgacccaaaaactaactactcacaaaactatactcgtactcgaacacgctacgaaaacaaaaacccgctcaaaatcgaaacgccgcgccgaaacgaaatcccgacgaaaaatcgcgacgaaaaaccctacccaccacacctattaatctactccataaacgcgaacacgacgctaaaatctaaatctcgcacctcctacaccaacgcgaaatcataaccaaccaaaatctaaaaaaaaacgacgaatacgaaaatcaacgcgatcaacacccctaaacgccgccccgccccgacccgaaccccaccttcgcgataatactaccgcaaacgaaatccgacactttactatcaccgaaactctaaatattaaaaactccgatacgaaacgcgacgatcccgacgacttccaacgcccaaaatacgaccaacaaaacccgaaacccgcccataacgcgaaacgaaaaactaaaaaaaacaaacgctaccgcctacgcaaacccgctatcaaacccaccgacccaccccttccctccgcgaccgccccttaacgaccaatacgacgcgaaa

SEQ ID NO: 12855 - DNA, 619 bp, Artificial Sequence
  chemically treated genomic DNA (Homo sapiens) CpG-island No: 12855
gcggttcgttttttatttgtatacgaataggtatatttttttgtattggtttcggtttaggggttggttgtttataaagttgtattcgtgttcggatacgttgcggagataggggttcgtttagggtcggggcgtcgcgtcggggcgagatttcggcggggggtcgcgacgaggggttttgtttattatatttgttgatttgttttatgagcgcggatacggcgttgaggtttgggtttcgtattttttgtattagcgcgaggttatagttagttaggatttggggaggagcggcgggtgcgggggttagcgcggttagtatttttaaacgtcgtttcgtttcggttcgggttttattttcgcgatgatgttgtcgtaagcggggttcgatattttgttgttatcgaagttttgaatgttgaaggtttcgatgcgaagcgcggcggtttcggcggtttttagcgtttagagtgcggttagtagagttcggggttcgtttatggcgcggagcgagaggttgggagggatagacgttgtcgtttacgtagattcgttgttagatttatcgatttatttttttttttcgcggtcgttttttgacggttagtgcgacgcggaa

SEQ ID NO: 12856 - DNA, 619 bp, Artificial Sequence
  chemically treated genomic DNA (Homo sapiens) CpG-island No: 12856
ttccgcgtcgcactaaccgtcaaaaaacgaccgcgaaaaaaaaaaataaatcgataaatctaacaacgaatctacgtaaacgacaacgtctatccctcccaacctctcgctccgcgccataaacgaaccccgaactctactaaccgcactctaaacgctaaaaaccgccgaaaccgccgcgcttcgcatcgaaaccttcaacattcaaaacttcgataacaacaaaatatcgaaccccgcttacgacaacatcatcgcgaaaataaaacccgaaccgaaacgaaacgacgtttaaaaatactaaccgcgctaacccccgcacccgccgctcctccccaaatcctaactaactataacctcgcgctaatacaaaaaatacgaaacccaaacctcaacgccgtatccgcgctcataaaacaaatcaacaaatataataaacaaaacccctcgtcgcgaccccccgccgaaatctcgccccgacgcgacgccccgaccctaaacgaacccctatctccgcaacgtatccgaacacgaatacaactttataaacaaccaacccctaaaccgaaaccaatacaaaaaaatatacctattcgtatacaaataaaaaacgaaccgc

SEQ ID NO: 12857 - DNA, 659 bp, Artificial Sequence
  chemically treated genomic DNA (Homo sapiens) CpG-island No: 12857
tttcgtcgtcgagtcgttgcggggcgcggggtaaggggcgtgagtgggcggggcgggtttggttatatttatttcgattagtatacgtttacgtttcgtattttcgtcggttttcgtttatcgtacgacgatttcgggggagtttcgtttacggtacgtttatttttgtcgagtttcgtttatttttgtcgagtttcgtttatttttgtcgagtttcgtttatttttgtcgagtttcgtttttcgttcgttaagtttcgtttcgtatttatcgcgggttttgcgcgtttttttgtcggattttgtattgtatcgtttgtagcgtcgttgttaggtatacgtttgtttattttaatttttgttcggcgttgttttttggcgaagcgttttcggtttggggcgggggcgtagttgtaggaggtaggtgtagtcggcgtagttttcggaggttttggtggtatcgtttagttgcggggcgtttttgggggaatggtggtttggcgggtgtttgcgtttatataaaggggtggggtaacgggttgatttggttaagggttgatggcgggtttgttttcgtcggtttaagggtgtcgtgttaaagggattcgtatttgttttaatagtaatttttttaaatcgtatttatagggtttatgtttt

SEQ ID NO: 12858 - DNA, 659 bp, Artificial Sequence
  chemically treated genomic DNA (Homo sapiens) CpG-island No: 12858
aaaacataaaccctataaatacgatttaaaaaaattactattaaaacaaatacgaatccctttaacacgacacccttaaaccgacgaaaacaaacccgccatcaacccttaaccaaatcaacccgttaccccacccctttatataaacgcaaacacccgccaaaccaccattcccccaaaaacgccccgcaactaaacgataccaccaaaacctccgaaaactacgccgactacacctacctcctacaactacgcccccgccccaaaccgaaaacgcttcgccaaaaaacaacgccgaacaaaaattaaaataaacaaacgtatacctaacaacgacgctacaaacgatacaatacaaaatccgacaaaaaaacgcgcaaaacccgcgataaatacgaaacgaaacttaacgaacgaaaaacgaaactcgacaaaaataaacgaaactcgacaaaaataaacgaaactcgacaaaaataaacgaaactcgacaaaaataaacgtaccgtaaacgaaactcccccgaaatcgtcgtacgataaacgaaaaccgacgaaaatacgaaacgtaaacgtatactaatcgaaataaatataaccaaacccgccccgcccactcacgccccttaccccgcgccccgcaacgactcgacgacgaaa

SEQ ID NO: 12859 - DNA, 659 bp, Artificial Sequence
  chemically treated genomic DNA (Homo sapiens) CpG-island No: 12859
gagatatagattttgtaaatgcgatttaggggaattgttattgagataagtgcgggtttttttaatacgatatttttaggtcggcgagaataagttcgttattagtttttgattaagttagttcgttattttatttttttatatgggcgtaagtattcgttaagttattatttttttaggagcgtttcgtagttgaacggtgttattaaagttttcgggagttacgtcgattgtatttattttttgtagttgcgttttcgttttaggtcgaaggcgtttcgttagggaatagcgtcgggtagaaattggagtagataagcgtgtgtttggtagcggcgttataggcggtgtagtataagattcgataggagaacgcgtagggttcgcggtaggtgcggggcggggtttggcgggcggagggcggggttcggtagagatgggcggggttcggtagagatgggcggggttcggtagagatgggcggggttcggtagagatgggcgtgtcgtgagcggggttttttcgaggtcgtcgtgcggtaggcggaagtcgacggagatgcgggacgtgggcgtgtattggtcggggtgggtgtggttagattcgtttcgtttatttacgttttttgtttcgcgtttcgtagcgattcggcggcggaa

SEQ ID NO: 12860 - DNA, 659 bp, Artificial Sequence
  chemically treated genomic DNA (Homo sapiens) CpG-island No: 12860
ttccgccgccgaatcgctacgaaacgcgaaacaaaaaacgtaaataaacgaaacgaatctaaccacacccaccccgaccaatacacgcccacgtcccgcatctccgtcgacttccgcctaccgcacgacgacctcgaaaaaaccccgctcacgacacgcccatctctaccgaaccccgcccatctctaccgaaccccgcccatctctaccgaaccccgcccatctctaccgaaccccgccctccgcccgccaaaccccgccccgcacctaccgcgaaccctacgcgttctcctatcgaatcttatactacaccgcctataacgccgctaccaaacacacgcttatctactccaatttctacccgacgctattccctaacgaaacgccttcgacctaaaacgaaaacgcaactacaaaaaataaatacaatcgacgtaactcccgaaaactttaataacaccgttcaactacgaaacgctcctaaaaaaataataacttaacgaatacttacgcccatataaaaaaataaaataacgaactaacttaatcaaaaactaataacgaacttattctcgccgacctaaaaatatcgtattaaaaaaacccgcacttatctcaataacaattcccctaaatcgcatttacaaaatctatatctc

SEQ ID NO: 12861 - DNA, 748 bp, Artificial Sequence
  chemically treated genomic DNA (Homo sapiens) CpG-island No: 12861
gggtttcgcgagattcgcgaggtgtttgggtttgggagggtcggtcgagttcgtagttcgggttattcgggtttttgttagttcgggatgaattgttcgtatttcggtcgtatttttcgggtcggttcggttatttttttcgttgaagggcgtcgggaggtcgaggaagtcgttgggggttaaggtcgtcgttatcgtcgtaattgtattttcgttcgtttttcgttcggtttcggtttgggtttttgtcgtatgagcggtcgttattcgtattgttatcgcgttttttatgtcgtaacgcgtcgtaggaagatggcggatttacgattatgtcgttataataacgggtcgcgtcgaggttagcgtgagggaacggtaagaggagggcggggtagaatcggagcggattgacggataggcggggagtcgggtttggatagcggtgtggttttaaagggtagaggcggggtcgggcgcgttgagagcgaagatggggcgggattgtggggagggcgtggttacggtggagtagattgttagttagggggcggggcggtagaaggatttatgttcgaggttgtattcggatttgagagttagagaacgcgaggggcgagcggattggcggttgttaggtagtcgcgttttagcgttttcgtatttaaggataggtcgtttcgttcgcggttgttgttgggaagtcgttatagttttaattaggggtgtggtgtttgttgtttattgatcg

SEQ ID NO: 12862 - DNA, 748 bp, Artificial Sequence
  chemically treated genomic DNA (Homo sapiens) CpG-island No: 12862
cgatcaataaacaacaaacaccacacccctaattaaaactataacgacttcccaacaacaaccgcgaacgaaacgacctatccttaaatacgaaaacgctaaaacgcgactacctaacaaccgccaatccgctcgcccctcgcgttctctaactctcaaatccgaatacaacctcgaacataaatccttctaccgccccgccccctaactaacaatctactccaccgtaaccacgccctccccacaatcccgccccatcttcgctctcaacgcgcccgaccccgcctctaccctttaaaaccacaccgctatccaaacccgactccccgcctatccgtcaatccgctccgattctaccccgccctcctcttaccgttccctcacgctaacctcgacgcgacccgttattataacgacataatcgtaaatccgccatcttcctacgacgcgttacgacataaaaaacgcgataacaatacgaataacgaccgctcatacgacaaaaacccaaaccgaaaccgaacgaaaaacgaacgaaaatacaattacgacgataacgacgaccttaacccccaacgacttcctcgacctcccgacgcccttcaacgaaaaaaataaccgaaccgacccgaaaaatacgaccgaaatacgaacaattcatcccgaactaacaaaaacccgaataacccgaactacgaactcgaccgaccctcccaaacccaaacacctcgcgaatctcgcgaaaccc

SEQ ID NO: 12863 - DNA, 748 bp, Artificial Sequence
  chemically treated genomic DNA (Homo sapiens) CpG-island No: 12863
cggttagtgggtagtaggtattatatttttggttggagttgtggcggttttttagtagtagtcgcgggcggggcgatttgtttttaggtacggaagcgttggggcgcggttgtttagtagtcgttagttcgttcgtttttcgcgttttttggtttttaaattcgagtgtagtttcgaatataggtttttttgtcgtttcgttttttggttggtaatttgttttatcgtaattacgttttttttatagtttcgttttattttcgtttttagcgcgttcggtttcgtttttgttttttaaggttatatcgttatttaggttcggtttttcgtttgttcgttaattcgtttcggttttgtttcgttttttttttgtcgtttttttacgttggtttcggcgcggttcgttgttatgacgatatggtcgtaaattcgttatttttttgcggcgcgttgcgatatggagggcgcgatggtagtgcgggtgacggtcgtttatacggtagaagtttaggtcgaagtcgggcgggaagcgggcgagggtgtagttgcggcggtggcggcggttttggtttttagcggttttttcggtttttcggcgttttttagcgaggaaggtaatcgggtcgattcggagggtgcggtcggggtgcgggtagtttatttcgggttggtagaggttcggatggttcgagttgcgggttcgatcgatttttttagatttagatatttcgcggatttcgcgggattt

SEQ ID NO: 12864 - DNA, 748 bp, Artificial Sequence
  chemically treated genomic DNA (Homo sapiens) CpG-island No: 12864
aaatcccgcgaaatccgcgaaatatctaaatctaaaaaaatcgatcgaacccgcaactcgaaccatccgaacctctaccaacccgaaataaactacccgcaccccgaccgcaccctccgaatcgacccgattaccttcctcgctaaaaaacgccgaaaaaccgaaaaaaccgctaaaaaccaaaaccgccgccaccgccgcaactacaccctcgcccgcttcccgcccgacttcgacctaaacttctaccgtataaacgaccgtcacccgcactaccatcgcgccctccatatcgcaacgcgccgcaaaaaaataacgaatttacgaccatatcgtcataacaacgaaccgcgccgaaaccaacgtaaaaaaacgacaaaaaaaaaacgaaacaaaaccgaaacgaattaacgaacaaacgaaaaaccgaacctaaataacgatataaccttaaaaaacaaaaacgaaaccgaacgcgctaaaaacgaaaataaaacgaaactataaaaaaaacgtaattacgataaaacaaattaccaaccaaaaaacgaaacgacaaaaaaacctatattcgaaactacactcgaatttaaaaaccaaaaaacgcgaaaaacgaacgaactaacgactactaaacaaccgcgccccaacgcttccgtacctaaaaacaaatcgccccgcccgcgactactactaaaaaaccgccacaactccaaccaaaaatataatacctactacccactaaccg

SEQ ID NO: 12865 - DNA, 1219 bp, Artificial Sequence
  chemically treated genomic DNA (Homo sapiens) CpG-island No: 12865
attgaggcgcgtatttacgtttgtcggggaaggagtttcgggttggttcgcgggattggtcggtaagcgatttacgtggtggtttcgtgtttcgagcgcgtttacggtatagaggtacgggtacggtcgacgaaggtgtttcggttttttttcgcggcgtttttgcgagagtttcgtttatgttcgcgggagagatcggttaatggatagtcggtttggttcgggttatttcgtgaagggtttcgttatttaggttgattattcgtttttaatgggtgagcggttcgcggtagttcgggaatagcggttttgcgtttgcgttgtttttttttttggcgtattttcgtagcgagcgttttatttcgaatgtcggttggagttttgttagttaattatcggggcgttttaaggtcggtagttaatgatcgttttttttttcgcgtcgggttttatcgattggcgttgagttttcgtagttcgcgggaggcgggggcggattggcgaaggtgtaggttaatgggcggcgggcgcgaggcgttgggttaatgagcgtttcgggggcggggagggcgtcgcggcgggcggttgcgaggagcggtcggcgggcggcggcggtcggcgggcggcgatggcggcggcggaggtcggtggcgacgacgttcgttgcgtgcggttgagcgtcgagcgggtataggcgttgttggtcgacgtggatacgttgttgttcgattgcgacggcgtgttgtggcgcggggagattcgtttgtttggcgcgttcgaggttttgcggcgtttgtaattcgttgtaagcgtttgggttttattattaataatagtagtaagattcgcgttgtttacgtcgagaagttgcggcgtttgggtttcggcggtttcgcggggttcggcgttagtttggaggttttcggtacggtttattgtatcgcgttttatttgcgttagcgtttggtcggcgttttcgcgtttaaggtttacgtgttgggtagtttagttttggtcgcggagttggaggtcgtgggcgtcgttagcgtgggcgtggggttcgagttattgtaggggcgagggtttcggcgattggttgtacgcgtcgttggagttcgacgtgcgcgcggtggtggtgggttttgattcgtattttagttatatgaagtttattaaggttttgcgttatttgtagtagttcggttggtttgttcgtggg

SEQ ID NO: 12866 - DNA, 1219 bp, Artificial Sequence
  chemically treated genomic DNA (Homo sapiens) CpG-island No: 12866
cccacgaacaaaccaaccgaactactacaaataacgcaaaaccttaataaacttcatataactaaaatacgaatcaaaacccaccaccaccgcgcgcacgtcgaactccaacgacgcgtacaaccaatcgccgaaaccctcgcccctacaataactcgaaccccacgcccacgctaacgacgcccacgacctccaactccgcgaccaaaactaaactacccaacacgtaaaccttaaacgcgaaaacgccgaccaaacgctaacgcaaataaaacgcgatacaataaaccgtaccgaaaacctccaaactaacgccgaaccccgcgaaaccgccgaaacccaaacgccgcaacttctcgacgtaaacaacgcgaatcttactactattattaataataaaacccaaacgcttacaacgaattacaaacgccgcaaaacctcgaacgcgccaaacaaacgaatctccccgcgccacaacacgccgtcgcaatcgaacaacaacgtatccacgtcgaccaacaacgcctatacccgctcgacgctcaaccgcacgcaacgaacgtcgtcgccaccgacctccgccgccgccatcgccgcccgccgaccgccgccgcccgccgaccgctcctcgcaaccgcccgccgcgacgccctccccgcccccgaaacgctcattaacccaacgcctcgcgcccgccgcccattaacctacaccttcgccaatccgcccccgcctcccgcgaactacgaaaactcaacgccaatcgataaaacccgacgcgaaaaaaaaaacgatcattaactaccgaccttaaaacgccccgataattaactaacaaaactccaaccgacattcgaaataaaacgctcgctacgaaaatacgccaaaaaaaaaaacaacgcaaacgcaaaaccgctattcccgaactaccgcgaaccgctcacccattaaaaacgaataatcaacctaaataacgaaacccttcacgaaataacccgaaccaaaccgactatccattaaccgatctctcccgcgaacataaacgaaactctcgcaaaaacgccgcgaaaaaaaaccgaaacaccttcgtcgaccgtacccgtacctctataccgtaaacgcgctcgaaacacgaaaccaccacgtaaatcgcttaccgaccaatcccgcgaaccaacccgaaactccttccccgacaaacgtaaatacgcgcctcaat

SEQ ID NO: 12867 - DNA, 1219 bp, Artificial Sequence
  chemically treated genomic DNA (Homo sapiens) CpG-island No: 12867
tttacgagtaagttagtcgggttgttgtaggtagcgtagggttttggtgagttttatgtagttgaagtgcgggttaaagtttattattatcgcgcgtacgtcgggttttagcggcgcgtgtagttagtcgtcgggattttcgtttttgtagtggttcgggttttacgtttacgttggcgacgtttacggtttttagtttcgcggttagggttgggttgtttagtacgtaggttttgggcgcgggggcgtcggttaggcgttggcgtaggtagagcgcggtgtagtaggtcgtgtcgaagatttttaggttggcgtcgggtttcgcggggtcgtcgaagtttaggcgtcgtagtttttcggcgtaggtagcgcgggttttgttgttgttgttggtgatgaagtttaggcgtttgtagcgggttgtaagcgtcgtagggtttcgggcgcgttaggtaggcgggttttttcgcgttatagtacgtcgtcgtagtcgaatagtagcgtgtttacgtcggttagtagcgtttgtgttcgttcggcgtttagtcgtacgtagcgggcgtcgtcgttatcggttttcgtcgtcgttatcgtcgttcgtcggtcgtcgtcgttcgtcggtcgtttttcgtagtcgttcgtcgcggcgtttttttcgttttcggggcgtttattggtttagcgtttcgcgttcgtcgtttattggtttgtattttcgttaattcgttttcgtttttcgcgggttgcgggagtttagcgttaatcggtgaggttcggcgcggggagaggggcgattattggttatcggttttgggacgtttcggtgattggttggtagggttttaatcggtattcggagtgaagcgttcgttgcggaaatgcgttagaggggagagtagcgtaggcgtaaggtcgttgttttcgggttgtcgcgggtcgtttatttattggaagcgagtggttagtttaggtgacgaggttttttacggagtgattcgggttaggtcggttgtttattggtcggtttttttcgcgggtatgggcggggttttcgtaggagcgtcgcgggagggggtcggggtattttcgtcggtcgtgttcgtgtttttgtgtcgtggacgcgttcgggatacggggttattacgtgggtcgtttatcggttagtttcgcgagttagttcggggtttttttttcggtaggcgtgagtacgcgttttagt

SEQ ID NO: 12868 - DNA, 1219 bp, Artificial Sequence
  chemically treated genomic DNA (Homo sapiens) CpG-island No: 12868
actaaaacgcgtactcacgcctaccgaaaaaaaaaccccgaactaactcgcgaaactaaccgataaacgacccacgtaataaccccgtatcccgaacgcgtccacgacacaaaaacacgaacacgaccgacgaaaataccccgaccccctcccgcgacgctcctacgaaaaccccgcccatacccgcgaaaaaaaccgaccaataaacaaccgacctaacccgaatcactccgtaaaaaacctcgtcacctaaactaaccactcgcttccaataaataaacgacccgcgacaacccgaaaacaacgaccttacgcctacgctactctcccctctaacgcatttccgcaacgaacgcttcactccgaataccgattaaaaccctaccaaccaatcaccgaaacgtcccaaaaccgataaccaataatcgcccctctccccgcgccgaacctcaccgattaacgctaaactcccgcaacccgcgaaaaacgaaaacgaattaacgaaaatacaaaccaataaacgacgaacgcgaaacgctaaaccaataaacgccccgaaaacgaaaaaaacgccgcgacgaacgactacgaaaaacgaccgacgaacgacgacgaccgacgaacgacgataacgacgacgaaaaccgataacgacgacgcccgctacgtacgactaaacgccgaacgaacacaaacgctactaaccgacgtaaacacgctactattcgactacgacgacgtactataacgcgaaaaaacccgcctacctaacgcgcccgaaaccctacgacgcttacaacccgctacaaacgcctaaacttcatcaccaacaacaacaacaaaacccgcgctacctacgccgaaaaactacgacgcctaaacttcgacgaccccgcgaaacccgacgccaacctaaaaatcttcgacacgacctactacaccgcgctctacctacgccaacgcctaaccgacgcccccgcgcccaaaacctacgtactaaacaacccaaccctaaccgcgaaactaaaaaccgtaaacgtcgccaacgtaaacgtaaaacccgaaccactacaaaaacgaaaatcccgacgactaactacacgcgccgctaaaacccgacgtacgcgcgataataataaactttaacccgcacttcaactacataaaactcaccaaaaccctacgctacctacaacaacccgactaacttactcgtaaa

SEQ ID NO: 12869 - DNA, 592 bp, Artificial Sequence
  chemically treated genomic DNA (Homo sapiens) CpG-island No: 12869
agttcgcgtcgtcgtttagggttttgcggaggtcggatatacgtgggtgtacgcggtcgagcgtagggtcgcgcggggttcggtcggcgtagaggcgttgggggcgtcgtagacgcgaggttcgggatttagttggttgtttcgtcgcgtttttcgtttttttttttttttagttcgttcggttttttttttttttagcgttcgcgtcggagtcggagtcggagtcggagtggcggaggtacgggtagtgttcgttaggcgtcggtagtagttatagtagtttggcgtttggcggcggcggcggtggtagcggcgggcgggttggcgtcgtggattgggtcgggaatcgtgcggacgagggtgttgcgtttgcggcggcggcggtttacgcgggcgcgtacggcggtttttcgggttcggattaattgcggcggcggcggtggcggcggcggcggcggcggcggcggcggcgagtgggtcgtcggggcgggcgtttggcgagttgtagagattaggtaagttcgggatgttcgatttttggcgtcggtcgggttatagggatgagttatttgttagggtaaattttacgttt

SEQ ID NO: 12870 - DNA, 592 bp, Artificial Sequence
  chemically treated genomic DNA (Homo sapiens) CpG-island No: 12870
aaacgtaaaatttaccctaacaaataactcatccctataacccgaccgacgccaaaaatcgaacatcccgaacttacctaatctctacaactcgccaaacgcccgccccgacgacccactcgccgccgccgccgccgccgccgccgccgccaccgccgccgccgcaattaatccgaacccgaaaaaccgccgtacgcgcccgcgtaaaccgccgccgccgcaaacgcaacaccctcgtccgcacgattcccgacccaatccacgacgccaacccgcccgccgctaccaccgccgccgccgccaaacgccaaactactataactactaccgacgcctaacgaacactacccgtacctccgccactccgactccgactccgactccgacgcgaacgctaaaaaaaaaaaaaaccgaacgaactaaaaaaaaaaaaaaacgaaaaacgcgacgaaacaaccaactaaatcccgaacctcgcgtctacgacgcccccaacgcctctacgccgaccgaaccccgcgcgaccctacgctcgaccgcgtacacccacgtatatccgacctccgcaaaaccctaaacgacgacgcgaact

SEQ ID NO: 12871 - DNA, 592 bp, Artificial Sequence
  chemically treated genomic DNA (Homo sapiens) CpG-island No: 12871
gggcgtaaagtttgttttggtaggtggtttatttttgtggttcggtcggcgttaggagtcgggtatttcggatttatttggtttttgtagttcgttagacgttcgtttcgacggtttattcgtcgtcgtcgtcgtcgtcgtcgtcgtcgttatcgtcgtcgtcgtagttagttcgggttcggggggtcgtcgtgcgcgttcgcgtaagtcgtcgtcgtcgtaggcgtagtattttcgttcgtacggttttcggtttagtttacggcgttagttcgttcgtcgttgttatcgtcgtcgtcgttaagcgttaggttgttgtggttgttgtcggcgtttagcgagtattgttcgtgttttcgttatttcggtttcggtttcggtttcgacgcggacgttggagggaggggagatcgggcggattggagggagggaggggcggggagcgcggcggagtagttaattgggtttcgagtttcgcgtttgcggcgtttttagcgtttttgcgtcggtcggatttcgcgcggttttgcgttcggtcgcgtgtatttacgtgtgttcggttttcgtagggttttgggcggcggcgcgggtt

SEQ ID NO: 12872 - DNA, 592 bp, Artificial Sequence
  chemically treated genomic DNA (Homo sapiens) CpG-island No: 12872
aacccgcgccgccgcccaaaaccctacgaaaaccgaacacacgtaaatacacgcgaccgaacgcaaaaccgcgcgaaatccgaccgacgcaaaaacgctaaaaacgccgcaaacgcgaaactcgaaacccaattaactactccgccgcgctccccgcccctccctccctccaatccgcccgatctcccctccctccaacgtccgcgtcgaaaccgaaaccgaaaccgaaataacgaaaacacgaacaatactcgctaaacgccgacaacaaccacaacaacctaacgcttaacgacgacgacgataacaacgacgaacgaactaacgccgtaaactaaaccgaaaaccgtacgaacgaaaatactacgcctacgacgacgacgacttacgcgaacgcgcacgacgaccccccgaacccgaactaactacgacgacgacgataacgacgacgacgacgacgacgacgacgacgaataaaccgtcgaaacgaacgtctaacgaactacaaaaaccaaataaatccgaaatacccgactcctaacgccgaccgaaccacaaaaataaaccacctaccaaaacaaactttacgccc

SEQ ID NO: 12873 - DNA, 519 bp, Artificial Sequence
  chemically treated genomic DNA (Homo sapiens) CpG-island No: 12873
atcgtcgtttagataaagtatcgggcgtttggtagcgttaattatcgtcgttgcgttacgaatgtttttttcgttaaaggcgggggcggcggttttttttgttatagcgggttgtgttttaattttaaaaattgtcgtttgtttatttttaggaatgtttatttatatcgggtttgggcggtttgattgcgtaatgcggaaggtatcgtttatgatttgcgggagtttttcgatatgtttgattagatagttgtgtttggtgatggggatagagatgtcgtaggtgtttattttttggaaggcgtcggtgtcgattatcgaggcgggaatttgattagtgatgtaaattagcgggatggagtttagtcgcgtatcggtaatggcggttattaggttagtcgtattcggttcgttataggttatatagatcgtcggtttatcgtcggtgcgcgttattttttgagcgataaagttcgcgttttgtttatgacgggttagaatatattttgtatagtatgg

SEQ ID NO: 12874 - DNA, 519 bp, Artificial Sequence
  chemically treated genomic DNA (Homo sapiens) CpG-island No: 12874
ccatactatacaaaatatattctaacccgtcataaacaaaacgcgaactttatcgctcaaaaaataacgcgcaccgacgataaaccgacgatctatataacctataacgaaccgaatacgactaacctaataaccgccattaccgatacgcgactaaactccatcccgctaatttacatcactaatcaaattcccgcctcgataatcgacaccgacgccttccaaaaaataaacacctacgacatctctatccccatcaccaaacacaactatctaatcaaacatatcgaaaaactcccgcaaatcataaacgataccttccgcattacgcaatcaaaccgcccaaacccgatataaataaacattcctaaaaataaacaaacgacaatttttaaaattaaaacacaacccgctataacaaaaaaaaccgccgcccccgcctttaacgaaaaaaacattcgtaacgcaacgacgataattaacgctaccaaacgcccgatactttatctaaacgacgat

SEQ ID NO: 12875 - DNA, 519 bp, Artificial Sequence
  chemically treated genomic DNA (Homo sapiens) CpG-island No: 12875
ttatgttatataagatatattttggttcgttatgaatagggcgcgggttttatcgtttagggaatggcgcgtatcgacggtaaatcggcggtttgtatggtttgtagcggatcgggtgcgattaatttggtgatcgttattgtcgatgcgcggttggattttatttcgttgatttgtattattggttaggttttcgtttcgatgatcggtatcgacgttttttaggaagtggatatttacggtatttttatttttattattaaatataattatttggttagatatatcgaagaattttcgtaggttatgagcgatgtttttcgtattgcgtaattaggtcgtttaggttcggtgtggatagatatttttaaggatgagtaaacggtagtttttgagattgaaatatagttcgttatggtagaaaaagtcgtcgttttcgtttttagcgaagaaagtattcgtgacgtagcggcgatgattaacgttgttaaacgttcggtgttttatttgggcggcggt

SEQ ID NO: 12876 - DNA, 519 bp, Artificial Sequence
  chemically treated genomic DNA (Homo sapiens) CpG-island No: 12876
accgccgcccaaataaaacaccgaacgtttaacaacgttaatcatcgccgctacgtcacgaatactttcttcgctaaaaacgaaaacgacgactttttctaccataacgaactatatttcaatctcaaaaactaccgtttactcatccttaaaaatatctatccacaccgaacctaaacgacctaattacgcaatacgaaaaacatcgctcataacctacgaaaattcttcgatatatctaaccaaataattatatttaataataaaaataaaaataccgtaaatatccacttcctaaaaaacgtcgataccgatcatcgaaacgaaaacctaaccaataatacaaatcaacgaaataaaatccaaccgcgcatcgacaataacgatcaccaaattaatcgcacccgatccgctacaaaccatacaaaccgccgatttaccgtcgatacgcgccattccctaaacgataaaacccgcgccctattcataacgaaccaaaatatatcttatataacataa

SEQ ID NO: 12877 - DNA, 535 bp, Artificial Sequence
  chemically treated genomic DNA (Homo sapiens) CpG-island No: 12877
tgggcgtcgcgcggggttgggggcgtttagaagacgtgcgagtgttcgcggttttgttgttgtttttagtatttttcgtattttttaagtgatgggaataagggttcgtttaggtagtcgttgtcgtcgtatcgttttttcgttcgttttttgcgcgcggagttatttagttatattttcggtatttcgagtttttttttcggagttgttgtttttattttggttgttatcgtcgtcgtcgcgggtggttcgttgttgattgggttcgtcgggagacggagaagtattttttggtttttttttagtagtttttatattttaattttgtcgtcgtcgtcgcgtttgttttcgtagcggcgttcggtcgtatattgtgggggcgtacgtcgggaggtttcgtaagatcgtggaggtaggaaacggtattattgcgtttttgtttcggttttttgttgttcgttttggatggtttttgaaagtgtttgagttttttcggaaattttggggtcggagaagataaattttggaatttttt

SEQ ID NO: 12878 - DNA, 535 bp, Artificial Sequence
  chemically treated genomic DNA (Homo sapiens) CpG-island No: 12878
aaaaaattccaaaatttatcttctccgaccccaaaatttccgaaaaaactcaaacactttcaaaaaccatccaaaacgaacaacaaaaaaccgaaacaaaaacgcaataataccgtttcctacctccacgatcttacgaaacctcccgacgtacgcccccacaatatacgaccgaacgccgctacgaaaacaaacgcgacgacgacgacaaaattaaaatataaaaactactaaaaaaaaaccaaaaaatacttctccgtctcccgacgaacccaatcaacaacgaaccacccgcgacgacgacgataacaaccaaaataaaaacaacaactccgaaaaaaaaactcgaaataccgaaaatataactaaataactccgcgcgcaaaaaacgaacgaaaaaacgatacgacgacaacgactacctaaacgaacccttattcccatcacttaaaaaatacgaaaaatactaaaaacaacaacaaaaccgcgaacactcgcacgtcttctaaacgcccccaaccccgcgcgacgccca

SEQ ID NO: 12879 - DNA, 535 bp, Artificial Sequence
  chemically treated genomic DNA (Homo sapiens) CpG-island No: 12879
gaagaattttaaggtttgtttttttcggttttaggattttcgaggaggtttagatatttttaagaattatttaaagcgaataataaagagtcgaggtagaagcgtagtagtgtcgttttttgtttttacggttttgcggagtttttcggcgtgcgtttttataatgtgcggtcgagcgtcgttgcgagggtaggcgcggcggcggcggtaaagttggggtgtgagagttgttgagggagggttaaaaagtgttttttcgtttttcggcgagtttagttagtagcgggttattcgcggcggcggcgatagtagttaaagtagaagtagtagtttcggaggaagggttcggggtgtcgggagtgtgattgggtgatttcgcgcgtagagagcgagcgagggggcggtgcggcgatagcggttgtttgggcgggtttttgtttttattatttgggggatgcggagggtattggagatagtagtaggatcgcggatattcgtacgttttttgggcgtttttagtttcgcgcggcgttta

SEQ ID NO: 12880 - DNA, 535 bp, Artificial Sequence
  chemically treated genomic DNA (Homo sapiens) CpG-island No: 12880
taaacgccgcgcgaaactaaaaacgcccaaaaaacgtacgaatatccgcgatcctactactatctccaataccctccgcatcccccaaataataaaaacaaaaacccgcccaaacaaccgctatcgccgcaccgccccctcgctcgctctctacgcgcgaaatcacccaatcacactcccgacaccccgaacccttcctccgaaactactacttctactttaactactatcgccgccgccgcgaataacccgctactaactaaactcgccgaaaaacgaaaaaacactttttaaccctccctcaacaactctcacaccccaactttaccgccgccgccgcgcctaccctcgcaacgacgctcgaccgcacattataaaaacgcacgccgaaaaactccgcaaaaccgtaaaaacaaaaaacgacactactacgcttctacctcgactctttattattcgctttaaataattcttaaaaatatctaaacctcctcgaaaatcctaaaaccgaaaaaaacaaaccttaaaattcttc

SEQ ID NO: 12881 - DNA, 701 bp, Artificial Sequence
  chemically treated genomic DNA (Homo sapiens) CpG-island No: 12881
cgttcggagttcgggggaatcgaaggtttaggagtttaaggttatttacgaattttagttcgttttttggggcgattttttggagtagttacgtgttttttcggcgtcgtacgtcgcgtagttgtattttggttgcggttcgcgttttcggattcgtagttcggagtcggcgtattagggtttgcggtttttaagggcgaggattcgaagttttcggggttgagagcgatagtgggggtatatttggtttcgttattcgtcgttttgtgatcgaggaggcgggtaagaaggtagagagaagggaagggacgagaggcgaagggacgagaggcgtagggacgtttttgcgtatagtcgtcgatttcgtgtatttgtagtcgttcgaggcgtcgttatagttttttttttataggttcgcggtttcgttttatttcggtcgtttcgtttggggtcgcgatcgttttttcgtaatacgtgcggttttttatggttgttggatagtatcggagcggtcgttttagttagtttcgtaggatgaagggaggatacgagggtcggtgtagttttagaagttcgtatttatattagcgcgtttttcgtttcgagtcgttattcgatatttcgacgatatgaggggatggcggtttttaatcggcggtttaggttcgcgtttcgagttcggttttggtaattattagtgt

SEQ ID NO: 12882 - DNA, 701 bp, Artificial Sequence
  chemically treated genomic DNA (Homo sapiens) CpG-island No: 12882
acactaataattaccaaaaccgaactcgaaacgcgaacctaaaccgccgattaaaaaccgccatcccctcatatcgtcgaaatatcgaataacgactcgaaacgaaaaacgcgctaatataaatacgaacttctaaaactacaccgaccctcgtatcctcccttcatcctacgaaactaactaaaacgaccgctccgatactatccaacaaccataaaaaaccgcacgtattacgaaaaaacgatcgcgaccccaaacgaaacgaccgaaataaaacgaaaccgcgaacctataaaaaaaaaactataacgacgcctcgaacgactacaaatacacgaaatcgacgactatacgcaaaaacgtccctacgcctctcgtcccttcgcctctcgtcccttcccttctctctaccttcttacccgcctcctcgatcacaaaacgacgaataacgaaaccaaatatacccccactatcgctctcaaccccgaaaacttcgaatcctcgcccttaaaaaccgcaaaccctaatacgccgactccgaactacgaatccgaaaacgcgaaccgcaaccaaaatacaactacgcgacgtacgacgccgaaaaaacacgtaactactccaaaaaatcgccccaaaaaacgaactaaaattcgtaaataaccttaaactcctaaaccttcgattcccccgaactccgaacg

SEQ ID NO: 12883 - DNA, 701 bp, Artificial Sequence
  chemically treated genomic DNA (Homo sapiens) CpG-island No: 12883
gtattggtagttattagggtcgggttcggggcgcggatttaaatcgtcggttaggggtcgttatttttttatatcgtcgggatatcgggtggcggttcgggacggaggacgcgttagtgtgagtgcgggtttttagaattatatcgattttcgtgttttttttttattttgcggggttggttggagcggtcgtttcggtgttgtttagtagttatagggagtcgtacgtgttgcgggaaagcggtcgcggttttaggcggggcggtcgggatggagcggggtcgcgagtttgtggggaaggggttgtggcggcgtttcgagcggttgtaggtatacggggtcggcggttgtgcgtagaggcgtttttgcgtttttcgttttttcgtttttcgtttttttttttttttttgtttttttgttcgttttttcggttatagagcgacgaatgacgagattaggtgtatttttattgtcgtttttagtttcggggatttcgggttttcgtttttgaaggtcgtaggttttagtgcgtcggtttcgggttgcgggttcgggagcgcgggtcgtagttaaggtgtagttgcgcggcgtgcggcgtcgggggaatacgtggttgttttaggaagtcgttttagggaacgggttgggattcgtgggtgattttgggtttttaaattttcggttttttcgggtttcgggcg

SEQ ID NO: 12884 - DNA, 701 bp, Artificial Sequence
  chemically treated genomic DNA (Homo sapiens) CpG-island No: 12884
cgcccgaaacccgaaaaaaccgaaaatttaaaaacccaaaatcacccacgaatcccaacccgttccctaaaacgacttcctaaaacaaccacgtattcccccgacgccgcacgccgcgcaactacaccttaactacgacccgcgctcccgaacccgcaacccgaaaccgacgcactaaaacctacgaccttcaaaaacgaaaacccgaaatccccgaaactaaaaacgacaataaaaatacacctaatctcgtcattcgtcgctctataaccgaaaaaacgaacaaaaaaacaaaaaaaaaaaaaaaaacgaaaaacgaaaaaacgaaaaacgcaaaaacgcctctacgcacaaccgccgaccccgtatacctacaaccgctcgaaacgccgccacaaccccttccccacaaactcgcgaccccgctccatcccgaccgccccgcctaaaaccgcgaccgctttcccgcaacacgtacgactccctataactactaaacaacaccgaaacgaccgctccaaccaaccccgcaaaataaaaaaaaaacacgaaaatcgatataattctaaaaacccgcactcacactaacgcgtcctccgtcccgaaccgccacccgatatcccgacgatataaaaaaataacgacccctaaccgacgatttaaatccgcgccccgaacccgaccctaataactaccaatac

SEQ ID NO: 12885 - DNA, 514 bp, Artificial Sequence
  chemically treated genomic DNA (Homo sapiens) CpG-island No: 12885
  unsure (331, 386..387, 401)
gcggtttttcggggtatttgttgttttggcgtttttttttttggttttcgtttcgttcgtagcgtttttcgatatttttcgttcgttgcgcgcgtattttcgtttttcgggcgatttgtttgagtatttcgcgagcgtacgtgttttaggaagtgacgtatagtttttttgggggtcgggggcggggttaggttataaatcgtcggttaggggtcgttatttttttagagcgtcgggatatcgggtggcggttcgggacggaggacgcgttagtgtgagtgcgggtttttagaattatatcgattttcgtgttttttttttattttgcggngttggttggagcggtcgtttcggtgttgtttagtagttatagggagtcgtacggnngagcgggaaagcgncgcgggtttaggcggggcgggcgggatggagcggggtcgcgagtttggggggaagggttgggcggggtttcgagcggttgtagggttttaaaattagaatatgagtttttatt

SEQ ID NO: 12886 - DNA, 514 bp, Artificial Sequence
  chemically treated genomic DNA (Homo sapiens) CpG-island No: 12886
  unsure (114, 128..129, 184)
aataaaaactcatattctaattttaaaaccctacaaccgctcgaaaccccgcccaacccttccccccaaactcgcgaccccgctccatcccgcccgccccgcctaaacccgcgncgctttcccgctcnnccgtacgactccctataactactaaacaacaccgaaacgaccgctccaaccaacnccgcaaaataaaaaaaaaacacgaaaatcgatataattctaaaaacccgcactcacactaacgcgtcctccgtcccgaaccgccacccgatatcccgacgctctaaaaaaataacgacccctaaccgacgatttataacctaaccccgcccccgacccccaaaaaaactatacgtcacttcctaaaacacgtacgctcgcgaaatactcaaacaaatcgcccgaaaaacgaaaatacgcgcgcaacgaacgaaaaatatcgaaaaacgctacgaacgaaacgaaaaccaaaaaaaaaaacgccaaaacaacaaataccccgaaaaaccgc

SEQ ID NO: 12887 - DNA, 514 bp, Artificial Sequence
  chemically treated genomic DNA (Homo sapiens) CpG-island No: 12887
  unsure (114, 128..129, 184)
ggtgggagtttatgttttagttttagggttttgtagtcgttcgaggtttcgtttagtttttttttttaggttcgcggtttcgttttatttcgttcgtttcgtttgggttcgcgncgttttttcgtttnntcgtgcggttttttatggttgttggatagtatcggagcggtcgttttagttagtntcgtaggatgaagggaggatacgagggtcggtgtagttttagaagttcgtatttatattagcgcgtttttcgtttcgagtcgttattcgatatttcgacgttttgaggggatggcggtttttaatcggcggtttatagtttggtttcgttttcggtttttaggggggttgtgcgttattttttgaggtacgtacgttcgcgaggtgtttagatagatcgttcggggggcggggatgcgcgcgtagcgggcggagaatatcggagggcgttgcgggcgaggcgaaggttaagggaaaaggcgttaaggtagtaggtgtttcgaggagtcgt

SEQ ID NO: 12888 - DNA, 514 bp, Artificial Sequence
  chemically treated genomic DNA (Homo sapiens) CpG-island No: 12888
  unsure (331, 386..387, 401)
acgactcctcgaaacacctactaccttaacgccttttcccttaaccttcgcctcgcccgcaacgccctccgatattctccgcccgctacgcgcgcatccccgccccccgaacgatctatctaaacacctcgcgaacgtacgtacctcaaaaaataacgcacaacccccctaaaaaccgaaaacgaaaccaaactataaaccgccgattaaaaaccgccatcccctcaaaacgtcgaaatatcgaataacgactcgaaacgaaaaacgcgctaatataaatacgaacttctaaaactacaccgaccctcgtatcctcccttcatcctacganactaactaaaacgaccgctccgatactatccaacaaccataaaaaaccgcacgannaaacgaaaaaacgncgcgaacccaaacgaaacgaacgaaataaaacgaaaccgcgaacctaaaaaaaaaaactaaacgaaacctcgaacgactacaaaaccctaaaactaaaacataaactcccacc

SEQ ID NO: 12889 - DNA, 650 bp, Artificial Sequence
  chemically treated genomic DNA (Homo sapiens) CpG-island No: 12889
tcgttttttttttcgcggtgatttttcggtttcggcgttcggcgagggcgcgcggttggtgttcgtttcgttcgaaaggtaggggttcggttgtgttttcgtttggtttttaacgttttatttttcgggagattcgtagttttttattattttgtattttttttttcgaatttgggggcggttatcgtgtaattggcgttagtcgcggagtaggaggagtttttcgcgatttcggaggcgttcggcgtagtcgttcgggattggggttggcgggagtttgagatttcgggtagggttgtttttttttttgttttttcgttagattcgcggggaaggaatcgtgttcgcgtcgtttttggttcgcgttatttttttttggtttttgtcggtttcgggtttttgcggttcgatgtggtaggcgtcgcgagagaggtagtagtcggttggagtagcggttttttaggtttcggagttcggtgcgtttttgcggtcgtcgtttttgggtttcggcgggttatttttgtcggtcggtttcgttgcgggtttgtattgttcgggtgagggaaattgggggtgcgggaagatcggtttgggtcggggttcgggcggtttggggtttgtgttgtttcgatttttcggttttgtagttt

SEQ ID NO: 12890 - DNA, 650 bp, Artificial Sequence
  chemically treated genomic DNA (Homo sapiens) CpG-island No: 12890
aaactacaaaaccgaaaaatcgaaacaacacaaaccccaaaccgcccgaaccccgacccaaaccgatcttcccgcacccccaatttccctcacccgaacaatacaaacccgcaacgaaaccgaccgacaaaaataacccgccgaaacccaaaaacgacgaccgcaaaaacgcaccgaactccgaaacctaaaaaaccgctactccaaccgactactacctctctcgcgacgcctaccacatcgaaccgcaaaaacccgaaaccgacaaaaaccaaaaaaaaataacgcgaaccaaaaacgacgcgaacacgattccttccccgcgaatctaacgaaaaaacaaaaaaaaaaacaaccctacccgaaatctcaaactcccgccaaccccaatcccgaacgactacgccgaacgcctccgaaatcgcgaaaaactcctcctactccgcgactaacgccaattacacgataaccgcccccaaattcgaaaaaaaaaatacaaaataataaaaaactacgaatctcccgaaaaataaaacgttaaaaaccaaacgaaaacacaaccgaacccctacctttcgaacgaaacgaacaccaaccgcgcgccctcgccgaacgccgaaaccgaaaaatcaccgcgaaaaaaaaaacga

SEQ ID NO: 12891 - DNA, 650 bp, Artificial Sequence
  chemically treated genomic DNA (Homo sapiens) CpG-island No: 12891
aggttgtaaagtcggagggtcggggtagtatagattttaggtcgttcggatttcggtttagatcggttttttcgtatttttaattttttttattcgggtagtgtaaattcgtagcgaagtcggtcggtaagagtgattcgtcgaggtttaggagcgacgatcgtagaggcgtatcgggtttcgagatttgaggggtcgttgttttagtcggttgttgtttttttcgcggcgtttgttatatcgggtcgtagaagttcgaggtcggtagaaattaaaggaaggtggcgcgggttaggggcggcgcgggtacgatttttttttcgcggatttggcgggggagtagaggagggagtagttttgttcggagttttaggttttcgttagttttaatttcgggcgattgcgtcgagcgttttcggagtcgcgggaagttttttttgtttcgcggttggcgttagttgtacggtggtcgtttttaaattcgaggaggaaggtgtaaagtggtgggaggttgcgggtttttcggagggtgaggcgttggggattaggcgggagtatagtcgaatttttatttttcgggcggggcggatattagtcgcgcgttttcgtcgggcgtcgggatcggaaaattatcgcgaagggagggacga

SEQ ID NO: 12892 - DNA, 650 bp, Artificial Sequence
  chemically treated genomic DNA (Homo sapiens) CpG-island No: 12892
tcgtccctcccttcgcgataattttccgatcccgacgcccgacgaaaacgcgcgactaatatccgccccgcccgaaaaataaaaattcgactatactcccgcctaatccccaacgcctcaccctccgaaaaacccgcaacctcccaccactttacaccttcctcctcgaatttaaaaacgaccaccgtacaactaacgccaaccgcgaaacaaaaaaaacttcccgcgactccgaaaacgctcgacgcaatcgcccgaaattaaaactaacgaaaacctaaaactccgaacaaaactactccctcctctactcccccgccaaatccgcgaaaaaaaaatcgtacccgcgccgcccctaacccgcgccaccttcctttaatttctaccgacctcgaacttctacgacccgatataacaaacgccgcgaaaaaaacaacaaccgactaaaacaacgacccctcaaatctcgaaacccgatacgcctctacgatcgtcgctcctaaacctcgacgaatcactcttaccgaccgacttcgctacgaatttacactacccgaataaaaaaaattaaaaatacgaaaaaaccgatctaaaccgaaatccgaacgacctaaaatctatactaccccgaccctccgactttacaacct

SEQ ID NO: 12893 - DNA, 529 bp, Artificial Sequence
  chemically treated genomic DNA (Homo sapiens) CpG-island No: 12893
cgttatcggtagcggttttcgtcgtttgattcgttagtaacgtttagtcgtttagtgaatttaagtaattcgtagttgcgtagaaggaaataatggtttcggcggtgttatttaacgttattcgtgcggtattatcgaatggcgaagtagaaacgcgtagtgcggtattagggattatttttataatcgcggtggtagaaagtatatagtaaacggcggtaattaatattttattaatggtggcgatagggatattgcgtttcgggttttttattatatttgcggtaacggaggtattttttatatcgatgaacgattatagcgtaacgttaaaggtattttgaattgtattaaaggtgtttaggtcgttgacgttttatgtcgttatataggttttattatcgaattagaattagttaaattcggtaatttcgattatggggattaacgttagttcggtggttattgtttgtatatcggtggagatttttcgatttataatgtttaataggattaaaaattatagtat

SEQ ID NO: 12894 - DNA, 529 bp, Artificial Sequence
  chemically treated genomic DNA (Homo sapiens) CpG-island No: 12894
atactataatttttaatcctattaaacattataaatcgaaaaatctccaccgatatacaaacaataaccaccgaactaacgttaatccccataatcgaaattaccgaatttaactaattctaattcgataataaaacctatataacgacataaaacgtcaacgacctaaacacctttaatacaattcaaaatacctttaacgttacgctataatcgttcatcgatataaaaaatacctccgttaccgcaaatataataaaaaacccgaaacgcaatatccctatcgccaccattaataaaatattaattaccgccgtttactatatactttctaccaccgcgattataaaaataatccctaataccgcactacgcgtttctacttcgccattcgataataccgcacgaataacgttaaataacaccgccgaaaccattatttccttctacgcaactacgaattacttaaattcactaaacgactaaacgttactaacgaatcaaacgacgaaaaccgctaccgataacg

SEQ ID NO: 12895 - DNA, 529 bp, Artificial Sequence
  chemically treated genomic DNA (Homo sapiens) CpG-island No: 12895
gtgttgtgatttttggttttgttaaatattgtgggtcggaaaatttttatcggtgtgtaggtagtggttatcgggttggcgttgatttttatagtcggaattgtcgaatttggttggttttggttcggtggtgaaatttatatggcggtatggaacgttagcggtttgggtatttttggtgtaatttaaagtatttttaacgttacgttgtggtcgtttatcggtgtggaaagtgttttcgttgtcgtaggtgtggtgaaaaattcgaaacgtaatgtttttatcgttattattggtggggtattgattgtcgtcgtttgttatgtattttttattatcgcgattatggggatgatttttaatgtcgtattgcgcgtttttgtttcgttattcggtgatgtcgtacggatggcgttgggtgatatcgtcggggttattgtttttttttgcgtagttgcgggttgtttaggtttattgggcggttggacgttgttggcgggttaaacggcgaaagtcgttgtcgatgacg

SEQ ID NO: 12896 - DNA, 529 bp, Artificial Sequence
  chemically treated genomic DNA (Homo sapiens) CpG-island No: 12896
cgtcatcgacaacgactttcgccgtttaacccgccaacaacgtccaaccgcccaataaacctaaacaacccgcaactacgcaaaaaaaaacaataaccccgacgatatcacccaacgccatccgtacgacatcaccgaataacgaaacaaaaacgcgcaatacgacattaaaaatcatccccataatcgcgataataaaaaatacataacaaacgacgacaatcaataccccaccaataataacgataaaaacattacgtttcgaatttttcaccacacctacgacaacgaaaacactttccacaccgataaacgaccacaacgtaacgttaaaaatactttaaattacaccaaaaatacccaaaccgctaacgttccataccgccatataaatttcaccaccgaaccaaaaccaaccaaattcgacaattccgactataaaaatcaacgccaacccgataaccactacctacacaccgataaaaattttccgacccacaatatttaacaaaaccaaaaatcacaacac

SEQ ID NO: 12897 - DNA, 615 bp, Artificial Sequence
  chemically treated genomic DNA (Homo sapiens) CpG-island No: 12897
aagtattgcgttgtttgtcgggcgttggttcgaagtcggcgtagcgtatggcgtttacgttgttttagcgcgatcgtagcggcggaatgcgtttggcgtaggcgtttattcgggcgatgtcggaaatcggttattgcgtcgattgtcgtatttttatcgaataggaagtttgtaatatttgttcgaattcgcgtcgttaggaaaacggttaaatttgcgtggtggagagttcggcggatatttacgttattgagtagacggggtagtttttaggtcgttattttgtgttgatggggtatttgttatcgttggacggtatcggttcggatgatatcgggtttgatcgtttggaatagcgtttggtagaggaaaaaattattgaagtgattttcgttattaattttacggttgaaggtgaagttatcgttaattatattgtcgagttttgcgcgtaatatgacgtggaagttagtcgaatcgtttatggcgtttcggttggcggcgagttggaaatggtcgacggtattacgttgttatatttttttgtcgggcgttataagattcgtttttaagtaaacgagagtaggattatttgttttcgtttgaaattatttt

SEQ ID NO: 12898 - DNA, 615 bp, Artificial Sequence
  chemically treated genomic DNA (Homo sapiens) CpG-island No: 12898
aaaataatttcaaacgaaaacaaataatcctactctcgtttacttaaaaacgaatcttataacgcccgacaaaaaaatataacaacgtaataccgtcgaccatttccaactcgccgccaaccgaaacgccataaacgattcgactaacttccacgtcatattacgcgcaaaactcgacaatataattaacgataacttcaccttcaaccgtaaaattaataacgaaaatcacttcaataattttttcctctaccaaacgctattccaaacgatcaaacccgatatcatccgaaccgataccgtccaacgataacaaataccccatcaacacaaaataacgacctaaaaactaccccgtctactcaataacgtaaatatccgccgaactctccaccacgcaaatttaaccgttttcctaacgacgcgaattcgaacaaatattacaaacttcctattcgataaaaatacgacaatcgacgcaataaccgatttccgacatcgcccgaataaacgcctacgccaaacgcattccgccgctacgatcgcgctaaaacaacgtaaacgccatacgctacgccgacttcgaaccaacgcccgacaaacaacgcaatactt

SEQ ID NO: 12899 - DNA, 615 bp, Artificial Sequence
  chemically treated genomic DNA (Homo sapiens) CpG-island No: 12899
agaataattttaagcgagagtaggtgattttgttttcgtttgtttaaaaacgaattttatgacgttcggtaagggagtgtgataacgtggtgtcgtcgattatttttagttcgtcgttaatcggaacgttatgagcgattcggttggtttttacgttatattgcgcgtaaagttcggtaatgtagttagcggtagttttatttttaatcgtggggttggtggcgaggattattttagtgatttttttttttgttagacgttgttttagacgattaagttcgatattattcggatcgatgtcgtttagcggtgatagatgttttattaatataaaataacgatttgaaaattgtttcgtttgtttaatggcgtagatgttcgtcggattttttattacgtagatttgatcgtttttttgacgacgcggattcgaatagatgttatagattttttgttcggtgaaagtgcggtaatcggcgtagtggtcgattttcgatatcgttcgggtgagcgtttgcgttagacgtatttcgtcgttacgatcgcgttgaagtagcgtgaacgttatacgttgcgtcgatttcgggttaacgttcggtagatagcgtagtgttt

SEQ ID NO: 12900 - DNA, 615 bp, Artificial Sequence
  chemically treated genomic DNA (Homo sapiens) CpG-island No: 12900
aaacactacgctatctaccgaacgttaacccgaaatcgacgcaacgtataacgttcacgctacttcaacgcgatcgtaacgacgaaatacgtctaacgcaaacgctcacccgaacgatatcgaaaatcgaccactacgccgattaccgcactttcaccgaacaaaaaatctataacatctattcgaatccgcgtcgtcaaaaaaacgatcaaatctacgtaataaaaaatccgacgaacatctacgccattaaacaaacgaaacaattttcaaatcgttattttatattaataaaacatctatcaccgctaaacgacatcgatccgaataatatcgaacttaatcgtctaaaacaacgtctaacaaaaaaaaaaatcactaaaataatcctcgccaccaaccccacgattaaaaataaaactaccgctaactacattaccgaactttacgcgcaatataacgtaaaaaccaaccgaatcgctcataacgttccgattaacgacgaactaaaaataatcgacgacaccacgttatcacactcccttaccgaacgtcataaaattcgtttttaaacaaacgaaaacaaaatcacctactctcgcttaaaattattct

SEQ ID NO: 12901 - DNA, 503 bp, Artificial Sequence
  chemically treated genomic DNA (Homo sapiens) CpG-island No: 12901
attcgtgttgttttagtaatagttggggacgttgcgcgataaaattgatcgtatttaggcgttggttggttggattgttgaataagattggcgttgacgttaattacgttattcgtgcgggtttgttgtttaagtgcgatttgatgattaatatggttttcgagtttatcgatatttagggcgttatggggatgtattatgcgcgttacgatggcgaagcggaagatgtcgcggtggcgttgaatgagtagtattagtcgcgttttgttggtgatgatttgtcgtttaatttagtagtttgtgcgttggcgattgttgataagatggatattttggcgggtattttcggtatcggttagtattcgaaaggcgataaagattcgtttgcgttgcgtcgtgtcgcgtttggcgtgttgcgaattatcgttgagaagaattttaattttgatttgtaaacgttgatcgaagaagcggtgcgtttgtatggcgataagttgattaat

SEQ ID NO: 12902 - DNA, 503 bp, Artificial Sequence
  chemically treated genomic DNA (Homo sapiens) CpG-island No: 12902
attaatcaacttatcgccatacaaacgcaccgcttcttcgatcaacgtttacaaatcaaaattaaaattcttctcaacgataattcgcaacacgccaaacgcgacacgacgcaacgcaaacgaatctttatcgcctttcgaatactaaccgataccgaaaatacccgccaaaatatccatcttatcaacaatcgccaacgcacaaactactaaattaaacgacaaatcatcaccaacaaaacgcgactaatactactcattcaacgccaccgcgacatcttccgcttcgccatcgtaacgcgcataatacatccccataacgccctaaatatcgataaactcgaaaaccatattaatcatcaaatcgcacttaaacaacaaacccgcacgaataacgtaattaacgtcaacgccaatcttattcaacaatccaaccaaccaacgcctaaatacgatcaattttatcgcgcaacgtccccaactattactaaaacaacacgaat

SEQ ID NO: 12903 - DNA, 503 bp, Artificial Sequence
  chemically treated genomic DNA (Homo sapiens) CpG-island No: 12903
attagttagtttatcgttatatagacgtatcgttttttcggttagcgtttgtagattaaggttgaggttttttttaacgataattcgtagtacgttaagcgcggtacgacgtagcgtaaacgggtttttgtcgtttttcggatgttgatcgatatcgaagatattcgttagggtatttattttgttagtaatcgttagcgtataagttattgggttggacggtaggttattattagtaaaacgcggttgatattgtttatttagcgttatcgcgatatttttcgtttcgttatcgtgacgcgtatagtgtatttttataacgttttgggtgtcggtgaattcgaagattatgttggttattaggtcgtatttagatagtagattcgtacgggtagcgtggttaacgttagcgttaattttgtttagtaatttagttagttagcgtttggatgcggttagttttgtcgcgtagcgtttttaattgttgttggaataatacgggt

SEQ ID NO: 12904 - DNA, 503 bp, Artificial Sequence
  chemically treated genomic DNA (Homo sapiens) CpG-island No: 12904
acccgtattattccaacaacaattaaaaacgctacgcgacaaaactaaccgcatccaaacgctaactaactaaattactaaacaaaattaacgctaacgttaaccacgctacccgtacgaatctactatctaaatacgacctaataaccaacataatcttcgaattcaccgacacccaaaacgttataaaaatacactatacgcgtcacgataacgaaacgaaaaatatcgcgataacgctaaataaacaatatcaaccgcgttttactaataataacctaccgtccaacccaataacttatacgctaacgattactaacaaaataaataccctaacgaatatcttcgatatcgatcaacatccgaaaaacgacaaaaacccgtttacgctacgtcgtaccgcgcttaacgtactacgaattatcgttaaaaaaaacctcaaccttaatctacaaacgctaaccgaaaaaacgatacgtctatataacgataaactaactaat

SEQ ID NO: 12905 - DNA, 545 bp, Artificial Sequence
  chemically treated genomic DNA (Homo sapiens) CpG-island No: 12905
atcgttagggacgtttttttgtttgcgttttcgttcgtttagtgttttgcgttgcgtattcgttcggggcgttggtttggttcggtcgcgcgattatttcgggcgaatgatacgtcgggtttttagacgggggtttcggcgtcgggcgggtagttttattatcgtaggcggcgtcgcgagatcgcggtttttgtagcggggtagtaggtgcggggtgggttaggcgtttcggggttttgttcgttgcgttttagagtcgcgttttaggtttttttcggcgtcggttcgggtaggacgcgatgttttggaggcgttaggggcgcggtcggtttagttcgagcgtggaggtcgcggcggacgtaggtttggttttgtttatttagcgtttttcgtattcgcggtttcgcgttcgtttcgcgttagttttagcgtttgcgtcgttttcgttcgagttcggtagcgcggttttaggtatttgcgagttttttcggggttattagaggtgttcgtgtagggatttgggtttgaggggcggtgtttgtagt

SEQ ID NO: 12906 - DNA, 545 bp, Artificial Sequence
  chemically treated genomic DNA (Homo sapiens) CpG-island No: 12906
actacaaacaccgcccctcaaacccaaatccctacacgaacacctctaataaccccgaaaaaactcgcaaatacctaaaaccgcgctaccgaactcgaacgaaaacgacgcaaacgctaaaactaacgcgaaacgaacgcgaaaccgcgaatacgaaaaacgctaaataaacaaaaccaaacctacgtccgccgcgacctccacgctcgaactaaaccgaccgcgcccctaacgcctccaaaacatcgcgtcctacccgaaccgacgccgaaaaaaacctaaaacgcgactctaaaacgcaacgaacaaaaccccgaaacgcctaacccaccccgcacctactaccccgctacaaaaaccgcgatctcgcgacgccgcctacgataataaaactacccgcccgacgccgaaacccccgtctaaaaacccgacgtatcattcgcccgaaataatcgcgcgaccgaaccaaaccaacgccccgaacgaatacgcaacgcaaaacactaaacgaacgaaaacgcaaacaaaaaaacgtccctaacgat

SEQ ID NO: 12907 - DNA, 545 bp, Artificial Sequence
  chemically treated genomic DNA (Homo sapiens) CpG-island No: 12907
gttgtaggtatcgttttttaagtttaggtttttgtacggatatttttgatgatttcgaagaggttcgtaggtgtttaaggtcgcgttgtcgggttcgagcggaggcggcgtaggcgttgaggttggcgcggagcgggcgcggggtcgcgggtgcggaaagcgttaggtaagtagggttaggtttgcgttcgtcgcggtttttacgttcgggttgggtcggtcgcgtttttgacgtttttagggtatcgcgttttgttcgggtcggcgtcgaggagagtttggggcgcggttttgaggcgtagcgggtagggtttcgggacgtttggtttatttcgtatttgttgtttcgttgtaaggatcgcggtttcgcggcgtcgtttgcggtggtggagttgttcgttcggcgtcggagttttcgtttggggattcggcgtgttattcgttcgaggtggtcgcgcggtcgggttaggttagcgtttcgggcgggtgcgtagcgtagggtattgggcgggcggaggcgtagatagggaggcgtttttggcggt

SEQ ID NO: 12908 - DNA, 545 bp, Artificial Sequence
  chemically treated genomic DNA (Homo sapiens) CpG-island No: 12908
accgccaaaaacgcctccctatctacgcctccgcccgcccaataccctacgctacgcacccgcccgaaacgctaacctaacccgaccgcgcgaccacctcgaacgaataacacgccgaatccccaaacgaaaactccgacgccgaacgaacaactccaccaccgcaaacgacgccgcgaaaccgcgatccttacaacgaaacaacaaatacgaaataaaccaaacgtcccgaaaccctacccgctacgcctcaaaaccgcgccccaaactctcctcgacgccgacccgaacaaaacgcgataccctaaaaacgtcaaaaacgcgaccgacccaacccgaacgtaaaaaccgcgacgaacgcaaacctaaccctacttacctaacgctttccgcacccgcgaccccgcgcccgctccgcgccaacctcaacgcctacgccgcctccgctcgaacccgacaacgcgaccttaaacacctacgaacctcttcgaaatcatcaaaaatatccgtacaaaaacctaaacttaaaaaacgatacctacaac

SEQ ID NO: 12909 - DNA, 1887 bp, Artificial Sequence
  chemically treated genomic DNA (Homo sapiens) CpG-island No: 12909
  unsure (3..4, 21, 37, 43..44, 51, 55, 60, 81, 89, 94, 100, 111, 121)
  unsure (141, 186, 215, 240, 268, 315, 324, 330, 339, 368, 380, 425)
  unsure (431, 459, 501, 519, 529, 536, 580, 602, 620, 649, 677, 698)
  unsure (734, 756, 772, 814, 885, 888..889, 891, 893, 976, 1011, 1014..1015)
  unsure (1017..1018, 1022, 1057, 1131, 1167, 1685)
ttnncgtttcgtagcggtcgnttttttacgtcgcgantcgtannttatttnttanggatnttattgtttgcgtcgacgttnattatttngcgangtcgtntagacgatttngacgcgatanttgttacgttcgtttttatngttttattcggttagtgcgatgatgtcggttcgattatattgttngtatagatgcgtattttagtcgacgagtnattacgatttttaagagtatattanggtcgacgtagtaattttattcgattantgtcgattcgtttagtagtatacgttcgcgtacgacgtattgcgcgngatatatanttcggnttcgtagantttcgtcgcgcggaattcgtacgttatantatcgtttcgancgatatcgcgcgtagcgtattttattacgcgatattattacgtanattgtnatcgtcgttcgtgcgatttcggcgtatnttcgtattcgagtcgtcgcgttttcgatattattcgttagtntagtcgttatagtatttngtcgtagtanagtcgtntatcgcgtaattagtacgcgtcgatatgttacgcgttgatatanacgcgcgtaattattcgcgcgnatagatatttttgacgantgttcgcgagagatacgcgacgcgtatancgtagtcgtatttgcgtcgtaattattnttcgtatatgatcgtagcgantcgttcgtataatttatatcggtatttatacgcganttatcgcgtatatgtgtcgatntttgcgtttacgttgnttcgcgtattcgcgcgatatgttacgtttatgtatcgtatantcgtcgcgttattcgatagcgtatcgttcgatatattttttcgttatgcgttacggattttttaatattanttnnnnantttatcgtatgcgttcgtaggtgttattagtgatcgtttagagtcgtcggtttttttatcgttagtttttcggagatttagancgacgttcgcgttattttcgtagttcgtcgcggtnatnntnnnagntatatcgtcgtgattcgttattcgtgatacgtcgntttatttaaattcgtttacgattttttttttagtcgcgcgatatagcgcgttatcgtcgttttatttgcgcgantattacgttatacgtacgtgtttttcgtatagcgtncggattattcgcgacgttcgcgtagtaattcgtttcgtttcgcggtattacgcgcgagtttcgcgcgattttttcgtatttttgcgcgatttttatatagttcgtcgcgattcgcgtacgacggttacgattttttagtattcgtagtaattttcgtcgtgtcgcgttttcgttatatttttatattcgtcgagtttcgcgcgattttcgtaatcgcgacgatcgattacgtagttttcggatcgcgttattcgttatacgcgttatattttcggaacgtttcgagattcgcgcgtttcgcgattcgtacgtatatcgtgtgttcgtatatattcgtattttttaagttgttttagtttcgtataacgtagatttttttacgttcgataatcgtcgttcgtttcgtttacgttcgatcgcgtaatcgcgcgattaatttagttgtttagatatttcgttatattttttgagatttcgcgtcgtacgcgatttcgttagtcgatcgcgtgatcgcggtnagcgtttcgaacgtcgagatattttcgcgcgttttcggttttcgtagttatcgatcgttcgtatcgttatcgattcgtcgttcggttacgattataatatttgcgatacgtcgtcgttatacgacgtttttttttcgttatttttatggttattattacgttcggttatcgcgattatattttgtattcggagcggtatgga

SEQ ID NO: 12910 - DNA, 1887 bp, Artificial Sequence
  chemically treated genomic DNA (Homo sapiens) CpG-island No: 12910
  unsure (203, 721, 757, 831, 866, 869..870, 873..874, 877, 912, 995)
  unsure (997..998, 1000, 1003, 1074, 1116, 1132, 1154, 1190, 1211)
  unsure (1239, 1268, 1286, 1308, 1352, 1359, 1369, 1387, 1429, 1457)
  unsure (1463, 1508, 1520, 1549, 1558, 1564, 1573, 1620, 1648, 1673)
  unsure (1702, 1747, 1767, 1777, 1788, 1794, 1799, 1807, 1828, 1833)
  unsure (1837, 1844..1845, 1851, 1867, 1884..)
tccataccgctccgaatacaaaatataatcgcgataaccgaacgtaataataaccataaaaataacgaaaaaaaaacgtcgtataacgacgacgtatcgcaaatattataatcgtaaccgaacgacgaatcgataacgatacgaacgatcgataactacgaaaaccgaaaacgcgcgaaaatatctcgacgttcgaaacgctnaccgcgatcacgcgatcgactaacgaaatcgcgtacgacgcgaaatctcaaaaaatataacgaaatatctaaacaactaaattaatcgcgcgattacgcgatcgaacgtaaacgaaacgaacgacgattatcgaacgtaaaaaaatctacgttatacgaaactaaaacaacttaaaaaatacgaatatatacgaacacacgatatacgtacgaatcgcgaaacgcgcgaatctcgaaacgttccgaaaatataacgcgtataacgaataacgcgatccgaaaactacgtaatcgatcgtcgcgattacgaaaatcgcgcgaaactcgacgaatataaaaatataacgaaaacgcgacacgacgaaaattactacgaatactaaaaaatcgtaaccgtcgtacgcgaatcgcgacgaactatataaaaatcgcgcaaaaatacgaaaaaatcgcgcgaaactcgcgcgtaataccgcgaaacgaaacgaattactacgcgaacgtcgcgaataatccgnacgctatacgaaaaacacgtacgtataacgtaatantcgcgcaaataaaacgacgataacgcgctatatcgcgcgactaaaaaaaaaatcgtaaacgaatttaaataaancgacgtatcacgaataacgaatcacgacgatatanctnnnannatnaccgcgacgaactacgaaaataacgcgaacgtcgntctaaatctccgaaaaactaacgataaaaaaaccgacgactctaaacgatcactaataacacctacgaacgcatacgataaantnnnnaantaatattaaaaaatccgtaacgcataacgaaaaaatatatcgaacgatacgctatcgaataacgcgacgantatacgatacataaacgtaacatatcgcgcgaatacgcgaancaacgtaaacgcaaanatcgacacatatacgcgataantcgcgtataaataccgatataaattatacgaacgantcgctacgatcatatacgaanaataattacgacgcaaatacgactacgntatacgcgtcgcgtatctctcgcgaacantcgtcaaaaatatctatncgcgcgaataattacgcgcgtntatatcaacgcgtaacatatcgacgcgtactaattacgcgatanacgactntactacgacnaaatactataacgactanactaacgaataatatcgaaaacgcgacgactcgaatacgaanatacgccgaaatcgcacgaacgacgatnacaatntacgtaataatatcgcgtaataaaatacgctacgcgcgatatcgntcgaaacgatantataacgtacgaattccgcgcgacgaaantctacgaanccgaantatatatcncgcgcaatacgtcgtacgcgaacgtatactactaaacgaatcgacantaatcgaataaaattactacgtcgaccntaatatactcttaaaaatcgtaatnactcgtcgactaaaatacgcatctatacnaacaatataatcgaaccgacatcatcgcactaaccgaataaaacnataaaaacgaacgtaacaantatcgcgtcnaaatcgtctanacgacntcgcnaaataatnaacgtcgacgcaaacaataanatccntaanaaataanntacgantcgcgacgtaaaaaancgaccgctacgaaacgnnaa

SEQ ID NO: 12911 - DNA, 1887 bp, Artificial Sequence
  chemically treated genomic DNA (Homo sapiens) CpG-island No: 12911
  unsure (203, 721, 757, 831, 866, 869..870, 873..874, 877, 912, 995)
  unsure (997..998, 1000, 1003, 1074, 1116, 1132, 1154, 1190, 1211)
  unsure (1239, 1268, 1286, 1308, 1352, 1359, 1369, 1387, 1429, 1457)
  unsure (1463, 1508, 1520, 1549, 1558, 1564, 1573, 1620, 1648, 1673)
  unsure (1702, 1747, 1767, 1777, 1788, 1794, 1799, 1807, 1828, 1833)
  unsure (1837, 1844..1845, 1851, 1867, 1884..)
tttatgtcgtttcgggtgtaagatgtgatcgcggtggtcgggcgtggtggtgattatgggaatgacggagaagaggcgtcgtgtggcggcggcgtgtcgtaggtgttgtaatcgtggtcgggcggcgggtcgatgacggtgcgaacggtcgatgattgcgagagtcgggagcgcgcggagatgtttcgacgttcggagcgttngtcgcgattacgcgatcgattggcgagatcgcgtgcgacgcgagattttaggggatatggcgaggtatttggataattgggttgatcgcgcgattgcgcgatcgggcgtgagcggggcgaacggcgattgtcgggcgtgggagagtttgcgttatgcgggattgggataatttggggaatgcggatatatgcggatatacggtgtacgtgcggatcgcgggacgcgcgggtttcggggcgtttcggagatgtggcgcgtatggcgggtggcgcggttcggggattacgtggtcgatcgtcgcgattacggagatcgcgcggaattcggcgaatatggagatatggcgagagcgcgatacggcggggattattgcggatgttggagggtcgtggtcgtcgtgcgcgaatcgcggcgaattgtgtgggaatcgcgtagaaatacggggagatcgcgcgagattcgcgcgtgatgtcgcgaaacgaggcggattgttgcgcggacgtcgcgggtgattcgngcgttgtgcgggagatacgtgcgtgtggcgtggtantcgcgtagatagggcggcgatagcgcgttgtatcgcgcgattgagaggggaatcgtggacgagtttgggtagancggcgtgttacgggtggcgagttacggcggtatanttnnnannatnatcgcgacgggttgcggaggtggcgcgggcgtcgntttggattttcgggggattggcggtggaaaggtcggcgattttgggcggttattggtggtatttgcggacgtatgcggtggantnnnnggntgatattgggagattcgtggcgtatagcggaggagtatatcgggcgatacgttgtcggatagcgcgacgantgtgcggtatatgggcgtgatatgtcgcgcggatgcgcgggntaacgtaggcgtagangtcggtatatgtgcgcgatgantcgcgtgtgagtgtcggtatggattatgcggacgantcgttgcgattatatgcggangatgattgcgacgtagatacggttacgntatacgcgtcgcgtatttttcgcgagtantcgttaggagtatttatncgcgcggatgattacgcgcgtntatattaacgcgtgatatgtcgacgcgtgttgattgcgcggtanacgattntgttgcggtngagtgttgtgacgattangttggcggatgatatcgggagcgcgacgattcgggtgcggangtacgtcgggatcgtacggacggcggtnatagtntgcgtggtgatatcgcgtggtgggatacgttgcgcgcgatgtcgntcggggcgatantgtgacgtgcggatttcgcgcggcgggantttacgagntcggantatatattncgcgtaatacgtcgtgcgcgggcgtatattattgggcggatcgatantagtcgggtgagattgttacgtcggttntgatatatttttggggatcgtgatnattcgtcggttaggatacgtatttgtgtnggtagtataatcgggtcggtattatcgtattgatcgggtagagtngtgagggcgggcgtaataantatcgcgttnggatcgtttgngcggtntcgtnggatgatnagcgtcggcgtaggtagtagnatttntggngggtganntacgantcgcgacgtagaggancgatcgttgcggggcgnnga

SEQ ID NO: 12912 - DNA, 1887 bp, Artificial Sequence
  chemically treated genomic DNA (Homo sapiens) CpG-island No: 12912
  unsure (3..4, 21, 37, 43..44, 51, 55, 60, 81, 89, 94, 100, 111, 121)
  unsure (141, 186, 215, 240, 268, 315, 324, 330, 339, 368, 380, 425)
  unsure (431, 459, 501, 519, 529, 536, 580, 602, 620, 649, 677, 698)
  unsure (734, 756, 772, 814, 885, 888..889, 891, 893, 976, 1011, 1014..1015)
  unsure (1017..1018, 1022, 1057, 1131, 1167, 1685)
tcnncgccccgcaacgatcgntcctctacgtcgcgantcgtanntcacccnccanaaatnctactacctacgccgacgctnatcatccnacganaccgcncaaacgatccnaacgcgatanttattacgcccgccctcacnactctacccgatcaatacgataataccgacccgattatactaccnacacaaatacgtatcctaaccgacgaatnatcacgatccccaaaaatatatcanaaccgacgtaacaatctcacccgactantatcgatccgcccaataatatacgcccgcgcacgacgtattacgcgnaatatatantccganctcgtaaantcccgccgcgcgaaatccgcacgtcacantatcgccccgancgacatcgcgcgcaacgtatcccaccacgcgatatcaccacgcanactatnaccgccgtccgtacgatcccgacgtacntccgcacccgaatcgtcgcgctcccgatatcatccgccaacntaatcgtcacaacactcnaccgcaacanaatcgtntaccgcgcaatcaacacgcgtcgacatatcacgcgttaatatanacgcgcgtaatcatccgcgcgnataaatactcctaacgantactcgcgaaaaatacgcgacgcgtatancgtaaccgtatctacgtcgcaatcatcntccgcatataatcgcaacgantcgtccgcataatccataccgacactcacacgcgantcatcgcgcacatataccgacntctacgcctacgttancccgcgcatccgcgcgacatatcacgcccatataccgcacantcgtcgcgctatccgacaacgtatcgcccgatatactcctccgctatacgccacgaatctcccaatatcanccnnnnantccaccgcatacgtccgcaaataccaccaataaccgcccaaaatcgccgacctttccaccgccaatcccccgaaaatccaaancgacgcccgcgccacctccgcaacccgtcgcgatnatnntnnnaantataccgccgtaactcgccacccgtaacacgccgntctacccaaactcgtccacgattcccctctcaatcgcgcgatacaacgcgctatcgccgccctatctacgcgantaccacgccacacgcacgtatctcccgcacaacgcncgaatcacccgcgacgtccgcgcaacaatccgcctcgtttcgcgacatcacgcgcgaatctcgcgcgatctccccgtatttctacgcgattcccacacaattcgccgcgattcgcgcacgacgaccacgaccctccaacatccgcaataatccccgccgtatcgcgctctcgccatatctccatattcgccgaattccgcgcgatctccgtaatcgcgacgatcgaccacgtaatccccgaaccgcgccacccgccatacgcgccacatctccgaaacgccccgaaacccgcgcgtcccgcgatccgcacgtacaccgtatatccgcatatatccgcattccccaaattatcccaatcccgcataacgcaaactctcccacgcccgacaatcgccgttcgccccgctcacgcccgatcgcgcaatcgcgcgatcaacccaattatccaaatacctcgccatatcccctaaaatctcgcgtcgcacgcgatctcgccaatcgatcgcgtaatcgcgacnaacgctccgaacgtcgaaacatctccgcgcgctcccgactctcgcaatcatcgaccgttcgcaccgtcatcgacccgccgcccgaccacgattacaacacctacgacacgccgccgccacacgacgcctcttctccgtcattcccataatcaccaccacgcccgaccaccgcgatcacatcttacacccgaaacgacataaa

SEQ ID NO: 12913 - DNA, 764 bp, Artificial Sequence
  chemically treated genomic DNA (Homo sapiens) CpG-island No: 12913
ggttcgcggttggtaacgttcgttgggtttcgggtggggttttagggaggtcggggcggatcgcggcgttcggatcgtcgaattttgtttagttttaggcgagcgcgtgtgtagcgggagtcgtttttttcggcggtagttcggtttggttgttttttttcgcgggcgcgcgggtttcggagtcggcggtatcggggaagtttttttcgggcgcggtttttcggagaggaataaaggcggcgttttggtcgcgttgttatcgtcgcgttcgtaaggttagcgcgttcgtttagagttcgagacgtcggttcgtgtttcgttatttatttgtagttttcgttgcgcgtttcgtcggttcggttttgatttatttttcgtttcggagcgagacgtaaataattttcgttttttgcgtttattggtttcggcggcgaggggcgggtatatttgtttcggagtttcgggagagggggcgggagtcgggtgataaagttattgtcgagaggttttaggaattgttagttttaatttaacgtttttaatggttagtttttaagcggttggagataaagttcgcgcgtatattggattcgggtgggaggtggtatcgtaggtcgcgttgatcggaaagtaggttcgtgttatcgtttgcgtcggaatttgcgggatcggatcgagagttttttcggtaagttgattggttgggatagtaggattaggtttgttaagaagagttacgggcgggtacgtattgtttattggtt

SEQ ID NO: 12914 - DNA, 764 bp, Artificial Sequence
  chemically treated genomic DNA (Homo sapiens) CpG-island No: 12914
aaccaataaacaatacgtacccgcccgtaactcttcttaacaaacctaatcctactatcccaaccaatcaacttaccgaaaaaactctcgatccgatcccgcaaattccgacgcaaacgataacacgaacctactttccgatcaacgcgacctacgataccacctcccacccgaatccaatatacgcgcgaactttatctccaaccgcttaaaaactaaccattaaaaacgttaaattaaaactaacaattcctaaaacctctcgacaataactttatcacccgactcccgccccctctcccgaaactccgaaacaaatatacccgcccctcgccgccgaaaccaataaacgcaaaaaacgaaaattatttacgtctcgctccgaaacgaaaaataaatcaaaaccgaaccgacgaaacgcgcaacgaaaactacaaataaataacgaaacacgaaccgacgtctcgaactctaaacgaacgcgctaaccttacgaacgcgacgataacaacgcgaccaaaacgccgcctttattcctctccgaaaaaccgcgcccgaaaaaaacttccccgataccgccgactccgaaacccgcgcgcccgcgaaaaaaaacaaccaaaccgaactaccgccgaaaaaaacgactcccgctacacacgcgctcgcctaaaactaaacaaaattcgacgatccgaacgccgcgatccgccccgacctccctaaaaccccacccgaaacccaacgaacgttaccaaccgcgaacc

SEQ ID NO: 12915 - DNA, 764 bp, Artificial Sequence
  chemically treated genomic DNA (Homo sapiens) CpG-island No: 12915
aattaatgggtagtgcgtgttcgttcgtggttttttttgataggtttaattttgttgttttagttaattagtttgtcggaggagttttcgattcggtttcgtaggtttcggcgtagacgatgatacggatttatttttcggttaacgcggtttgcggtattattttttattcgggtttaatgtgcgcgcgagttttgtttttaatcgtttgggaattgattattaggaacgttggattaggattgatagtttttgaaatttttcggtaatagttttgttattcgattttcgttttttttttcgaagtttcgagataggtgtgttcgtttttcgtcgtcggagttaatgggcgtagggggcggggattgtttacgtttcgtttcggggcggaaagtgggttagggtcgggtcggcggagcgcgtagcgggggttgtaggtgagtggcggggtacgggtcgacgtttcgggttttgggcgggcgcgttgattttgcgggcgcggcggtagtagcgcggttagggcgtcgtttttgttttttttcggagggtcgcgttcgagagaggttttttcggtgtcgtcgatttcggaattcgcgcgttcgcgggagggaatagttaggtcgggttgtcgtcggggagggcggttttcgttgtatacgcgttcgtttggggttgggtagggttcggcggttcgggcgtcgcgattcgtttcggtttttttggaattttattcggggtttagcgggcgttgttagtcgcgagtt

SEQ ID NO: 12916 - DNA, 764 bp, Artificial Sequence
  chemically treated genomic DNA (Homo sapiens) CpG-island No: 12916
aactcgcgactaacaacgcccgctaaaccccgaataaaattccaaaaaaaccgaaacgaatcgcgacgcccgaaccgccgaaccctacccaaccccaaacgaacgcgtatacaacgaaaaccgccctccccgacgacaacccgacctaactattccctcccgcgaacgcgcgaattccgaaatcgacgacaccgaaaaaacctctctcgaacgcgaccctccgaaaaaaaacaaaaacgacgccctaaccgcgctactaccgccgcgcccgcaaaatcaacgcgcccgcccaaaacccgaaacgtcgacccgtaccccgccactcacctacaacccccgctacgcgctccgccgacccgaccctaacccactttccgccccgaaacgaaacgtaaacaatccccgccccctacgcccattaactccgacgacgaaaaacgaacacacctatctcgaaacttcgaaaaaaaaaacgaaaatcgaataacaaaactattaccgaaaaatttcaaaaactatcaatcctaatccaacgttcctaataatcaattcccaaacgattaaaaacaaaactcgcgcgcacattaaacccgaataaaaaataataccgcaaaccgcgttaaccgaaaaataaatccgtatcatcgtctacgccgaaacctacgaaaccgaatcgaaaactcctccgacaaactaattaactaaaacaacaaaattaaacctatcaaaaaaaaccacgaacgaacacgcactacccattaatt

SEQ ID NO: 12917 - DNA, 634 bp, Artificial Sequence
  chemically treated genomic DNA (Homo sapiens) CpG-island No: 12917
tcgattgggttacgttgggagagtgttttcgttttagttaatgggcggtagttatagagcgttttgttcgtagagtcgggcgcggggtttttataaaaggcgttcgaagcgggggcgcgcgttttagagacgtgaattgtcgttgtagagattgcgggcggttgagacgtcgtttgtttggtatttatgagcgtagcggagtttcgatatcgtcgtcgtcgttatggagttcgagatcgaattcgagttcgttacgtttttggtgaagagttttaattagcgttatcgcgatttggagttgagtggcgatcgcggttggagtgtgggttattttaaggtttatttgagtcgcgtttatttcgagcgttcggtgagagcggtttcgatttttcgtttttatgttgtggtttttcgttttttgttggggatgttacgttcggttgttttgttttgtggttttttttcgttgacggttgcgatcgttcggtcgggttattttttttaaggttgtggttttttttttttttgtttcgtcgacgcgggcgttttttttgttgtttaatagtcgttaattattattaatttgattttgggcgagttattttatttttttaagttttgttttttttttagt

SEQ ID NO: 12918 - DNA, 634 bp, Artificial Sequence
  chemically treated genomic DNA (Homo sapiens) CpG-island No: 12918
actaaaaaaaaaacaaaacttaaaaaaataaaataactcgcccaaaatcaaattaataataattaacgactattaaacaacaaaaaaaacgcccgcgtcgacgaaacaaaaaaaaaaaaaaccacaaccttaaaaaaaataacccgaccgaacgatcgcaaccgtcaacgaaaaaaaaccacaaaacaaaacaaccgaacgtaacatccccaacaaaaaacgaaaaaccacaacataaaaacgaaaaatcgaaaccgctctcaccgaacgctcgaaataaacgcgactcaaataaaccttaaaataacccacactccaaccgcgatcgccactcaactccaaatcgcgataacgctaattaaaactcttcaccaaaaacgtaacgaactcgaattcgatctcgaactccataacgacgacgacgatatcgaaactccgctacgctcataaataccaaacaaacgacgtctcaaccgcccgcaatctctacaacgacaattcacgtctctaaaacgcgcgcccccgcttcgaacgccttttataaaaaccccgcgcccgactctacgaacaaaacgctctataactaccgcccattaactaaaacgaaaacactctcccaacgtaacccaatcga

SEQ ID NO: 12919 - DNA, 634 bp, Artificial Sequence
  chemically treated genomic DNA (Homo sapiens) CpG-island No: 12919
gttggggaagaaatagggtttggaggggtgaaatgattcgtttaaggttaggttgatgataattgacggttattgggtaatagaaggggcgttcgcgtcggcggggtaaggaaaggggagattatagttttggggaaggtgattcggtcgagcgatcgtagtcgttagcgggaggaggttataggatagggtagtcgaacgtggtatttttagtagagggcggggggttatagtataggggcgggaagtcggggtcgtttttatcggacgttcggggtagacgcggtttaggtgggttttgaggtggtttatattttagtcgcggtcgttatttagttttaagtcgcggtggcgttggttggggttttttattaggagcgtgacgggttcgggttcggtttcggattttatggcggcggcggcggtgtcggggtttcgttgcgtttataggtgttaggtaggcggcgttttagtcgttcgtaatttttgtaacgatagtttacgtttttggggcgcgcgttttcgtttcgggcgttttttatagaagtttcgcgttcggttttgcggatagaacgttttgtggttgtcgtttattggttgaggcggaggtatttttttaacgtggtttaatcgg

SEQ ID NO: 12920 - DNA, 634 bp, Artificial Sequence
  chemically treated genomic DNA (Homo sapiens) CpG-island No: 12920
ccgattaaaccacgttaaaaaaatacctccgcctcaaccaataaacgacaaccacaaaacgttctatccgcaaaaccgaacgcgaaacttctataaaaaacgcccgaaacgaaaacgcgcgccccaaaaacgtaaactatcgttacaaaaattacgaacgactaaaacgccgcctacctaacacctataaacgcaacgaaaccccgacaccgccgccgccgccataaaatccgaaaccgaacccgaacccgtcacgctcctaataaaaaaccccaaccaacgccaccgcgacttaaaactaaataacgaccgcgactaaaatataaaccacctcaaaacccacctaaaccgcgtctaccccgaacgtccgataaaaacgaccccgacttcccgcccctatactataaccccccgccctctactaaaaataccacgttcgactaccctatcctataacctcctcccgctaacgactacgatcgctcgaccgaatcaccttccccaaaactataatctcccctttccttaccccgccgacgcgaacgccccttctattacccaataaccgtcaattatcatcaacctaaccttaaacgaatcatttcacccctccaaaccctatttcttccccaac

SEQ ID NO: 12921 - DNA, 999 bp, Artificial Sequence
  chemically treated genomic DNA (Homo sapiens) CpG-island No: 12921
gggcgttattttaaaagaaattttttcggttaattagaaggttaggaacggttcggtttttttttttgagaagtaataaaaaggcgtttttgttaaggttttcggtcggattcggagtataggaagtacgtaagttatttataagcgaggggattaagaggcggtgtagagtgaatgaaagttttagagtcgaagtgaattggcggagttttaggcggttttgtttaatgcgaggtgcgttgttgtttagttaatattttcggtagagttaaagtatttttttttgcgagtgtatggcgatttgcgttcgataaggcgtagcgttaagaagaatttcggtttagtaggcgcgcgtttcggatagcgtcgggtttagggtatggatagagttagttgggcgcgtagagagcgtagcggattcgggcggtaggagcgttgagttagataaaggtttcggagttgcgtttgttttcgggagtcgggttttaggcgttgggcgtcgaggttgcggaatttcgtcgggggtagtttcggtcggttttttttttcgtcggttggtttcgagttttcggatttgttttgttcgttttttttcgggtttgggaatttgtcgaggcgatttaggcggtttcggcggggatcgggagttcgaggttcgcggcgcgtttgtcgggttaggagttagggagcgtcgtaagtttttaaggcgcgtgcgaggattcggcgtgtagtgtttcgagttgggttgggcgtcgagagtatgggtagcgattcgagcgcgttcggacggtcgggttggacgggtagttttttcggcgatcgggaggaggcggcgcggtcgcgattgttgtcgttgtttttggtgtttttgggttgtttgggttttggcgtagcggtcgaagacgcggaggtttatgtcgaggtaagattttcgttttgttttttggttgcgggttgggggtttggagggagaggcgttacgttcgtaggttgggattt

SEQ ID NO: 12922 - DNA, 999 bp, Artificial Sequence
  chemically treated genomic DNA (Homo sapiens) CpG-island No: 12922
aaatcccaacctacgaacgtaacgcctctccctccaaacccccaacccgcaaccaaaaaacaaaacgaaaatcttacctcgacataaacctccgcgtcttcgaccgctacgccaaaacccaaacaacccaaaaacaccaaaaacaacgacaacaatcgcgaccgcgccgcctcctcccgatcgccgaaaaaactacccgtccaacccgaccgtccgaacgcgctcgaatcgctacccatactctcgacgcccaacccaactcgaaacactacacgccgaatcctcgcacgcgccttaaaaacttacgacgctccctaactcctaacccgacaaacgcgccgcgaacctcgaactcccgatccccgccgaaaccgcctaaatcgcctcgacaaattcccaaacccgaaaaaaaacgaacaaaacaaatccgaaaactcgaaaccaaccgacgaaaaaaaaaaccgaccgaaactacccccgacgaaattccgcaacctcgacgcccaacgcctaaaacccgactcccgaaaacaaacgcaactccgaaacctttatctaactcaacgctcctaccgcccgaatccgctacgctctctacgcgcccaactaactctatccataccctaaacccgacgctatccgaaacgcgcgcctactaaaccgaaattcttcttaacgctacgccttatcgaacgcaaatcgccatacactcgcaaaaaaaaatactttaactctaccgaaaatattaactaaacaacaacgcacctcgcattaaacaaaaccgcctaaaactccgccaattcacttcgactctaaaactttcattcactctacaccgcctcttaatcccctcgcttataaataacttacgtacttcctatactccgaatccgaccgaaaaccttaacaaaaacgcctttttattacttctcaaaaaaaaaaaccgaaccgttcctaaccttctaattaaccgaaaaaatttcttttaaaataacgccc

SEQ ID NO: 12923 - DNA, 999 bp, Artificial Sequence
  chemically treated genomic DNA (Homo sapiens) CpG-island No: 12923
aagttttagtttgcggacgtggcgtttttttttttaagtttttagttcgtagttaaagggtagggcgggggttttatttcggtatggattttcgcgttttcggtcgttacgttaaggtttaggtagtttagaagtattaggagtagcggtagtagtcgcggtcgcgtcgttttttttcggtcgtcgaggaggttgttcgtttagttcggtcgttcgggcgcgttcgggtcgttgtttatgttttcggcgtttagtttagttcggaatattgtacgtcggattttcgtacgcgttttggaaatttgcgacgttttttggtttttggttcggtaggcgcgtcgcggatttcgggttttcggttttcgtcggagtcgtttaggtcgtttcggtaaatttttaagttcgaggagaagcgggtagggtaggttcgggagttcggaattagtcggcgggaaagggggtcgatcggagttgttttcggcgaggtttcgtagtttcggcgtttagcgtttggggttcggttttcgagagtaagcgtaatttcggagtttttgtttggtttagcgtttttgtcgttcgggttcgttgcgttttttgcgcgtttagttgattttgtttatgttttgggttcggcgttgttcggagcgcgcgtttattggatcgggattttttttgacgttgcgttttgtcgggcgtaggtcgttatgtattcgtaggaagaagtattttgattttgtcgagagtattagttagatagtaacgtatttcgtattgagtagggtcgtttaaggtttcgttaatttatttcggttttggagtttttatttattttatatcgttttttggttttttcgtttataaatggtttacgtgttttttatgtttcggattcggtcgggaattttggtaggggcgtttttttattgttttttaagagggggaatcgggtcgtttttggttttttggttggtcgggggggttttttttgaggtaacgttt

SEQ ID NO: 12924 - DNA, 999 bp, Artificial Sequence
  chemically treated genomic DNA (Homo sapiens) CpG-island No: 12924
aaacgttacctcaaaaaaaacccccccgaccaaccaaaaaaccaaaaacgacccgattccccctcttaaaaaacaataaaaaaacgcccctaccaaaattcccgaccgaatccgaaacataaaaaacacgtaaaccatttataaacgaaaaaaccaaaaaacgatataaaataaataaaaactccaaaaccgaaataaattaacgaaaccttaaacgaccctactcaatacgaaatacgttactatctaactaatactctcgacaaaatcaaaatacttcttcctacgaatacataacgacctacgcccgacaaaacgcaacgtcaaaaaaaatcccgatccaataaacgcgcgctccgaacaacgccgaacccaaaacataaacaaaatcaactaaacgcgcaaaaaacgcaacgaacccgaacgacaaaaacgctaaaccaaacaaaaactccgaaattacgcttactctcgaaaaccgaaccccaaacgctaaacgccgaaactacgaaacctcgccgaaaacaactccgatcgaccccctttcccgccgactaattccgaactcccgaacctaccctacccgcttctcctcgaacttaaaaatttaccgaaacgacctaaacgactccgacgaaaaccgaaaacccgaaatccgcgacgcgcctaccgaaccaaaaaccaaaaaacgtcgcaaatttccaaaacgcgtacgaaaatccgacgtacaatattccgaactaaactaaacgccgaaaacataaacaacgacccgaacgcgcccgaacgaccgaactaaacgaacaacctcctcgacgaccgaaaaaaaacgacgcgaccgcgactactaccgctactcctaatacttctaaactacctaaaccttaacgtaacgaccgaaaacgcgaaaatccataccgaaataaaacccccgccctaccctttaactacgaactaaaaacttaaaaaaaaaaacgccacgtccgcaaactaaaactt

SEQ ID NO: 12925 - DNA, 543 bp, Artificial Sequence
  chemically treated genomic DNA (Homo sapiens) CpG-island No: 12925
  unsure (338)
gtcgcggcggcggtattgtgttgcgcgttgtgtttttgtaataaggttacgtttaggaagcgtttttcgtattatatatatttgaattgttgttcgcgggcgtgtacgttttggtgtttgttgagatgttttcgttgtttgaaggttttgtcgtagttggggtatttgtagggtttttcgtttgtgtgtattcgtcggtgtcgttgtaggtttgacgcgtatttgaagcgtttttcgtagtttgggtatttgagtggtttttcgcgggtcggatcgtagcggtgttgtacgaattcggaagaggagaagaagcggcgttcgtaaagcgtgtagcgtangggtttttttgtcgtcgtatagtgggttagttggtgtttttgtagggtcgacgcgcgtttgtaggttttgttgtatatagggtatttgaagggtcgttcggtcgcgtcgggtaggtatttgtgtcgtagtagttcggtagattggttaaagtttttttggtatacggggtatttgaagagagtttcgagggtgtgtacgtgttgg

SEQ ID NO: 12926 - DNA, 543 bp, Artificial Sequence
  chemically treated genomic DNA (Homo sapiens) CpG-island No: 12926
  unsure (206)
ccaacacgtacacaccctcgaaactctcttcaaataccccgtataccaaaaaaactttaaccaatctaccgaactactacgacacaaatacctacccgacgcgaccgaacgacccttcaaataccctatatacaacaaaacctacaaacgcgcgtcgaccctacaaaaacaccaactaacccactatacgacgacaaaaaaacccntacgctacacgctttacgaacgccgcttcttctcctcttccgaattcgtacaacaccgctacgatccgacccgcgaaaaaccactcaaatacccaaactacgaaaaacgcttcaaatacgcgtcaaacctacaacgacaccgacgaatacacacaaacgaaaaaccctacaaataccccaactacgacaaaaccttcaaacaacgaaaacatctcaacaaacaccaaaacgtacacgcccgcgaacaacaattcaaatatatataatacgaaaaacgcttcctaaacgtaaccttattacaaaaacacaacgcgcaacacaataccgccgccgcgac

SEQ ID NO: 12927 - DNA, 543 bp, Artificial Sequence
  chemically treated genomic DNA (Homo sapiens) CpG-island No: 12927
  unsure (206)
ttagtacgtgtatattttcgagattttttttaagtgtttcgtgtgttagaaaggttttgattaatttgtcgagttgttgcggtataagtgtttgttcggcgcggtcgagcggttttttaagtgttttgtgtgtaataaggtttataagcgcgcgtcggttttgtagaagtattagttggtttattgtgcggcggtagagaagtttntgcgttgtacgttttgcgaacgtcgtttttttttttttttcgagttcgtgtagtatcgttgcgattcggttcgcgagaagttatttaagtgtttagattgcgagaaacgttttaagtacgcgttagatttgtagcggtatcggcgggtatatataggcgagaagttttataagtgttttaattgcgataaggtttttaagtagcgggagtattttaataagtattagggcgtgtacgttcgcgagtagtagtttaagtgtgtatggtgcggggagcgttttttagacgtggttttgttgtaggagtatagcgcgtagtatagtgtcgtcgtcgcggt

SEQ ID NO: 12928 - DNA, 543 bp, Artificial Sequence
  chemically treated genomic DNA (Homo sapiens) CpG-island No: 12928
  unsure (338)
accgcgacgacgacactatactacgcgctatactcctacaacaaaaccacgtctaaaaaacgctccccgcaccatacacacttaaactactactcgcgaacgtacacgccctaatacttattaaaatactcccgctacttaaaaaccttatcgcaattaaaacacttataaaacttctcgcctatatatacccgccgataccgctacaaatctaacgcgtacttaaaacgtttctcgcaatctaaacacttaaataacttctcgcgaaccgaatcgcaacgatactacacgaactcgaaaaaaaaaaaaaaacgacgttcgcaaaacgtacaacgcanaaacttctctaccgccgcacaataaaccaactaatacttctacaaaaccgacgcgcgcttataaaccttattacacacaaaacacttaaaaaaccgctcgaccgcgccgaacaaacacttataccgcaacaactcgacaaattaatcaaaacctttctaacacacgaaacacttaaaaaaaatctcgaaaatatacacgtactaa

SEQ ID NO: 12929 - DNA, 513 bp, Artificial Sequence
  chemically treated genomic DNA (Homo sapiens) CpG-island No: 12929
gaggttttatagcgtttcgacgtttttattttggcgtttaagttttagtttggattttgggggcggaatcggcgcgatttggtcgattttattttcgagacgttttagcgttttattttagagtagttgtagtagttgtatttcggtaatcgttcgcggtaagtttttcgagtttttcgcgttattttcgcggttttattcggtggtttaggtttttatcgggatattttcgcggtttaaaagtttatagttaatcggagcgggcgatttcggcgtgagatttcgtttttggaggatttggtagttaattagagtgaagattcgcgaaattagcggttgagtaagaatgggcggtattagtttagtatttcgttttacgcggtagtcgcggttaattagagtcgtgttcgtcgaggcgtttcgcgttgggattattcgcgcgtttatgtgagtgttaatatttagacgtacgcgtattggcgtatcgagtttaaatttttttttatatatttt

SEQ ID NO: 12930 - DNA, 513 bp, Artificial Sequence
  chemically treated genomic DNA (Homo sapiens) CpG-island No: 12930
aaaatatataaaaaaaaatttaaactcgatacgccaatacgcgtacgtctaaatattaacactcacataaacgcgcgaataatcccaacgcgaaacgcctcgacgaacacgactctaattaaccgcgactaccgcgtaaaacgaaatactaaactaataccgcccattcttactcaaccgctaatttcgcgaatcttcactctaattaactaccaaatcctccaaaaacgaaatctcacgccgaaatcgcccgctccgattaactataaacttttaaaccgcgaaaatatcccgataaaaacctaaaccaccgaataaaaccgcgaaaataacgcgaaaaactcgaaaaacttaccgcgaacgattaccgaaatacaactactacaactactctaaaataaaacgctaaaacgtctcgaaaataaaatcgaccaaatcgcgccgattccgcccccaaaatccaaactaaaacttaaacgccaaaataaaaacgtcgaaacgctataaaacctc

SEQ ID NO: 12931 - DNA, 513 bp, Artificial Sequence
  chemically treated genomic DNA (Homo sapiens) CpG-island No: 12931
gggatatgtgagaggagatttaagttcgatgcgttagtgcgcgtgcgtttgagtgttggtatttatataggcgcgcgagtagttttagcgcgaggcgtttcggcgggtacggttttgattggtcgcgattgtcgcgtggggcgggatgttgggttggtatcgtttatttttgtttagtcgttggtttcgcgggtttttattttggttggttgttagattttttaggggcggggttttacgtcgaagtcgttcgtttcgattggttgtgggtttttgagtcgcggaagtgtttcggtaagggtttgggttatcgagtgaggtcgcggggatgacgcggggggttcgggaggtttgtcgcgagcggttgtcgagatgtagttgttgtagttgttttgagataaggcgttgaagcgtttcggaggtgaagtcggttaaatcgcgtcggtttcgtttttaggatttaaattgggatttaagcgttagagtgagagcgtcgaaacgttgtgaggtttt

SEQ ID NO: 12932 - DNA, 513 bp, Artificial Sequence
  chemically treated genomic DNA (Homo sapiens) CpG-island No: 12932
aaaacctcacaacgtttcgacgctctcactctaacgcttaaatcccaatttaaatcctaaaaacgaaaccgacgcgatttaaccgacttcacctccgaaacgcttcaacgccttatctcaaaacaactacaacaactacatctcgacaaccgctcgcgacaaacctcccgaaccccccgcgtcatccccgcgacctcactcgataacccaaacccttaccgaaacacttccgcgactcaaaaacccacaaccaatcgaaacgaacgacttcgacgtaaaaccccgcccctaaaaaatctaacaaccaaccaaaataaaaacccgcgaaaccaacgactaaacaaaaataaacgataccaacccaacatcccgccccacgcgacaatcgcgaccaatcaaaaccgtacccgccgaaacgcctcgcgctaaaactactcgcgcgcctatataaataccaacactcaaacgcacgcgcactaacgcatcgaacttaaatctcctctcacatatccc

SEQ ID NO: 12933 - DNA, 764 bp, Artificial Sequence
  chemically treated genomic DNA (Homo sapiens) CpG-island No: 12933
gtcgggttgaatttatcgcgcggatcggtagggggagcggcggcgaagatagcgttagatagcgggttttagagatcgtagcgcgcggcgtggcgtagggtttcgtcggttattgatttaaggcgcggcggcgcggagttcgagaggcgttagggattgggcggtagcgcggtttcggagtttggttcggatattttcgcgattcgtggtaggagttcggatttaaataaaggcgggcggcgaataaaaggcggcggcggagcggagtgttcgggttgcgagttgaggattgggattcgcgcgtagtttttcgcggtttgtttgttttggagcggagggggagttttagttttttgcggtttcgagaagtttttttttgcgattttcgcgaggagacgagtttgcgtagcgtggtggtcgtcgtttttcgattttttgcgtattttttttcgcgtcggcggtttagtttagtttcgttcggtcggtcgaggtgagtgtacggtcgcggggcgttattcgggtttggtttcggggttgggggatgtattgttaggaggagggggaagtttttcgcgtcgttcgtatttcgatttgtttggcgtcgcgcgcgaagttttttcgttttttagttagttcgggatgcgggtttcggagtttttcgggaaagacggttaggggtggatagaatttaagtttgttttttacgatcgggttttagtttcgtattattttttcgcgggattgtagtatttttggtcggttaa

SEQ ID NO: 12934 - DNA, 764 bp, Artificial Sequence
  chemically treated genomic DNA (Homo sapiens) CpG-island No: 12934
ttaaccgaccaaaaatactacaatcccgcgaaaaaataatacgaaactaaaacccgatcgtaaaaaacaaacttaaattctatccacccctaaccgtctttcccgaaaaactccgaaacccgcatcccgaactaactaaaaaacgaaaaaacttcgcgcgcgacgccaaacaaatcgaaatacgaacgacgcgaaaaacttccccctcctcctaacaatacatcccccaaccccgaaaccaaacccgaataacgccccgcgaccgtacactcacctcgaccgaccgaacgaaactaaactaaaccgccgacgcgaaaaaaaatacgcaaaaaatcgaaaaacgacgaccaccacgctacgcaaactcgtctcctcgcgaaaatcgcaaaaaaaaacttctcgaaaccgcaaaaaactaaaactccccctccgctccaaaacaaacaaaccgcgaaaaactacgcgcgaatcccaatcctcaactcgcaacccgaacactccgctccgccgccgccttttattcgccgcccgcctttatttaaatccgaactcctaccacgaatcgcgaaaatatccgaaccaaactccgaaaccgcgctaccgcccaatccctaacgcctctcgaactccgcgccgccgcgccttaaatcaataaccgacgaaaccctacgccacgccgcgcgctacgatctctaaaacccgctatctaacgctatcttcgccgccgctccccctaccgatccgcgcgataaattcaacccgac

SEQ ID NO: 12935 - DNA, 764 bp, Artificial Sequence
  chemically treated genomic DNA (Homo sapiens) CpG-island No: 12935
ttggtcgattaagaatgttgtagtttcgcggggagatggtgcggagttggggttcggtcgtagagggtaagtttgggttttgtttatttttgatcgtttttttcggggggtttcgaggttcgtatttcgggttggttggagagcgagagaatttcgcgcgcggcgttaagtaggtcggggtgcggacggcgcggaggatttttttttttttttagtaatgtattttttagtttcgagattaagttcggatggcgtttcgcggtcgtgtatttatttcggtcggtcgaacggggttaggttgagtcgtcggcgcgggagagagtgcgtagagggtcggggggcggcggttattacgttgcgtagattcgttttttcgcggaagtcgtagggggaagtttttcggagtcgtaggaggttggggtttttttttcgttttagggtaagtagatcgcgggaagttgcgcgcgaattttagtttttagttcgtaattcgagtatttcgtttcgtcgtcgttttttattcgtcgttcgtttttgtttgggttcgggtttttattacgggtcgcgggggtgttcgagttaggtttcggagtcgcgttgtcgtttaatttttggcgtttttcgggtttcgcgtcgtcgcgttttgaattagtggtcggcgagattttgcgttacgtcgcgcgttgcggtttttgggattcgttgtttggcgttgttttcgtcgtcgttttttttgtcgattcgcgcggtgggtttagttcggt

SEQ ID NO: 12936 - DNA, 764 bp, Artificial Sequence
  chemically treated genomic DNA (Homo sapiens) CpG-island No: 12936
accgaactaaacccaccgcgcgaatcgacaaaaaaaacgacgacgaaaacaacgccaaacaacgaatcccaaaaaccgcaacgcgcgacgtaacgcaaaatctcgccgaccactaattcaaaacgcgacgacgcgaaacccgaaaaacgccaaaaattaaacgacaacgcgactccgaaacctaactcgaacacccccgcgacccgtaataaaaacccgaacccaaacaaaaacgaacgacgaataaaaaacgacgacgaaacgaaatactcgaattacgaactaaaaactaaaattcgcgcgcaacttcccgcgatctacttaccctaaaacgaaaaaaaaaccccaacctcctacgactccgaaaaacttccccctacgacttccgcgaaaaaacgaatctacgcaacgtaataaccgccgccccccgaccctctacgcactctctcccgcgccgacgactcaacctaaccccgttcgaccgaccgaaataaatacacgaccgcgaaacgccatccgaacttaatctcgaaactaaaaaatacattactaaaaaaaaaaaaaaatcctccgcgccgtccgcaccccgacctacttaacgccgcgcgcgaaattctctcgctctccaaccaacccgaaatacgaacctcgaaaccccccgaaaaaaacgatcaaaaataaacaaaacccaaacttaccctctacgaccgaaccccaactccgcaccatctccccgcgaaactacaacattcttaatcgaccaa

SEQ ID NO: 12937 - DNA, 526 bp, Artificial Sequence
  chemically treated genomic DNA (Homo sapiens) CpG-island No: 12937
tagcgattcgggggaatgggagttggggttcgggtttcggggaggcgattggttgaaggatagaggtttgggaggggtagagcgatggggatatggacggcggttcgttgtagggatttcggggtattgggagtcgggggtcggggatagttttggttttttgtttttttttgtcgtttgttgttttagtttttttcgttttgcggcgaggtgggtagggtgagttttcgggacgaatggtagttttggaagaggtttggggttaaggataggttagggcggcgggagaggcggatcggtggcgtggttggatttgggcgcgttgtcggattttttatattattagttgtaggtaggcgtttgcgttttcgttggagttgtggtcgttttggttgttttggatgatttgtgttaggtagtcggtcgcgagatttttgagggagcgtttgtaggggaaatttaggtagtgcgggaagagtacgttcgtgtttattacggtgttgtggatgagttttagggttagtag

SEQ ID NO: 12938 - DNA, 526 bp, Artificial Sequence
  chemically treated genomic DNA (Homo sapiens) CpG-island No: 12938
ctactaaccctaaaactcatccacaacaccgtaataaacacgaacgtactcttcccgcactacctaaatttcccctacaaacgctccctcaaaaatctcgcgaccgactacctaacacaaatcatccaaaacaaccaaaacgaccacaactccaacgaaaacgcaaacgcctacctacaactaataatataaaaaatccgacaacgcgcccaaatccaaccacgccaccgatccgcctctcccgccgccctaacctatccttaaccccaaacctcttccaaaactaccattcgtcccgaaaactcaccctacccacctcgccgcaaaacgaaaaaaactaaaacaacaaacgacaaaaaaaaacaaaaaaccaaaactatccccgacccccgactcccaataccccgaaatccctacaacgaaccgccgtccatatccccatcgctctacccctcccaaacctctatccttcaaccaatcgcctccccgaaacccgaaccccaactcccattcccccgaatcgcta

SEQ ID NO: 12939 - DNA, 526 bp, Artificial Sequence
  chemically treated genomic DNA (Homo sapiens) CpG-island No: 12939
ttgttggttttgaagtttatttatagtatcgtggtggatacgggcgtgtttttttcgtattatttgggttttttttataagcgtttttttaggaatttcgcggtcgattatttggtatagattatttagaatagttaggacggttataattttagcgaggacgtaaacgtttgtttgtagttggtgatgtggaaggttcgatagcgcgtttagatttagttacgttatcggttcgtttttttcgtcgttttggtttgtttttagttttaggttttttttaaaattgttattcgtttcgagagtttattttgtttatttcgtcgtaaagcgaaagaaattggagtagtaggcggtaggagagggtaaaaagttaagattattttcgattttcgatttttagtgtttcggagtttttgtagcgggtcgtcgtttatgtttttatcgttttgttttttttagatttttgttttttaattaatcgttttttcgaggttcgagttttaatttttattttttcgggtcgttg

SEQ ID NO: 12940 - DNA, 526 bp, Artificial Sequence
  chemically treated genomic DNA (Homo sapiens) CpG-island No: 12940
caacgacccgaaaaaataaaaattaaaactcgaacctcgaaaaaacgattaattaaaaaacaaaaatctaaaaaaaacaaaacgataaaaacataaacgacgacccgctacaaaaactccgaaacactaaaaatcgaaaatcgaaaataatcttaactttttaccctctcctaccgcctactactccaatttctttcgctttacgacgaaataaacaaaataaactctcgaaacgaataacaattttaaaaaaaacctaaaactaaaaacaaaccaaaacgacgaaaaaaacgaaccgataacgtaactaaatctaaacgcgctatcgaaccttccacatcaccaactacaaacaaacgtttacgtcctcgctaaaattataaccgtcctaactattctaaataatctataccaaataatcgaccgcgaaattcctaaaaaaacgcttataaaaaaaacccaaataatacgaaaaaaacacgcccgtatccaccacgatactataaataaacttcaaaaccaacaa

SEQ ID NO: 12941 - DNA, 1026 bp, Artificial Sequence
  chemically treated genomic DNA (Homo sapiens) CpG-island No: 12941
gacgtttagtattttttgatagtagttgagatatttggcggttagttcgtgtttcgggtttttttggaggaaggtgtaggtcgtcgttatcgttttttttagtcggttagtttggtcggggggtagggggtgggggagcgggttagtaagatcggagttcgcggtttcgagcgtacggcgggtttcgtgttttgggtgaagataacgttttttcgatcgatttgtggggagttacgacgtttagttcgagataggttttcgggtgggggcgggtttttatttttgaatagcgcgtagtgtaggtattggtagggtaggcggttttggaagttacgtagtagttgtcgcggcgggtagggtatttggaaggcgggtagcgttcgtttgtagcgtcgtaggtaggcggttcgttttaggacgcggtcgaagagtcgtagttcgtaggtttattcgtttgcgcggtcgtcgtcgggatcgggtttggtcgcgggcgcggggtcgttgtagttggcgtggtagaaggtttcgttgtcgcgtaggagtcggtgtagtcgtagcgtcgtttttaggtagcgcgcgttttcgcgttagttttttttttcgtattgttttagagcgtgttcgtacgtcgcggttagcggtattaggttttcgggcgggaagtttcggaagttgtatttttcgtattgcgtttcggcgttgtttagtagtaattatagtagtttttacgttattcgagttatgttcgtcgcgtcgtcggtttttcggagttgagttggttgtttcgcggacggaaggggatagggtcgggtttcgggcgggcggcgcgttcgttgggttttagcgtcgggtacgaggcggtaaggtggggcggggtttgggttacgacgttttttttttttttttagagggttcgatagtgtcgttaagtttttttcgtcggttcgggtttttgttttgggggtgttttttaggtagagaatgcgtcggggagcgtttttcgttagagatgggaagtttaggaag

SEQ ID NO: 12942 - DNA, 1026 bp, Artificial Sequence
  chemically treated genomic DNA (Homo sapiens) CpG-island No: 12942
cttcctaaacttcccatctctaacgaaaaacgctccccgacgcattctctacctaaaaaacacccccaaaacaaaaacccgaaccgacgaaaaaaacttaacgacactatcgaaccctctaaaaaaaaaaaaaaaacgtcgtaacccaaaccccgccccaccttaccgcctcgtacccgacgctaaaacccaacgaacgcgccgcccgcccgaaacccgaccctatccccttccgtccgcgaaacaaccaactcaactccgaaaaaccgacgacgcgacgaacataactcgaataacgtaaaaactactataattactactaaacaacgccgaaacgcaatacgaaaaatacaacttccgaaacttcccgcccgaaaacctaataccgctaaccgcgacgtacgaacacgctctaaaacaatacgaaaaaaaaaactaacgcgaaaacgcgcgctacctaaaaacgacgctacgactacaccgactcctacgcgacaacgaaaccttctaccacgccaactacaacgaccccgcgcccgcgaccaaacccgatcccgacgacgaccgcgcaaacgaataaacctacgaactacgactcttcgaccgcgtcctaaaacgaaccgcctacctacgacgctacaaacgaacgctacccgccttccaaataccctacccgccgcgacaactactacgtaacttccaaaaccgcctaccctaccaatacctacactacgcgctattcaaaaataaaaacccgcccccacccgaaaacctatctcgaactaaacgtcgtaactccccacaaatcgatcgaaaaaacgttatcttcacccaaaacacgaaacccgccgtacgctcgaaaccgcgaactccgatcttactaacccgctcccccaccccctaccccccgaccaaactaaccgactaaaaaaaacgataacgacgacctacaccttcctccaaaaaaacccgaaacacgaactaaccgccaaatatctcaactactatcaaaaaatactaaacgtc

SEQ ID NO: 12943 - DNA, 1026 bp, Artificial Sequence
  chemically treated genomic DNA (Homo sapiens) CpG-island No: 12943
ttttttgggttttttatttttggcgggaagcgtttttcgacgtattttttatttaggggatatttttaaggtaggagttcgggtcgacggagaggatttaacgatattatcggattttttgggaaaagaggggagacgtcgtgatttaggtttcgttttattttgtcgtttcgtgttcggcgttaagatttagcgggcgcgtcgttcgttcggggttcggttttgttttttttcgttcgcggggtagttagtttagtttcggagagtcggcggcgcggcgggtatggttcgggtggcgtgggggttgttgtggttgttgttgggtagcgtcggggcgtagtacgagaagtatagttttcggggtttttcgttcgaggatttgatgtcgttggtcgcggcgtacgggtacgttttggagtagtacgagggagagagttggcgcgagagcgcgcgttatttggaggcggcgttgcggttgtatcggtttttgcgcgatagcgaggttttttgttacgttaattgtagcggtttcgcgttcgcggttaagttcgatttcgacggcggtcgcgtagacgagtgggtttgcgagttgcggtttttcggtcgcgttttggagcgagtcgtttgtttgcggcgttgtaagcggacgttgttcgttttttaggtgttttattcgtcgcggtagttgttgcgtgatttttagagtcgtttgttttattagtatttgtattacgcgttgtttaagggtgggagttcgtttttattcggggatttgtttcgggttgggcgtcgtggttttttatagatcggtcgaaggagcgttatttttatttaaggtacgaagttcgtcgtgcgttcggggtcgcgagtttcggttttgttgattcgtttttttattttttatttttcgattaggttaatcggttggagaaggcggtggcggcggtttatatttttttttagaggaattcgaagtacgagttgatcgttaagtattttaattattattaggggatgttggacgtt

SEQ ID NO: 12944 - DNA, 1026 bp, Artificial Sequence
  chemically treated genomic DNA (Homo sapiens) CpG-island No: 12944
aacgtccaacatcccctaataataattaaaatacttaacgatcaactcgtacttcgaattcctctaaaaaaaaatataaaccgccgccaccgccttctccaaccgattaacctaatcgaaaaataaaaaataaaaaaacgaatcaacaaaaccgaaactcgcgaccccgaacgcacgacgaacttcgtaccttaaataaaaataacgctccttcgaccgatctataaaaaaccacgacgcccaacccgaaacaaatccccgaataaaaacgaactcccacccttaaacaacgcgtaatacaaatactaataaaacaaacgactctaaaaatcacgcaacaactaccgcgacgaataaaacacctaaaaaacgaacaacgtccgcttacaacgccgcaaacaaacgactcgctccaaaacgcgaccgaaaaaccgcaactcgcaaacccactcgtctacgcgaccgccgtcgaaatcgaacttaaccgcgaacgcgaaaccgctacaattaacgtaacaaaaaacctcgctatcgcgcaaaaaccgatacaaccgcaacgccgcctccaaataacgcgcgctctcgcgccaactctctccctcgtactactccaaaacgtacccgtacgccgcgaccaacgacatcaaatcctcgaacgaaaaaccccgaaaactatacttctcgtactacgccccgacgctacccaacaacaaccacaacaacccccacgccacccgaaccatacccgccgcgccgccgactctccgaaactaaactaactaccccgcgaacgaaaaaaaacaaaaccgaaccccgaacgaacgacgcgcccgctaaatcttaacgccgaacacgaaacgacaaaataaaacgaaacctaaatcacgacgtctcccctcttttcccaaaaaatccgataatatcgttaaatcctctccgtcgacccgaactcctaccttaaaaatatcccctaaataaaaaatacgtcgaaaaacgcttcccgccaaaaataaaaaacccaaaaaa

SEQ ID NO: 12945 - DNA, 607 bp, Artificial Sequence
  chemically treated genomic DNA (Homo sapiens) CpG-island No: 12945
tttttcgttagtttagggcgagagttagggacgcggcgtcgggcgagttgcgcgggtttcgggggaggcgcgatttcggaggtatttgttcggattttttttcgttttgtttagatttttggttcgcggagtttcgaggcgcgttcggttcgaatcgcgcgatttttaagtcgtcgcgtttaggattttagcgcgttttttgtcgtcggtgtagggtggcgttcgatggtatcggtttttatttgtttagggacggttgggatcggtttcgcggtcgttcgttatttttttgtttttaacgatatttgcgttttcgatagttcgtatttgagtatggggtttgatcgggtcgggtcggggtcgggtcggggtgggagtcggcgcggatagcgaattgagttcggcgtggtcgggcggcggttgtttcggattttggttaaggtagtaatttagtaatcgaataaaaggcgaagagatttgatagttaagttacgtttttcgttatttcgaagtttcgtttttgggggagacgtttattttttggtgcgagtttattggttatttcgtttgattgtttcgtggaggggcggagtttcgtttttagttt

SEQ ID NO: 12946 - DNA, 607 bp, Artificial Sequence
  chemically treated genomic DNA (Homo sapiens) CpG-island No: 12946
aaactaaaaacgaaactccgcccctccacgaaacaatcaaacgaaataaccaataaactcgcaccaaaaaataaacgtctcccccaaaaacgaaacttcgaaataacgaaaaacgtaacttaactatcaaatctcttcgccttttattcgattactaaattactaccttaaccaaaatccgaaacaaccgccgcccgaccacgccgaactcaattcgctatccgcgccgactcccaccccgacccgaccccgacccgacccgatcaaaccccatactcaaatacgaactatcgaaaacgcaaatatcgttaaaaacaaaaaaataacgaacgaccgcgaaaccgatcccaaccgtccctaaacaaataaaaaccgataccatcgaacgccaccctacaccgacgacaaaaaacgcgctaaaatcctaaacgcgacgacttaaaaatcgcgcgattcgaaccgaacgcgcctcgaaactccgcgaaccaaaaatctaaacaaaacgaaaaaaaatccgaacaaatacctccgaaatcgcgcctcccccgaaacccgcgcaactcgcccgacgccgcgtccctaactctcgccctaaactaacgaaaaa

SEQ ID NO: 12947 - DNA, 607 bp, Artificial Sequence
  chemically treated genomic DNA (Homo sapiens) CpG-island No: 12947
ggattggaggcgaggtttcgtttttttacgggatagttaggcgagatagttagtgagttcgtattagagggtgggcgttttttttaggggcggagtttcgaggtggcgaggggcgtggtttggttgttaggttttttcgttttttgttcggttattgagttgttgttttggttagagttcggagtagtcgtcgttcgattacgtcgagtttagttcgttgttcgcgtcggtttttatttcggttcgatttcgattcggttcggttaggttttatatttaggtgcgggttatcgggggcgtaggtatcgttggggatagaggggtggcgagcggtcgcggggtcggttttagtcgtttttgggtaggtgagggtcggtgttatcgagcgttattttgtatcggcggtagggggcgcgttggggttttgggcgcggcgatttgggggtcgcgcggttcgggtcgagcgcgtttcggagtttcgcgaattagagatttgagtaaggcggggagggattcggataggtgttttcggggtcgcgtttttttcggggttcgcgtagttcgttcgacgtcgcgtttttgattttcgttttgggttggcggggga

SEQ ID NO: 12948 - DNA, 607 bp, Artificial Sequence
  chemically treated genomic DNA (Homo sapiens) CpG-island No: 12948
tcccccgccaacccaaaacgaaaatcaaaaacgcgacgtcgaacgaactacgcgaaccccgaaaaaaacgcgaccccgaaaacacctatccgaatccctccccgccttactcaaatctctaattcgcgaaactccgaaacgcgctcgacccgaaccgcgcgacccccaaatcgccgcgcccaaaaccccaacgcgccccctaccgccgatacaaaataacgctcgataacaccgaccctcacctacccaaaaacgactaaaaccgaccccgcgaccgctcgccacccctctatccccaacgatacctacgcccccgataacccgcacctaaatataaaacctaaccgaaccgaatcgaaatcgaaccgaaataaaaaccgacgcgaacaacgaactaaactcgacgtaatcgaacgacgactactccgaactctaaccaaaacaacaactcaataaccgaacaaaaaacgaaaaaacctaacaaccaaaccacgcccctcgccacctcgaaactccgcccctaaaaaaaacgcccaccctctaatacgaactcactaactatctcgcctaactatcccgtaaaaaaacgaaacctcgcctccaatcc

SEQ ID NO: 12949 - DNA, 860 bp, Artificial Sequence
  chemically treated genomic DNA (Homo sapiens) CpG-island No: 12949
  unsure (697)
tttcgcgttcgtcgtttttcgcgttttcgtttttttcgtttatttgtcggttaattttagtatttcgtgtacgttgttcgtgttgacgcggatgcgttcggtgtatatgtattcgattacggtttttattgtgtcgggttcgggtttcggttcggagttttatttgcgtatttttattcgtttcgagcgggattcggaaaattggttcgagagtaggggcgtgaagtattcggtggcggtagttagtatcgagcggtgggttcggaattcgcggtttttagtttcgtcgaagtatagggtaatgtcgtagaagaggttttggcgtcgttgttcgttttgtcgttaggatagttttgagtagtgagagttgtattcgaaattttcggtttttgggttcggatcgttttcgttcgtttttattgtagagattttcggtttaggttcgaagtttatcgtgtcgttgtttcggatttcggcggttagttttgtcgagtcggcggcggttcgtttttatgttttttatttttagtatttgaagagatgtagtcgcggtcgtcgtcgtcgtcgtcgttattgtcgtagtcgttattttgacgtcgttgcgttcggtttttatagtttcggaacgatgcggttgttggtacgatatagagggattttgggattaaatagtgcgcgcggggcggggttaggtcgntcgtcggtcgtatatgcgtcgtttcgtttttagtagcgtcgtttcgtttttagtagcgtcgtttcgtttttagtagcgtcgtttcgtttttagtagttttgtttgttttggtgaggttcgttagtaatagtcgtttagtttagaagatttcgttttaggttta

SEQ ID NO: 12950 - DNA, 860 bp, Artificial Sequence
  chemically treated genomic DNA (Homo sapiens) CpG-island No: 12950
  unsure (164)
taaacctaaaacgaaatcttctaaactaaacgactattactaacgaacctcaccaaaacaaacaaaactactaaaaacgaaacgacgctactaaaaacgaaacgacgctactaaaaacgaaacgacgctactaaaaacgaaacgacgcatatacgaccgacgancgacctaaccccgccccgcgcgcactatttaatcccaaaatccctctatatcgtaccaacaaccgcatcgttccgaaactataaaaaccgaacgcaacgacgtcaaaataacgactacgacaataacgacgacgacgacgacgaccgcgactacatctcttcaaatactaaaaataaaaaacataaaaacgaaccgccgccgactcgacaaaactaaccgccgaaatccgaaacaacgacacgataaacttcgaacctaaaccgaaaatctctacaataaaaacgaacgaaaacgatccgaacccaaaaaccgaaaatttcgaatacaactctcactactcaaaactatcctaacgacaaaacgaacaacgacgccaaaacctcttctacgacattaccctatacttcgacgaaactaaaaaccgcgaattccgaacccaccgctcgatactaactaccgccaccgaatacttcacgcccctactctcgaaccaattttccgaatcccgctcgaaacgaataaaaatacgcaaataaaactccgaaccgaaacccgaacccgacacaataaaaaccgtaatcgaatacatatacaccgaacgcatccgcgtcaacacgaacaacgtacacgaaatactaaaattaaccgacaaataaacgaaaaaaacgaaaacgcgaaaaacgacgaacgcgaaa

SEQ ID NO: 12951 - DNA, 860 bp, Artificial Sequence
  chemically treated genomic DNA (Homo sapiens) CpG-island No: 12951
  unsure (164)
taggtttggggcgaagttttttggattgggcgattgttattgacggattttattaaggtaggtagagttgttggaggcgaggcggcgttgttggaggcgaggcggcgttgttggaggcgaggcggcgttgttggaggcgaggcggcgtatgtgcggtcggcggncgatttggtttcgtttcgcgcgtattatttaattttagaatttttttgtgtcgtattaatagtcgtatcgtttcgaggttgtggaggtcgggcgtagcggcgttaagatggcggttgcggtagtggcggcggcggcggcggcggtcgcggttgtatttttttaggtattggagatggagagtatggaaacgggtcgtcgtcggttcggtaggattggtcgtcgaggttcgaggtagcggtacggtggatttcgggtttgggtcggggatttttgtaatggaggcgagcgggggcgattcgggtttagaagtcgaggatttcgagtgtagtttttattgtttagagttgttttggcggtagaacgagtagcggcgttagggttttttttgcgatattattttgtgtttcggcggggttggaggtcgcgagtttcgggtttatcgttcggtattggttgtcgttatcgagtattttacgtttttgttttcgggttagtttttcgagtttcgttcgggacgggtggagatgcgtaagtggagtttcgagtcggggttcgaattcgatatagtggaagtcgtaatcgagtatatgtatatcgggcgtattcgcgttagtacgggtagcgtgtacgaggtgttggagttggtcgataggtaggcgagggaggcgggagcgcggagggcggcgggcgcggag

SEQ ID NO: 12952 - DNA, 860 bp, Artificial Sequence
  chemically treated genomic DNA (Homo sapiens) CpG-island No: 12952
  unsure (697)
ctccgcgcccgccgccctccgcgctcccgcctccctcgcctacctatcgaccaactccaacacctcgtacacgctacccgtactaacgcgaatacgcccgatatacatatactcgattacgacttccactatatcgaattcgaaccccgactcgaaactccacttacgcatctccacccgtcccgaacgaaactcgaaaaactaacccgaaaacaaaaacgtaaaatactcgataacgacaaccaataccgaacgataaacccgaaactcgcgacctccaaccccgccgaaacacaaaataatatcgcaaaaaaaaccctaacgccgctactcgttctaccgccaaaacaactctaaacaataaaaactacactcgaaatcctcgacttctaaacccgaatcgcccccgctcgcctccattacaaaaatccccgacccaaacccgaaatccaccgtaccgctacctcgaacctcgacgaccaatcctaccgaaccgacgacgacccgtttccatactctccatctccaatacctaaaaaaatacaaccgcgaccgccgccgccgccgccgccactaccgcaaccgccatcttaacgccgctacgcccgacctccacaacctcgaaacgatacgactattaatacgacacaaaaaaattctaaaattaaataatacgcgcgaaacgaaaccaaatcgnccgccgaccgcacatacgccgcctcgcctccaacaacgccgcctcgcctccaacaacgccgcctcgcctccaacaacgccgcctcgcctccaacaactctacctaccttaataaaatccgtcaataacaatcgcccaatccaaaaaacttcgccccaaaccta

SEQ ID NO: 12953 - DNA, 698 bp, Artificial Sequence
  chemically treated genomic DNA (Homo sapiens) CpG-island No: 12953
gggagcgaggagtcggaggaagttcggtttgcgttttgcgggtagtaggatacgattttttcggcgcgttttcgtcggcgtcgtagcgggcgcgcgggcgatagggtgggcgtggatcgatgggggtatcgtttttggagaagggcgggcgtcgttgtttcgggggcgggacgcgtcgaggagtggggcgcgagtcgtcggttttgattagtgcggcggagttgcggcggtggagttgttcggtcgggagttcggcggcgagacggagaggcggcggaggtgttcgcgcgtagggtttggtgggcggtcgcgaggttcgggagaggcgaatcggagcgcgggatcgcggtcgtttcgattagagtcgggagatcgtagtattcgtagtcgttcgcgagcgcgtcgaagatagcgcgtaggcgagagcgcgcgggcgggggcgcgtaggttttgttcgtttttttcgtttttattttttttcgtttttttttttttttatttttttttcgtttttcgcgttttcgtatcgggcgtttattttgttttttttttgcgggagcgttgttcgtgttggcggtcgtagcgggtcgggtcggttcggcgggtcgggggatggcgttgttggatttggttttggagggaatggtcgttttcgggttcgttttttttttggtgttgtggttgatgtattttatggt

SEQ ID NO: 12954 - DNA, 698 bp, Artificial Sequence
  chemically treated genomic DNA (Homo sapiens) CpG-island No: 12954
accataaaatacatcaaccacaacaccaaaaaaaaaacgaacccgaaaacgaccattccctccaaaaccaaatccaacaacgccatcccccgacccgccgaaccgacccgacccgctacgaccgccaacacgaacaacgctcccgcaaaaaaaaaacaaaataaacgcccgatacgaaaacgcgaaaaacgaaaaaaaaataaaaaaaaaaaaaaacgaaaaaaaataaaaacgaaaaaaacgaacaaaacctacgcgcccccgcccgcgcgctctcgcctacgcgctatcttcgacgcgctcgcgaacgactacgaatactacgatctcccgactctaatcgaaacgaccgcgatcccgcgctccgattcgcctctcccgaacctcgcgaccgcccaccaaaccctacgcgcgaacacctccgccgcctctccgtctcgccgccgaactcccgaccgaacaactccaccgccgcaactccgccgcactaatcaaaaccgacgactcgcgccccactcctcgacgcgtcccgcccccgaaacaacgacgcccgcccttctccaaaaacgatacccccatcgatccacgcccaccctatcgcccgcgcgcccgctacgacgccgacgaaaacgcgccgaaaaaatcgtatcctactacccgcaaaacgcaaaccgaacttcctccgactcctcgctccc

SEQ ID NO: 12955 - DNA, 698 bp, Artificial Sequence
  chemically treated genomic DNA (Homo sapiens) CpG-island No: 12955
gttatgaaatgtattagttatagtattaagaagaggacgaattcgaagacggttattttttttaaggttaggtttagtagcgttatttttcggttcgtcggatcggttcggttcgttgcggtcgttaatacggataacgttttcgtaggaggaggatagggtgggcgttcggtgcgggggcgcgggaggcgagaggaaggtggggagaggaaagggcggaggggggtggggacggaaggggcgggtagggtttgcgcgttttcgttcgcgcgttttcgtttgcgcgttgttttcggcgcgttcgcgggcggttgcgggtgttgcggtttttcggttttggtcggggcgatcgcggtttcgcgtttcggttcgtttttttcgagtttcgcggtcgtttattagattttgcgcgcgggtattttcgtcgttttttcgtttcgtcgtcgggttttcggtcgagtagttttatcgtcgtagtttcgtcgtattaattaaaatcggcggttcgcgttttatttttcggcgcgtttcgttttcggaataacggcgttcgtttttttttaggggcggtgtttttatcggtttacgtttattttgtcgttcgcgcgttcgttgcggcgtcggcgagagcgcgtcggggagatcgtgttttgttgttcgtaggacgtaggtcgggtttttttcggtttttcgttttt

SEQ ID NO: 12956 - DNA, 698 bp, Artificial Sequence
  chemically treated genomic DNA (Homo sapiens) CpG-island No: 12956
aaaaacgaaaaaccgaaaaaaacccgacctacgtcctacgaacaacaaaacacgatctccccgacgcgctctcgccgacgccgcaacgaacgcgcgaacgacaaaataaacgtaaaccgataaaaacaccgcccctaaaaaaaaacgaacgccgttattccgaaaacgaaacgcgccgaaaaataaaacgcgaaccgccgattttaattaatacgacgaaactacgacgataaaactactcgaccgaaaacccgacgacgaaacgaaaaaacgacgaaaatacccgcgcgcaaaatctaataaacgaccgcgaaactcgaaaaaaacgaaccgaaacgcgaaaccgcgatcgccccgaccaaaaccgaaaaaccgcaacacccgcaaccgcccgcgaacgcgccgaaaacaacgcgcaaacgaaaacgcgcgaacgaaaacgcgcaaaccctacccgccccttccgtccccacccccctccgccctttcctctccccaccttcctctcgcctcccgcgcccccgcaccgaacgcccaccctatcctcctcctacgaaaacgttatccgtattaacgaccgcaacgaaccgaaccgatccgacgaaccgaaaaataacgctactaaacctaaccttaaaaaaaataaccgtcttcgaattcgtcctcttcttaatactataactaatacatttcataac

SEQ ID NO: 12957 - DNA, 716 bp, Artificial Sequence
  chemically treated genomic DNA (Homo sapiens) CpG-island No: 12957
  unsure (75, 485)
atttttcgttttcgcggtttcgtttcgggatcgggggtcgtttcgtcggtttttttcggtttgggaattacgggnttttgtttttaggaatttgtgggcgtttttttcgtttttgattttgataaagttatagttacgcgggaaaacgtttttcgggttttgagtttaatttgggcgtcgcgggggttttaagggttttgcgcggttcggtattacggttttattttcgttttttatcgtcgttagttcgggtcgagttcgcggcgtatttaggttttagcggttttatcgtttattagggttgggcgaggttttttttcggcgtttttattatttcgcgatttcgggcgtcggaggggatgagtttcggatgttcggcgtttaggtttcgaggatgttttgaagcgttggggtataggcgtcgtttcggattgtgttttttttattttttttttagttttgtcgcggtttgagcgcggcgtatntgcgtattgcgttttcggtcgttgttttggtgattcgagcggacgtggttacgttttcggttagggtttgggaaagggtggggggagggggtagttcgggagtaagtgggggtcggcgggggagaaggagagaatcgggagaggggaatttgcgggggtcgggtgggggttcgggggtagaggaggatttagggaatcggggatagggtagggttaggggttcggtggggg

SEQ ID NO: 12958 - DNA, 716 bp, Artificial Sequence
  chemically treated genomic DNA (Homo sapiens) CpG-island No: 12958
  unsure (232, 642)
cccccaccgaacccctaaccctaccctatccccgattccctaaatcctcctctacccccgaacccccacccgacccccgcaaattcccctctcccgattctctccttctcccccgccgacccccacttactcccgaactaccccctccccccaccctttcccaaaccctaaccgaaaacgtaaccacgtccgctcgaatcaccaaaacaacgaccgaaaacgcaatacgcanatacgccgcgctcaaaccgcgacaaaactaaaaaaaaaataaaaaaaacacaatccgaaacgacgcctataccccaacgcttcaaaacatcctcgaaacctaaacgccgaacatccgaaactcatcccctccgacgcccgaaatcgcgaaataataaaaacgccgaaaaaaaacctcgcccaaccctaataaacgataaaaccgctaaaacctaaatacgccgcgaactcgacccgaactaacgacgataaaaaacgaaaataaaaccgtaataccgaaccgcgcaaaacccttaaaacccccgcgacgcccaaattaaactcaaaacccgaaaaacgttttcccgcgtaactataactttatcaaaatcaaaaacgaaaaaaacgcccacaaattcctaaaaacaaaancccgtaattcccaaaccgaaaaaaaccgacgaaacgacccccgatcccgaaacgaaaccgcgaaaacgaaaaat

SEQ ID NO: 12959 - DNA, 716 bp, Artificial Sequence
  chemically treated genomic DNA (Homo sapiens) CpG-island No: 12959
  unsure (232, 642)
tttttatcgagtttttagttttgttttattttcggttttttgggtttttttttattttcgagtttttattcggttttcgtaaatttttttttttcggttttttttttttttttcgtcgatttttatttattttcggattgttttttttttttatttttttttagattttggtcggaggcgtggttacgttcgttcgggttattaaggtaacggtcgggagcgtagtgcgtanatgcgtcgcgtttaggtcgcggtaaggttgaggggaaggtggagggggtatagttcggagcggcgtttgtattttagcgttttagggtattttcggggtttgggcgtcgggtattcgggatttatttttttcggcgttcgaggtcgcgggatagtgggggcgtcgggaggaagtttcgtttagttttggtgggcggtggggtcgttggggtttgggtgcgtcgcgggttcggttcggattgacggcggtggggggcggggatggggtcgtggtgtcgggtcgcgtagaatttttgggattttcgcggcgtttaggttgggtttagggttcggagaacgttttttcgcgtggttatggttttgttagaattaggagcgggagaggcgtttatagatttttgagggtagaanttcgtggtttttaggtcgaaaggagtcggcgaggcgattttcgatttcgggacggagtcgcgggaacgggggat

SEQ ID NO: 12960 - DNA, 716 bp, Artificial Sequence
  chemically treated genomic DNA (Homo sapiens) CpG-island No: 12960
  unsure (75, 485)
atcccccgttcccgcgactccgtcccgaaatcgaaaatcgcctcgccgactcctttcgacctaaaaaccacgaanttctaccctcaaaaatctataaacgcctctcccgctcctaattctaacaaaaccataaccacgcgaaaaaacgttctccgaaccctaaacccaacctaaacgccgcgaaaatcccaaaaattctacgcgacccgacaccacgaccccatccccgccccccaccgccgtcaatccgaaccgaacccgcgacgcacccaaaccccaacgaccccaccgcccaccaaaactaaacgaaacttcctcccgacgcccccactatcccgcgacctcgaacgccgaaaaaaataaatcccgaatacccgacgcccaaaccccgaaaataccctaaaacgctaaaatacaaacgccgctccgaactataccccctccaccttcccctcaaccttaccgcgacctaaacgcgacgcatntacgcactacgctcccgaccgttaccttaataacccgaacgaacgtaaccacgcctccgaccaaaatctaaaaaaaaataaaaaaaaaaaacaatccgaaaataaataaaaatcgacgaaaaaaaaaaaaaaaaccgaaaaaaaaaaatttacgaaaaccgaataaaaactcgaaaataaaaaaaaacccaaaaaaccgaaaataaaacaaaactaaaaactcgataaaaa

SEQ ID NO: 12961 - DNA, 694 bp, Artificial Sequence
  chemically treated genomic DNA (Homo sapiens) CpG-island No: 12961
ggtcgagttggtcgttcggttgcgtaatgttgtttagtcgagtttcgtttcgtagcgtaggttattcgcgtcgttcgcgtttgtatttttatcgtttagcgtggaggggttttggtttatttttgtgtcgagcgttgtttttcgtttcgggcggagcgaggttcgggggtcggtcgttaggggaggcgtcgcggcggtggcggttttgcggttcggagggcgggtcgacgggagtcgttgtttgggtcgcgcgtcgttcggagttcgtattcgttgtcgagtttgtagcggagcgcgtagttagttcggttttcggattggatttttttattgatataaatttcgttcggtcgttttacgtagggatattttcgtttttcgtaggttgttttcgttcgtcgattcgttcgtttttttttcggtgttatttattaggagtatatattttagtcggcgtatttttttcgttcgtaaatatagcgttgttacgtttttttcgggttttgtattcgtttatacgtacgttttgatatagatttcgtttttttatacgttttttttagttttttttttattttattttttagaagaattttagtatacgtttcgtattttgtttgtttgttttagatcgattttttcgtttttttttaaatttttattttatcgaaattttttttgttaatgaaagatt

SEQ ID NO: 12962 - DNA, 694 bp, Artificial Sequence
  chemically treated genomic DNA (Homo sapiens) CpG-island No: 12962
aatctttcattaacaaaaaaaatttcgataaaataaaaatttaaaaaaaaacgaaaaaatcgatctaaaacaaacaaacaaaatacgaaacgtatactaaaattcttctaaaaaataaaataaaaaaaaaactaaaaaaaacgtataaaaaaacgaaatctatatcaaaacgtacgtataaacgaatacaaaacccgaaaaaaacgtaacaacgctatatttacgaacgaaaaaaatacgccgactaaaatatatactcctaataaataacaccgaaaaaaaaacgaacgaatcgacgaacgaaaacaacctacgaaaaacgaaaatatccctacgtaaaacgaccgaacgaaatttatatcaataaaaaaatccaatccgaaaaccgaactaactacgcgctccgctacaaactcgacaacgaatacgaactccgaacgacgcgcgacccaaacaacgactcccgtcgacccgccctccgaaccgcaaaaccgccaccgccgcgacgcctcccctaacgaccgacccccgaacctcgctccgcccgaaacgaaaaacaacgctcgacacaaaaataaaccaaaacccctccacgctaaacgataaaaatacaaacgcgaacgacgcgaataacctacgctacgaaacgaaactcgactaaacaacattacgcaaccgaacgaccaactcgacc

SEQ ID NO: 12963 - DNA, 694 bp, Artificial Sequence
  chemically treated genomic DNA (Homo sapiens) CpG-island No: 12963
aattttttattaataaggggagtttcggtgaagtggaggtttggggaaaggcgaggaagtcggtttggagtaagtaagtaaagtgcggaacgtgtattgggatttttttagaaagtggggtgggaaaggagttagggagggcgtgtggagggacgagatttgtgttagaacgtgcgtgtgagcggatataaaattcgagagaggcgtgatagcgttgtgtttgcgagcgggaggggtgcgtcggttggggtgtgtgtttttggtgagtgatatcgaggggaaggcgggcgggtcggcgggcgggggtagtttgcgaggggcgggagtgtttttgcgtggggcggtcgagcggagtttgtgttagtgaaggaatttagttcgggggtcgagttggttgcgcgtttcgttgtaagttcggtagcgggtgcgagtttcggacggcgcgcggtttaggtagcggttttcgtcggttcgtttttcgagtcgtagggtcgttatcgtcgcggcgttttttttggcgatcggttttcggatttcgtttcgttcgggacgaggagtagcgttcgatatagaggtaagttaggatttttttacgttgggcggtggggatgtaggcgcgggcgacgcgagtggtttgcgttgcgggacgagattcggttgggtagtattgcgtagtcgggcggttagttcggtt

SEQ ID NO: 12964 - DNA, 694 bp, Artificial Sequence
  chemically treated genomic DNA (Homo sapiens) CpG-island No: 12964
aaccgaactaaccgcccgactacgcaatactacccaaccgaatctcgtcccgcaacgcaaaccactcgcgtcgcccgcgcctacatccccaccgcccaacgtaaaaaaatcctaacttacctctatatcgaacgctactcctcgtcccgaacgaaacgaaatccgaaaaccgatcgccaaaaaaaacgccgcgacgataacgaccctacgactcgaaaaacgaaccgacgaaaaccgctacctaaaccgcgcgccgtccgaaactcgcacccgctaccgaacttacaacgaaacgcgcaaccaactcgacccccgaactaaattccttcactaacacaaactccgctcgaccgccccacgcaaaaacactcccgcccctcgcaaactacccccgcccgccgacccgcccgccttcccctcgatatcactcaccaaaaacacacaccccaaccgacgcacccctcccgctcgcaaacacaacgctatcacgcctctctcgaattttatatccgctcacacgcacgttctaacacaaatctcgtccctccacacgccctccctaactcctttcccaccccactttctaaaaaaatcccaatacacgttccgcactttacttacttactccaaaccgacttcctcgcctttccccaaacctccacttcaccgaaactccccttattaataaaaaatt

SEQ ID NO: 12965 - DNA, 794 bp, Artificial Sequence
  chemically treated genomic DNA (Homo sapiens) CpG-island No: 12965
ggtcgaggttcgggtttcgttcgttacggttttcggggtttcgtttatatttggtagaagttacgtttcgttcgtgtgggtggggacggttcgtcggatcgaaatttttagattgttgttttaggtaacgggtttttcgattttttggttttttatgtgaggaaattatagcgcggtcggtatttagagagtcggttagtcgcgaagttttcgtcggacgaagggattagttagcgttttgttagatagcgaggtcggaagcggaggcgtggtttttgcgcggtttcggaaattagtgaggtcggcgcgcgttcgtcggaagtcgcgatttcgacgcgttttttattgttttcggcgtcggaagtggtcgcgggtcgttttgttttttgttcgaggggcgtgcgcgggttaggggcggtcgcggaggcggaagtatttatggcggagggcggtagtttagacgggcgggtagggtcgggtttcgtaggtaacgtgcgcgcggttattgtgtcgcggggcgtgtggggatggcgaagggttggtttcggcgtttttgtcgaggttttgcgttttcgtttcgggttggtcgggtttacggggtagttagggagtcgtattttgtaggtcgggggtggggtttagcgcggttcgtagtgttgggcgattttattacggacgcgttgtttttttttcggtttcgagtgtagttttcgcgttagatttttttttcggtggaatttgttcgtaatttttttttcgttagtcgatatagatttgatatgatttaatcgtaa

SEQ ID NO: 12966 - DNA, 794 bp, Artificial Sequence
  chemically treated genomic DNA (Homo sapiens) CpG-island No: 12966
ttacgattaaatcatatcaaatctatatcgactaacgaaaaaaaaattacgaacaaattccaccgaaaaaaaaatctaacgcgaaaactacactcgaaaccgaaaaaaaaacaacgcgtccgtaataaaatcgcccaacactacgaaccgcgctaaaccccacccccgacctacaaaatacgactccctaactaccccgtaaacccgaccaacccgaaacgaaaacgcaaaacctcgacaaaaacgccgaaaccaacccttcgccatccccacacgccccgcgacacaataaccgcgcgcacgttacctacgaaacccgaccctacccgcccgtctaaactaccgccctccgccataaatacttccgcctccgcgaccgcccctaacccgcgcacgcccctcgaacaaaaaacaaaacgacccgcgaccacttccgacgccgaaaacaataaaaaacgcgtcgaaatcgcgacttccgacgaacgcgcgccgacctcactaatttccgaaaccgcgcaaaaaccacgcctccgcttccgacctcgctatctaacaaaacgctaactaatcccttcgtccgacgaaaacttcgcgactaaccgactctctaaataccgaccgcgctataatttcctcacataaaaaaccaaaaaatcgaaaaacccgttacctaaaacaacaatctaaaaatttcgatccgacgaaccgtccccacccacacgaacgaaacgtaacttctaccaaatataaacgaaaccccgaaaaccgtaacgaacgaaacccgaacctcgacc

SEQ ID NO: 12967 - DNA, 794 bp, Artificial Sequence
  chemically treated genomic DNA (Homo sapiens) CpG-island No: 12967
ttgcggttgggttatattaaatttgtatcggttaacgggaaggaagttacgagtaagttttatcggaaagaaaatttagcgcggggattgtattcgaggtcgaggagagggtagcgcgttcgtggtggggtcgtttagtattgcgagtcgcgttgaattttattttcggtttgtagggtgcggttttttggttgtttcgtggattcggttagttcgggacgaggacgtaggatttcggtagggacgtcggagttagtttttcgttatttttatacgtttcgcggtatagtggtcgcgcgtacgttatttgcggagttcggttttgttcgttcgtttgggttgtcgtttttcgttatggatgttttcgttttcgcggtcgtttttgattcgcgtacgtttttcgggtaggaagtagaacgattcgcgattattttcggcgtcgagggtaatggggggcgcgtcggggtcgcggttttcggcgggcgcgcgtcggttttattggttttcggggtcgcgtaggggttacgttttcgttttcggtttcgttgtttagtagggcgttggttggttttttcgttcggcgggaatttcgcggttaatcgattttttggatgtcggtcgcgttgtggtttttttatataagaagttaaggagtcggaaagttcgttgtttgaggtagtagtttgggaatttcggttcggcgggtcgtttttatttatacggacggggcgtggtttttgttagatgtgggcggggtttcgagggtcgtggcgggcgggattcgggtttcggtt

SEQ ID NO: 12968 - DNA, 794 bp, Artificial Sequence
  chemically treated genomic DNA (Homo sapiens) CpG-island No: 12968
aaccgaaacccgaatcccgcccgccacgaccctcgaaaccccgcccacatctaacaaaaaccacgccccgtccgtataaataaaaacgacccgccgaaccgaaattcccaaactactacctcaaacaacgaactttccgactccttaacttcttatataaaaaaaccacaacgcgaccgacatccaaaaaatcgattaaccgcgaaattcccgccgaacgaaaaaaccaaccaacgccctactaaacaacgaaaccgaaaacgaaaacgtaacccctacgcgaccccgaaaaccaataaaaccgacgcgcgcccgccgaaaaccgcgaccccgacgcgccccccattaccctcgacgccgaaaataatcgcgaatcgttctacttcctacccgaaaaacgtacgcgaatcaaaaacgaccgcgaaaacgaaaacatccataacgaaaaacgacaacccaaacgaacgaacaaaaccgaactccgcaaataacgtacgcgcgaccactataccgcgaaacgtataaaaataacgaaaaactaactccgacgtccctaccgaaatcctacgtcctcgtcccgaactaaccgaatccacgaaacaaccaaaaaaccgcaccctacaaaccgaaaataaaattcaacgcgactcgcaatactaaacgaccccaccacgaacgcgctaccctctcctcgacctcgaatacaatccccgcgctaaattttctttccgataaaacttactcgtaacttccttcccgttaaccgatacaaatttaatataacccaaccgcaa

SEQ ID NO: 12969 - DNA, 792 bp, Artificial Sequence
  chemically treated genomic DNA (Homo sapiens) CpG-island No: 12969
  unsure (42, 236, 727)
ttcggggttttcgcggagaatatttattcgagggtattggangtttggaaagggtttgcgagtatattgggggtagcgcggggggaagggttttttaggggtcgggcgcgatagtcggattgtcgtcggggaagaggtaggatgcggttttttttaggataaatatatacgtttatatatatattcgtttttcgatttcgggttagtttcgagtttcggcggttttttattttcgngcgcgcgagcggattttcgatacggtttttcgtatggtgggtatcgcggcggcggttgtaggtgggtttttagttcggattttgtatttgttacggcgtggtatacgcgggagattcggttgcgtcgcgtagagcgtttagttgtagtttgggtcgcgtcgtcgtttatttagggtagagttgtcgtcgggcgcggttttcgtacgtcgataggaggaggagaaaggtagcggtggcggcgaaggtggcggcgttcgtagagttgggcgagtttttgttgtagtcgcggaggggcggttcggcgaggggcggagttcgggcgtcggcgtcgggggaggggtttgcggggttcgcgttttttttttcgcggtcgtttagtaaggaaggcgggtgaggggcggggagagttagggggagtttttttcgtttcgtttcgtttcgtttcggatcgtattacgatttaaaggggggattaatttttagtttttttnagttttttagcgttttcgtttcgttttgtggagttggttgattcggttttttttttaggttattt

SEQ ID NO: 12970 - DNA, 792 bp, Artificial Sequence
  chemically treated genomic DNA (Homo sapiens) CpG-island No: 12970
  unsure (66, 557, 751)
aaataacctaaaaaaaaaaccgaatcaaccaactccacaaaacgaaacgaaaacgctaaaaaactnaaaaaaactaaaaattaatcccccctttaaatcgtaatacgatccgaaacgaaacgaaacgaaacgaaaaaaactccccctaactctccccgcccctcacccgccttccttactaaacgaccgcgaaaaaaaaaacgcgaaccccgcaaacccctcccccgacgccgacgcccgaactccgcccctcgccgaaccgcccctccgcgactacaacaaaaactcgcccaactctacgaacgccgccaccttcgccgccaccgctacctttctcctcctcctatcgacgtacgaaaaccgcgcccgacgacaactctaccctaaataaacgacgacgcgacccaaactacaactaaacgctctacgcgacgcaaccgaatctcccgcgtataccacgccgtaacaaatacaaaatccgaactaaaaacccacctacaaccgccgccgcgatacccaccatacgaaaaaccgtatcgaaaatccgctcgcgcgcncgaaaataaaaaaccgccgaaactcgaaactaacccgaaatcgaaaaacgaatatatatataaacgtatatatttatcctaaaaaaaaccgcatcctacctcttccccgacgacaatccgactatcgcgcccgacccctaaaaaacccttccccccgcgctacccccaatatactcgcaaaccctttccaaacntccaataccctcgaataaatattctccgcgaaaaccccgaa

SEQ ID NO: 12971 - DNA, 792 bp, Artificial Sequence
  chemically treated genomic DNA (Homo sapiens) CpG-island No: 12971
  unsure (66, 557, 751)
gagtggtttggaggaggaatcgggttaattaattttatagggcggagcgaaaacgttggaggattnaaggaggttaagagttgattttttttttgagtcgtgatacggttcgaagcggggcggggcggggcgaaggaggttttttttggtttttttcgttttttattcgttttttttgttgagcggtcgcgggagggggagcgcgagtttcgtaggtttttttttcggcgtcggcgttcgagtttcgtttttcgtcgagtcgttttttcgcggttgtagtaagagttcgtttagttttgcgggcgtcgttattttcgtcgttatcgttgttttttttttttttttgtcggcgtgcgggggtcgcgttcggcggtagttttgttttaggtgggcggcggcgcggtttaggttgtagttgagcgttttgcgcggcgtagtcgggtttttcgcgtgtattacgtcgtgataggtgtagagttcgggttgaggatttatttgtagtcgtcgtcgcgatgtttattatgcggaggatcgtgtcggagattcgttcgcgcgtncgaaggtaaggggtcgtcgaggttcggggttagttcggggtcgggaagcgagtgtgtgtgtgagcgtgtgtgtttattttggaagagatcgtattttatttttttttcggcggtagttcgattgtcgcgttcggtttttaggggattttttttttcgcgttgtttttagtgtattcgtagattttttttaggtntttagtattttcgaatgggtgtttttcgcgggagtttcgag

SEQ ID NO: 12972 - DNA, 792 bp, Artificial Sequence
  chemically treated genomic DNA (Homo sapiens) CpG-island No: 12972
  unsure (42, 236, 727)
ctcgaaactcccgcgaaaaacacccattcgaaaatactaaanacctaaaaaaaatctacgaatacactaaaaacaacgcgaaaaaaaaaatcccctaaaaaccgaacgcgacaatcgaactaccgccgaaaaaaaaataaaatacgatctcttccaaaataaacacacacgctcacacacacactcgcttcccgaccccgaactaaccccgaacctcgacgaccccttaccttcgnacgcgcgaacgaatctccgacacgatcctccgcataataaacatcgcgacgacgactacaaataaatcctcaacccgaactctacacctatcacgacgtaatacacgcgaaaaacccgactacgccgcgcaaaacgctcaactacaacctaaaccgcgccgccgcccacctaaaacaaaactaccgccgaacgcgacccccgcacgccgacaaaaaaaaaaaaaaaacaacgataacgacgaaaataacgacgcccgcaaaactaaacgaactcttactacaaccgcgaaaaaacgactcgacgaaaaacgaaactcgaacgccgacgccgaaaaaaaaacctacgaaactcgcgctccccctcccgcgaccgctcaacaaaaaaaacgaataaaaaacgaaaaaaaccaaaaaaaacctccttcgccccgccccgccccgcttcgaaccgtatcacgactcaaaaaaaaaatcaactcttaacctccttnaatcctccaacgttttcgctccgccctataaaattaattaacccgattcctcctccaaaccactc

SEQ ID NO: 12973 - DNA, 544 bp, Artificial Sequence
  chemically treated genomic DNA (Homo sapiens) CpG-island No: 12973
ggcgtagggcgcggtttcgggcgtcgttatcgtagcggcgtcgagggtcggaggtgtagtttttttttaggagagaaggcgagtcgttgtcggtcgtttagttagaaggtcgagggaatcgcgcgggtgtttttcgttagtcggttttttgggaatagggcgggggcgatattttagggagtagggttgaggatcgtaaaaattaatcgtgggtatcggcgcggggttacgtataggagaggagcgggagaggggttggtgggggttttagggcggttgaggtcgtggttttgtttgtggattcggcgggcgtttcgaagtttggggtcgttacggttttagtttcgtcggtttcggtcggagattttaggtcgtagtttttttttttttcggcgttttttttttagtgaggagttgagcgcgggcggcgcggggggaggggtggcggcggagagaatagttagttgtttaaaatttttttagagtagtttttaattttttttttgcgttcgggttcggaggggggagggggaaggagagcggg

SEQ ID NO: 12974 - DNA, 544 bp, Artificial Sequence
  chemically treated genomic DNA (Homo sapiens) CpG-island No: 12974
cccgctctccttccccctcccccctccgaacccgaacgcaaaaaaaaaattaaaaactactctaaaaaaattttaaacaactaactattctctccgccgccacccctccccccgcgccgcccgcgctcaactcctcactaaaaaaaaaacgccgaaaaaaaaaaaaactacgacctaaaatctccgaccgaaaccgacgaaactaaaaccgtaacgaccccaaacttcgaaacgcccgccgaatccacaaacaaaaccacgacctcaaccgccctaaaacccccaccaacccctctcccgctcctctcctatacgtaaccccgcgccgatacccacgattaatttttacgatcctcaaccctactccctaaaatatcgcccccgccctattcccaaaaaaccgactaacgaaaaacacccgcgcgattccctcgaccttctaactaaacgaccgacaacgactcgccttctctcctaaaaaaaaactacacctccgaccctcgacgccgctacgataacgacgcccgaaaccgcgccctacgcc

SEQ ID NO: 12975 - DNA, 544 bp, Artificial Sequence
  chemically treated genomic DNA (Homo sapiens) CpG-island No: 12975
ttcgttttttttttttttttttttttcgaattcgggcgtaaggggggaattagaaattgttttagaaggattttaaataattggttgtttttttcgtcgttattttttttttcgcgtcgttcgcgtttagttttttattggagagaaggcgtcgggaggaggagaaattgcggtttggagttttcggtcggagtcggcggagttggagtcgtggcggttttagatttcggggcgttcgtcgagtttatagatagagttacggttttagtcgttttggggtttttattagtttttttttcgttttttttttatgcgtgatttcgcgtcggtatttacgattgatttttgcggtttttagttttattttttggggtgtcgttttcgttttgtttttagagggtcggttggcgagggatattcgcgcggttttttcgattttttggttgagcgatcgatagcgattcgtttttttttttggggaaaggttgtattttcggttttcggcgtcgttgcggtggcggcgttcggggtcgcgttttgcgtt

SEQ ID NO: 12976 - DNA, 544 bp, Artificial Sequence
  chemically treated genomic DNA (Homo sapiens) CpG-island No: 12976
aacgcaaaacgcgaccccgaacgccgccaccgcaacgacgccgaaaaccgaaaatacaacctttccccaaaaaaaaaaacgaatcgctatcgatcgctcaaccaaaaaatcgaaaaaaccgcgcgaatatccctcgccaaccgaccctctaaaaacaaaacgaaaacgacaccccaaaaaataaaactaaaaaccgcaaaaatcaatcgtaaataccgacgcgaaatcacgcataaaaaaaaaacgaaaaaaaaactaataaaaaccccaaaacgactaaaaccgtaactctatctataaactcgacgaacgccccgaaatctaaaaccgccacgactccaactccgccgactccgaccgaaaactccaaaccgcaatttctcctcctcccgacgccttctctccaataaaaaactaaacgcgaacgacgcgaaaaaaaaaataacgacgaaaaaaacaaccaattatttaaaatccttctaaaacaatttctaattccccccttacgcccgaattcgaaaaaaaaaaaaaaaaaaaaaacgaa

SEQ ID NO: 12977 - DNA, 1501 bp, Artificial Sequence
  chemically treated genomic DNA (Homo sapiens) CpG-island No: 12977
agcggagagggaaggcgggagggagggagtcggggagggagggaaggagggaggagattgtcgttgaggtttagtcgttatcgcgcgtttcggaaggttagagggagggggaggtttgttagtttcgcgcgttgtttgggcgaagggggcggagttttggcgtggggcggttaatagtgggggtggttgcgtgggtcgttatggggacggggttgttttcggggaggttgtgatgggttgataggtgcgtgatagtgggagttgttttcggtataagtatgtacggtaaaggtaagagtaatagtagcgtcgtttcgttcgatagttaggttcgggagaagtaagtgttttcgttttttatttattttcgtttttatacgcgcgtatatttacgtacgtattcgtatattttgggagatatagatatttttcgttcggggagcgtcgggggtgggttggtagggggaggggtgtcgcgatgggggcgtgtggtgcggggagttgcgttttttcgggaggtgcgggcgttgggcgggcggtcgtagggggttgtcggcgggagggatcgggtgtgttgaggggcggcggtggtgttggtggcgaggatggaaatttgtttgggtgattgagggaaataattcgcgggtttattttttaaagtaattttagagttggggttcggggtttcggggatttggggagtcgtcgggggtggcgggaggggtagttgcgtggaggaaggcgcgtagtgggaatgtgggtgtttggcgggtcggtcggggtcggggtcggggtcggggcgggtagcgcggggagcgcggcggcgggggtttgggcgttggggtttagggtcgcgagcgcggggcgaggcgaggcgagggcggcggtgtcgggcgcgcggcgggcggaagtcgggcgtggagcggtcgagcggggtttcgcggggcgcggagacgcgcgcggggcgcggagggcgtgtgcgggttgggcgttcgggtttttttgggttagttacggacgcggcgttcgtagtttttcgcgtatcgcggggttggggttggggttggggcgggggcgggggcgggtgggcgtcggagacgtcgtcgaagtttgggagtcggagagggatcgagttttcggggagttaaagtgtgttggcgaggagcgggattcgttggaggaggttggcgtttttgtttttcgtagcggatttaatttcgcggcggcggttggcgaattttttgtgaggttggtagttttcgagcggcgggaggggcgggttcggcggggcggtggtcgggggcgcgcggaggggagttgtgggagtcgtcgggggcgttcgaggagggtagttgtggcggggagggttagtggttcgaaaaggggtttgtgggaggggagaagcgtttaggtgggaaggagtcgtttggttatagttgtggggagatataggtgttaatttcggtgggagtttaagaggcggttggcgagaatagagttt

SEQ ID NO: 12978 - DNA, 1501 bp, Artificial Sequence
  chemically treated genomic DNA (Homo sapiens) CpG-island No: 12978
aaactctattctcgccaaccgcctcttaaactcccaccgaaattaacacctatatctccccacaactataaccaaacgactccttcccacctaaacgcttctcccctcccacaaaccccttttcgaaccactaaccctccccgccacaactaccctcctcgaacgcccccgacgactcccacaactcccctccgcgcgcccccgaccaccgccccgccgaacccgcccctcccgccgctcgaaaactaccaacctcacaaaaaattcgccaaccgccgccgcgaaattaaatccgctacgaaaaacaaaaacgccaacctcctccaacgaatcccgctcctcgccaacacactttaactccccgaaaactcgatccctctccgactcccaaacttcgacgacgtctccgacgcccacccgcccccgcccccgccccaaccccaaccccaaccccgcgatacgcgaaaaactacgaacgccgcgtccgtaactaacccaaaaaaacccgaacgcccaacccgcacacgccctccgcgccccgcgcgcgtctccgcgccccgcgaaaccccgctcgaccgctccacgcccgacttccgcccgccgcgcgcccgacaccgccgccctcgcctcgcctcgccccgcgctcgcgaccctaaaccccaacgcccaaacccccgccgccgcgctccccgcgctacccgccccgaccccgaccccgaccccgaccgacccgccaaacacccacattcccactacgcgccttcctccacgcaactacccctcccgccacccccgacgactccccaaatccccgaaaccccgaaccccaactctaaaattactttaaaaaataaacccgcgaattatttccctcaatcacccaaacaaatttccatcctcgccaccaacaccaccgccgcccctcaacacacccgatccctcccgccgacaaccccctacgaccgcccgcccaacgcccgcacctcccgaaaaaacgcaactccccgcaccacacgcccccatcgcgacacccctccccctaccaacccacccccgacgctccccgaacgaaaaatatctatatctcccaaaatatacgaatacgtacgtaaatatacgcgcgtataaaaacgaaaataaataaaaaacgaaaacacttacttctcccgaacctaactatcgaacgaaacgacgctactattactcttacctttaccgtacatacttataccgaaaacaactcccactatcacgcacctatcaacccatcacaacctccccgaaaacaaccccgtccccataacgacccacgcaaccacccccactattaaccgccccacgccaaaactccgcccccttcgcccaaacaacgcgcgaaactaacaaacctccccctccctctaaccttccgaaacgcgcgataacgactaaacctcaacgacaatctcctccctccttccctccctccccgactccctccctcccgccttccctctccgct

SEQ ID NO: 12979 - DNA, 1501 bp, Artificial Sequence
  chemically treated genomic DNA (Homo sapiens) CpG-island No: 12979
gggttttgttttcgttagtcgttttttgggtttttatcgaagttaatatttgtatttttttataattgtaattaagcggtttttttttatttgaacgtttttttttttttataaattttttttcggattattggtttttttcgttatagttgtttttttcgggcgttttcggcggtttttataattttttttcgcgcgttttcgattatcgtttcgtcgggttcgtttttttcgtcgttcgggggttgttagttttataaaaagttcgttagtcgtcgtcgcggagttgggttcgttgcgagaggtagaaacgttagttttttttagcggatttcgtttttcgttaatatattttagtttttcgggaattcggttttttttcgatttttaaatttcggcggcgttttcggcgtttattcgttttcgttttcgttttagttttagttttagtttcgcgatgcgcgggggattgcgggcgtcgcgttcgtagttggtttaggaaagttcggacgtttaattcgtatacgtttttcgcgtttcgcgcgcgttttcgcgtttcgcggggtttcgttcggtcgttttacgttcggttttcgttcgtcgcgcgttcggtatcgtcgttttcgtttcgtttcgtttcgcgttcgcggttttaagttttagcgtttaggttttcgtcgtcgcgtttttcgcgttgttcgtttcgatttcggtttcgatttcggtcggttcgttaaatatttatatttttattgcgcgtttttttttacgtagttgtttttttcgttattttcggcggttttttaggttttcggagtttcggattttagttttaaagttattttggaaggtgaattcgcgggttattttttttaattatttaaataagtttttattttcgttattagtattatcgtcgttttttaatatattcggtttttttcgtcgatagttttttgcggtcgttcgtttagcgttcgtatttttcgggaaagcgtagtttttcgtattatacgtttttatcgcggtatttttttttttgttagtttattttcggcgtttttcgggcggagagtgtttgtgttttttagagtgtgcgagtgcgtgcgtgagtgtgcgcgcgtgtgaaggcggaggtgggtgagaagcggagatatttatttttttcgggtttggttgtcggacgggacggcgttgttgttatttttgtttttgtcgtatatgtttgtgtcgagagtagtttttattgttacgtatttgttaatttattatagttttttcgggaatagtttcgtttttatggcgatttacgtagttatttttattattggtcgttttacgttaaagtttcgtttttttcgtttaggtaacgcgcgagattgataggtttttttttttttttggtttttcgaagcgcgcggtggcggttaagttttagcggtagtttttttttttttttttttttttttcgattttttttttttcgtttttttttttcgtt

SEQ ID NO: 12980 - DNA, 1501 bp, Artificial Sequence
  chemically treated genomic DNA (Homo sapiens) CpG-island No: 12980
aacgaaaaaaaaaaacgaaaaaaaaaaaatcgaaaaaaaaaaaaaaaaaaaaaaaaactaccgctaaaacttaaccgccaccgcgcgcttcgaaaaaccaaaaaaaaaaaaaaacctatcaatctcgcgcgttacctaaacgaaaaaaacgaaactttaacgtaaaacgaccaataataaaaataactacgtaaatcgccataaaaacgaaactattcccgaaaaaactataataaattaacaaatacgtaacaataaaaactactctcgacacaaacatatacgacaaaaacaaaaataacaacaacgccgtcccgtccgacaaccaaacccgaaaaaaataaatatctccgcttctcacccacctccgccttcacacgcgcgcacactcacgcacgcactcgcacactctaaaaaacacaaacactctccgcccgaaaaacgccgaaaataaactaacaaaaaaaaaaataccgcgataaaaacgtataatacgaaaaactacgctttcccgaaaaatacgaacgctaaacgaacgaccgcaaaaaactatcgacgaaaaaaaccgaatatattaaaaaacgacgataatactaataacgaaaataaaaacttatttaaataattaaaaaaaataacccgcgaattcaccttccaaaataactttaaaactaaaatccgaaactccgaaaacctaaaaaaccgccgaaaataacgaaaaaaacaactacgtaaaaaaaaacgcgcaataaaaatataaatatttaacgaaccgaccgaaatcgaaaccgaaatcgaaacgaacaacgcgaaaaacgcgacgacgaaaacctaaacgctaaaacttaaaaccgcgaacgcgaaacgaaacgaaacgaaaacgacgataccgaacgcgcgacgaacgaaaaccgaacgtaaaacgaccgaacgaaaccccgcgaaacgcgaaaacgcgcgcgaaacgcgaaaaacgtatacgaattaaacgtccgaactttcctaaaccaactacgaacgcgacgcccgcaatcccccgcgcatcgcgaaactaaaactaaaactaaaacgaaaacgaaaacgaataaacgccgaaaacgccgccgaaatttaaaaatcgaaaaaaaaccgaattcccgaaaaactaaaatatattaacgaaaaacgaaatccgctaaaaaaaactaacgtttctacctctcgcaacgaacccaactccgcgacgacgactaacgaactttttataaaactaacaacccccgaacgacgaaaaaaacgaacccgacgaaacgataatcgaaaacgcgcgaaaaaaaattataaaaaccgccgaaaacgcccgaaaaaaacaactataacgaaaaaaaccaataatccgaaaaaaaatttataaaaaaaaaaaaacgttcaaataaaaaaaaaccgcttaattacaattataaaaaaatacaaatattaacttcgataaaaacccaaaaaacgactaacgaaaacaaaaccc

SEQ ID NO: 12981 - DNA, 1317 bp, Artificial Sequence
  chemically treated genomic DNA (Homo sapiens) CpG-island No: 12981
agagcgaggtaggtgggattttaggatgttcgttcggcggggcgatttcggttattttcgagattagggtttttttcgttcggtcgttacgttcgcgcgtagttcgggttatttcgaaatttcggcgcggttattataggataaattacgcgagtagagtttagcggcgcgttgggtatgcgcgggggcggcgcgatgtttatttttcgagaggcgggaatttcggattgagatcgggtcgggcgtgcgttgtcgagagaggacgcgcgttttagtcggttgtcgcgtacggcgggttcgcgtcgacgtagtacggtttcgagggcgcgacgcgtcgtcgtcgtcgtcgtcggtttcggattattgtgagttcgcggcgtgaggcgtgggaggaagcgcggttgttgtcgtttagcgtcgtttcgtcgtcgtttgttttcgttttacggcgtcgagtcgcggttcgagtgagtgcggggcgtcgggcggggcgcgggtcgggggttgggcgggttttttttgtgtagcggtcgtgggttgggcgcggttttgagggcggaggggtagagcggggtcgtttaattagtttcggggcggatgcggcggagatcggtttttttcgcgttttcggttcgggttttgggaggaggggaggtcggtggtcgtgaggaggttgggggttttcgcggaggtcgagaggtttaaggaggttagggggcgcgttgggaggcgggggttcggggcgttgggtggtcgggaggtttggggaagattgggaggttgagggacgtggggaggtcgggagttcgaggaggtcgggggttttgggggcgcgcggggaggttaaggggttcggggaagatagaaaggttgggggacgtggggagttcgggagacgtgaggaggaaggggggggcggttttcgaaaaggtcgggcgcgcggagaggtcgaggggtttgaggaagacgaggaggtcggggttttgggggcgcgtagggcggatagaggcgcggggaggacgggtcggttttcgtcggagcggatttaatgtttgaaaaataaaaggggagaggtaggaggaggaagagggaaatcgtagggacgtcggtagggttcgttcggacgcgagagggaggttcgcgacggttcgattttcgtttttcgggcgcggtttcgcgggtagttaagggtgggtttcgagcggtttgtcggtgttcgagttttaagttcgtcgtgttttcgaacgtaaatttttaagtttggtagagtttcgtgggttttttggcgggagttttggagtttttattgaagttttt

SEQ ID NO: 12982 - DNA, 1317 bp, Artificial Sequence
  chemically treated genomic DNA (Homo sapiens) CpG-island No: 12982
aaaaacttcaataaaaactccaaaactcccgccaaaaaacccacgaaactctaccaaacttaaaaatttacgttcgaaaacacgacgaacttaaaactcgaacaccgacaaaccgctcgaaacccacccttaactacccgcgaaaccgcgcccgaaaaacgaaaatcgaaccgtcgcgaacctccctctcgcgtccgaacgaaccctaccgacgtccctacgatttccctcttcctcctcctacctctccccttttatttttcaaacattaaatccgctccgacgaaaaccgacccgtcctccccgcgcctctatccgccctacgcgcccccaaaaccccgacctcctcgtcttcctcaaacccctcgacctctccgcgcgcccgaccttttcgaaaaccgccccccccttcctcctcacgtctcccgaactccccacgtcccccaacctttctatcttccccgaaccccttaacctccccgcgcgcccccaaaacccccgacctcctcgaactcccgacctccccacgtccctcaacctcccaatcttccccaaacctcccgaccacccaacgccccgaacccccgcctcccaacgcgccccctaacctccttaaacctctcgacctccgcgaaaacccccaacctcctcacgaccaccgacctcccctcctcccaaaacccgaaccgaaaacgcgaaaaaaaccgatctccgccgcatccgccccgaaactaattaaacgaccccgctctacccctccgccctcaaaaccgcgcccaacccacgaccgctacacaaaaaaaacccgcccaacccccgacccgcgccccgcccgacgccccgcactcactcgaaccgcgactcgacgccgtaaaacgaaaacaaacgacgacgaaacgacgctaaacgacaacaaccgcgcttcctcccacgcctcacgccgcgaactcacaataatccgaaaccgacgacgacgacgacgacgcgtcgcgccctcgaaaccgtactacgtcgacgcgaacccgccgtacgcgacaaccgactaaaacgcgcgtcctctctcgacaacgcacgcccgacccgatctcaatccgaaattcccgcctctcgaaaaataaacatcgcgccgcccccgcgcatacccaacgcgccgctaaactctactcgcgtaatttatcctataataaccgcgccgaaatttcgaaataacccgaactacgcgcgaacgtaacgaccgaacgaaaaaaaccctaatctcgaaaataaccgaaatcgccccgccgaacgaacatcctaaaatcccacctacctcgctct

SEQ ID NO: 12983 - DNA, 1317 bp, Artificial Sequence
  chemically treated genomic DNA (Homo sapiens) CpG-island No: 12983
gaggattttagtgagggttttagggttttcgttaagaagtttacggggttttattaaatttgagggtttgcgttcggggatacggcgggtttggggttcgggtatcggtaggtcgttcggagtttatttttggttgttcgcgaggtcgcgttcgggggacggaggtcgggtcgtcgcgagtttttttttcgcgttcgggcgaattttgtcgacgtttttgcgatttttttttttttttttttgtttttttttttttgttttttaggtattgggttcgtttcggcggaggtcggttcgtttttttcgcgtttttgttcgttttgcgcgtttttagagtttcggttttttcgttttttttaggtttttcggttttttcgcgcgttcggttttttcgaaagtcgtttttttttttttttttacgtttttcggattttttacgttttttagtttttttgtttttttcgaattttttggttttttcgcgcgtttttaaaattttcgattttttcgagttttcggtttttttacgttttttagttttttagttttttttaagtttttcgattatttagcgtttcgaattttcgttttttagcgcgttttttgatttttttaagtttttcggttttcgcgagggtttttaatttttttacggttatcggttttttttttttttagaattcgggtcgggggcgcgggaggggtcggttttcgtcgtattcgtttcgggattggttgggcggtttcgttttgttttttcgtttttagggtcgcgtttagtttacgatcgttgtatagaaggagttcgtttagttttcgattcgcgtttcgttcggcgtttcgtatttattcggatcgcggttcggcgtcgtgaagcgaaggtagacgacgacggggcggcgttgggcgatagtagtcgcgtttttttttacgttttacgtcgcgggtttatagtggttcgggatcggcggcggcggcggcggcgcgtcgcgttttcgaggtcgtgttgcgtcggcgcgggttcgtcgtgcgcggtagtcggttgaggcgcgcgttttttttcggtagcgtacgttcgattcggttttagttcggagttttcgtttttcgggggatgaatatcgcgtcgttttcgcgtatgtttagcgcgtcgttaggttttgttcgcgtaatttgttttgtagtgatcgcgtcggggtttcggggtggttcgggttgcgcgcgggcgtggcggtcggacgaggaaagttttggtttcgggggtggtcggggtcgtttcgtcgagcggatattttggggttttatttgtttcgtttt

SEQ ID NO: 12984 - DNA, 1317 bp, Artificial Sequence
  chemically treated genomic DNA (Homo sapiens) CpG-island No: 12984
aaaacgaaacaaataaaaccccaaaatatccgctcgacgaaacgaccccgaccacccccgaaaccaaaactttcctcgtccgaccgccacgcccgcgcgcaacccgaaccaccccgaaaccccgacgcgatcactacaaaacaaattacgcgaacaaaacctaacgacgcgctaaacatacgcgaaaacgacgcgatattcatcccccgaaaaacgaaaactccgaactaaaaccgaatcgaacgtacgctaccgaaaaaaaacgcgcgcctcaaccgactaccgcgcacgacgaacccgcgccgacgcaacacgacctcgaaaacgcgacgcgccgccgccgccgccgccgatcccgaaccactataaacccgcgacgtaaaacgtaaaaaaaaacgcgactactatcgcccaacgccgccccgtcgtcgtctaccttcgcttcacgacgccgaaccgcgatccgaataaatacgaaacgccgaacgaaacgcgaatcgaaaactaaacgaactccttctatacaacgatcgtaaactaaacgcgaccctaaaaacgaaaaaacaaaacgaaaccgcccaaccaatcccgaaacgaatacgacgaaaaccgacccctcccgcgcccccgacccgaattctaaaaaaaaaaaaaaccgataaccgtaaaaaaattaaaaaccctcgcgaaaaccgaaaaacttaaaaaaatcaaaaaacgcgctaaaaaacgaaaattcgaaacgctaaataatcgaaaaacttaaaaaaaactaaaaaactaaaaaacgtaaaaaaaccgaaaactcgaaaaaatcgaaaattttaaaaacgcgcgaaaaaaccaaaaaattcgaaaaaaacaaaaaaactaaaaaacgtaaaaaatccgaaaaacgtaaaaaaaaaaaaaaaaacgactttcgaaaaaaccgaacgcgcgaaaaaaccgaaaaacctaaaaaaaacgaaaaaaccgaaactctaaaaacgcgcaaaacgaacaaaaacgcgaaaaaaacgaaccgacctccgccgaaacgaacccaatacctaaaaaacaaaaaaaaaaaaacaaaaaaaaaaaaaaaaaaatcgcaaaaacgtcgacaaaattcgcccgaacgcgaaaaaaaaactcgcgacgacccgacctccgtcccccgaacgcgacctcgcgaacaaccaaaaataaactccgaacgacctaccgatacccgaaccccaaacccgccgtatccccgaacgcaaaccctcaaatttaataaaaccccgtaaacttcttaacgaaaaccctaaaaccctcactaaaatcctc

SEQ ID NO: 12985 - DNA, 976 bp, Artificial Sequence
  chemically treated genomic DNA (Homo sapiens) CpG-island No: 12985
  unsure (128)
gtgtgtcggcgcgtttgtgcgtggagggggataattgtatttagcgcgaggtattgggggaggaggaagcggtacgagagatttgaataattgattttttagtcgtattagacgttcgggagcggagnggagcgtggttttaatattacggatagtagcgcgcgtcgtcgtagcgtttcgtcgttagttagttatttattttggttttatttgtcgtcgtggttttcggaacgggtggtcgcgtttcgttcgtcgtcgagggattgcggggtttgtttcgatttatttaggagagaggttgcgggtaggagacgttttcgttcgtcggagttcgaagttttttgggtttgagcgggggttattgcgtttcgtcggttgagaataagtttttaagttggtgtggagggcgtcgttatttttttttttttttttttcggaggcgatcgtagtagaaagacgtttcgggaattcgttttgtagtgttgtgaattagggtgtttaggcgtttatcggattttcgttgggaagtggggagtcgaacgttcggcgcggagttggtttagtagcgaagggttcggagggagttgttttttttcgttcgcgtttttttcggtcggggatcgcggggattttcggttatacgcgagcgcgtttttatatttatatatatattcgtttttaaatatattagttcggagttgggttgcggagagggtgtttcggcgcgtttagaggatcgggtagttgtcgttcggagtggggtaggaagcggagttagggattttggaggggagtttttagggtttggtcggattatgggatcgggtgagcgttgagaatcgcggtcgtagttattagttttggagatgattaggagcggttattgttgagaattatgtggagagaggttgcggtgagtgttagcgcgggacgtcgcgtttgggaggtttttttgggaaggggggaggtgggaggt

SEQ ID NO: 12986 - DNA, 976 bp, Artificial Sequence
  chemically treated genomic DNA (Homo sapiens) CpG-island No: 12986
  unsure (849)
acctcccacctccccccttcccaaaaaaacctcccaaacgcgacgtcccgcgctaacactcaccgcaacctctctccacataattctcaacaataaccgctcctaatcatctccaaaactaataactacgaccgcgattctcaacgctcacccgatcccataatccgaccaaaccctaaaaactcccctccaaaatccctaactccgcttcctaccccactccgaacgacaactacccgatcctctaaacgcgccgaaacaccctctccgcaacccaactccgaactaatatatttaaaaacgaatatatatataaatataaaaacgcgctcgcgtataaccgaaaatccccgcgatccccgaccgaaaaaaacgcgaacgaaaaaaaacaactccctccgaacccttcgctactaaaccaactccgcgccgaacgttcgactccccacttcccaacgaaaatccgataaacgcctaaacaccctaattcacaacactacaaaacgaattcccgaaacgtctttctactacgatcgcctccgaaaaaaaaaaaaaaaaaaataacgacgccctccacaccaacttaaaaacttattctcaaccgacgaaacgcaataacccccgctcaaacccaaaaaacttcgaactccgacgaacgaaaacgtctcctacccgcaacctctctcctaaataaatcgaaacaaaccccgcaatccctcgacgacgaacgaaacgcgaccacccgttccgaaaaccacgacgacaaataaaaccaaaataaataactaactaacgacgaaacgctacgacgacgcgcgctactatccgtaatattaaaaccacgctccnctccgctcccgaacgtctaatacgactaaaaaatcaattattcaaatctctcgtaccgcttcctcctcccccaatacctcgcgctaaatacaattatccccctccacgcacaaacgcgccgacacac

SEQ ID NO: 12987 - DNA, 976 bp, Artificial Sequence
  chemically treated genomic DNA (Homo sapiens) CpG-island No: 12987
  unsure (849)
gttttttattttttttttttttaagggggttttttaggcgcggcgtttcgcgttagtatttatcgtagtttttttttatatagtttttagtagtggtcgtttttggttatttttagggttgatggttgcggtcgcgatttttagcgtttattcggttttatgattcggttaagttttaggagtttttttttaagatttttagtttcgttttttgttttatttcggacggtaattgttcggttttttgagcgcgtcggagtatttttttcgtaatttagtttcgggttggtgtgtttgagggcgagtgtgtgtgtgagtgtgggagcgcgttcgcgtgtggtcggggattttcgcggttttcggtcgagagaggcgcgggcggggaaaggtagtttttttcgggtttttcgttgttgggttagtttcgcgtcgggcgttcggttttttattttttagcgggagttcggtgagcgtttggatattttggtttatagtattgtaaagcgggttttcggggcgtttttttgttgcggtcgttttcgaggaagaggagaaggaaggtagcggcgttttttatattaatttagggatttgtttttagtcggcgagacgtagtagttttcgtttaagtttaagaggtttcgagtttcggcgggcgaaagcgttttttgttcgtagttttttttttaggtgggtcgagatagatttcgtagtttttcggcggcgagcggagcgcggttattcgtttcgagagttacggcggtaaataaggttaggataggtggttggttggcgacggggcgttgcggcggcgcgcgttgttgttcgtggtgttggaattacgttttntttcgttttcgggcgtttggtgcggttgaagaattaattatttagatttttcgtatcgttttttttttttttagtgtttcgcgttgggtatagttatttttttttacgtataggcgcgtcgatatat

SEQ ID NO: 12988 - DNA, 976 bp, Artificial Sequence
  chemically treated genomic DNA (Homo sapiens) CpG-island No: 12988
  unsure (128)
atatatcgacgcgcctatacgtaaaaaaaaataactatacccaacgcgaaacactaaaaaaaaaaaaaacgatacgaaaaatctaaataattaattcttcaaccgcaccaaacgcccgaaaacgaaanaaaacgtaattccaacaccacgaacaacaacgcgcgccgccgcaacgccccgtcgccaaccaaccacctatcctaaccttatttaccgccgtaactctcgaaacgaataaccgcgctccgctcgccgccgaaaaactacgaaatctatctcgacccacctaaaaaaaaaactacgaacaaaaaacgctttcgcccgccgaaactcgaaacctcttaaacttaaacgaaaactactacgtctcgccgactaaaaacaaatccctaaattaatataaaaaacgccgctaccttccttctcctcttcctcgaaaacgaccgcaacaaaaaaacgccccgaaaacccgctttacaatactataaaccaaaatatccaaacgctcaccgaactcccgctaaaaaataaaaaaccgaacgcccgacgcgaaactaacccaacaacgaaaaacccgaaaaaaactacctttccccgcccgcgcctctctcgaccgaaaaccgcgaaaatccccgaccacacgcgaacgcgctcccacactcacacacacactcgccctcaaacacaccaacccgaaactaaattacgaaaaaaatactccgacgcgctcaaaaaaccgaacaattaccgtccgaaataaaacaaaaaacgaaactaaaaatcttaaaaaaaaactcctaaaacttaaccgaatcataaaaccgaataaacgctaaaaatcgcgaccgcaaccatcaaccctaaaaataaccaaaaacgaccactactaaaaactatataaaaaaaaactacgataaatactaacgcgaaacgccgcgcctaaaaaacccccttaaaaaaaaaaaaaataaaaaac

SEQ ID NO: 12989 - DNA, 508 bp, Artificial Sequence
  chemically treated genomic DNA (Homo sapiens) CpG-island No: 12989
ggtcggattttacgaggtgttcgttaggagtttcgtttatcgttatttttttttataggcgattttcgttttttttagattatttttagttacgtgattcgcggagcggcggtttgttggtttaattggattttgcgtcgtttcgtagttttgtcggtaaacgttagtaaggggcggttttttagttgtgtagtcgttttcgcgttcgtgggttggagtatttgtgggcgaggtagggcggagattcgggagaggttgggattttttttttatcgcgtttttcgtcggcgtgacgtagtgtttgggtttcgtttttgtttttttagtattagagttttcggtttcgtttacgcgttttgggtataagagttttttcgttggtttcggaggtggggttgcgtttataaggggcgatcgtatttacggcggcggttattgtattgtgtttttattttttcggtgagaaattaagatagaaaattaattataataatatagagtaagtgtg

SEQ ID NO: 12990 - DNA, 508 bp, Artificial Sequence
  chemically treated genomic DNA (Homo sapiens) CpG-island No: 12990
cacacttactctatattattataattaattttctatcttaatttctcaccgaaaaaataaaaacacaatacaataaccgccgccgtaaatacgatcgccccttataaacgcaaccccacctccgaaaccaacgaaaaaactcttatacccaaaacgcgtaaacgaaaccgaaaactctaatactaaaaaaacaaaaacgaaacccaaacactacgtcacgccgacgaaaaacgcgataaaaaaaaaatcccaacctctcccgaatctccgccctacctcgcccacaaatactccaacccacgaacgcgaaaacgactacacaactaaaaaaccgccccttactaacgtttaccgacaaaactacgaaacgacgcaaaatccaattaaaccaacaaaccgccgctccgcgaatcacgtaactaaaaataatctaaaaaaaacgaaaatcgcctataaaaaaaaataacgataaacgaaactcctaacgaacacctcgtaaaatccgacc

SEQ ID NO: 12991 - DNA, 508 bp, Artificial Sequence
  chemically treated genomic DNA (Homo sapiens) CpG-island No: 12991
tatatttgttttgtgttattatggttagttttttattttggttttttatcggggaggtgggaatataatatagtggtcgtcgtcgtgaatacggtcgttttttgtgagcgtaattttattttcgggattaacgagaggatttttatgtttaaggcgcgtgagcgaagtcggagattttagtattgagggggtaagaacggggtttagatattacgttacgtcggcggaaagcgcgatggaggggaggttttagtttttttcgagttttcgttttgtttcgtttataaatgttttagtttacggacgcggaagcgattgtatagttaaagaatcgttttttgttaacgtttgtcggtaaaattacggagcggcgtaggatttagttgagttagtaggtcgtcgtttcgcgagttacgtgattggaagtagtttgggaaaagcggaagtcgtttgtgggaggaggtggcggtgggcggaatttttagcggatatttcgtggagttcggtt

SEQ ID NO: 12992 - DNA, 508 bp, Artificial Sequence
  chemically treated genomic DNA (Homo sapiens) CpG-island No: 12992
aaccgaactccacgaaatatccgctaaaaattccgcccaccgccacctcctcccacaaacgacttccgcttttcccaaactacttccaatcacgtaactcgcgaaacgacgacctactaactcaactaaatcctacgccgctccgtaattttaccgacaaacgttaacaaaaaacgattctttaactatacaatcgcttccgcgtccgtaaactaaaacatttataaacgaaacaaaacgaaaactcgaaaaaaactaaaacctcccctccatcgcgctttccgccgacgtaacgtaatatctaaaccccgttcttaccccctcaatactaaaatctccgacttcgctcacgcgccttaaacataaaaatcctctcgttaatcccgaaaataaaattacgctcacaaaaaacgaccgtattcacgacgacgaccactatattatattcccacctccccgataaaaaaccaaaataaaaaactaaccataataacacaaaacaaatata

SEQ ID NO: 12993 - DNA, 601 bp, Artificial Sequence
  chemically treated genomic DNA (Homo sapiens) CpG-island No: 12993
gcgagtttcgacgcgtagcggggttaggcgtcggtttttttttattacgcgttcggtttagggtcgtttagtcgtcgttatcgtcgtcgtatttatgggtagatggagtcggcgcggaaggttcgcgcgttttgcgtcgtcgtcgtttagtgtcgtcgttagtatttttttcgtttttttttttttcgggtttatttcgcgggggcggcgttattttttcgttgtttaggttcgggtatcgcgggcgtttcgcgggcggtagtcgtttttttcgagcgcgatttttaggttgggttcggggtcgggcggggagggaggagagattgagcgtgaagggagagggcgttcgagttttcggggacggaagtgtggagaataggagcgtgtgagggggcgttcgaggtgtcgggggcgggggaagagtatgagtaggggtgggggtaggggtgttaggtgtagtaggtagggaggtagaggcggcgagtgggggcgttcgagggatcggggcggggcggggagcgtaagggtggtaaggcgttcgagagttagggttggagttgaaggtgggtgatagggagggggcgtttaggtgttaggattt

SEQ ID NO: 12994 - DNA, 601 bp, Artificial Sequence
  chemically treated genomic DNA (Homo sapiens) CpG-island No: 12994
aaatcctaacacctaaacgccccctccctatcacccaccttcaactccaaccctaactctcgaacgccttaccacccttacgctccccgccccgccccgatccctcgaacgcccccactcgccgcctctacctccctacctactacacctaacacccctacccccacccctactcatactcttcccccgcccccgacacctcgaacgccccctcacacgctcctattctccacacttccgtccccgaaaactcgaacgccctctcccttcacgctcaatctctcctccctccccgcccgaccccgaacccaacctaaaaatcgcgctcgaaaaaaacgactaccgcccgcgaaacgcccgcgatacccgaacctaaacaacgaaaaaataacgccgcccccgcgaaataaacccgaaaaaaaaaaaaacgaaaaaaatactaacgacgacactaaacgacgacgacgcaaaacgcgcgaaccttccgcgccgactccatctacccataaatacgacgacgataacgacgactaaacgaccctaaaccgaacgcgtaataaaaaaaaaccgacgcctaaccccgctacgcgtcgaaactcgc

SEQ ID NO: 12995 - DNA, 601 bp, Artificial Sequence
  chemically treated genomic DNA (Homo sapiens) CpG-island No: 12995
aggttttgatatttgggcgttttttttttgttatttatttttagttttagttttgattttcgggcgttttgttatttttacgtttttcgtttcgtttcggtttttcgggcgtttttattcgtcgtttttatttttttatttgttatatttggtatttttgtttttatttttgtttatatttttttttcgttttcgatatttcgggcgtttttttatacgtttttattttttatattttcgttttcgaaaattcgggcgttttttttttttacgtttagtttttttttttttttcgttcggtttcggatttagtttggagatcgcgttcgggaggggcggttgtcgttcgcggggcgttcgcggtgttcgggtttgggtagcgaggaggtgacgtcgttttcgcgggatgagttcggaagaaggaggggcggaggaggtgttggcggcggtattgagcggcggcggcgtagggcgcgcgggtttttcgcgtcgattttatttatttatgggtgcggcggcggtggcggcggttgagcgattttgggtcgggcgcgtgatgaggaggggtcggcgtttgatttcgttgcgcgtcggagttcgt

SEQ ID NO: 12996 - DNA, 601 bp, Artificial Sequence
  chemically treated genomic DNA (Homo sapiens) CpG-island No: 12996
acgaactccgacgcgcaacgaaatcaaacgccgacccctcctcatcacgcgcccgacccaaaatcgctcaaccgccgccaccgccgccgcacccataaataaataaaatcgacgcgaaaaacccgcgcgccctacgccgccgccgctcaataccgccgccaacacctcctccgcccctccttcttccgaactcatcccgcgaaaacgacgtcacctcctcgctacccaaacccgaacaccgcgaacgccccgcgaacgacaaccgcccctcccgaacgcgatctccaaactaaatccgaaaccgaacgaaaaaaaaaaaaaaactaaacgtaaaaaaaaaaaacgcccgaattttcgaaaacgaaaatataaaaaataaaaacgtataaaaaaacgcccgaaatatcgaaaacgaaaaaaaaatataaacaaaaataaaaacaaaaataccaaatataacaaataaaaaaataaaaacgacgaataaaaacgcccgaaaaaccgaaacgaaacgaaaaacgtaaaaataacaaaacgcccgaaaatcaaaactaaaactaaaaataaataacaaaaaaaaaacgcccaaatatcaaaacct

SEQ ID NO: 12997 - DNA, 531 bp, Artificial Sequence
  chemically treated genomic DNA (Homo sapiens) CpG-island No: 12997
aggaggtcgcggagtcgttgcggggaggcggcggggttttggggtcgtatggttttcggttgtcgggtagcgcggagttggaggcggaggagatcgaggagaggaacgtggttagcgtttggtttcgtcgcgtttcgaggtcgtcgtaggttgtattaatgcgttttttattcgcgcgttttttttttttttttaatttttttcgttttcgcgatattcggagtttttatttcgtaataggtttcgagtttttatttcgagttcggcgtgggggcggatcgagagtcgggttcgtttttttttattgtagtcgttcggtttgttaggattttcgcggggttgcgtagattttcgtggagagttcgtttgtagggtttgggcggggtggttcgtggttaggagtcgtaggtcggggattttcgtaggtaatatagcgtcgtttaaatgaatattttagagatacgtggtttaatttgggtatacgagttatttttaagggtcgttaatttatggtatgggtcggcgagtttt

SEQ ID NO: 12998 - DNA, 531 bp, Artificial Sequence
  chemically treated genomic DNA (Homo sapiens) CpG-island No: 12998
aaaactcgccgacccataccataaattaacgacccttaaaaataactcgtatacccaaattaaaccacgtatctctaaaatattcatttaaacgacgctatattacctacgaaaatccccgacctacgactcctaaccacgaaccaccccgcccaaaccctacaaacgaactctccacgaaaatctacgcaaccccgcgaaaatcctaacaaaccgaacgactacaataaaaaaaaacgaacccgactctcgatccgcccccacgccgaactcgaaataaaaactcgaaacctattacgaaataaaaactccgaatatcgcgaaaacgaaaaaaattaaaaaaaaaaaaaaaacgcgcgaataaaaaacgcattaatacaacctacgacgacctcgaaacgcgacgaaaccaaacgctaaccacgttcctctcctcgatctcctccgcctccaactccgcgctacccgacaaccgaaaaccatacgaccccaaaaccccgccgcctccccgcaacgactccgcgacctcct

SEQ ID NO: 12999 - DNA, 531 bp, Artificial Sequence
  chemically treated genomic DNA (Homo sapiens) CpG-island No: 12999
aagattcgtcgatttatgttatagattgacgatttttgaaggtggttcgtgtatttaggttaagttacgtgtttttaaaatgtttatttaggcggcgttgtgttatttgcgggaattttcgatttgcggtttttgattacgggttatttcgtttagattttgtaggcgggttttttacgagggtttgcgtagtttcgcgggggttttgataggtcgagcgattgtagtaggagggggcgggttcggttttcggttcgtttttacgtcgggttcggggtgggggttcggggtttattacgggatggaagtttcgggtgtcgcgggggcgggaggaattaagggagggagagaggcgcgcgggtgaaaggcgtattgatgtagtttgcggcggtttcggagcgcggcggagttagacgttgattacgttttttttttcggtttttttcgtttttagtttcgcgttgttcggtagtcgggagttatgcgattttagggtttcgtcgttttttcgtagcggtttcgcggtttttt

SEQ ID NO: 13000 - DNA, 531 bp, Artificial Sequence
  chemically treated genomic DNA (Homo sapiens) CpG-island No: 13000
aaaaaaccgcgaaaccgctacgaaaaaacgacgaaaccctaaaatcgcataactcccgactaccgaacaacgcgaaactaaaaacgaaaaaaaccgaaaaaaaaaacgtaatcaacgtctaactccgccgcgctccgaaaccgccgcaaactacatcaatacgcctttcacccgcgcgcctctctccctcccttaattcctcccgcccccgcgacacccgaaacttccatcccgtaataaaccccgaacccccaccccgaacccgacgtaaaaacgaaccgaaaaccgaacccgccccctcctactacaatcgctcgacctatcaaaacccccgcgaaactacgcaaaccctcgtaaaaaacccgcctacaaaatctaaacgaaataacccgtaatcaaaaaccgcaaatcgaaaattcccgcaaataacacaacgccgcctaaataaacattttaaaaacacgtaacttaacctaaatacacgaaccaccttcaaaaatcgtcaatctataacataaatcgacgaatctt

SEQ ID NO: 13001 - DNA, 563 bp, Artificial Sequence
  chemically treated genomic DNA (Homo sapiens) CpG-island No: 13001
ggggttttcggtttcgcggttcgttttcgggtgtgtttggaggagttttttttttgtggcgcgcgggagttatgtgatgcgttagtcggcgggacgggtgagttgtttattcgggaaatcgttttcgtttttttacgattttttcggttttcgtttgggtgtttttcgggtcggtagtatttcgttttcgggcgttcgaagcgagtttttcgggggtttgttcgtaggtattttttttttttcgagacggcgcgcgcgttttcggttttgatcgcggtcggatatattcgcgtttcggttcgtttgtcgttattttcgtttgttttttttagttattttatttttagttgttttcgttattttattttattattttttttcgttttttcgcgtattacgcgtttcggtttttagttttttttttttttgaatcgtttattttatagtttttcgttttcgggaagaagaaatatttttcgaagcgtattttttagttttttttttttacgcgttcgtttttttttttttttgttttttttgggggaggggggttgtcgttttgg

SEQ ID NO: 13002 - DNA, 563 bp, Artificial Sequence
  chemically treated genomic DNA (Homo sapiens) CpG-island No: 13002
ccaaaacgacaacccccctcccccaaaaaaaacaaaaaaaaaaaaaaacgaacgcgtaaaaaaaaaaaactaaaaaatacgcttcgaaaaatatttcttcttcccgaaaacgaaaaactataaaataaacgattcaaaaaaaaaaaaaactaaaaaccgaaacgcgtaatacgcgaaaaaacgaaaaaaaataataaaataaaataacgaaaacaactaaaaataaaataactaaaaaaaacaaacgaaaataacgacaaacgaaccgaaacgcgaatatatccgaccgcgatcaaaaccgaaaacgcgcgcgccgtctcgaaaaaaaaaaaatacctacgaacaaacccccgaaaaactcgcttcgaacgcccgaaaacgaaatactaccgacccgaaaaacacccaaacgaaaaccgaaaaaatcgtaaaaaaacgaaaacgatttcccgaataaacaactcacccgtcccgccgactaacgcatcacataactcccgcgcgccacaaaaaaaaaactcctccaaacacacccgaaaacgaaccgcgaaaccgaaaacccc

SEQ ID NO: 13003 - DNA, 563 bp, Artificial Sequence
  chemically treated genomic DNA (Homo sapiens) CpG-island No: 13003
ttaaggcgatagttttttttttttaagaaaagtagggggaggggagggcgagcgcgtggggaaggagggttgaggagtgcgtttcgggaaatgtttttttttttcgggggcgaagggttgtgaagtgagcggtttaagggaaaggggaattggaggtcgggacgcgtagtgcgcggagaggcgggggagggtggtggagtaaggtggcggggatagttaagggtggggtgattggagggagtaggcgggagtggcgataggcggatcggggcgcgagtgtgttcggtcgcggttagggtcgggagcgcgcgcgtcgtttcggaggggaaggggtgtttgcgaataagttttcggggaattcgtttcgagcgttcggaggcggagtattgtcggttcgaggggtatttaggcgggagtcgagagggtcgtgaggaagcgaggacggtttttcggataagtaatttattcgtttcgtcggttgacgtattatatggttttcgcgcgttatagagggagaatttttttaggtatattcgggagcgggtcgcggggtcggaaatttt

SEQ ID NO: 13004 - DNA, 563 bp, Artificial Sequence
  chemically treated genomic DNA (Homo sapiens) CpG-island No: 13004
aaaatttccgaccccgcgacccgctcccgaatatacctaaaaaaattctccctctataacgcgcgaaaaccatataatacgtcaaccgacgaaacgaataaattacttatccgaaaaaccgtcctcgcttcctcacgaccctctcgactcccgcctaaatacccctcgaaccgacaatactccgcctccgaacgctcgaaacgaattccccgaaaacttattcgcaaacaccccttcccctccgaaacgacgcgcgcgctcccgaccctaaccgcgaccgaacacactcgcgccccgatccgcctatcgccactcccgcctactccctccaatcaccccacccttaactatccccgccaccttactccaccaccctcccccgcctctccgcgcactacgcgtcccgacctccaattcccctttcccttaaaccgctcacttcacaacccttcgcccccgaaaaaaaaaaacatttcccgaaacgcactcctcaaccctccttccccacgcgctcgccctcccctccccctacttttcttaaaaaaaaaaaactatcgccttaa

SEQ ID NO: 13005 - DNA, 506 bp, Artificial Sequence
  chemically treated genomic DNA (Homo sapiens) CpG-island No: 13005
aatcgtagtaggcgattttttaaggggatattgggggaggtacggaacgcgttcgaaaatgttgggacgtcggttattggatttttagttttgcggcgatttttttttcgttgaggggtggaggttgtatcgcggggcgttagggacgggaggatatttttataggagttatacgggagtgtcgtaagtagggcgaggcggggtacgtgtgatacggcgttcggtttcgggtcgtttggtcgttgggggatagaggtttttttttcgttacgttcgttttttttggttttggcggggcgtttttggggtcgggaggagtttcgtttttagcggagcgtttgtcggtatttagtttttttttttcgttttggcggtgggaatttgatttttttttttggtcgcgtttcgggggttggagtttgtttttttacgtcgtttaatgagcgttttttaaagggaattgtttttttggttttttttcgttcgtagttgtttttatttgggcg

SEQ ID NO: 13006 - DNA, 506 bp, Artificial Sequence
  chemically treated genomic DNA (Homo sapiens) CpG-island No: 13006
cgcccaaataaaaacaactacgaacgaaaaaaaaccaaaaaaacaattccctttaaaaaacgctcattaaacgacgtaaaaaaacaaactccaacccccgaaacgcgaccaaaaaaaaaaatcaaattcccaccgccaaaacgaaaaaaaaaaactaaataccgacaaacgctccgctaaaaacgaaactcctcccgaccccaaaaacgccccgccaaaaccaaaaaaaacgaacgtaacgaaaaaaaaacctctatcccccaacgaccaaacgacccgaaaccgaacgccgtatcacacgtaccccgcctcgccctacttacgacactcccgtataactcctataaaaatatcctcccgtccctaacgccccgcgatacaacctccacccctcaacgaaaaaaaaatcgccgcaaaactaaaaatccaataaccgacgtcccaacattttcgaacgcgttccgtacctcccccaatatccccttaaaaaatcgcctactacgatt

SEQ ID NO: 13007 - DNA, 506 bp, Artificial Sequence
  chemically treated genomic DNA (Homo sapiens) CpG-island No: 13007
cgtttaggtagaggtagttgcggacgagaggaggttaaggaggtagttttttttagagggcgtttattgggcgacgtggggaaataagttttagttttcgaagcgcgattaaaaggagaaattaagtttttatcgttagggcgggggagggaagttgggtgtcggtaggcgtttcgttggagacgagatttttttcggttttagaagcgtttcgttagggttagagagggcgagcgtggcgggagggaagtttttgttttttagcggttaggcgattcgaagtcgagcgtcgtgttatacgtatttcgtttcgttttgtttgcggtattttcgtgtaatttttatgaaaatgttttttcgtttttgacgtttcgcggtgtaatttttattttttaacgaggagggggtcgtcgtaggattgggaatttagtggtcggcgttttagtattttcggacgcgtttcgtgttttttttagtatttttttgagggatcgtttattgcgatt

SEQ ID NO: 13008 - DNA, 506 bp, Artificial Sequence
  chemically treated genomic DNA (Homo sapiens) CpG-island No: 13008
aatcgcaataaacgatccctcaaaaaaatactaaaaaaaacacgaaacgcgtccgaaaatactaaaacgccgaccactaaattcccaatcctacgacgaccccctcctcgttaaaaaataaaaattacaccgcgaaacgtcaaaaacgaaaaaacattttcataaaaattacacgaaaataccgcaaacaaaacgaaacgaaatacgtataacacgacgctcgacttcgaatcgcctaaccgctaaaaaacaaaaacttccctcccgccacgctcgccctctctaaccctaacgaaacgcttctaaaaccgaaaaaaatctcgtctccaacgaaacgcctaccgacacccaacttccctcccccgccctaacgataaaaacttaatttctccttttaatcgcgcttcgaaaactaaaacttatttccccacgtcgcccaataaacgccctctaaaaaaaactacctccttaacctcctctcgtccgcaactacctctacctaaacg

SEQ ID NO: 13009 - DNA, 1023 bp, Artificial Sequence
  chemically treated genomic DNA (Homo sapiens) CpG-island No: 13009
gtgcgaagttagtagtgcgcgtgcgcgcgggtacgggcgcgcgatcgtcgggttttcgcgttttttttttttttcgtttttttataatttggttggcgtggaggaggcgtcgtcggagtcggagggcggggagttaggaggagggagttcgagagttgtggagattagtgattgggagaagtcgtagttcgtttaggttcgcgttttttcgtttttcgttttttttttttatatatttatttcgtttttcgttttagttcgcgcgttagttttttttttcgttcggggtttttgtcggtagtttttcgggttttggcgcggcgggggcgtttcgggggtgttttcgttttttcgttgcgggcgggcgggcggtatgtggcgtttggtgttttcgaagttgggtcgtttgtttcgttcgttgaagttggcggcgttgggtagtttgttggtgttgatggtgttgtattcgtcgtcgttgttcgttttttggtagcgtaacgaattgatcgatcggcgttttttgtagtttaataagtgttcggcgtgtttcggtacgagttggtgtcgtcgtttttttaacgggtaggtggtattcgaggcgtggggtcgtttgcgtttgttggatttttttaacgtgaagaacgtgtatttcgcgtagtacggcgagtttcgcgagggcggtcgtcgtcgagtggtgtttaagcgtttcggttcgtagcgcgagttggcgtagttcgattagagtatttgtaagcgggttatcggtcggtttcgttgcgatttgttgtaggttatgtttcggatcgagttcgcgcgttttaacggcgacgtgcgtttgtttacgttcgaggcggtggagggttggtcggatttggtgtattgtttttcgtagcgttttttcgatcgtttggtgcgtcgttacgcggagattaaggattcgggtagttttttgtttcgtaattttaaggattcggagcgtatgtagttgttgttgattttggtttttaatttcgagtcgttggt

SEQ ID NO: 13010 - DNA, 1023 bp, Artificial Sequence
  chemically treated genomic DNA (Homo sapiens) CpG-island No: 13010
accaacgactcgaaattaaaaaccaaaatcaacaacaactacatacgctccgaatccttaaaattacgaaacaaaaaactacccgaatccttaatctccgcgtaacgacgcaccaaacgatcgaaaaaacgctacgaaaaacaatacaccaaatccgaccaaccctccaccgcctcgaacgtaaacaaacgcacgtcgccgttaaaacgcgcgaactcgatccgaaacataacctacaacaaatcgcaacgaaaccgaccgataacccgcttacaaatactctaatcgaactacgccaactcgcgctacgaaccgaaacgcttaaacaccactcgacgacgaccgccctcgcgaaactcgccgtactacgcgaaatacacgttcttcacgttaaaaaaatccaacaaacgcaaacgaccccacgcctcgaataccacctacccgttaaaaaaacgacgacaccaactcgtaccgaaacacgccgaacacttattaaactacaaaaaacgccgatcgatcaattcgttacgctaccaaaaaacgaacaacgacgacgaatacaacaccatcaacaccaacaaactacccaacgccgccaacttcaacgaacgaaacaaacgacccaacttcgaaaacaccaaacgccacataccgcccgcccgcccgcaacgaaaaaacgaaaacacccccgaaacgcccccgccgcgccaaaacccgaaaaactaccgacaaaaaccccgaacgaaaaaaaaaactaacgcgcgaactaaaacgaaaaacgaaataaatatataaaaaaaaaaaacgaaaaacgaaaaaacgcgaacctaaacgaactacgacttctcccaatcactaatctccacaactctcgaactccctcctcctaactccccgccctccgactccgacgacgcctcctccacgccaaccaaattataaaaaaacgaaaaaaaaaaaaaacgcgaaaacccgacgatcgcgcgcccgtacccgcgcgcacgcgcactactaacttcgcac

SEQ ID NO: 13011 - DNA, 1023 bp, Artificial Sequence
  chemically treated genomic DNA (Homo sapiens) CpG-island No: 13011
attagcggttcggggttgaaggttagggttagtagtagttgtatgcgtttcgagtttttgaggttgcgaagtaggaagttgttcgagtttttggttttcgcgtagcggcgtattaggcggtcgagaaggcgttgcgaggggtagtgtattaggttcgattagttttttatcgtttcgggcgtgagtagacgtacgtcgtcgttgaggcgcgcgaattcggttcggggtatggtttgtagtaggtcgtagcggggtcggtcggtggttcgtttgtagatgttttggtcgagttgcgttagttcgcgttgcgagtcgaggcgtttgagtattattcggcggcggtcgttttcgcggggttcgtcgtattgcgcgaagtatacgttttttacgttgaggaagtttagtaggcgtaagcggttttacgtttcgaatattatttgttcgttgaggaagcggcggtattagttcgtgtcgaagtacgtcgggtatttattgagttgtaggaagcgtcggtcggttagttcgttgcgttgttaagaggcgagtagcgacggcgagtgtagtattattagtattaataggttgtttagcgtcgttagttttagcgagcgggataggcggtttagtttcgggggtattaggcgttatatatcgttcgttcgttcgtaacgggagggcgagggtattttcggggcgttttcgtcgcgttaagattcggagagttatcggtaggaatttcgggcgagagaaggagttagcgcgcgggttggggcggagggcggagtaggtgtgtgagagaggaagacggggagcgggaaggcgcgggtttgagcgggttgcgattttttttagttattagtttttataattttcgagttttttttttttagtttttcgtttttcgatttcggcggcgttttttttacgttagttaagttatagaggagcgggagggggagggagcgcggggattcgacggtcgcgcgttcgtgttcgcgcgtacgcgtattgttggtttcgtat

SEQ ID NO: 13012 - DNA, 1023 bp, Artificial Sequence
  chemically treated genomic DNA (Homo sapiens) CpG-island No: 13012
atacgaaaccaacaatacgcgtacgcgcgaacacgaacgcgcgaccgtcgaatccccgcgctccctccccctcccgctcctctataacttaactaacgtaaaaaaaacgccgccgaaatcgaaaaacgaaaaactaaaaaaaaaaaactcgaaaattataaaaactaataactaaaaaaaatcgcaacccgctcaaacccgcgccttcccgctccccgtcttcctctctcacacacctactccgccctccgccccaacccgcgcgctaactccttctctcgcccgaaattcctaccgataactctccgaatcttaacgcgacgaaaacgccccgaaaataccctcgccctcccgttacgaacgaacgaacgatatataacgcctaatacccccgaaactaaaccgcctatcccgctcgctaaaactaacgacgctaaacaacctattaatactaataatactacactcgccgtcgctactcgcctcttaacaacgcaacgaactaaccgaccgacgcttcctacaactcaataaatacccgacgtacttcgacacgaactaataccgccgcttcctcaacgaacaaataatattcgaaacgtaaaaccgcttacgcctactaaacttcctcaacgtaaaaaacgtatacttcgcgcaatacgacgaaccccgcgaaaacgaccgccgccgaataatactcaaacgcctcgactcgcaacgcgaactaacgcaactcgaccaaaacatctacaaacgaaccaccgaccgaccccgctacgacctactacaaaccataccccgaaccgaattcgcgcgcctcaacgacgacgtacgtctactcacgcccgaaacgataaaaaactaatcgaacctaatacactacccctcgcaacgccttctcgaccgcctaatacgccgctacgcgaaaaccaaaaactcgaacaacttcctacttcgcaacctcaaaaactcgaaacgcatacaactactactaaccctaaccttcaaccccgaaccgctaat

SEQ ID NO: 13013 - DNA, 671 bp, Artificial Sequence
  chemically treated genomic DNA (Homo sapiens) CpG-island No: 13013
tttgcgtcgttcgtaaagtacgtgggagggaaattgaggttcggatagttttttttttacgtttacggagcgtcgatcgcggtttgggttagaaggagttatacggtaaaaaggggattgtacgtcgaattttatttttcgtcggtttttgttttttcgaatttttagcggttcgggtttttttttttcgcgggaagaatatttatagtcgagcgatttaggacgggagtggttcgggaagacgcgttagtcgtttacgattgtagtttagtaggttttcgaggtagcggtaggtagtggggtatgggcgttcggcggttattttagagggttgttcgagtttttcgcgatcgtcgttgtttgatcggttagcgcgttttagtatcgcgtatagtagtagttttaatttcgcggcgcgcgtacggaggttcggcgcgtttatcgcggtttagcggtttaggtttttattcgaagtttttagtcggcgcgcgttcggggttcggtataaatttttagtcgagggtgtacgttcgttttcgcggtcgcgtgcgcgtttttttttcgcgttgttcggttaatttttttttttattttcggcggcgaagtttttttatgtttttaaatagtaggagggaaatcgaaaagaattgttaattgtaatagagttgtag

SEQ ID NO: 13014 - DNA, 671 bp, Artificial Sequence
  chemically treated genomic DNA (Homo sapiens) CpG-island No: 13014
ctacaactctattacaattaacaattcttttcgatttccctcctactatttaaaaacataaaaaaacttcgccgccgaaaataaaaaaaaaaattaaccgaacaacgcgaaaaaaaaacgcgcacgcgaccgcgaaaacgaacgtacaccctcgactaaaaatttataccgaaccccgaacgcgcgccgactaaaaacttcgaataaaaacctaaaccgctaaaccgcgataaacgcgccgaacctccgtacgcgcgccgcgaaattaaaactactactatacgcgatactaaaacgcgctaaccgatcaaacaacgacgatcgcgaaaaactcgaacaaccctctaaaataaccgccgaacgcccataccccactacctaccgctacctcgaaaacctactaaactacaatcgtaaacgactaacgcgtcttcccgaaccactcccgtcctaaatcgctcgactataaatattcttcccgcgaaaaaaaaaaacccgaaccgctaaaaattcgaaaaaacaaaaaccgacgaaaaataaaattcgacgtacaatcccctttttaccgtataactccttctaacccaaaccgcgatcgacgctccgtaaacgtaaaaaaaaaactatccgaacctcaatttccctcccacgtactttacgaacgacgcaaa

SEQ ID NO: 13015 - DNA, 671 bp, Artificial Sequence
  chemically treated genomic DNA (Homo sapiens) CpG-island No: 13015
ttgtaattttgttgtagttggtagtttttttcggttttttttttgttgtttgggggtatgaaagggtttcgtcgtcgggagtaaaagaaggaattgatcgggtagcgcgagggaggagcgcgtacgcgatcgcgagggcgggcgtgtattttcggttggaagtttgtgtcgggtttcgagcgcgcgtcggttgggagtttcgggtagagatttaggtcgttggatcgcgatgagcgcgtcgagttttcgtgcgcgcgtcgcggggttggggttgttgttgtgcgcggtgttggggcgcgttggtcggttagatagcggcggtcgcggggaattcgggtagttttttggggtagtcgtcgagcgtttatgttttattatttgtcgttgtttcggggatttgttggattgtagtcgtaagcggttagcgcgttttttcgagttattttcgttttgggtcgttcggttgtaagtatttttttcgcggggggagggggttcgggtcgttggagattcgagaaaataggagtcggcggggaatggggttcggcgtgtagttttttttttgtcgtatagttttttttggtttaggtcgcgatcggcgtttcgtgggcgtggaaaaagaattgttcgggttttagttttttttttacgtgttttgcgggcggcgtagg

SEQ ID NO: 13016 - DNA, 671 bp, Artificial Sequence
  chemically treated genomic DNA (Homo sapiens) CpG-island No: 13016
cctacgccgcccgcaaaacacgtaaaaaaaaaactaaaacccgaacaattctttttccacgcccacgaaacgccgatcgcgacctaaaccaaaaaaaactatacgacaaaaaaaaaactacacgccgaaccccattccccgccgactcctattttctcgaatctccaacgacccgaaccccctccccccgcgaaaaaaatacttacaaccgaacgacccaaaacgaaaataactcgaaaaaacgcgctaaccgcttacgactacaatccaacaaatccccgaaacaacgacaaataataaaacataaacgctcgacgactaccccaaaaaactacccgaattccccgcgaccgccgctatctaaccgaccaacgcgccccaacaccgcgcacaacaacaaccccaaccccgcgacgcgcgcacgaaaactcgacgcgctcatcgcgatccaacgacctaaatctctacccgaaactcccaaccgacgcgcgctcgaaacccgacacaaacttccaaccgaaaatacacgcccgccctcgcgatcgcgtacgcgctcctccctcgcgctacccgatcaattccttcttttactcccgacgacgaaaccctttcatacccccaaacaacaaaaaaaaaaccgaaaaaaactaccaactacaacaaaattacaa

SEQ ID NO: 13017 - DNA, 620 bp, Artificial Sequence
  chemically treated genomic DNA (Homo sapiens) CpG-island No: 13017
tgggtgcgcgcggtgggggagggggtcggttttagttttaagtgcggttatttacgaagacgcgttgggtacgaagaaatttacggcgacgaagtaatttttttcggggttagagtattcggtaggattgtttacgtttaggttgaaggcgcggtatagaggtagtaggagtttcgagagaagaagcgggaggtcgcggggatcgaggcgtagtcgtcgtcgcggcggaaaagttatcgtcgaagtgcgcgcgggacgttaagtcgggagcggtagttattttttttcgttttagcgaggcgtttagtgttcgcggttcgtcgtttgcgcgcgtttaaatttgtcggtcgtttttttttcggttagttcgggatagtttcggggtaggtaagagggttgagtttcggagcgatcgttagggacgaggggcgtagagcgcgcggggcggggatagtagcgtagacggttttttgttttttttcggtttcgtcgttttacgtagcgtttgaggttggggattgtcggggtgagcgtcgtattttaggtttgagagtcgcggcggtattgggaggagatttggaaggaggaggagtcggttcgggaggttgttgtggagttgg

SEQ ID NO: 13018 - DNA, 620 bp, Artificial Sequence
  chemically treated genomic DNA (Homo sapiens) CpG-island No: 13018
ccaactccacaacaacctcccgaaccgactcctcctccttccaaatctcctcccaataccgccgcgactctcaaacctaaaatacgacgctcaccccgacaatccccaacctcaaacgctacgtaaaacgacgaaaccgaaaaaaaacaaaaaaccgtctacgctactatccccgccccgcgcgctctacgcccctcgtccctaacgatcgctccgaaactcaaccctcttacctaccccgaaactatcccgaactaaccgaaaaaaaaacgaccgacaaatttaaacgcgcgcaaacgacgaaccgcgaacactaaacgcctcgctaaaacgaaaaaaaataactaccgctcccgacttaacgtcccgcgcgcacttcgacgataacttttccgccgcgacgacgactacgcctcgatccccgcgacctcccgcttcttctctcgaaactcctactacctctataccgcgccttcaacctaaacgtaaacaatcctaccgaatactctaaccccgaaaaaaattacttcgtcgccgtaaatttcttcgtacccaacgcgtcttcgtaaataaccgcacttaaaactaaaaccgaccccctcccccaccgcgcgcaccca

SEQ ID NO: 13019 - DNA, 620 bp, Artificial Sequence
  chemically treated genomic DNA (Homo sapiens) CpG-island No: 13019
ttagttttatagtagtttttcgggtcggttttttttttttttaggtttttttttagtgtcgtcgcggtttttaggtttgaggtgcggcgtttatttcggtagtttttagttttagacgttgcgtggagcggcggagtcggagggaagtaaaggatcgtttgcgttgttgttttcgtttcgcgcgttttgcgtttttcgtttttggcggtcgtttcgaagtttagtttttttgtttgtttcggagttgtttcgggttagtcgagaagagagcggtcggtaagtttgggcgcgcgtaggcggcgggtcgcgggtattgggcgtttcgttggggcggggggaggtggttatcgttttcggtttggcgtttcgcgcgtatttcggcgatggttttttcgtcgcggcgacggttgcgtttcggttttcgcggtttttcgttttttttttcgggatttttgttatttttgtgtcgcgtttttaatttagacgtggatagttttgtcgagtattttggtttcgagggaagttatttcgtcgtcgtggattttttcgtgtttagcgcgttttcgtaagtggtcgtatttggaattggagtcggtttttttttttatcgcgcgtattta

SEQ ID NO: 13020 - DNA, 620 bp, Artificial Sequence
  chemically treated genomic DNA (Homo sapiens) CpG-island No: 13020
taaatacgcgcgataaaaaaaaaaaccgactccaattccaaatacgaccacttacgaaaacgcgctaaacacgaaaaaatccacgacgacgaaataacttccctcgaaaccaaaatactcgacaaaactatccacgtctaaattaaaaacgcgacacaaaaataacaaaaatcccgaaaaaaaaaacgaaaaaccgcgaaaaccgaaacgcaaccgtcgccgcgacgaaaaaaccatcgccgaaatacgcgcgaaacgccaaaccgaaaacgataaccacctccccccgccccaacgaaacgcccaatacccgcgacccgccgcctacgcgcgcccaaacttaccgaccgctctcttctcgactaacccgaaacaactccgaaacaaacaaaaaaactaaacttcgaaacgaccgccaaaaacgaaaaacgcaaaacgcgcgaaacgaaaacaacaacgcaaacgatcctttacttccctccgactccgccgctccacgcaacgtctaaaactaaaaactaccgaaataaacgccgcacctcaaacctaaaaaccgcgacgacactaaaaaaaaacctaaaaaaaaaaaaaaccgacccgaaaaactactataaaactaa

SEQ ID NO: 13021 - DNA, 1254 bp, Artificial Sequence
  chemically treated genomic DNA (Homo sapiens) CpG-island No: 13021
tcgtcgcgcgtcggggtcggtttttttttttttgagcgcgcgttcgggtagcgggggaggaaacgaggagggatttcggagagcgttttttgttttcgtttcgggcgttttatcgttacgagtgtcgtttgcggtttatatttaggtcgttcgtatttgttcgcgtcgtttttcggtcgggaggggttttcgtttttagtttagatgattatattcgttttcgcggttttattcgagcgcgttcggggagggggcgtgttcggcgggggcgcggtcgtttggcgggcgtcggtttcgagagttaagattcgtttcgcgcgacgcgcggggttagtcgcgggtcggagcggtaggggaaggggcgaggtttcgggcgtttcggttcgttcggtttttatttcgcgttttatcggggatttcgggggcgtggtcgggtagttcgcgtcgatttcgttcgcgcgattcgggcgttcgcgtcgttttattgatttgtgtgagtttttaggtgcgttttgaggtgcgaagatttttcgtaaattttttcgtagttcgcgtagtggtatttgtgttttttttgcggggattcgaggtcggcgcgatttcggtttcgtcggattttttgtttgaggtcgggttcgtcgtttttcgcgggtttcggttttcgttcgggttttagtttcgtttcgggtttcggttcgttttacgtcgggttggggggcgcggtcgtcgcgttttcggcgtcgggggaggtgggttcgggggcgggcggcggtaggcggtagggggttttcgtttttcgggtcgcggcgttttttttgcgtttcgtcggggcgggcgtcggcgtttgttggttgaggttcgttaggattcgcgttattacgaagagcgaggcgttgtttttatcgtcgcggcgtttttcgacgcggggtagcgtgggggtggcggttacggtcgcgttttcgggtcgggatttcggtttttttcgcggttcgtgtacgatcgcgcggttcgatatggatacgaggtattcggcggcgaagtggtttatataggcggcggttgttatgttgcgggttggggtcggcggcggtgtttttgttgcgagtcgttagtcgcgtattcgtatttacggtttcgggagagcgggcggggggcgggggcgcggcgcgtttttttttcgggttgggttgggttgttaaatatgttttaattaattatagtatttttggggttttgaggttgtttacgattttt

SEQ ID NO: 13022 - DNA, 1254 bp, Artificial Sequence
  chemically treated genomic DNA (Homo sapiens) CpG-island No: 13022
aaaaatcgtaaacaacctcaaaaccccaaaaatactataattaattaaaacatatttaacaacccaacccaacccgaaaaaaaaacgcgccgcgcccccgccccccgcccgctctcccgaaaccgtaaatacgaatacgcgactaacgactcgcaacaaaaacaccgccgccgaccccaacccgcaacataacaaccgccgcctatataaaccacttcgccgccgaatacctcgtatccatatcgaaccgcgcgatcgtacacgaaccgcgaaaaaaaccgaaatcccgacccgaaaacgcgaccgtaaccgccacccccacgctaccccgcgtcgaaaaacgccgcgacgataaaaacaacgcctcgctcttcgtaataacgcgaatcctaacgaacctcaaccaacaaacgccgacgcccgccccgacgaaacgcaaaaaaaacgccgcgacccgaaaaacgaaaaccccctaccgcctaccgccgcccgcccccgaacccacctcccccgacgccgaaaacgcgacgaccgcgccccccaacccgacgtaaaacgaaccgaaacccgaaacgaaactaaaacccgaacgaaaaccgaaacccgcgaaaaacgacgaacccgacctcaaacaaaaaatccgacgaaaccgaaatcgcgccgacctcgaatccccgcaaaaaaaacacaaataccactacgcgaactacgaaaaaatttacgaaaaatcttcgcacctcaaaacgcacctaaaaactcacacaaatcaataaaacgacgcgaacgcccgaatcgcgcgaacgaaatcgacgcgaactacccgaccacgcccccgaaatccccgataaaacgcgaaataaaaaccgaacgaaccgaaacgcccgaaacctcgccccttcccctaccgctccgacccgcgactaaccccgcgcgtcgcgcgaaacgaatcttaactctcgaaaccgacgcccgccaaacgaccgcgcccccgccgaacacgccccctccccgaacgcgctcgaataaaaccgcgaaaacgaatataatcatctaaactaaaaacgaaaacccctcccgaccgaaaaacgacgcgaacaaatacgaacgacctaaatataaaccgcaaacgacactcgtaacgataaaacgcccgaaacgaaaacaaaaaacgctctccgaaatccctcctcgtttcctcccccgctacccgaacgcgcgctcaaaaaaaaaaaaaccgaccccgacgcgcgacga

SEQ ID NO: 13023 - DNA, 1254 bp, Artificial Sequence
  chemically treated genomic DNA (Homo sapiens) CpG-island No: 13023
gggagtcgtgggtagttttaaagttttagagatgttgtgattgattgagatatatttggtagtttagtttagttcgaggagagggcgcgtcgcgttttcgtttttcgttcgttttttcgaggtcgtgggtgcggatgcgcggttgacgattcgtagtaagagtatcgtcgtcggttttagttcgtagtatggtagtcgtcgtttatgtggattatttcgtcgtcgagtgtttcgtgtttatgtcgagtcgcgcggtcgtgtacgggtcgcgggaggggtcggagtttcggttcgagggcgcggtcgtggtcgttatttttacgttgtttcgcgtcgaggagcgtcgcgacggtaaggatagcgtttcgtttttcgtggtggcgcggattttagcggattttaattagtaagcgtcggcgttcgtttcggcggagcgtagggagggcgtcgcggttcggaaggcgaggattttttgtcgtttgtcgtcgttcgttttcgagtttatttttttcggcgtcgaaggcgcggcggtcgcgttttttagttcggcgtggagcgagtcggagttcgaggcggggttggagttcgagcgggagtcggggttcgcggggagcggcgagttcggttttagataaagggttcggcggggtcgaagtcgcgtcgatttcgagttttcgtagaggaagtataagtgttattacgcgggttgcgagaaagtttacgggaaattttcgtattttaaggcgtatttgagaatttatataggttagtggggcggcgcgggcgttcggatcgcgcggacggggtcggcgcgagttgttcgattacgttttcggagttttcgatggggcgcgaggtgggggtcgggcgggtcggaacgttcggggtttcgtttttttttttgtcgtttcgattcgcggttggtttcgcgcgtcgcgcgaggcgggttttggttttcggagtcggcgttcgttaggcgatcgcgttttcgtcgggtacgtttttttttcgggcgcgttcgggtggggtcgcgggggcggatatagttatttgggttgggggcggggatttttttcggtcgggaggcggcgcgggtaggtgcgggcggtttgggtgtggatcgtaggcggtattcgtgacggtggggcgttcggagcgggggtaggggacgtttttcggggttttttttcgttttttttttcgttgttcgggcgcgcgtttaggaggggaggggtcggtttcggcgcgcggcgg

SEQ ID NO: 13024 - DNA, 1254 bp, Artificial Sequence
  chemically treated genomic DNA (Homo sapiens) CpG-island No: 13024
ccgccgcgcgccgaaaccgacccctcccctcctaaacgcgcgcccgaacaacgaaaaaaaaaacgaaaaaaaaccccgaaaaacgtcccctacccccgctccgaacgccccaccgtcacgaataccgcctacgatccacacccaaaccgcccgcacctacccgcgccgcctcccgaccgaaaaaaatccccgcccccaacccaaataactatatccgcccccgcgaccccacccgaacgcgcccgaaaaaaaaacgtacccgacgaaaacgcgatcgcctaacgaacgccgactccgaaaaccaaaacccgcctcgcgcgacgcgcgaaaccaaccgcgaatcgaaacgacaaaaaaaaaaacgaaaccccgaacgttccgacccgcccgacccccacctcgcgccccatcgaaaactccgaaaacgtaatcgaacaactcgcgccgaccccgtccgcgcgatccgaacgcccgcgccgccccactaacctatataaattctcaaatacgccttaaaatacgaaaatttcccgtaaactttctcgcaacccgcgtaataacacttatacttcctctacgaaaactcgaaatcgacgcgacttcgaccccgccgaaccctttatctaaaaccgaactcgccgctccccgcgaaccccgactcccgctcgaactccaaccccgcctcgaactccgactcgctccacgccgaactaaaaaacgcgaccgccgcgccttcgacgccgaaaaaaataaactcgaaaacgaacgacgacaaacgacaaaaaatcctcgccttccgaaccgcgacgccctccctacgctccgccgaaacgaacgccgacgcttactaattaaaatccgctaaaatccgcgccaccacgaaaaacgaaacgctatccttaccgtcgcgacgctcctcgacgcgaaacaacgtaaaaataacgaccacgaccgcgccctcgaaccgaaactccgacccctcccgcgacccgtacacgaccgcgcgactcgacataaacacgaaacactcgacgacgaaataatccacataaacgacgactaccatactacgaactaaaaccgacgacgatactcttactacgaatcgtcaaccgcgcatccgcacccacgacctcgaaaaaacgaacgaaaaacgaaaacgcgacgcgccctctcctcgaactaaactaaactaccaaatatatctcaatcaatcacaacatctctaaaactttaaaactacccacgactccc

SEQ ID NO: 13025 - DNA, 1352 bp, Artificial Sequence
  chemically treated genomic DNA (Homo sapiens) CpG-island No: 13025
agatagcgggcgggtggggcgcggtgggcggggttttcgtagttggtggcgtttgaagttttttcgatcgcggtgggagaggggtagtttagaagagttggtagcgggtttgcggcgggatggggaggaaggggtttcgcgtttttttagtagcggcgtcggtcgttttggtacgtagttcgtttttggaggtataggtcgcggtgggcgcgttattcgggttgttaggtttatcgttagtcgaggttagttttgttcgggttgattcgagttgaagggtagcgcggtcgtatttcggattttaggaacgagttcgagtttgtttttttcgcgggagttgtttcgttcggattttcggagttttgtaaggtaggggcgtggggagggcgagcggtttgaggttttaggcgcggttattcggtaagtcggcggcggagggcgcggcgcgagtgcgtttcgtttttaggtagtttcgcgttcggtcgggtagatacgttttttcgtcggcgtttatcgcgggaggaataaatggcgttttttagaaatcgtttttttttatgtcgggggttaaggttgttattatataaaagtttcggtagagaagtgttcgttgtgttttcgtcgcggggggtataagtagtcgtttcgcgtcgcgattattcggttcgtcgttttcggacgttatgcgttagcgcgtttcgttttagttttcgtttttttttttatcggtttaggggatacgtttattggcgcgcgtagggttcgggatcgggtacgtttttttaacggttcggattggtttggtcgtgtatttacggattaatggcgtttgtttcggttttcggttacgtttttttgtttaggcgcgggtacgcgatcgtttcgtttcgtcggtgcgcgttttggggttttcgtttttttcgcgcgcgtagtttttcgtagtcgtcgtcgtttgtaatttgcgtcgttaggatgtggttgggggttgacgtcgggtttagatgtggtttcggtttcgtttattttcggggtcgggtcgtttatacggagtcgcggcgcgtacggtagttgtttcgtttgttataatgcgcggcgaagttgcggtcgcgatttggcgaggtggtttttaacgttgtcgttcggtatttttagaatcggtcgtttttgacgtcgcgcggggattttagtcgttcgcgcgttttatgcgtttatttttcggtgttcggtcgggtcggcgtttcgtagacgcggagtcgcgcgggtgacggtataggcggttgcgcgtttagtttagtttagtttagtatttattttttttttattgtttttattttattttatttttagatttg

SEQ ID NO: 13026 - DNA, 1352 bp, Artificial Sequence
  chemically treated genomic DNA (Homo sapiens) CpG-island No: 13026
caaatctaaaaataaaataaaataaaaacaataaaaaaaaaataaatactaaactaaactaaactaaacgcgcaaccgcctataccgtcacccgcgcgactccgcgtctacgaaacgccgacccgaccgaacaccgaaaaataaacgcataaaacgcgcgaacgactaaaatccccgcgcgacgtcaaaaacgaccgattctaaaaataccgaacgacaacgttaaaaaccacctcgccaaatcgcgaccgcaacttcgccgcgcattataacaaacgaaacaactaccgtacgcgccgcgactccgtataaacgacccgaccccgaaaataaacgaaaccgaaaccacatctaaacccgacgtcaacccccaaccacatcctaacgacgcaaattacaaacgacgacgactacgaaaaactacgcgcgcgaaaaaaacgaaaaccccaaaacgcgcaccgacgaaacgaaacgatcgcgtacccgcgcctaaacaaaaaaacgtaaccgaaaaccgaaacaaacgccattaatccgtaaatacacgaccaaaccaatccgaaccgttaaaaaaacgtacccgatcccgaaccctacgcgcgccaataaacgtatcccctaaaccgataaaaaaaaaaacgaaaactaaaacgaaacgcgctaacgcataacgtccgaaaacgacgaaccgaataatcgcgacgcgaaacgactacttataccccccgcgacgaaaacacaacgaacacttctctaccgaaacttttatataataacaaccttaacccccgacataaaaaaaaacgatttctaaaaaacgccatttattcctcccgcgataaacgccgacgaaaaaacgtatctacccgaccgaacgcgaaactacctaaaaacgaaacgcactcgcgccgcgccctccgccgccgacttaccgaataaccgcgcctaaaacctcaaaccgctcgccctccccacgcccctaccttacaaaactccgaaaatccgaacgaaacaactcccgcgaaaaaaacaaactcgaactcgttcctaaaatccgaaatacgaccgcgctacccttcaactcgaatcaacccgaacaaaactaacctcgactaacgataaacctaacaacccgaataacgcgcccaccgcgacctatacctccaaaaacgaactacgtaccaaaacgaccgacgccgctactaaaaaaacgcgaaaccccttcctccccatcccgccgcaaacccgctaccaactcttctaaactacccctctcccaccgcgatcgaaaaaacttcaaacgccaccaactacgaaaaccccgcccaccgcgccccacccgcccgctatct

SEQ ID NO: 13027 - DNA, 1352 bp, Artificial Sequence
  chemically treated genomic DNA (Homo sapiens) CpG-island No: 13027
taagtttggaaatggggtaaggtgggggtagtggagaaagaatgagtgttgggttgggttgggttgggcgcgtagtcgtttgtgtcgttattcgcgcggtttcgcgtttgcgaggcgtcggttcggtcgggtatcgaagagtgagcgtatggggcgcgcgggcgattggggttttcgcgcggcgttaggggcggtcggttttaaggatgtcgagcggtagcgttagggattatttcgttaagtcgcggtcgtagtttcgtcgcgtattgtggtaggcgggatagttgtcgtgcgcgtcgcggtttcgtgtgggcggttcggtttcgggggtgggcggggtcggggttatatttggattcgacgttagtttttagttatattttggcggcgtaggttataggcggcggcggttgcggggagttgcgcgcgcggagggggcggggattttagagcgcgtatcggcggaacggagcggtcgcgtgttcgcgtttgggtaagggggcgtgatcgagggtcgggatagacgttattggttcgtgagtgtacggttaggttaattcgagtcgttagaggggcgtgttcggtttcgggttttgcgcgcgttagtgggcgtgttttttgggtcggtgggaggaggggcggaaattggagcggggcgcgttgacgtatgacgttcgggggcggcgggtcgggtagtcgcggcgcggagcggttgtttgtatttttcgcggcggggatatagcgagtatttttttgtcggagtttttatgtggtgatagttttggttttcggtatggaggggagcggtttttggagggcgttatttgtttttttcgcgatgggcgtcggcggggaggcgtgtttgttcggtcgggcgcggggttgtttaggggcggaacgtattcgcgtcgcgtttttcgtcgtcggtttgtcgggtggtcgcgtttagagttttaggtcgttcgttttttttacgtttttgttttgtagagtttcgggagttcgggcggggtagttttcgcgggagggatagattcgggttcgtttttggggttcggggtgcggtcgcgttgttttttagttcgggttagttcgagtaggattggtttcggttggcggtgagtttggtagttcgggtggcgcgtttatcgcggtttgtgtttttagaagcgaattacgtgttagggcggtcggcgtcgttgttgagggaacgcggggtttttttttttttatttcgtcgtaggttcgttgttaatttttttaggttgttttttttttatcgcggtcgggggggttttaaacgttattagttgcgaggatttcgtttatcgcgttttattcgttcgttgttt

SEQ ID NO: 13028 - DNA, 1352 bp, Artificial Sequence
  chemically treated genomic DNA (Homo sapiens) CpG-island No: 13028
aaacaacgaacgaataaaacgcgataaacgaaatcctcgcaactaataacgtttaaaacccccccgaccgcgataaaaaaaaaacaacctaaaaaaattaacaacgaacctacgacgaaataaaaaaaaaaaaaccccgcgttccctcaacaacgacgccgaccgccctaacacgtaattcgcttctaaaaacacaaaccgcgataaacgcgccacccgaactaccaaactcaccgccaaccgaaaccaatcctactcgaactaacccgaactaaaaaacaacgcgaccgcaccccgaaccccaaaaacgaacccgaatctatccctcccgcgaaaactaccccgcccgaactcccgaaactctacaaaacaaaaacgtaaaaaaaacgaacgacctaaaactctaaacgcgaccacccgacaaaccgacgacgaaaaacgcgacgcgaatacgttccgcccctaaacaaccccgcgcccgaccgaacaaacacgcctccccgccgacgcccatcgcgaaaaaaacaaataacgccctccaaaaaccgctcccctccataccgaaaaccaaaactatcaccacataaaaactccgacaaaaaaatactcgctatatccccgccgcgaaaaatacaaacaaccgctccgcgccgcgactacccgacccgccgcccccgaacgtcatacgtcaacgcgccccgctccaatttccgcccctcctcccaccgacccaaaaaacacgcccactaacgcgcgcaaaacccgaaaccgaacacgcccctctaacgactcgaattaacctaaccgtacactcacgaaccaataacgtctatcccgaccctcgatcacgcccccttacccaaacgcgaacacgcgaccgctccgttccgccgatacgcgctctaaaatccccgccccctccgcgcgcgcaactccccgcaaccgccgccgcctataacctacgccgccaaaatataactaaaaactaacgtcgaatccaaatataaccccgaccccgcccacccccgaaaccgaaccgcccacacgaaaccgcgacgcgcacgacaactatcccgcctaccacaatacgcgacgaaactacgaccgcgacttaacgaaataatccctaacgctaccgctcgacatccttaaaaccgaccgcccctaacgccgcgcgaaaaccccaatcgcccgcgcgccccatacgctcactcttcgatacccgaccgaaccgacgcctcgcaaacgcgaaaccgcgcgaataacgacacaaacgactacgcgcccaacccaacccaacccaacactcattctttctccactacccccaccttaccccatttccaaactta

SEQ ID NO: 13029 - DNA, 986 bp, Artificial Sequence
  chemically treated genomic DNA (Homo sapiens) CpG-island No: 13029
tcgtttgcgtcgttttttcggggcgttcgcgttgtgtttatttagttgtttttgaggtttcggttttttttaaatttttgaagcgtttcgtgtacgcgacgcggcggcggggtaagttggagttttcgtcgcgagtttttttcgttgtttgttcgtagtatagtcgcgtcgatttttttattatggcggcggtcgggcggggaagtcgggtcgtgcgtcgcgtgcgtgttttttttttttttttttttttttcggcggcggcggcggcggtagaagcggtagcgttcgttattgtcgttggtggtaggaggttgcgaggagtcggcgcggtcgtagtttttacggcgtaggtttacggtagcgtagtcgttttgaggtgagtgttttatcgcgtaatttttagttattttagtttcggcgtagtcgtaatacgtcgttcgttcgtcggtcggtcggttcgtttcgtagtcggtattttgtcgttttcggttttgggtttgggttttcgtcggattcggttcgtttcgggcggggggtttcggttcggtttagttaaatcgttatttcgaggatgcgtaggtcgtattaggttttaggcgttttggcgggttcgggagggaggcgttgttttttcgagagttttagggtttcggtttttttcgtcgtttggggttttcggggtcgcggtttttttttcgtcgtggaattcggggttcggttttttcgtagttcgggagcgggaggcgcgggagagtgcgtcgggttcgggagcgggaggtgggcgggttgcgcgggatcggagtcgcggttttcggttcgttttttcggtttttttcggttttcgtacgcgggcgggcgggcgggcggcgcggtggggtcgggttggggcgcgggagtcgttgttttttgcgggagaggaggttggttttttgggcgattttcgaagttttttttttgtcggggtggcgtgggtttgttatttaggt

SEQ ID NO: 13030 - DNA, 986 bp, Artificial Sequence
  chemically treated genomic DNA (Homo sapiens) CpG-island No: 13030
acctaaataacaaacccacgccaccccgacaaaaaaaaaacttcgaaaatcgcccaaaaaaccaacctcctctcccgcaaaaaacaacgactcccgcgccccaacccgaccccaccgcgccgcccgcccgcccgcccgcgtacgaaaaccgaaaaaaaccgaaaaaacgaaccgaaaaccgcgactccgatcccgcgcaacccgcccacctcccgctcccgaacccgacgcactctcccgcgcctcccgctcccgaactacgaaaaaaccgaaccccgaattccacgacgaaaaaaaaaccgcgaccccgaaaaccccaaacgacgaaaaaaaccgaaaccctaaaactctcgaaaaaacaacgcctccctcccgaacccgccaaaacgcctaaaacctaatacgacctacgcatcctcgaaataacgatttaactaaaccgaaccgaaaccccccgcccgaaacgaaccgaatccgacgaaaacccaaacccaaaaccgaaaacgacaaaataccgactacgaaacgaaccgaccgaccgacgaacgaacgacgtattacgactacgccgaaactaaaataactaaaaattacgcgataaaacactcacctcaaaacgactacgctaccgtaaacctacgccgtaaaaactacgaccgcgccgactcctcgcaacctcctaccaccaacgacaataacgaacgctaccgcttctaccgccgccgccgccgccgaaaaaaaaaaaaaaaaaaaaaaaacacgcacgcgacgcacgacccgacttccccgcccgaccgccgccataataaaaaaatcgacgcgactatactacgaacaaacaacgaaaaaaactcgcgacgaaaactccaacttaccccgccgccgcgtcgcgtacacgaaacgcttcaaaaatttaaaaaaaaccgaaacctcaaaaacaactaaataaacacaacgcgaacgccccgaaaaaacgacgcaaacga

SEQ ID NO: 13031 - DNA, 986 bp, Artificial Sequence
  chemically treated genomic DNA (Homo sapiens) CpG-island No: 13031
atttgggtaataagtttacgttatttcggtaggagggaagtttcggaggtcgtttaaagagttagttttttttttcgtaggagatagcggttttcgcgttttagttcggttttatcgcgtcgttcgttcgttcgttcgcgtacgagagtcgggaagggtcgagggggcgagtcgagagtcgcggtttcggtttcgcgtagttcgtttatttttcgttttcgggttcggcgtattttttcgcgtttttcgttttcgagttgcgggaaggtcgggtttcgggttttacggcggggagaaggtcgcggtttcgagagttttaggcggcggaggaggtcggaattttggggttttcgggagggtagcgtttttttttcgagttcgttaggacgtttggggtttagtgcggtttgcgtattttcggggtggcggtttggttgggtcgggtcggggtttttcgttcgaggcgggtcgaattcggcgggggtttaggtttagagtcgggggcggtagggtgtcggttgcggggcgggtcggtcggtcggcgggcgggcggcgtgttgcggttgcgtcggggttgaaatagttggagattgcgcggtagggtatttattttagagcggttgcgttatcgtgggtttgcgtcgtggagattgcgatcgcgtcggtttttcgtagttttttgttattagcggtaatggcgagcgttgtcgtttttgtcgtcgtcgtcgtcgtcgaggagggggaggggagggagagggtacgtacgcgacgtacggttcggttttttcgttcggtcgtcgttatgatgaggaggtcggcgcggttgtgttgcgggtaggtagcggagagggttcgcggcgagggttttagtttatttcgtcgtcgcgtcgcgtgtacggagcgttttagaggtttggagggggtcggaattttaaaagtaattggatgagtataacgcggacgtttcggagaagcggcgtaagcgg

SEQ ID NO: 13032 - DNA, 986 bp, Artificial Sequence
  chemically treated genomic DNA (Homo sapiens) CpG-island No: 13032
ccgcttacgccgcttctccgaaacgtccgcgttatactcatccaattacttttaaaattccgaccccctccaaacctctaaaacgctccgtacacgcgacgcgacgacgaaataaactaaaaccctcgccgcgaaccctctccgctacctacccgcaacacaaccgcgccgacctcctcatcataacgacgaccgaacgaaaaaaccgaaccgtacgtcgcgtacgtaccctctccctcccctccccctcctcgacgacgacgacgacgacaaaaacgacaacgctcgccattaccgctaataacaaaaaactacgaaaaaccgacgcgatcgcaatctccacgacgcaaacccacgataacgcaaccgctctaaaataaataccctaccgcgcaatctccaactatttcaaccccgacgcaaccgcaacacgccgcccgcccgccgaccgaccgacccgccccgcaaccgacaccctaccgcccccgactctaaacctaaacccccgccgaattcgacccgcctcgaacgaaaaaccccgacccgacccaaccaaaccgccaccccgaaaatacgcaaaccgcactaaaccccaaacgtcctaacgaactcgaaaaaaaaacgctaccctcccgaaaaccccaaaattccgacctcctccgccgcctaaaactctcgaaaccgcgaccttctccccgccgtaaaacccgaaacccgaccttcccgcaactcgaaaacgaaaaacgcgaaaaaatacgccgaacccgaaaacgaaaaataaacgaactacgcgaaaccgaaaccgcgactctcgactcgccccctcgacccttcccgactctcgtacgcgaacgaacgaacgaacgacgcgataaaaccgaactaaaacgcgaaaaccgctatctcctacgaaaaaaaaaactaactctttaaacgacctccgaaacttccctcctaccgaaataacgtaaacttattacccaaat

SEQ ID NO: 13033 - DNA, 865 bp, Artificial Sequence
  chemically treated genomic DNA (Homo sapiens) CpG-island No: 13033
ggttgttgcgtttttagtaggcgcggatcgtcgggtattttttgtttttttattttttcgttacgcgttgaggtcgattttagggagaggcggtgatttcggcgttcgcgttttttcgggatagtttggggttttacggcgcgcgttttggtttcgggtattttagggagacggggattattatggcgatttttagtcgagtaggtaggcgtggtggattttttcgatttcgaagtttttagtatttatcggggtcgttgtttttagcgttcgtttttttagtattttcggttttttttcggttttttttagggaatcgttacgggtttagttttattacgttttttcgttacgtttcgttgggaggagcgcggtcggttcgggaggtagttagtcgcggagtcgtttggacgcgaggtatttgtttgttttacgcggtatttaggtcgtcgtagttgtgggcgttgggtcggcgtgcgtttcgggggcggggtcgcgcgtataattatcgggcgtggggtagggtttcgtcgtggttatcgttgttagggtaaagcggtagcgcgcggagggtgagcggagcggggtttcgggtttgcgcgcgcgggatgggtcgttatttagtacgaggtcgatcgcggtttttagcgttcggaaatttagttcggcgttttagcgtttgggtttgggttgtcggagcggcgggcgcggggcgagggggcgggcgcggggcgagggggcgggcgcggggcgagggggcgggcgcgggcggcgtttttattggggtggtattggggtgagagcgtaggttaggttcgtttattcggttaatttgggagagattatcggagaagtttttttggga

SEQ ID NO: 13034 - DNA, 865 bp, Artificial Sequence
  chemically treated genomic DNA (Homo sapiens) CpG-island No: 13034
tcccaaaaaaacttctccgataatctctcccaaattaaccgaataaacgaacctaacctacgctctcaccccaataccaccccaataaaaacgccgcccgcgcccgccccctcgccccgcgcccgccccctcgccccgcgcccgccccctcgccccgcgcccgccgctccgacaacccaaacccaaacgctaaaacgccgaactaaatttccgaacgctaaaaaccgcgatcgacctcgtactaaataacgacccatcccgcgcgcgcaaacccgaaaccccgctccgctcaccctccgcgcgctaccgctttaccctaacaacgataaccacgacgaaaccctaccccacgcccgataattatacgcgcgaccccgcccccgaaacgcacgccgacccaacgcccacaactacgacgacctaaataccgcgtaaaacaaacaaatacctcgcgtccaaacgactccgcgactaactacctcccgaaccgaccgcgctcctcccaacgaaacgtaacgaaaaaacgtaataaaactaaacccgtaacgattccctaaaaaaaaccgaaaaaaaaccgaaaatactaaaaaaacgaacgctaaaaacaacgaccccgataaatactaaaaacttcgaaatcgaaaaaatccaccacgcctacctactcgactaaaaatcgccataataatccccgtctccctaaaatacccgaaaccaaaacgcgcgccgtaaaaccccaaactatcccgaaaaaacgcgaacgccgaaatcaccgcctctccctaaaatcgacctcaacgcgtaacgaaaaaataaaaaaacaaaaaatacccgacgatccgcgcctactaaaaacgcaacaacc

SEQ ID NO: 13035 - DNA, 865 bp, Artificial Sequence
  chemically treated genomic DNA (Homo sapiens) CpG-island No: 13035
ttttaaaagagttttttcgatgattttttttaggttggtcgagtgagcgggtttagtttgcgtttttattttagtgttattttagtgggagcgtcgttcgcgttcgttttttcgtttcgcgttcgttttttcgtttcgcgttcgttttttcgtttcgcgttcgtcgtttcggtagtttaaatttagacgttaaagcgtcgaattgggttttcgggcgttggaggtcgcggtcggtttcgtattaggtgacggtttatttcgcgcgcgtaagttcggaatttcgtttcgtttatttttcgcgcgttgtcgttttgttttggtaacggtaattacggcgaggttttgttttacgttcggtgattgtgcgcgcggtttcgttttcgaggcgtacgtcggtttagcgtttatagttgcggcggtttaggtgtcgcgtggggtaagtaggtgtttcgcgtttaggcggtttcgcggttggttgtttttcgagtcggtcgcgttttttttagcgaggcgtggcggggaggcgtagtgaggttgggttcgtggcggttttttgaggagggtcgagaaggggtcgggggtgttaggggaacgggcgttgggggtagcggtttcggtggatgttaagggtttcgggatcgggagagtttattacgtttgtttgttcggttgagaatcgttatggtaattttcgtttttttaaagtattcggggttagggcgcgcgtcgtggagttttaggttgtttcggagaggcgcgggcgtcgaggttatcgtttttttttggggtcgattttaacgcgtggcgaaaagatggagggataaggggtgttcggcggttcgcgtttgttgggggcgtagtagtt

SEQ ID NO: 13036 - DNA, 865 bp, Artificial Sequence
  chemically treated genomic DNA (Homo sapiens) CpG-island No: 13036
aactactacgcccccaacaaacgcgaaccgccgaacaccccttatccctccatcttttcgccacgcgttaaaatcgaccccaaaaaaaaacgataacctcgacgcccgcgcctctccgaaacaacctaaaactccacgacgcgcgccctaaccccgaatactttaaaaaaacgaaaattaccataacgattctcaaccgaacaaacaaacgtaataaactctcccgatcccgaaacccttaacatccaccgaaaccgctacccccaacgcccgttcccctaacacccccgaccccttctcgaccctcctcaaaaaaccgccacgaacccaacctcactacgcctccccgccacgcctcgctaaaaaaaacgcgaccgactcgaaaaacaaccaaccgcgaaaccgcctaaacgcgaaacacctacttaccccacgcgacacctaaaccgccgcaactataaacgctaaaccgacgtacgcctcgaaaacgaaaccgcgcgcacaatcaccgaacgtaaaacaaaacctcgccgtaattaccgttaccaaaacaaaacgacaacgcgcgaaaaataaacgaaacgaaattccgaacttacgcgcgcgaaataaaccgtcacctaatacgaaaccgaccgcgacctccaacgcccgaaaacccaattcgacgctttaacgtctaaatttaaactaccgaaacgacgaacgcgaaacgaaaaaacgaacgcgaaacgaaaaaacgaacgcgaaacgaaaaaacgaacgcgaacgacgctcccactaaaataacactaaaataaaaacgcaaactaaacccgctcactcgaccaacctaaaaaaaatcatcgaaaaaactcttttaaaa

SEQ ID NO: 13037 - DNA, 582 bp, Artificial Sequence
  chemically treated genomic DNA (Homo sapiens) CpG-island No: 13037
cggtaggagacgggcggatattggttcgggttaaagagtttagagtttagtcgttaggatttcgtaggcgtttattgcgcggggttgatcgagcgcgtcgagggtttcggggtcgaggtcgaattattttagtcgtcgtttttcgtcggcgggcgttttcgggttttagtcgaagtttttcgggttttttatttttgattttcgtcgttggtttcggaacgtttcgcggtttttgggcgtcgtttgtttttttttgtcgtcgtcgttgttattgttatttgcgggcgggttttcggttttaggcgcggcggggttttttatgttgttggttagcggttttttttagggtttagttcgttttgtcggaggcgattttatcgtcgcgcgtcgggagttaggtttcgttttttttatttttattggttacggtagttcgtcgtaatttcgtttcgcgaggcgattggttgttcgatcggtcggagcgggattcgaggaggtgggggtttaatgaagagatttttgaggggatttttttagttttgcggtattgttggcggacggagatttttaggttagttatag

SEQ ID NO: 13038 - DNA, 582 bp, Artificial Sequence
  chemically treated genomic DNA (Homo sapiens) CpG-island No: 13038
ctataactaacctaaaaatctccgtccgccaacaataccgcaaaactaaaaaaatcccctcaaaaatctcttcattaaacccccacctcctcgaatcccgctccgaccgatcgaacaaccaatcgcctcgcgaaacgaaattacgacgaactaccgtaaccaataaaaataaaaaaaacgaaacctaactcccgacgcgcgacgataaaatcgcctccgacaaaacgaactaaaccctaaaaaaaaccgctaaccaacaacataaaaaaccccgccgcgcctaaaaccgaaaacccgcccgcaaataacaataacaacgacgacgacaaaaaaaaacaaacgacgcccaaaaaccgcgaaacgttccgaaaccaacgacgaaaatcaaaaataaaaaacccgaaaaacttcgactaaaacccgaaaacgcccgccgacgaaaaacgacgactaaaataattcgacctcgaccccgaaaccctcgacgcgctcgatcaaccccgcgcaataaacgcctacgaaatcctaacgactaaactctaaactctttaacccgaaccaatatccgcccgtctcctaccg

SEQ ID NO: 13039 - DNA, 582 bp, Artificial Sequence
  chemically treated genomic DNA (Homo sapiens) CpG-island No: 13039
ttgtagttaatttaggagttttcgttcgttagtaatgtcgtaggattaaaaagatttttttaaaaatttttttattgagtttttattttttcgagtttcgtttcggtcggtcgagtagttaatcgtttcgcggggcggggttgcggcgagttgtcgtaattaatagaggtggagggggcggggtttggttttcggcgcgcggcggtagggtcgttttcggtaaagcgagttgaattttgaggggagtcgttgattagtagtatggaggatttcgtcgcgtttgggatcgggggttcgttcgtaaatggtaatggtaacggcggcggtaaagggaagtaggcggcgtttaagggtcgcgaagcgtttcgaagttagcggcgggagttagaggtgaggagttcggaaagtttcggttggggttcggagacgttcgtcggcgggaagcggcggttgaggtgattcggtttcggtttcggagttttcggcgcgttcgattagtttcgcgtagtgggcgtttgcggggttttagcggttgaattttgggttttttggttcggattagtgttcgttcgttttttgtcg

SEQ ID NO: 13040 - DNA, 582 bp, Artificial Sequence
  chemically treated genomic DNA (Homo sapiens) CpG-island No: 13040
cgacaaaaaacgaacgaacactaatccgaaccaaaaaacccaaaattcaaccgctaaaaccccgcaaacgcccactacgcgaaactaatcgaacgcgccgaaaactccgaaaccgaaaccgaatcacctcaaccgccgcttcccgccgacgaacgtctccgaaccccaaccgaaactttccgaactcctcacctctaactcccgccgctaacttcgaaacgcttcgcgacccttaaacgccgcctacttccctttaccgccgccgttaccattaccatttacgaacgaacccccgatcccaaacgcgacgaaatcctccatactactaatcaacgactcccctcaaaattcaactcgctttaccgaaaacgaccctaccgccgcgcgccgaaaaccaaaccccgccccctccacctctattaattacgacaactcgccgcaaccccgccccgcgaaacgattaactactcgaccgaccgaaacgaaactcgaaaaaataaaaactcaataaaaaaatttttaaaaaaatctttttaatcctacgacattactaacgaacgaaaactcctaaattaactacaa

SEQ ID NO: 13041 - DNA, 597 bp, Artificial Sequence
  chemically treated genomic DNA (Homo sapiens) CpG-island No: 13041
  unsure (558, 577, 591)
cggatcggtgttgataatgatcgtttttttgttgatggggcgcgaaacggtagtttcgattttgttagttttcgtacgtttttatttttttcggggttggcgtcggcggtgtttttgttggtttttttcggttttggcgcgaaagtcgggatgatgtcgttgtatagttggttgtcgcgcgtttattttgtcgtattatcgtacgtttcggcgttgatgtttggcgtaatggttaaaataggtattttcggtattttgaaagtagcgatggatttgttggcgtaaacgggtttgtttttgtggtggggtattttggtgatggcgatcggcgtaattttcgcgtttttgggcgtgttatatgcgttggcggaataggatattaaacggttgttggtttggagtatcgtcgaaaacgtcggtattattttgttggtagtcggtgtggcgatggtcggtttgttattgtacgattcgttgtttatcgtggttggattgttcggcgtattgttttatttgtttaattatgcgttgtttaaagggttgttatttttcggcgtngggacgattatttcgcgtntgtatatttacgantatgga

SEQ ID NO: 13042 - DNA, 597 bp, Artificial Sequence
  chemically treated genomic DNA (Homo sapiens) CpG-island No: 13042
  unsure (7, 21, 40)
tccatantcgtaaatatacanacgcgaaataatcgtcccnacgccgaaaaataacaaccctttaaacaacgcataattaaacaaataaaacaatacgccgaacaatccaaccacgataaacaacgaatcgtacaataacaaaccgaccatcgccacaccgactaccaacaaaataataccgacgttttcgacgatactccaaaccaacaaccgtttaatatcctattccgccaacgcatataacacgcccaaaaacgcgaaaattacgccgatcgccatcaccaaaataccccaccacaaaaacaaacccgtttacgccaacaaatccatcgctactttcaaaataccgaaaatacctattttaaccattacgccaaacatcaacgccgaaacgtacgataatacgacaaaataaacgcgcgacaaccaactatacaacgacatcatcccgactttcgcgccaaaaccgaaaaaaaccaacaaaaacaccgccgacgccaaccccgaaaaaaataaaaacgtacgaaaactaacaaaatcgaaactaccgtttcgcgccccatcaacaaaaaaacgatcattatcaacaccgatccg

SEQ ID NO: 13043 - DNA, 597 bp, Artificial Sequence
  chemically treated genomic DNA (Homo sapiens) CpG-island No: 13043
  unsure (7, 21, 40)
tttatgntcgtgggtatgtanacgcgaaataatcgttttngcgtcgagaaatagtagttttttgaatagcgtatggttgagtagatgaaatagtgcgtcgagtagtttaattacggtgagtagcgggtcgtgtagtgatagatcgattatcgttatatcgattgttagtaaaataatgtcgacgttttcgacggtattttaggttagtagtcgtttgatattttgtttcgttagcgtatatagtacgtttaggagcgcggagattgcgtcgatcgttattattagaatgttttattatagaggtaaattcgtttgcgttagtagatttatcgttatttttaggatgtcgaaaatatttattttgattattacgttagatattaacgtcgaagcgtgcgatggtgcggtagggtgagcgcgcggtaattagttgtgtaacggtattatttcggttttcgcgttaaaatcgaaaaaggttagtaggaatatcgtcgacgttagtttcggagaaagtgaaagcgtgcggaaattggtaaaatcgaggttgtcgtttcgcgttttattagtaagaaggcgattattattagtatcgattcg

SEQ ID NO: 13044 - DNA, 597 bp, Artificial Sequence
  chemically treated genomic DNA (Homo sapiens) CpG-island No: 13044
  unsure (558, 577, 591)
cgaatcgatactaataataatcgccttcttactaataaaacgcgaaacgacaacctcgattttaccaatttccgcacgctttcactttctccgaaactaacgtcgacgatattcctactaacctttttcgattttaacgcgaaaaccgaaataataccgttacacaactaattaccgcgcgctcaccctaccgcaccatcgcacgcttcgacgttaatatctaacgtaataatcaaaataaatattttcgacatcctaaaaataacgataaatctactaacgcaaacgaatttacctctataataaaacattctaataataacgatcgacgcaatctccgcgctcctaaacgtactatatacgctaacgaaacaaaatatcaaacgactactaacctaaaataccgtcgaaaacgtcgacattattttactaacaatcgatataacgataatcgatctatcactacacgacccgctactcaccgtaattaaactactcgacgcactatttcatctactcaaccatacgctattcaaaaaactactatttctcgacgcnaaaacgattatttcgcgtntacatacccacgancataaa

SEQ ID NO: 13045 - DNA, 587 bp, Artificial Sequence
  chemically treated genomic DNA (Homo sapiens) CpG-island No: 13045
  unsure (167, 184, 254, 273, 312, 328, 339, 458..459, 516)
acgtttttttgttattgcggtaattattagattcgtattacgtacggcgttattattagcgaagattttcggattggtggtttggtaacggtattggttttttatattcgcgatgatgcggttttatttgtttatcgttatatcgtgcgattttagttacggtattncgtgcggattgaagtanacgttataattatagcgtcggttggtatgataaatttattgtatttaacggtattgggacgcgacgtttntgggtattaggtttttaangacgcgtgcgtaggaaacgaaattcgtagacgtgatttngtttatttagtttaangcgtacggttnggacgtaattttcgagtggtttttttttcgcgggcgtttttatttttttttcgagttggttatgtattttatacgacgatagcgtagtgacgtattcgcgcgtgcgagtgcggtataanntagttatcgcgtgttgcgtcggtagtatacgacgtaagtcggcgtatgataacggtntcggtagtttcgagttatattgttaggtggtatgagacggagcgtataagtcgggattttatgggtaacgt

SEQ ID NO: 13046 - DNA, 587 bp, Artificial Sequence
  chemically treated genomic DNA (Homo sapiens) CpG-island No: 13046
  unsure (72, 129..130, 249, 260, 276, 315, 334, 404, 421)
acgttacccataaaatcccgacttatacgctccgtctcataccacctaacaatataactcgaaactaccganaccgttatcatacgccgacttacgtcgtatactaccgacgcaacacgcgataactannttataccgcactcgcacgcgcgaatacgtcactacgctatcgtcgtataaaatacataaccaactcgaaaaaaaaataaaaacgcccgcgaaaaaaaaaccactcgaaaattacgtccnaaccgtacgcnttaaactaaataaacnaaatcacgtctacgaatttcgtttcctacgcacgcgtcnttaaaaacctaatacccanaaacgtcgcgtcccaataccgttaaatacaataaatttatcataccaaccgacgctataattataacgtntacttcaatccgcacgnaataccgtaactaaaatcgcacgatataacgataaacaaataaaaccgcatcatcgcgaatataaaaaaccaataccgttaccaaaccaccaatccgaaaatcttcgctaataataacgccgtacgtaatacgaatctaataattaccgcaataacaaaaaaacgt

SEQ ID NO: 13047 - DNA, 587 bp, Artificial Sequence
  chemically treated genomic DNA (Homo sapiens) CpG-island No: 13047
  unsure (72, 129..130, 249, 260, 276, 315, 334, 404, 421)
acgttatttatgaaatttcggtttatacgtttcgttttatgttatttaatagtatggttcgaagttatcganatcgttattatacgtcgatttacgtcgtgtattgtcggcgtagtacgcgatgattgnnttgtatcgtattcgtacgcgcgagtacgttattgcgttatcgtcgtatgaagtatatggttagttcgagaaagaagtgaagacgttcgcgaagagggggttattcgaaaattacgtttnagtcgtgcgtnttgagttgaatgaatnaagttacgtttgcggatttcgttttttgcgtacgcgttnttgagagtttgatgtttangggcgtcgcgttttagtgtcgttgaatgtagtgaatttgttatgttagtcgacgttgtgattatggcgtntgttttaattcgtacgngatgtcgtggttggagtcgtacggtgtaacggtagataaatggggtcgtattatcgcggatgtggaaagttagtatcgttattagattattaattcgaaaattttcgttggtggtgacgtcgtgcgtggtgcggatttggtggttatcgtaatggtagaaggacgt

SEQ ID NO: 13048 - DNA, 587 bp, Artificial Sequence
  chemically treated genomic DNA (Homo sapiens) CpG-island No: 13048
  unsure (167, 184, 254, 273, 312, 328, 339, 458..459, 516)
acgtccttctaccattacgataaccaccaaatccgcaccacgcacgacgtcaccaccaacgaaaattttcgaattaataatctaataacgatactaactttccacatccgcgataatacgaccccatttatctaccgttacaccgtacgactccaaccacgacatcncgtacgaattaaaacanacgccataatcacaacgtcgactaacataacaaattcactacattcaacgacactaaaacgcgacgcccntaaacatcaaactctcaanaacgcgtacgcaaaaaacgaaatccgcaaacgtaacttnattcattcaactcaanacgcacgactnaaacgtaattttcgaataaccccctcttcgcgaacgtcttcacttctttctcgaactaaccatatacttcatacgacgataacgcaataacgtactcgcgcgtacgaatacgatacaanncaatcatcgcgtactacgccgacaatacacgacgtaaatcgacgtataataacgatntcgataacttcgaaccatactattaaataacataaaacgaaacgtataaaccgaaatttcataaataacgt

SEQ ID NO: 13049 - DNA, 518 bp, Artificial Sequence
  chemically treated genomic DNA (Homo sapiens) CpG-island No: 13049
ttattaggtttacgtcgagtcgaatttttttgttttcggaggtttttatttttatgagttgtagatgtaaaaaagtttgttcgttgagtagtttttcgaatttggtcggtgatagaggattcgaattttcgattttttcgtttcgaacgaagtgcgttattaggttgcgttaattatcgaatgcggggcgttttttgtcgtattggtatttatcgttttttaggtataggcggtgaacgttatcgtggcgtattaaattttagtcgaatcgggaaagtggtttaggtcgataatatttttgttaaagaaagcggataatcgtggattggcgtaagtttgatagcggattagtatcgtgcgggcgttggttttaggcgacgtgtaaatcggtaatttcggttttagttcgttagcggttgtagttagttaataggtgtcgattgaagtttttttgttggcgttaaaattgggtaatttcgaagcgttggtggtaaagaaaattattagtaaatcggaag

SEQ ID NO: 13050 - DNA, 518 bp, Artificial Sequence
  chemically treated genomic DNA (Homo sapiens) CpG-island No: 13050
cttccgatttactaataattttctttaccaccaacgcttcgaaattacccaattttaacgccaacaaaaaaacttcaatcgacacctattaactaactacaaccgctaacgaactaaaaccgaaattaccgatttacacgtcgcctaaaaccaacgcccgcacgatactaatccgctatcaaacttacgccaatccacgattatccgctttctttaacaaaaatattatcgacctaaaccactttcccgattcgactaaaatttaatacgccacgataacgttcaccgcctatacctaaaaaacgataaataccaatacgacaaaaaacgccccgcattcgataattaacgcaacctaataacgcacttcgttcgaaacgaaaaaatcgaaaattcgaatcctctatcaccgaccaaattcgaaaaactactcaacgaacaaacttttttacatctacaactcataaaaataaaaacctccgaaaacaaaaaaattcgactcgacgtaaacctaataa

SEQ ID NO: 13051 - DNA, 518 bp, Artificial Sequence
  chemically treated genomic DNA (Homo sapiens) CpG-island No: 13051
ttttcggtttgttgatagttttttttattattagcgtttcggagttatttagttttgacgttagtaagaagattttaatcggtatttgttggttggttgtaatcgttaacgggttggaatcgaggttgtcgatttgtacgtcgtttgaagttagcgttcgtacgatgttggttcgttgttaaatttacgttagtttacggttgttcgttttttttagtaaaggtgttgtcggtttgagttattttttcggttcggttgaggtttgatacgttacggtgacgtttatcgtttgtgtttgaaaagcgatgaatgttagtgcggtaagaagcgtttcgtattcggtgattggcgtagtttggtagcgtatttcgttcgggacgaaggggtcggaggttcgaattttttattatcgattaaattcgaaaagttgtttaacgagtaggtttttttgtatttgtagtttatgaggatgagaattttcgggggtagggaggttcgattcgacgtaggtttgataa

SEQ ID NO: 13052 - DNA, 518 bp, Artificial Sequence
  chemically treated genomic DNA (Homo sapiens) CpG-island No: 13052
ttatcaaacctacgtcgaatcgaacctccctacccccgaaaattctcatcctcataaactacaaatacaaaaaaacctactcgttaaacaacttttcgaatttaatcgataataaaaaattcgaacctccgaccccttcgtcccgaacgaaatacgctaccaaactacgccaatcaccgaatacgaaacgcttcttaccgcactaacattcatcgcttttcaaacacaaacgataaacgtcaccgtaacgtatcaaacctcaaccgaaccgaaaaaataactcaaaccgacaacacctttactaaaaaaaacgaacaaccgtaaactaacgtaaatttaacaacgaaccaacatcgtacgaacgctaacttcaaacgacgtacaaatcgacaacctcgattccaacccgttaacgattacaaccaaccaacaaataccgattaaaatcttcttactaacgtcaaaactaaataactccgaaacgctaataataaaaaaaactatcaacaaaccgaaaa

SEQ ID NO: 13053 - DNA, 520 bp, Artificial Sequence
  chemically treated genomic DNA (Homo sapiens) CpG-island No: 13053
ttattatagtttgttggcggtattgaaatattggggtattaaattcgggtaagtggagattgtgaatttgtagtcgttcgcgattatcgttgtttggtagcggggagatattgatggtgtttatgtttgggtatcggcggttaacgttttggaaaaagacggtaaggtgttgatcgattttgaataggtcgggtagtggggcgcgttaacgttggacgtttgggtggtgcgtaagattttgtcgagaaatattttgaggtcgtgaaagcgttcgttaaaagcgttatcgatgtttagtaatcgtatattgttaatttagacgtgtggttgaaatagtcggaaaatattagtaaattggcgcgtttaagcggcgtgtttgaaggtgacgtttcgggttggtgaagggaatattatttgacgcgtagtataaacgtagattgacggacggtgataagcgatattatacgcgtattttgaagataggtaagtcggtgtagtaatatatatagtagtattcggt

SEQ ID NO: 13054 - DNA, 520 bp, Artificial Sequence
  chemically treated genomic DNA (Homo sapiens) CpG-island No: 13054
accgaatactactatatatattactacaccgacttacctatcttcaaaatacgcgtataatatcgcttatcaccgtccgtcaatctacgtttatactacgcgtcaaataatattcccttcaccaacccgaaacgtcaccttcaaacacgccgcttaaacgcgccaatttactaatattttccgactatttcaaccacacgtctaaattaacaatatacgattactaaacatcgataacgcttttaacgaacgctttcacgacctcaaaatatttctcgacaaaatcttacgcaccacccaaacgtccaacgttaacgcgccccactacccgacctattcaaaatcgatcaacaccttaccgtctttttccaaaacgttaaccgccgatacccaaacataaacaccatcaatatctccccgctaccaaacaacgataatcgcgaacgactacaaattcacaatctccacttacccgaatttaataccccaatatttcaataccgccaacaaactataataa

SEQ ID NO: 13055 - DNA, 520 bp, Artificial Sequence
  chemically treated genomic DNA (Homo sapiens) CpG-island No: 13055
gtcgagtattattgtgtatattgttatatcgatttgtttgtttttaaaatgcgcgtgtgatatcgtttgttatcgttcgttagtttgcgtttgtgttgcgcgttagatagtattttttttattagttcggaacgttatttttaggtacgtcgtttaaacgcgttagtttgttgatgtttttcggttgttttagttatacgtttgggttagtaatgtacggttgttgagtatcgatggcgtttttagcgaacgtttttacgattttaggatgtttttcggtaaaattttgcgtattatttagacgtttagcgttggcgcgttttattgttcgatttgtttagaatcggttaatattttgtcgtttttttttagggcgttaatcgtcggtgtttagatataagtattattaatattttttcgttgttaggtagcgataatcgcgggcggttgtaggtttataatttttatttgttcgggtttaatgttttagtgttttagtgtcgttagtaggttgtagtgg

SEQ ID NO: 13056 - DNA, 520 bp, Artificial Sequence
  chemically treated genomic DNA (Homo sapiens) CpG-island No: 13056
ccactacaacctactaacgacactaaaacactaaaacattaaacccgaacaaataaaaattataaacctacaaccgcccgcgattatcgctacctaacaacgaaaaaatattaataatacttatatctaaacaccgacgattaacgccctaaaaaaaaacgacaaaatattaaccgattctaaacaaatcgaacaataaaacgcgccaacgctaaacgtctaaataatacgcaaaattttaccgaaaaacatcctaaaatcgtaaaaacgttcgctaaaaacgccatcgatactcaacaaccgtacattactaacccaaacgtataactaaaacaaccgaaaaacatcaacaaactaacgcgtttaaacgacgtacctaaaaataacgttccgaactaataaaaaaaatactatctaacgcgcaacacaaacgcaaactaacgaacgataacaaacgatatcacacgcgcattttaaaaacaaacaaatcgatataacaatatacacaataatactcgac

SEQ ID NO: 13057 - DNA, 624 bp, Artificial Sequence
  chemically treated genomic DNA (Homo sapiens) CpG-island No: 13057
attaaaagtattgcgttattggttgagttttttgttgcgaattttattgcggacgtggataacgttggtttcgtatacggtatcgtttaatggtttgttgtttcgcgtcgtttggcgttgaaagtagttaatttggcggaacgtaatcggatcgtgaaatcgaaaaacgcggttcggcgattgtttaggcgttcgacgttgaaggtaaatcgagtaaagcggtagaaggttgggcgcgtggttgcggtattatcgttgattaggttgagcgtttgattatcgataaaggcgaatggttgttgtatcgcgtttatgtgaagggcgaaatatcgaagtattgttgtcgaatatggttgcgatttttttggcgaaattgtcgatttcgaaattgatgcgttggggcgtaacgtacgtgtatttcgtgcgttcggtgtatatcgtgattttgttgttgggcgataaagttatttcggtaattattttgggtatttagttcgatcgcgtgattcgcggttatcgttttatgggcgagtcggaatttattatcgataacgtcgattagtattcggaaattttgcgtgatagtgggaaagttatcgtcgattacgaagaacgtaaggcgaa

SEQ ID NO: 13058 - DNA, 624 bp, Artificial Sequence
  chemically treated genomic DNA (Homo sapiens) CpG-island No: 13058
ttcgccttacgttcttcgtaatcgacgataactttcccactatcacgcaaaatttccgaatactaatcgacgttatcgataataaattccgactcgcccataaaacgataaccgcgaatcacgcgatcgaactaaatacccaaaataattaccgaaataactttatcgcccaacaacaaaatcacgatatacaccgaacgcacgaaatacacgtacgttacgccccaacgcatcaatttcgaaatcgacaatttcgccaaaaaaatcgcaaccatattcgacaacaatacttcgatatttcgcccttcacataaacgcgatacaacaaccattcgcctttatcgataatcaaacgctcaacctaatcaacgataataccgcaaccacgcgcccaaccttctaccgctttactcgatttaccttcaacgtcgaacgcctaaacaatcgccgaaccgcgtttttcgatttcacgatccgattacgttccgccaaattaactactttcaacgccaaacgacgcgaaacaacaaaccattaaacgataccgtatacgaaaccaacgttatccacgtccgcaataaaattcgcaacaaaaaactcaaccaataacgcaatacttttaat

SEQ ID NO: 13059 - DNA, 624 bp, Artificial Sequence
  chemically treated genomic DNA (Homo sapiens) CpG-island No: 13059
ttcgttttacgtttttcgtaatcggcgatgatttttttattgttacgtagaattttcggatattgatcggcgttatcgatggtgaatttcggttcgtttataaagcggtggtcgcgaattacgcgatcggattgaatgtttagaatggttgtcggaatgattttgtcgtttagtagtagggttacggtgtgtatcggacgtacgaagtgtacgtacgttgcgttttaacgtattagtttcgggatcggtagtttcgttagagaagtcgtaattatattcggtagtagtgtttcggtgtttcgttttttatatgggcgcgatatagtagttattcgtttttatcggtagttagacgtttagtttggttaacggtaatatcgtaattacgcgtttaattttttgtcgttttgttcggtttgtttttagcgtcgaacgtttgggtaatcgtcgggtcgcgtttttcgattttacgattcggttgcgtttcgttaggttagttatttttagcgttagacgacgcggagtagtaaattattgaacggtgtcgtgtgcgaggttagcgttatttacgttcgtagtaaagttcgtagtaaaggatttagttagtggcgtagtgtttttggt

SEQ ID NO: 13060 - DNA, 624 bp, Artificial Sequence
  chemically treated genomic DNA (Homo sapiens) CpG-island No: 13060
accaaaaacactacgccactaactaaatcctttactacgaactttactacgaacgtaaataacgctaacctcgcacacgacaccgttcaataatttactactccgcgtcgtctaacgctaaaaataactaacctaacgaaacgcaaccgaatcgtaaaatcgaaaaacgcgacccgacgattacccaaacgttcgacgctaaaaacaaaccgaacaaaacgacaaaaaattaaacgcgtaattacgatattaccgttaaccaaactaaacgtctaactaccgataaaaacgaataactactatatcgcgcccatataaaaaacgaaacaccgaaacactactaccgaatataattacgacttctctaacgaaactaccgatcccgaaactaatacgttaaaacgcaacgtacgtacacttcgtacgtccgatacacaccgtaaccctactactaaacgacaaaatcattccgacaaccattctaaacattcaatccgatcgcgtaattcgcgaccaccgctttataaacgaaccgaaattcaccatcgataacgccgatcaatatccgaaaattctacgtaacaataaaaaaatcatcgccgattacgaaaaacgtaaaacgaa

SEQ ID NO: 13061 - DNA, 945 bp, Artificial Sequence
  chemically treated genomic DNA (Homo sapiens) CpG-island No: 13061
  unsure (766, 782, 826, 830..831, 837)
gcgtttcgcgtgaagtttgcgtcgttaaagtcgcgcgtttttttattcgtttgaacgtgtcggaacgtttgcggtatttggtattatcgatatttttcggtggcgaatagtagcgcgttaatatcgttcgcggttttatcgtcgattattttattttgttgtttgacgaatttatcgtttcgttggacgttaaaaatagcgtcgcggtggtggaattgattcgcgaagttaaaattcgtggcgtagttatcgtaggtattttttatgacgaagttgtacgtaatgacgtcgtcgatcgtttgtatttaatgggagtttttttatgattattaataacgttaagttggtgttggaaaacgaggtggtaagcggttcgttggaggtgtagaacggcgaaattcgcgtttttgtcgaaagttagagtcgtttgtcggaggcgatggacggcgaaggcggttggttgttgtcggggttgattgagttgtatatcgataatttggataaattttttatttcgcgttcgaaagttgattggtttgtttattcggcgatgagtagttacgacgcgttgatggtggcgagcggtattattatcgtattggatgtcgtgggtaattggcgacgtgcgtcgacggcggcgatcggttggagaattttgagaagatgattaacgttatcgaagagacgtagaaacgcggcgttaatcgtgtcgagtatcgtttgtatttgcgttgcgaattggcgtattatattacgttgtcgttgnttgaaaattgttgtancgcgaagtcgtgacgtttgtgttcgtgatgtatttattcgcggnttanngttagntggtaatcgcgagaagtatcgcgaatattttaagttataattttttattgatgcgttaagcgtagttcgataaagtattgggttttgtcgagttgtttaagtcgattg

SEQ ID NO: 13062 - DNA, 945 bp, Artificial Sequence
  chemically treated genomic DNA (Homo sapiens) CpG-island No: 13062
  unsure (109, 115..116, 120, 164, 180)
caatcgacttaaacaactcgacaaaacccaatactttatcgaactacgcttaacgcatcaataaaaaattataacttaaaatattcgcgatacttctcgcgattaccanctaacnntaanccgcgaataaatacatcacgaacacaaacgtcacgacttcgcgntacaacaattttcaancaacgacaacgtaatataatacgccaattcgcaacgcaaatacaaacgatactcgacacgattaacgccgcgtttctacgtctcttcgataacgttaatcatcttctcaaaattctccaaccgatcgccgccgtcgacgcacgtcgccaattacccacgacatccaatacgataataataccgctcgccaccatcaacgcgtcgtaactactcatcgccgaataaacaaaccaatcaactttcgaacgcgaaataaaaaatttatccaaattatcgatatacaactcaatcaaccccgacaacaaccaaccgccttcgccgtccatcgcctccgacaaacgactctaactttcgacaaaaacgcgaatttcgccgttctacacctccaacgaaccgcttaccacctcgttttccaacaccaacttaacgttattaataatcataaaaaaactcccattaaatacaaacgatcgacgacgtcattacgtacaacttcgtcataaaaaatacctacgataactacgccacgaattttaacttcgcgaatcaattccaccaccgcgacgctatttttaacgtccaacgaaacgataaattcgtcaaacaacaaaataaaataatcgacgataaaaccgcgaacgatattaacgcgctactattcgccaccgaaaaatatcgataataccaaataccgcaaacgttccgacacgttcaaacgaataaaaaaacgcgcgactttaacgacgcaaacttcacgcgaaacgc

SEQ ID NO: 13063 - DNA, 945 bp, Artificial Sequence
  chemically treated genomic DNA (Homo sapiens) CpG-island No: 13063
  unsure (109, 115..116, 120, 164, 180)
taatcggtttgaatagttcggtaaggtttagtgttttatcggattgcgtttggcgtattaatgagaagttatggtttgaaatattcgcgatatttttcgcggttgttanttggtnntggntcgcgagtgggtatattacggatataagcgttacggtttcgcgntgtaatagtttttaantagcggtagcgtggtgtgatgcgttagttcgtagcgtagatgtagacggtgttcggtacggttgacgtcgcgtttttgcgttttttcgatggcgttgattatttttttaagattttttagtcgatcgtcgtcgtcggcgtacgtcgttaattgtttacggtatttagtacggtggtgatgtcgttcgttattattagcgcgtcgtggttgtttatcgtcgagtgggtaggttagttaattttcgggcgcggggtgaagaatttatttagattatcggtatgtagtttaattagtttcggtagtagttagtcgttttcgtcgtttatcgttttcggtaggcggttttggttttcggtaaaggcgcggatttcgtcgttttgtatttttagcgaatcgtttattatttcgttttttagtattagtttaacgttattgataattatgaagaggtttttattgggtgtaggcggtcggcgacgttattacgtatagtttcgttatggaagatgtttacgatggttgcgttacgggttttggtttcgcgaattagttttattatcgcggcgttgtttttggcgtttagcgaggcggtaggttcgttaagtagtagaatggggtagtcgacgataaagtcgcgggcgatgttgacgcgttgttgttcgttatcggaaaatgtcgatggtgttaggtgtcgtaggcgtttcggtacgtttaggcgggtgagaagacgcgcggttttagcggcgtaggttttacgcggaacgt

SEQ ID NO: 13064 - DNA, 945 bp, Artificial Sequence
  chemically treated genomic DNA (Homo sapiens) CpG-island No: 13064
  unsure (766, 782, 826, 830..831, 837)
acgttccgcgtaaaacctacgccgctaaaaccgcgcgtcttctcacccgcctaaacgtaccgaaacgcctacgacacctaacaccatcgacattttccgataacgaacaacaacgcgtcaacatcgcccgcgactttatcgtcgactaccccattctactacttaacgaacctaccgcctcgctaaacgccaaaaacaacgccgcgataataaaactaattcgcgaaaccaaaacccgtaacgcaaccatcgtaaacatcttccataacgaaactatacgtaataacgtcgccgaccgcctacacccaataaaaacctcttcataattatcaataacgttaaactaatactaaaaaacgaaataataaacgattcgctaaaaatacaaaacgacgaaatccgcgcctttaccgaaaaccaaaaccgcctaccgaaaacgataaacgacgaaaacgactaactactaccgaaactaattaaactacataccgataatctaaataaattcttcaccccgcgcccgaaaattaactaacctacccactcgacgataaacaaccacgacgcgctaataataacgaacgacatcaccaccgtactaaataccgtaaacaattaacgacgtacgccgacgacgacgatcgactaaaaaatcttaaaaaaataatcaacgccatcgaaaaaacgcaaaaacgcgacgtcaaccgtaccgaacaccgtctacatctacgctacgaactaacgcatcacaccacgctaccgctanttaaaaactattacancgcgaaaccgtaacgcttatatccgtaatatacccactcgcganccannaccaantaacaaccgcgaaaaatatcgcgaatatttcaaaccataacttctcattaatacgccaaacgcaatccgataaaacactaaaccttaccgaactattcaaaccgatta

SEQ ID NO: 13065 - DNA, 773 bp, Artificial Sequence
  chemically treated genomic DNA (Homo sapiens) CpG-island No: 13065
agcgtttcgttgttcggtgcgttattagaaataatggcgtttttcgttgttacgtcgttggagcgtttatttgggcgtattgtcggagttagtgaaatgatttttagtagttcgttcggtagtacgcgtattattttgtagtttgattttgatcgggatattaacggcgtacgcgtgatgtgtaggcggcgattaacgttgtataaagtttgttgtttagtgggatgtttagtcgttcgatttatcgtaaagcgaattcgtcggatgcgttaattatgatttttacgttgacgttcgatatttattcgtagggtgaattgtacgatttcgtttcgacgtagttggtttcgacgatttcgtaaatcgacggtgttggtgatgtcgatgtcggaggtagtttattgttcgtcgtacgcgtcgggttgaattcgtaggcgttgtttaattagggcgtgtcgttggacgacgtacgtatcgtcgttagtaatgttaacgtgcgtaaatcgtagggcgcgttggaagatggtatttatcgttggtagatttagattaatgatgagttaaaaatcgtcgttgaatattagtcgttgattatttattataataacggcggcgcggttcgtttgggcgatgtggcgacggtgatcgatttagtgtaggatgtgcgtaacgtcgggatgattaacgttaaatcggttattttattgatgattcgtaaattgtcggaagttaatattatttagacggttgatagtattcgggtaaaattatcg

SEQ ID NO: 13066 - DNA, 773 bp, Artificial Sequence
  chemically treated genomic DNA (Homo sapiens) CpG-island No: 13066
cgataattttacccgaatactatcaaccgtctaaataatattaacttccgacaatttacgaatcatcaataaaataaccgatttaacgttaatcatcccgacgttacgcacatcctacactaaatcgatcaccgtcgccacatcgcccaaacgaaccgcgccgccgttattataataaataatcaacgactaatattcaacgacgatttttaactcatcattaatctaaatctaccaacgataaataccatcttccaacgcgccctacgatttacgcacgttaacattactaacgacgatacgtacgtcgtccaacgacacgccctaattaaacaacgcctacgaattcaacccgacgcgtacgacgaacaataaactacctccgacatcgacatcaccaacaccgtcgatttacgaaatcgtcgaaaccaactacgtcgaaacgaaatcgtacaattcaccctacgaataaatatcgaacgtcaacgtaaaaatcataattaacgcatccgacgaattcgctttacgataaatcgaacgactaaacatcccactaaacaacaaactttatacaacgttaatcgccgcctacacatcacgcgtacgccgttaatatcccgatcaaaatcaaactacaaaataatacgcgtactaccgaacgaactactaaaaatcatttcactaactccgacaatacgcccaaataaacgctccaacgacgtaacaacgaaaaacgccattatttctaataacgcaccgaacaacgaaacgct

SEQ ID NO: 13067 - DNA, 773 bp, Artificial Sequence
  chemically treated genomic DNA (Homo sapiens) CpG-island No: 13067
cggtaattttgttcggatgttgttaatcgtttggataatattggttttcggtagtttgcggattattagtaaaatagtcggtttggcgttggttatttcggcgttgcgtatattttgtattgagtcggttatcgtcgttatatcgtttagacgaatcgcgtcgtcgttgttgtagtgaataattaacggttgatatttagcggcggtttttagtttattattggtttggatttgttagcggtgagtgttattttttagcgcgttttgcggtttacgtacgttggtattgttgacggcggtgcgtacgtcgtttagcgatacgttttgattaaatagcgtttgcggatttagttcgacgcgtacggcgggtagtgagttgttttcgatatcgatattattaatatcgtcgatttgcgaaatcgtcggagttagttgcgtcgaggcgaaatcgtatagtttattttgcgaataagtatcggacgttagcgtgaggattataattggcgtattcgacgggttcgttttgcgataggtcgggcggttgggtattttattgggtagtaaattttgtgtagcgttgatcgtcgtttgtatattacgcgtgcgtcgttgatatttcggttaaaattaaattgtaaaataatacgcgtgttgtcgagcgaattgttggaggttattttattgatttcggtaatgcgtttaagtgagcgttttagcggcgtggtaacggaagacgttattgtttttggtgacgtatcgggtagcgaggcgtt

SEQ ID NO: 13068 - DNA, 773 bp, Artificial Sequence
  chemically treated genomic DNA (Homo sapiens) CpG-island No: 13068
aacgcctcgctacccgatacgtcaccaaaaacaataacgtcttccgttaccacgccgctaaaacgctcacttaaacgcattaccgaaatcaataaaataacctccaacaattcgctcgacaacacgcgtattattttacaatttaattttaaccgaaatatcaacgacgcacgcgtaatatacaaacgacgatcaacgctacacaaaatttactacccaataaaatacccaaccgcccgacctatcgcaaaacgaacccgtcgaatacgccaattataatcctcacgctaacgtccgatacttattcgcaaaataaactatacgatttcgcctcgacgcaactaactccgacgatttcgcaaatcgacgatattaataatatcgatatcgaaaacaactcactacccgccgtacgcgtcgaactaaatccgcaaacgctatttaatcaaaacgtatcgctaaacgacgtacgcaccgccgtcaacaataccaacgtacgtaaaccgcaaaacgcgctaaaaaataacactcaccgctaacaaatccaaaccaataataaactaaaaaccgccgctaaatatcaaccgttaattattcactacaacaacgacgacgcgattcgtctaaacgatataacgacgataaccgactcaatacaaaatatacgcaacgccgaaataaccaacgccaaaccgactattttactaataatccgcaaactaccgaaaaccaatattatccaaacgattaacaacatccgaacaaaattaccg

SEQ ID NO: 13069 - DNA, 1286 bp, Artificial Sequence
  chemically treated genomic DNA (Homo sapiens) CpG-island No: 13069
ggttcgttatgaatagggcgcgggttttatcgtttagggaatggcgcgtatcgacggtaaatcggcggtttgtatggtttgtagcggatcgggtgcgattaatttggtgatcgttattgtcgatgcgcggttggattttatttcgttgatttgtattattggttaggttttcgtttcgatgatcggtatcgacgttttttaggaagtggatatttacggtatttttatttttattattaaatataattatttggttagatatatcgaagaattttcgtaggttatgagcgatgtttttcgtattgcgtaattaggtcgtttaggttcggtgtggatagatatttttaaggatgtgtaaacggtagtttttgagattgaaatatagttcgttatggtagaaaaagtcgtcgttttcgtttttagcgaagaaagtattcgtgacgtagcggcgatgattaacgttgttaaacgttcggtgttttatttgggcggcggtgtgattaatgcgttcgtacgggtgcgtgaattggcggagaaagcgtaattgtttattattatgattttaatggcgttgggtatgttgttaaaagcgtattcgttgtcgttgggtatgttggggatgtacggcgtgcgtagtattaattatattttgtaggaggcggattcgttgatagtgttcggtgcgcgttttgatgatcgggcgattggtaaaatcgagtagttttgttcgaatgttaaaattatttatgtcgatatcgatcgtgtagggatttcgtggattcgacgtgtatggtatcgttatagacgtgttgagtcgtgcggttgggagtattggcgtgatacgagagagtagttgcgttttggcgaatgggtagtacgggtgtttagttagcgtttggcgatattattcgtgtcggatcgtttattagcgggtttggtacgtgtagttcggttatcgttagtgagagattgtttgttaggcggttgttggagataagtttaatatcgtcgttttgttagacgcggatagtcggttttaggtaacgattattgattttttagatcgacgcgcgtgtttttggcgtaaatgattagtgcgtacgttgtatagttataaatagcggttgtttacggcgagatttaagtagcggcggaacgggtagcggttgttgttgtcgcggtgcgttggtttttaggggaatagcgtttgtataaagtgtaattttcgatgtttgaatgaattgacgtcgattgagtgatatatttgttttatgtaaaattggtta

SEQ ID NO: 13070 - DNA, 1286 bp, Artificial Sequence
  chemically treated genomic DNA (Homo sapiens) CpG-island No: 13070
taaccaattttacataaaacaaatatatcactcaatcgacgtcaattcattcaaacatcgaaaattacactttatacaaacgctattcccctaaaaaccaacgcaccgcgacaacaacaaccgctacccgttccgccgctacttaaatctcgccgtaaacaaccgctatttataactatacaacgtacgcactaatcatttacgccaaaaacacgcgcgtcgatctaaaaaatcaataatcgttacctaaaaccgactatccgcgtctaacaaaacgacgatattaaacttatctccaacaaccgcctaacaaacaatctctcactaacgataaccgaactacacgtaccaaacccgctaataaacgatccgacacgaataatatcgccaaacgctaactaaacacccgtactacccattcgccaaaacgcaactactctctcgtatcacgccaatactcccaaccgcacgactcaacacgtctataacgataccatacacgtcgaatccacgaaatccctacacgatcgatatcgacataaataattttaacattcgaacaaaactactcgattttaccaatcgcccgatcatcaaaacgcgcaccgaacactatcaacgaatccgcctcctacaaaatataattaatactacgcacgccgtacatccccaacatacccaacgacaacgaatacgcttttaacaacatacccaacgccattaaaatcataataataaacaattacgctttctccgccaattcacgcacccgtacgaacgcattaatcacaccgccgcccaaataaaacaccgaacgtttaacaacgttaatcatcgccgctacgtcacgaatactttcttcgctaaaaacgaaaacgacgactttttctaccataacgaactatatttcaatctcaaaaactaccgtttacacatccttaaaaatatctatccacaccgaacctaaacgacctaattacgcaatacgaaaaacatcgctcataacctacgaaaattcttcgatatatctaaccaaataattatatttaataataaaaataaaaataccgtaaatatccacttcctaaaaaacgtcgataccgatcatcgaaacgaaaacctaaccaataatacaaatcaacgaaataaaatccaaccgcgcatcgacaataacgatcaccaaattaatcgcacccgatccgctacaaaccatacaaaccgccgatttaccgtcgatacgcgccattccctaaacgataaaacccgcgccctattcataacgaacc

SEQ ID NO: 13071 - DNA, 1286 bp, Artificial Sequence
  chemically treated genomic DNA (Homo sapiens) CpG-island No: 13071
tagttagttttatatggagtaaatatgttatttagtcggcgttagtttatttaggtatcggggattgtattttgtgtaggcgttgtttttttgaaggttagcgtatcgcggtaatagtaatcgttattcgtttcgtcgttatttgaatttcgtcgtgggtaatcgttgtttatgattgtataacgtgcgtattggttatttacgttagggatacgcgcgtcggtttggggaattaatggtcgttatttggggtcgattattcgcgtttggtagggcgacgatgttaagtttatttttagtaatcgtttgatagataattttttattgacggtggtcgggttatacgtattaggttcgttgatgggcggttcggtacggatgatgtcgttaaacgttgattgggtattcgtattgtttattcgttagaacgtagttattttttcgtattacgttaatatttttaatcgtacggtttagtacgtttataacgatgttatgtacgtcgagtttacgagatttttgtacggtcgatatcgatatgaatgattttggtattcggatagaattgttcggttttgttaatcgttcggttattaaaacgcgtatcgagtattattaacgaattcgttttttgtaaaatatagttggtgttgcgtacgtcgtgtatttttagtatatttagcgataacggatgcgtttttggtaatatgtttagcgttattaaagttatggtggtaggtagttgcgtttttttcgttagtttacgtattcgtgcgggcgtattgattatatcgtcgtttagataaagtatcgggcgtttggtagcgttaattatcgtcgttgcgttacgaatgtttttttcgttaaaggcgggggcggcggttttttttgttatagcgggttgtgttttaattttaaaaattgtcgtttgtatatttttaggaatgtttatttatatcgggtttgggcggtttgattgcgtaatgcggaaggtatcgtttatgatttgcgggagtttttcgatatgtttgattagatagttgtgtttggtgatggggatagagatgtcgtaggtgtttattttttggaaggcgtcggtgtcgattatcgaggcgggaatttgattagtgatgtaaattagcgggatggagtttagtcgcgtatcggtaatggcggttattaggttagtcgtattcggttcgttataggttatatagatcgtcggtttatcgtcggtgcgcgttattttttgagcgataaagttcgcgttttgtttatgacgggtt

SEQ ID NO: 13072 - DNA, 1286 bp, Artificial Sequence
  chemically treated genomic DNA (Homo sapiens) CpG-island No: 13072
aacccgtcataaacaaaacgcgaactttatcgctcaaaaaataacgcgcaccgacgataaaccgacgatctatataacctataacgaaccgaatacgactaacctaataaccgccattaccgatacgcgactaaactccatcccgctaatttacatcactaatcaaattcccgcctcgataatcgacaccgacgccttccaaaaaataaacacctacgacatctctatccccatcaccaaacacaactatctaatcaaacatatcgaaaaactcccgcaaatcataaacgataccttccgcattacgcaatcaaaccgcccaaacccgatataaataaacattcctaaaaatatacaaacgacaatttttaaaattaaaacacaacccgctataacaaaaaaaaccgccgcccccgcctttaacgaaaaaaacattcgtaacgcaacgacgataattaacgctaccaaacgcccgatactttatctaaacgacgatataatcaatacgcccgcacgaatacgtaaactaacgaaaaaaacgcaactacctaccaccataactttaataacgctaaacatattaccaaaaacgcatccgttatcgctaaatatactaaaaatacacgacgtacgcaacaccaactatattttacaaaaaacgaattcgttaataatactcgatacgcgttttaataaccgaacgattaacaaaaccgaacaattctatccgaataccaaaatcattcatatcgatatcgaccgtacaaaaatctcgtaaactcgacgtacataacatcgttataaacgtactaaaccgtacgattaaaaatattaacgtaatacgaaaaaataactacgttctaacgaataaacaatacgaatacccaatcaacgtttaacgacatcatccgtaccgaaccgcccatcaacgaacctaatacgtataacccgaccaccgtcaataaaaaattatctatcaaacgattactaaaaataaacttaacatcgtcgccctaccaaacgcgaataatcgaccccaaataacgaccattaattccccaaaccgacgcgcgtatccctaacgtaaataaccaatacgcacgttatacaatcataaacaacgattacccacgacgaaattcaaataacgacgaaacgaataacgattactattaccgcgatacgctaaccttcaaaaaaacaacgcctacacaaaatacaatccccgatacctaaataaactaacgccgactaaataacatatttactccatataaaactaacta

SEQ ID NO: 13073 - DNA, 1171 bp, Artificial Sequence
  chemically treated genomic DNA (Homo sapiens) CpG-island No: 13073
tttggtacggattttatcgttaatttgtattacgtattagttttagatttttttttaggtttgtagcgttatcgtcgagcgtttggagtaggggcgtatcgtcgaattgttgcgcgtgtttatcgagcgtaggttggttttggttcgtcgcgcgtaggacgtcgacgatttgttcggcgtattggtttattcggacgatggtatcgtcgtattgattttttgcgacggcgttttggttatgttcggcggtcgtattttgagtattcgtagcgatttcgagcgttaggtcgggaatattttgtaacgtttgtagcgcgattcggaacgggatatttattatatcgataattggtcgtagtttagttttgatttttcggacggcggcgattgttgcggtgtgttggcgattcgtttttatcgttaggaatcgggttggattttttggtttcgttacgaggaagtgtatcgtattcgttggggcggtaagtcggaaaagttgttgattatcggttttttcggttcgtagttgatttcgcgcggttcgttcgaggtttgggaggaagtggttcgcggttattttacgttttggagcgaaatcgatttggcgatcgtcgaaaagttgcgtttggatttgatggaattgtgttttaattatgcggtcgaggtcgatcgtatgcgttacgtttgatcgcggtgttcggttacgatttgcgtaattcgttgtagtcgatttttatggcggcggttttgttgttttttagcgatattcgtattatcgaattgcgttaatatattttcgcgtttagtagtcgtatggagcggttgtttagttagattttcgatatgagtcgtttgtaatcgggtatcggttttatcgtgaattcggtcgatatcgacgtttcgtaattggtgcggtagatcgtttgcgaaatcgacgtcgtttatttcggtttggtgatcgagatcgttatcgattcgtatgttcgtgtacgtggtcgattcggatcgttacgtttaggtcgtcgttaatttgttgagtaacgttcgttattacggttttgttcggcggttcggtgttggtttatttgattcgtatgttgacgatgtgttttttatcgtgtttaacgaaattagttggttttttcgaaatcgtagtggttttaattttgtt

SEQ ID NO: 13074 - DNA, 1171 bp, Artificial Sequence
  chemically treated genomic DNA (Homo sapiens) CpG-island No: 13074
aacaaaattaaaaccactacgatttcgaaaaaaccaactaatttcgttaaacacgataaaaaacacatcgtcaacatacgaatcaaataaaccaacaccgaaccgccgaacaaaaccgtaataacgaacgttactcaacaaattaacgacgacctaaacgtaacgatccgaatcgaccacgtacacgaacatacgaatcgataacgatctcgatcaccaaaccgaaataaacgacgtcgatttcgcaaacgatctaccgcaccaattacgaaacgtcgatatcgaccgaattcacgataaaaccgatacccgattacaaacgactcatatcgaaaatctaactaaacaaccgctccatacgactactaaacgcgaaaatatattaacgcaattcgataatacgaatatcgctaaaaaacaacaaaaccgccgccataaaaatcgactacaacgaattacgcaaatcgtaaccgaacaccgcgatcaaacgtaacgcatacgatcgacctcgaccgcataattaaaacacaattccatcaaatccaaacgcaacttttcgacgatcgccaaatcgatttcgctccaaaacgtaaaataaccgcgaaccacttcctcccaaacctcgaacgaaccgcgcgaaatcaactacgaaccgaaaaaaccgataatcaacaacttttccgacttaccgccccaacgaatacgatacacttcctcgtaacgaaaccaaaaaatccaacccgattcctaacgataaaaacgaatcgccaacacaccgcaacaatcgccgccgtccgaaaaatcaaaactaaactacgaccaattatcgatataataaatatcccgttccgaatcgcgctacaaacgttacaaaatattcccgacctaacgctcgaaatcgctacgaatactcaaaatacgaccgccgaacataaccaaaacgccgtcgcaaaaaatcaatacgacgataccatcgtccgaataaaccaatacgccgaacaaatcgtcgacgtcctacgcgcgacgaaccaaaaccaacctacgctcgataaacacgcgcaacaattcgacgatacgcccctactccaaacgctcgacgataacgctacaaacctaaaaaaaaatctaaaactaatacgtaatacaaattaacgataaaatccgtaccaaa

SEQ ID NO: 13075 - DNA, 1171 bp, Artificial Sequence
  chemically treated genomic DNA (Homo sapiens) CpG-island No: 13075
aataagattgaagttattgcgatttcggagaagttagttggtttcgttgagtacgataaggaatatatcgttagtatgcgagttaggtagattagtatcgggtcgtcgggtaaggtcgtgatgacggacgttgtttagtaggttggcggcgatttgggcgtagcggttcgggtcgattacgtgtacgaatatgcgggtcgatggcgatttcgattattaggtcgggataggcgacgtcggtttcgtagacgatttgtcgtattagttgcgagacgtcggtgtcgatcgggtttacggtgaggtcgatgttcgattgtaggcggtttatgtcgaggatttggttgaatagtcgttttatgcggttgttggacgcggaaatgtgttggcgtagttcggtggtgcgggtgtcgttggaggatagtagggtcgtcgttatggagatcgattgtaacgggttgcgtaggtcgtggtcgagtatcgcgattaggcgtggcgtatgcggtcgatttcggtcgtatggttgaggtatagttttattaggtttaggcgtagtttttcggcgatcgttaggtcggtttcgttttagggcgtggagtggtcgcggattatttttttttaggtttcgaacgagtcgcgcggggttagttgcgggtcggaggggtcgatggttaatagttttttcggtttgtcgttttagcggatgcggtgtattttttcgtggcggaattagaagatttagttcgatttttggcggtggaaacggatcgttagtatatcgtagtagtcgtcgtcgttcggagagttaaagttgggttgcggttagttgtcggtgtggtagatgtttcgtttcgggtcgcgttgtaggcgttgtaggatattttcggtttggcgttcgaagtcgttgcggatgtttagggtgcggtcgtcgagtatgattagggcgtcgtcgtagggaattagtgcggcgatgttatcgttcgggtgggttagtgcgtcgaataggtcgtcggcgttttgcgcgcggcgagttagggttagtttgcgttcggtggatacgcgtagtagttcggcgatacgtttttgttttaggcgttcgacgatggcgttgtagatttgggagaagatttggaattggtacgtggtgtaggttaacggtaaagttcgtgttaaa

SEQ ID NO: 13076 - DNA, 1171 bp, Artificial Sequence
  chemically treated genomic DNA (Homo sapiens) CpG-island No: 13076
tttaacacgaactttaccgttaacctacaccacgtaccaattccaaatcttctcccaaatctacaacgccatcgtcgaacgcctaaaacaaaaacgtatcgccgaactactacgcgtatccaccgaacgcaaactaaccctaactcgccgcgcgcaaaacgccgacgacctattcgacgcactaacccacccgaacgataacatcgccgcactaattccctacgacgacgccctaatcatactcgacgaccgcaccctaaacatccgcaacgacttcgaacgccaaaccgaaaatatcctacaacgcctacaacgcgacccgaaacgaaacatctaccacaccgacaactaaccgcaacccaactttaactctccgaacgacgacgactactacgatatactaacgatccgtttccaccgccaaaaatcgaactaaatcttctaattccgccacgaaaaaatacaccgcatccgctaaaacgacaaaccgaaaaaactattaaccatcgacccctccgacccgcaactaaccccgcgcgactcgttcgaaacctaaaaaaaaataatccgcgaccactccacgccctaaaacgaaaccgacctaacgatcgccgaaaaactacgcctaaacctaataaaactatacctcaaccatacgaccgaaatcgaccgcatacgccacgcctaatcgcgatactcgaccacgacctacgcaacccgttacaatcgatctccataacgacgaccctactatcctccaacgacacccgcaccaccgaactacgccaacacatttccgcgtccaacaaccgcataaaacgactattcaaccaaatcctcgacataaaccgcctacaatcgaacatcgacctcaccgtaaacccgatcgacaccgacgtctcgcaactaatacgacaaatcgtctacgaaaccgacgtcgcctatcccgacctaataatcgaaatcgccatcgacccgcatattcgtacacgtaatcgacccgaaccgctacgcccaaatcgccgccaacctactaaacaacgtccgtcatcacgaccttacccgacgacccgatactaatctacctaactcgcatactaacgatatattccttatcgtactcaacgaaaccaactaacttctccgaaatcgcaataacttcaatcttatt

SEQ ID NO: 13077 - DNA, 588 bp, Artificial Sequence
  chemically treated genomic DNA (Homo sapiens) CpG-island No: 13077
gcgatcgcgttacgtttgatattattttttaggtttttttttattagcgagtgatggggaaagtttttgatgatcgtttcggttgttatttgttggtgacgttattgcgcgaattgtacgacgtcgaattatttgcggaagtgtggttggtggtaagttttagcgaagaggtgggattacgcggcgggtaaattgttattcgcgcggtgtcgtcggacgtcgttattgtgtttgatatcgtttgttgggcgaaaaattttgattatggcgcggttaattatcgttagattggtaacgggtcgatgttggtgttaagcgataagtcgttgattgcgtcgttaaaatttatcgtttgggtcgaaatcgtggcggtagaaattggcgtgtcgttgtaggtagatatgtttagtaacggcggtacggacggcggggcggtgtatttaatcggtatcggcgtgtttatagtggtgatggggttagtaattcgttatggatattgcgtcgtatcgattgtcgattgtcgcgatattttgtagatgtagtaatttttatttgtttttatttaacgttttacgcgtgagacggttg

SEQ ID NO: 13078 - DNA, 588 bp, Artificial Sequence
  chemically treated genomic DNA (Homo sapiens) CpG-island No: 13078
caaccgtctcacgcgtaaaacgttaaataaaaacaaataaaaattactacatctacaaaatatcgcgacaatcgacaatcgatacgacgcaatatccataacgaattactaaccccatcaccactataaacacgccgataccgattaaatacaccgccccgccgtccgtaccgccgttactaaacatatctacctacaacgacacgccaatttctaccgccacgatttcgacccaaacgataaattttaacgacgcaatcaacgacttatcgcttaacaccaacatcgacccgttaccaatctaacgataattaaccgcgccataatcaaaatttttcgcccaacaaacgatatcaaacacaataacgacgtccgacgacaccgcgcgaataacaatttacccgccgcgtaatcccacctcttcgctaaaacttaccaccaaccacacttccgcaaataattcgacgtcgtacaattcgcgcaataacgtcaccaacaaataacaaccgaaacgatcatcaaaaactttccccatcactcgctaataaaaaaaaacctaaaaaataatatcaaacgtaacgcgatcgc

SEQ ID NO: 13079 - DNA, 588 bp, Artificial Sequence
  chemically treated genomic DNA (Homo sapiens) CpG-island No: 13079
taatcgttttacgcgtaagacgttgaataagggtagataaaagttgttgtatttgtaaaatgtcgcggtaatcggtaatcgatgcggcgtaatgtttatggcgggttgttggttttattattattgtgggtacgtcggtgtcggttaagtgtatcgtttcgtcgttcgtgtcgtcgttgttgaatatatttgtttgtaacggtacgttaatttttgtcgttacggtttcgatttaggcggtaagttttggcggcgtaattagcgatttgtcgtttaatattagtatcggttcgttattaatttggcgatggttagtcgcgttataattaaagtttttcgtttagtaggcggtattaagtataatggcgacgttcggcgatatcgcgcgggtggtagtttgttcgtcgcgtaattttattttttcgttggaatttgttattagttatattttcgtaggtagttcggcgtcgtgtagttcgcgtagtaacgttattagtagatagtaatcgaggcggttattaaaggttttttttattattcgttggtgagggagaatttgaaaagtggtattaaacgtgacgcgatcgt

SEQ ID NO: 13080 - DNA, 588 bp, Artificial Sequence
  chemically treated genomic DNA (Homo sapiens) CpG-island No: 13080
acgatcgcgtcacgtttaataccacttttcaaattctccctcaccaacgaataataaaaaaaacctttaataaccgcctcgattactatctactaataacgttactacgcgaactacacgacgccgaactacctacgaaaatataactaataacaaattccaacgaaaaaataaaattacgcgacgaacaaactaccacccgcgcgatatcgccgaacgtcgccattatacttaataccgcctactaaacgaaaaactttaattataacgcgactaaccatcgccaaattaataacgaaccgatactaatattaaacgacaaatcgctaattacgccgccaaaacttaccgcctaaatcgaaaccgtaacgacaaaaattaacgtaccgttacaaacaaatatattcaacaacgacgacacgaacgacgaaacgatacacttaaccgacaccgacgtacccacaataataataaaaccaacaacccgccataaacattacgccgcatcgattaccgattaccgcgacattttacaaatacaacaacttttatctacccttattcaacgtcttacgcgtaaaacgatta

SEQ ID NO: 13081 - DNA, 511 bp, Artificial Sequence
  chemically treated genomic DNA (Homo sapiens) CpG-island No: 13081
ttgtggtaacgcgttgagcgtattagcgtcggtttttagcgtattgtttcgggcgcgaaggcgttggacggttttatatcgcgtggttttgacgattatagtaaatttttttttttttaatttgacgtttattttgtgtcgttaacggtaacggaagagggtatcgtttggtcggaaggattacgtttatcgtcgcgtgattatacgtcgttgtatgacgaattacgttatgaattggcgattgatttttttatttacgacggtggggtcgttagcggttgggcgatgtaggcgtaatcgggcgataaatttacggtggtaggttcgcgcggttcgttggtggtgtcggaagattacgcgtattagttgtatgtttgcgatgaattcggaatgtttgtattgcgtcgtcgtttggaaacgttgagtaaatttgtcgttaaatcgtaagttagtgcgttggttagcgtgcgggataacgtttgttaggattatttcgcgtattttgatggtt

SEQ ID NO: 13082 - DNA, 511 bp, Artificial Sequence
  chemically treated genomic DNA (Homo sapiens) CpG-island No: 13082
aaccatcaaaatacgcgaaataatcctaacaaacgttatcccgcacgctaaccaacgcactaacttacgatttaacgacaaatttactcaacgtttccaaacgacgacgcaatacaaacattccgaattcatcgcaaacatacaactaatacgcgtaatcttccgacaccaccaacgaaccgcgcgaacctaccaccgtaaatttatcgcccgattacgcctacatcgcccaaccgctaacgaccccaccgtcgtaaataaaaaaatcaatcgccaattcataacgtaattcgtcatacaacgacgtataatcacgcgacgataaacgtaatccttccgaccaaacgataccctcttccgttaccgttaacgacacaaaataaacgtcaaattaaaaaaaaaaaaatttactataatcgtcaaaaccacgcgatataaaaccgtccaacgccttcgcgcccgaaacaatacgctaaaaaccgacgctaatacgctcaacgcgttaccacaa

SEQ ID NO: 13083 - DNA, 511 bp, Artificial Sequence
  chemically treated genomic DNA (Homo sapiens) CpG-island No: 13083
aattattaaggtgcgcgagataattttgataggcgttatttcgtacgttaattagcgtattaatttgcggtttaacggtaagtttgtttaacgtttttaggcggcggcgtaatgtaggtatttcggatttatcgtagatatatagttgatacgcgtaatttttcggtattattagcgaatcgcgcggatttgttatcgtaagtttatcgttcggttgcgtttgtatcgtttagtcgttggcgattttatcgtcgtgaataaagaaattaatcgttagtttatggcgtagttcgttatatagcggcgtatagttacgcgacggtgggcgtggttttttcggttagacgatgttttttttcgttatcgttggcggtataaagtgagcgttaggttgaggaaagaagagtttgttgtgatcgttaaagttacgcgatgtaaaatcgtttagcgttttcgcgttcgagataatgcgttgaaaatcggcgttgatgcgtttaacgcgttattatag

SEQ ID NO: 13084 - DNA, 511 bp, Artificial Sequence
  chemically treated genomic DNA (Homo sapiens) CpG-island No: 13084
ctataataacgcgttaaacgcatcaacgccgattttcaacgcattatctcgaacgcgaaaacgctaaacgattttacatcgcgtaactttaacgatcacaacaaactcttctttcctcaacctaacgctcactttataccgccaacgataacgaaaaaaaacatcgtctaaccgaaaaaaccacgcccaccgtcgcgtaactatacgccgctatataacgaactacgccataaactaacgattaatttctttattcacgacgataaaatcgccaacgactaaacgatacaaacgcaaccgaacgataaacttacgataacaaatccgcgcgattcgctaataataccgaaaaattacgcgtatcaactatatatctacgataaatccgaaatacctacattacgccgccgcctaaaaacgttaaacaaacttaccgttaaaccgcaaattaatacgctaattaacgtacgaaataacgcctatcaaaattatctcgcgcaccttaataatt

SEQ ID NO: 13085 - DNA, 1286 bp, Artificial Sequence
  chemically treated genomic DNA (Homo sapiens) CpG-island No: 13085
  unsure (402)
tcgtcgcgattttgtttaggtggagcgattcgtcggtttcgtcgtcgatcggttgcggttggatcgagtttagtatcgcggtatcgtcgttttcgtatttgtaggtatgcgtttgttggtcgacgatgtattcgtcgtcgcgttcgtagtgggttattaattcgagtaggttgtttatggtttcggtcggtacgaagagcgtcgcggcgaagtttaggcgcgtcgttagttcggtttttaggcggttgatcgtggggttttcgttatagacgtcgtcgtttagttcggtcgcggttatggttcgcgtatgtcggcggtgggttgggtgacggtgttcgtgcgtaggtcgatgataggtacggagggtttttcggttcggcggaaaagttcgatttacggcgnttatcgatagttataagggaagtcgggaaattttttcggtcgtaacggaaacgacgtcgaagcgtttcgttatgatcgagagggaaggtcgatacgttttagagtttggtcggtattattaggatttcggtacgtaggtcgttttttattcgtggattggggaagatgatgcgcgcgtcgatttcgtttattatttagcgcgtgtcgtcgatattttcggttagtaggtagttcggcgagagttcggtgaagttggttacgtcgtcgtcgaggtgtaggcggaagtggtcgttgtgtttgattatttcgcgcgatacgttgaatagtttgaggtcgtcgagtcgggagtcgttcggttgtttttcgttgtcgtcgattagtagttttaggtttcgttttaggcgttttaggttgattttttggtttttttcgaacggacgtgttttgtttagttttagggtaaaggtttcggcgtcgagttggtcgtaggtgtaggtgttgaaggtgatgttcggtttgttttgtaatagtatcgtttcgatgtcggcgtcgcgtaagcgggttagttcgttgtcggaatgttggcggttttcggtttaggggtagacggcgaattgttcgattttcgagtcgcggatcgtcgtatgtaggttttagtgtaggtggagtcgttcggttttgttgaataatatttgggttaagcgttttagttcggcggtacggaaggtttcgttggtatgtttttttcgtggcgatcgttgaataggtcgtttatgttttgttcgacgtaacggttttattttattcgtgatcggtttgaagtatggaagaagtataaatttgataatagtaagaagtgtttatgggttatcgatgaagagtag

SEQ ID NO: 13086 - DNA, 1286 bp, Artificial Sequence
  chemically treated genomic DNA (Homo sapiens) CpG-island No: 13086
  unsure (885)
ctactcttcatcgataacccataaacacttcttactattatcaaatttatacttcttccatacttcaaaccgatcacgaataaaataaaaccgttacgtcgaacaaaacataaacgacctattcaacgatcgccacgaaaaaaacataccaacgaaaccttccgtaccgccgaactaaaacgcttaacccaaatattattcaacaaaaccgaacgactccacctacactaaaacctacatacgacgatccgcgactcgaaaatcgaacaattcgccgtctacccctaaaccgaaaaccgccaacattccgacaacgaactaacccgcttacgcgacgccgacatcgaaacgatactattacaaaacaaaccgaacatcaccttcaacacctacacctacgaccaactcgacgccgaaacctttaccctaaaactaaacaaaacacgtccgttcgaaaaaaaccaaaaaatcaacctaaaacgcctaaaacgaaacctaaaactactaatcgacgacaacgaaaaacaaccgaacgactcccgactcgacgacctcaaactattcaacgtatcgcgcgaaataatcaaacacaacgaccacttccgcctacacctcgacgacgacgtaaccaacttcaccgaactctcgccgaactacctactaaccgaaaatatcgacgacacgcgctaaataataaacgaaatcgacgcgcgcatcatcttccccaatccacgaataaaaaacgacctacgtaccgaaatcctaataataccgaccaaactctaaaacgtatcgaccttccctctcgatcataacgaaacgcttcgacgtcgtttccgttacgaccgaaaaaatttcccgacttcccttataactatcgataancgccgtaaatcgaacttttccgccgaaccgaaaaaccctccgtacctatcatcgacctacgcacgaacaccgtcacccaacccaccgccgacatacgcgaaccataaccgcgaccgaactaaacgacgacgtctataacgaaaaccccacgatcaaccgcctaaaaaccgaactaacgacgcgcctaaacttcgccgcgacgctcttcgtaccgaccgaaaccataaacaacctactcgaattaataacccactacgaacgcgacgacgaatacatcgtcgaccaacaaacgcatacctacaaatacgaaaacgacgataccgcgatactaaactcgatccaaccgcaaccgatcgacgacgaaaccgacgaatcgctccacctaaacaaaatcgcgacga

SEQ ID NO: 13087 - DNA, 1286 bp, Artificial Sequence
  chemically treated genomic DNA (Homo sapiens) CpG-island No: 13087
  unsure (885)
ttgttttttatcggtgatttatggatattttttgttgttgttagatttgtattttttttatgttttagatcggttacggatggagtaggatcgttacgtcgaataggatatgaacggtttgtttaacggtcgttacgaggagggtatgttaacgaggtttttcgtgtcgtcgagttggagcgtttggtttaggtgttgtttagtaagatcgagcgattttatttgtattaggatttgtatacggcgattcgcggttcgaagatcgagtagttcgtcgtttatttttgggtcgagggtcgttagtatttcggtagcgaattggttcgtttgcgcgacgtcggtatcgaggcggtgttgttgtagaataagtcgggtattatttttagtatttatatttacggttagttcggcgtcgaggtttttattttggaattgggtaaggtacgttcgttcggagagaattaggaggttaatttggagcgtttggagcggagtttggagttgttgatcgacggtagcgaggaatagtcggacggttttcggttcgacggttttaagttgtttagcgtgtcgcgcgaggtgattaagtatagcgattattttcgtttgtatttcgacgacgacgtggttaattttatcgaattttcgtcgggttatttgttggtcgaggatatcggcggtacgcgttgggtggtggacgaggtcggcgcgcgtattattttttttaatttacgggtgaagaacggtttgcgtgtcggaattttggtggtgtcggttaagttttgaggcgtatcggttttttttttcgattatgacggagcgtttcggcgtcgttttcgttgcggtcgggaagatttttcgattttttttgtggttgtcggtagncgtcgtagatcgggttttttcgtcgaatcgaggagtttttcgtgtttgttatcgatttgcgtacggatatcgttatttagtttatcgtcggtatgcgcgaattatggtcgcggtcgaattgggcgacgacgtttatggcgaggattttacggttaatcgtttggaggtcgaattggcggcgcgtttgggtttcgtcgcggcgtttttcgtatcgatcgggattatgagtaatttgttcggattgatggtttattgcgagcgcggcgacgaatatatcgtcggttagtaggcgtatatttataaatacgagggcggcggtgtcgcggtgttgggttcgatttagtcgtagtcgatcgacggcgaggtcgacggatcgttttatttggataaggtcgcggcgg

SEQ ID NO: 13088 - DNA, 1286 bp, Artificial Sequence
  chemically treated genomic DNA (Homo sapiens) CpG-island No: 13088
  unsure (402)
ccgccgcgaccttatccaaataaaacgatccgtcgacctcgccgtcgatcgactacgactaaatcgaacccaacaccgcgacaccgccgccctcgtatttataaatatacgcctactaaccgacgatatattcgtcgccgcgctcgcaataaaccatcaatccgaacaaattactcataatcccgatcgatacgaaaaacgccgcgacgaaacccaaacgcgccgccaattcgacctccaaacgattaaccgtaaaatcctcgccataaacgtcgtcgcccaattcgaccgcgaccataattcgcgcataccgacgataaactaaataacgatatccgtacgcaaatcgataacaaacacgaaaaactcctcgattcgacgaaaaaacccgatctacgacgnctaccgacaaccacaaaaaaaatcgaaaaatcttcccgaccgcaacgaaaacgacgccgaaacgctccgtcataatcgaaaaaaaaaaccgatacgcctcaaaacttaaccgacaccaccaaaattccgacacgcaaaccgttcttcacccgtaaattaaaaaaaataatacgcgcgccgacctcgtccaccacccaacgcgtaccgccgatatcctcgaccaacaaataacccgacgaaaattcgataaaattaaccacgtcgtcgtcgaaatacaaacgaaaataatcgctatacttaatcacctcgcgcgacacgctaaacaacttaaaaccgtcgaaccgaaaaccgtccgactattcctcgctaccgtcgatcaacaactccaaactccgctccaaacgctccaaattaacctcctaattctctccgaacgaacgtaccttacccaattccaaaataaaaacctcgacgccgaactaaccgtaaatataaatactaaaaataatacccgacttattctacaacaacaccgcctcgataccgacgtcgcgcaaacgaaccaattcgctaccgaaatactaacgaccctcgacccaaaaataaacgacgaactactcgatcttcgaaccgcgaatcgccgtatacaaatcctaatacaaataaaatcgctcgatcttactaaacaacacctaaaccaaacgctccaactcgacgacacgaaaaacctcgttaacataccctcctcgtaacgaccgttaaacaaaccgttcatatcctattcgacgtaacgatcctactccatccgtaaccgatctaaaacataaaaaaaatacaaatctaacaacaacaaaaaatatccataaatcaccgataaaaaacaa

SEQ ID NO: 13089 - DNA, 569 bp, Artificial Sequence
  chemically treated genomic DNA (Homo sapiens) CpG-island No: 13089
gcggtttgcgttttatcgtcgattttttttagtaggcgttcgtatagtggattgtcggtggttttacgtagataggcgatgcgtaattcgtggatattgttacggatacgatcgcgtaattttgtcgtggtagtttcggtaaaggtgattattagtagttttttaacggttagcgggcggggaaaggcggcggaatcgttagtttaagtaataggcgtaaatagagcgtcgtaatcgtaaaggttttgtttgtgtcggtagaggttttaattaggcgtttattttgtaagggtaagcgtaaaggatttagtgtttcggcgatattatttattttttttatttattaggggtattgtttgttgtaacgcgttgacgtttttttatattttttagtttttagggtgtatatattcggttttttcgttttggttgtcggaaatttgcgatagaatagttatgttttgcggttcgattatcgtttgatggaagaaattagtaagtttttgcggcgttacgagttttatttgggttacgattttattacgcgaatcgaagcgtatattgtcgcg

SEQ ID NO: 13090 - DNA, 569 bp, Artificial Sequence
  chemically treated genomic DNA (Homo sapiens) CpG-island No: 13090
cgcgacaatatacgcttcgattcgcgtaataaaatcgtaacccaaataaaactcgtaacgccgcaaaaacttactaatttcttccatcaaacgataatcgaaccgcaaaacataactattctatcgcaaatttccgacaaccaaaacgaaaaaaccgaatatatacaccctaaaaactaaaaaatataaaaaaacgtcaacgcgttacaacaaacaatacccctaataaataaaaaaaataaataatatcgccgaaacactaaatcctttacgcttacccttacaaaataaacgcctaattaaaacctctaccgacacaaacaaaacctttacgattacgacgctctatttacgcctattacttaaactaacgattccgccgcctttccccgcccgctaaccgttaaaaaactactaataatcacctttaccgaaactaccacgacaaaattacgcgatcgtatccgtaacaatatccacgaattacgcatcgcctatctacgtaaaaccaccgacaatccactatacgaacgcctactaaaaaaaatcgacgataaaacgcaaaccgc

SEQ ID NO: 13091 - DNA, 569 bp, Artificial Sequence
  chemically treated genomic DNA (Homo sapiens) CpG-island No: 13091
cgcggtaatatgcgtttcgattcgcgtgataaaatcgtggtttagataaaattcgtgacgtcgtaaaaatttgttgattttttttattaggcggtggtcgagtcgtaaggtatggttattttgtcgtagattttcggtagttagaacgggaaagtcgaatatgtatattttgaaggttggaaagtgtgggagaacgttagcgcgttgtagtaaataatgtttttgatgagtgaaaagaatgagtgatgtcgtcgagatattagattttttgcgtttgtttttatagggtgagcgtttgattgaagtttttgtcggtataggtaaaatttttacgattgcggcgttttatttgcgtttgttatttggattagcggtttcgtcgttttttttcgttcgttgatcgttgaagaattgttggtggttatttttatcgaggttgttacggtagaattgcgcggtcgtattcgtagtaatatttacgagttgcgtatcgtttgtttgcgtgaaattatcgataatttattgtacgaacgtttgttggaagagatcgacgataaagcgtaagtcgt

SEQ ID NO: 13092 - DNA, 569 bp, Artificial Sequence
  chemically treated genomic DNA (Homo sapiens) CpG-island No: 13092
acgacttacgctttatcgtcgatctcttccaacaaacgttcgtacaataaattatcgataatttcacgcaaacaaacgatacgcaactcgtaaatattactacgaatacgaccgcgcaattctaccgtaacaacctcgataaaaataaccaccaacaattcttcaacgatcaacgaacgaaaaaaaacgacgaaaccgctaatccaaataacaaacgcaaataaaacgccgcaatcgtaaaaattttacctataccgacaaaaacttcaatcaaacgctcaccctataaaaacaaacgcaaaaaatctaatatctcgacgacatcactcattcttttcactcatcaaaaacattatttactacaacgcgctaacgttctcccacactttccaaccttcaaaatatacatattcgactttcccgttctaactaccgaaaatctacgacaaaataaccataccttacgactcgaccaccgcctaataaaaaaaatcaacaaatttttacgacgtcacgaattttatctaaaccacgattttatcacgcgaatcgaaacgcatattaccgcg

SEQ ID NO: 13093 - DNA, 1037 bp, Artificial Sequence
  chemically treated genomic DNA (Homo sapiens) CpG-island No: 13093
agttggcgatgatcgtgcgtgaatcggtcggcgtgattgtcgttatcgtgtcgtggaatttttcgttgttgttgatttgttggaaattcggttcggcgttggcggcgggaaatagcgtgattttaaaatcgtttgaaaaattatcgtttagtgcgattcgtttcgcggggttggcgaaagaagtaggtttgtcggatggtgtgttgaacgtggtgacgggttttggttatgaagtcgggtaggcgttgtcgcgttataacgatatcgacgttattgtttttatcggtttaattcgtatcgggaaatagttgttgaaagatgcgggcgatataatatgaaacgcgtttggttggaagcgggcggtaaaagcgttaatatcgttttcgttgattgttcggatttgtaataggcggtaagcgttatcgtagtaggtattttttataattagggataggtgtgtatcgtcggaacgcgtttgttgttggaagagagtatcgtcgatgaatttttagttttgttaaaatagtaggcgtaaaattggtagtcgggttatttatttgatttcgtaattattatgggtattttaatcgattgcgtttacgtcgattcggtttatagttttattcgggaaggcgaaagtaaagggtaattgttgttggatggtcgtaacgtcgggttggttgtcgttatcggttcgattatttttgtggatgtggattcgaatgcgtttttaagtcgcgaagagattttcggttcggtgttggtggttacgcgttttatattagaagaataggcgttatagtttgttaacgatagttagtacggttttggcgcggcggtatggacgcgcgatttttttcgcgcgtatcgtatgattcgacgtttgatagtcggtttcgttttttttaattattattacgacggcgatatgatcgtttcgtttggcggttattagtagagcggtaacggtcgttataaatttttgtatgttttttataaatttattgaattgaaaattatttggataagtttggagg

SEQ ID NO: 13094 - DNA, 1037 bp, Artificial Sequence
  chemically treated genomic DNA (Homo sapiens) CpG-island No: 13094
cctccaaacttatccaaataattttcaattcaataaatttataaaaaacatacaaaaatttataacgaccgttaccgctctactaataaccgccaaacgaaacgatcatatcgccgtcgtaataataattaaaaaaaacgaaaccgactatcaaacgtcgaatcatacgatacgcgcgaaaaaaatcgcgcgtccataccgccgcgccaaaaccgtactaactatcgttaacaaactataacgcctattcttctaatataaaacgcgtaaccaccaacaccgaaccgaaaatctcttcgcgacttaaaaacgcattcgaatccacatccacaaaaataatcgaaccgataacgacaaccaacccgacgttacgaccatccaacaacaattaccctttactttcgccttcccgaataaaactataaaccgaatcgacgtaaacgcaatcgattaaaatacccataataattacgaaatcaaataaataacccgactaccaattttacgcctactattttaacaaaactaaaaattcatcgacgatactctcttccaacaacaaacgcgttccgacgatacacacctatccctaattataaaaaatacctactacgataacgcttaccgcctattacaaatccgaacaatcaacgaaaacgatattaacgcttttaccgcccgcttccaaccaaacgcgtttcatattatatcgcccgcatctttcaacaactatttcccgatacgaattaaaccgataaaaacaataacgtcgatatcgttataacgcgacaacgcctacccgacttcataaccaaaacccgtcaccacgttcaacacaccatccgacaaacctacttctttcgccaaccccgcgaaacgaatcgcactaaacgataatttttcaaacgattttaaaatcacgctatttcccgccgccaacgccgaaccgaatttccaacaaatcaacaacaacgaaaaattccacgacacgataacgacaatcacgccgaccgattcacgcacgatcatcgccaact

SEQ ID NO: 13095 - DNA, 1037 bp, Artificial Sequence
  chemically treated genomic DNA (Homo sapiens) CpG-island No: 13095
tttttaggtttatttagatggtttttagtttagtgaatttgtgaagggtatgtagggatttgtggcgatcgttgtcgttttgttgatagtcgttaaacgggacggttatatcgtcgtcgtggtagtgattgaggaagacggaatcggttgttaggcgtcgggttatgcggtgcgcgcgggagaggtcgcgcgtttatatcgtcgcgttaaggtcgtattggttgtcgttggtaagttgtagcgtttgtttttttgatgtgaaacgcgtgattattagtatcggatcgaaaattttttcgcgatttaaggacgtattcgggtttatatttataaagatggtcgggtcgatggcggtagttagttcggcgttacggttatttaataatagttgttttttgttttcgttttttcgaataaagttatggatcgagtcggcgtgggcgtagtcgattaaggtgtttatggtggttgcgggattaagtggatggttcggttgttagttttgcgtttgttgttttaatagggttaagaatttatcggcgatgtttttttttagtaataggcgcgtttcggcgatgtatatttgtttttggttgtagaaaatgtttgttgcggtggcgtttgtcgtttgttgtaaattcgggtagttagcgaaaacgatgttggcgtttttgtcgttcgtttttagttagacgcgttttatgttgtgtcgttcgtattttttagtagttgtttttcggtacgggttgaatcggtaaaggtaatggcgtcgatatcgttatgacgcgatagcgtttgttcggttttatgattaaaattcgttattacgtttaatatattattcggtaagtttgtttttttcgttagtttcgcgagacgaatcgtattgagcggtgattttttagacggttttagaattacgttgtttttcgtcgttagcgtcgggtcgagtttttagtaagttagtaatagcgggaagttttacggtacgatggcggtaattacgtcgatcggtttacgtacgattatcgttagtt

SEQ ID NO: 13096 - DNA, 1037 bp, Artificial Sequence
  chemically treated genomic DNA (Homo sapiens) CpG-island No: 13096
aactaacgataatcgtacgtaaaccgatcgacgtaattaccgccatcgtaccgtaaaacttcccgctattactaacttactaaaaactcgacccgacgctaacgacgaaaaacaacgtaattctaaaaccgtctaaaaaatcaccgctcaatacgattcgtctcgcgaaactaacgaaaaaaacaaacttaccgaataatatattaaacgtaataacgaattttaatcataaaaccgaacaaacgctatcgcgtcataacgatatcgacgccattacctttaccgattcaacccgtaccgaaaaacaactactaaaaaatacgaacgacacaacataaaacgcgtctaactaaaaacgaacgacaaaaacgccaacatcgttttcgctaactacccgaatttacaacaaacgacaaacgccaccgcaacaaacattttctacaaccaaaaacaaatatacatcgccgaaacgcgcctattactaaaaaaaaacatcgccgataaattcttaaccctattaaaacaacaaacgcaaaactaacaaccgaaccatccacttaatcccgcaaccaccataaacaccttaatcgactacgcccacgccgactcgatccataactttattcgaaaaaacgaaaacaaaaaacaactattattaaataaccgtaacgccgaactaactaccgccatcgacccgaccatctttataaatataaacccgaatacgtccttaaatcgcgaaaaaattttcgatccgatactaataatcacgcgtttcacatcaaaaaaacaaacgctacaacttaccaacgacaaccaatacgaccttaacgcgacgatataaacgcgcgacctctcccgcgcgcaccgcataacccgacgcctaacaaccgattccgtcttcctcaatcactaccacgacgacgatataaccgtcccgtttaacgactatcaacaaaacgacaacgatcgccacaaatccctacatacccttcacaaattcactaaactaaaaaccatctaaataaacctaaaaa

SEQ ID NO: 13097 - DNA, 1551 bp, Artificial Sequence
  chemically treated genomic DNA (Homo sapiens) CpG-island No: 13097
  unsure (1410)
gaacgagacgttattgtttagagaacgttttttttttagacggttgattatgcgttcgatattttttatcggttcgataattattcgtttggagtaatttgttagacgagtcgattcgagtcggggttacggagttttatgtttgtttattcgcgaaatttttgtatttatcgatggtttttgcgggtcgttggaagttttgtatttcgatttgttcgatgttcgcggcgtcgttttggtttgttattcgtattcgttgttcgtcggtattatgtagaataaggtggtcgttattttgtaacgtacgttcgcgatgtcggtttggcgattttgcgttttaattttcgtggcgttggttagagcgttggtagttatggcgaggggatcggcgagatcgacgacgtcgaggtcgtcgcgcgtatggttgttggtacgttattcggggttgtcgttgatattgatgggtttttttttcggtttttgcgtcgtcggtaatttggcggggcgtttggaagcgtagggcgtggggttggcgcggttgtttatgatcgcgtcgtcggtggaacgtttcgcggttagtttgtttgcgcgttgttcgttgatcgtggtgtagtcggaggacgacgacgtggttacgtcggtcgcggtatatgtttggagcgagtttttggtacgatcgtacgagttgttgcgggtggtagaaagcggatattttttttatggtaagttgatcgatttgaaggatttgttgttgttacgtttgtaggattgacgtcgtcgcgtcggttttgttattattcggcgcgttatttttttttttgtttgatatttggtatcgtatgattattcgtattttgatcggtattatttttatcggtatttcgtatttgggtaattacgtcggcgttattcgttcggcgattttcgttagtcgtcggagcgacgtggattcgttttattttttggcggattattacgttttgattaagtgcgacgatttcgttcgtatttagcgttcgcgtttggaaatcgtcgcgatttggttggtcggcggtatggacgtcgagcgtgcgattttttatcggtagtcggatattttcgagattttcgagttgatttggttgtttatttgcgttagtgttaagggtttgtttaatcgcgcgtatgtttataaggtcgcggtggatcgtaatgtcgaggtcggcgaagattcggacgtcggcgtgattatgggtttttatagttattcggtgttgatggtcgcggatattttgatgtttaacgcgtataagatttcggtcggtcgcgattaggtgtagtacgtggagatggttcgcgatatcggttagcggtttaaataatttgttcggtaacggtcgtcgagtttttttcgttttgttacgaagcggntgatcgaaggaaaacgtcggtatttttgtcggggtttggaacgggcgatgtcgttattattttatcgcgaggaaagatatgaacggtttatttcgtattcgttagcgttattaggggtttgtttagagtgataaaaaattg

SEQ ID NO: 13098 - DNA, 1551 bp, Artificial Sequence
  chemically treated genomic DNA (Homo sapiens) CpG-island No: 13098
  unsure (142)
caattttttatcactctaaacaaacccctaataacgctaacgaatacgaaataaaccgttcatatctttcctcgcgataaaataataacgacatcgcccgttccaaaccccgacaaaaataccgacgttttccttcgatcanccgcttcgtaacaaaacgaaaaaaactcgacgaccgttaccgaacaaattatttaaaccgctaaccgatatcgcgaaccatctccacgtactacacctaatcgcgaccgaccgaaatcttatacgcgttaaacatcaaaatatccgcgaccatcaacaccgaataactataaaaacccataatcacgccgacgtccgaatcttcgccgacctcgacattacgatccaccgcgaccttataaacatacgcgcgattaaacaaacccttaacactaacgcaaataaacaaccaaatcaactcgaaaatctcgaaaatatccgactaccgataaaaaatcgcacgctcgacgtccataccgccgaccaaccaaatcgcgacgatttccaaacgcgaacgctaaatacgaacgaaatcgtcgcacttaatcaaaacgtaataatccgccaaaaaataaaacgaatccacgtcgctccgacgactaacgaaaatcgccgaacgaataacgccgacgtaattacccaaatacgaaataccgataaaaataataccgatcaaaatacgaataatcatacgataccaaatatcaaacaaaaaaaaaaataacgcgccgaataataacaaaaccgacgcgacgacgtcaatcctacaaacgtaacaacaacaaatccttcaaatcgatcaacttaccataaaaaaaatatccgctttctaccacccgcaacaactcgtacgatcgtaccaaaaactcgctccaaacatataccgcgaccgacgtaaccacgtcgtcgtcctccgactacaccacgatcaacgaacaacgcgcaaacaaactaaccgcgaaacgttccaccgacgacgcgatcataaacaaccgcgccaaccccacgccctacgcttccaaacgccccgccaaattaccgacgacgcaaaaaccgaaaaaaaaacccatcaatatcaacgacaaccccgaataacgtaccaacaaccatacgcgcgacgacctcgacgtcgtcgatctcgccgatcccctcgccataactaccaacgctctaaccaacgccacgaaaattaaaacgcaaaatcgccaaaccgacatcgcgaacgtacgttacaaaataacgaccaccttattctacataataccgacgaacaacgaatacgaataacaaaccaaaacgacgccgcgaacatcgaacaaatcgaaatacaaaacttccaacgacccgcaaaaaccatcgataaatacaaaaatttcgcgaataaacaaacataaaactccgtaaccccgactcgaatcgactcgtctaacaaattactccaaacgaataattatcgaaccgataaaaaatatcgaacgcataatcaaccgtctaaaaaaaaaacgttctctaaacaataacgtctcgttc

SEQ ID NO: 13099 - DNA, 1551 bp, Artificial Sequence
  chemically treated genomic DNA (Homo sapiens) CpG-island No: 13099
  unsure (142)
tagttttttattattttgggtaagtttttggtaacgttgacggatacgaagtaagtcgtttatattttttttcgcgatgaaatagtggcgatatcgttcgttttaggtttcggtaggggtgtcgacgttttttttcgattantcgtttcgtggtaggacgaaagaaattcggcggtcgttgtcgaataggttgtttgaatcgttggtcgatgtcgcgggttatttttacgtgttgtatttggtcgcggtcgatcggaattttgtgcgcgttgaatattaggatgttcgcggttattagtatcggatagttgtagaggtttatggttacgtcggcgttcgggttttcgtcggtttcgatattgcggtttatcgcggttttgtaggtatgcgcgcggttgagtaggtttttggtattgacgtaggtgagtaattaggttagttcgggaatttcggggatgttcgattgtcggtagaaggtcgtacgttcgacgtttatgtcgtcggttagttaggtcgcggcgatttttaggcgcgagcgttggatacgagcgggatcgtcgtatttgattaaggcgtggtagttcgttaggaagtagaacgaatttacgtcgtttcgacggttggcgaggatcgtcgggcggatggcgtcggcgtagttgtttaggtgcggagtgtcggtaggagtgatgtcggttaggatacgagtagttatgcgatattagatgttaggtaaagaaaagaatggcgcgtcggatggtagtagggtcggcgcgacgacgttagttttgtaggcgtggtagtaataggttttttagatcgattagtttgttatggaagaaatgttcgttttttgttattcgtaatagttcgtgcggtcgtgttagggattcgttttaggtatatatcgcggtcggcgtgattacgtcgtcgtttttcggttgtattacggttagcgggtaacgcgtaggtaggttgatcgcgaagcgttttatcggcggcgcgattatgaatagtcgcgttagttttacgttttgcgtttttaggcgtttcgttagattgtcggcgacgtaggagtcgaaggaaaagtttattagtgttagcggtaatttcggatggcgtgttagtaattatgcgcgcggcggtttcggcgtcgtcgatttcgtcgattttttcgttatagttgttagcgttttggttaacgttacggaagttgaaacgtagggtcgttaggtcggtatcgcgggcgtgcgttgtagagtggcgattattttgttttgtatggtgtcggcgaatagcgggtgcggatggtagattagggcgacgtcgcgggtatcgggtagatcgaggtgtagggtttttagcggttcgtaggggttatcgatggatatagggatttcgcgggtagataaatatggaatttcgtgatttcggttcgggtcgattcgtttagtagattattttaagcgaatgattatcgggtcggtgaaaaatatcgagcgtatgattaatcgtttgggggaagggcgttttttgggtaatagcgtttcgttt

SEQ ID NO: 13100 - DNA, 1551 bp, Artificial Sequence
  chemically treated genomic DNA (Homo sapiens) CpG-island No: 13100
  unsure (1410)
aaacgaaacgctattacccaaaaaacgcccttcccccaaacgattaatcatacgctcgatatttttcaccgacccgataatcattcgcttaaaataatctactaaacgaatcgacccgaaccgaaatcacgaaattccatatttatctacccgcgaaatccctatatccatcgataacccctacgaaccgctaaaaaccctacacctcgatctacccgatacccgcgacgtcgccctaatctaccatccgcacccgctattcgccgacaccatacaaaacaaaataatcgccactctacaacgcacgcccgcgataccgacctaacgaccctacgtttcaacttccgtaacgttaaccaaaacgctaacaactataacgaaaaaatcgacgaaatcgacgacgccgaaaccgccgcgcgcataattactaacacgccatccgaaattaccgctaacactaataaacttttccttcgactcctacgtcgccgacaatctaacgaaacgcctaaaaacgcaaaacgtaaaactaacgcgactattcataatcgcgccgccgataaaacgcttcgcgatcaacctacctacgcgttacccgctaaccgtaatacaaccgaaaaacgacgacgtaatcacgccgaccgcgatatatacctaaaacgaatccctaacacgaccgcacgaactattacgaataacaaaaaacgaacatttcttccataacaaactaatcgatctaaaaaacctattactaccacgcctacaaaactaacgtcgtcgcgccgaccctactaccatccgacgcgccattcttttctttacctaacatctaatatcgcataactactcgtatcctaaccgacatcactcctaccgacactccgcacctaaacaactacgccgacgccatccgcccgacgatcctcgccaaccgtcgaaacgacgtaaattcgttctacttcctaacgaactaccacgccttaatcaaatacgacgatcccgctcgtatccaacgctcgcgcctaaaaatcgccgcgacctaactaaccgacgacataaacgtcgaacgtacgaccttctaccgacaatcgaacatccccgaaattcccgaactaacctaattactcacctacgtcaataccaaaaacctactcaaccgcgcgcatacctacaaaaccgcgataaaccgcaatatcgaaaccgacgaaaacccgaacgccgacgtaaccataaacctctacaactatccgatactaataaccgcgaacatcctaatattcaacgcgcacaaaattccgatcgaccgcgaccaaatacaacacgtaaaaataacccgcgacatcgaccaacgattcaaacaacctattcgacaacgaccgccgaatttctttcgtcctaccacgaaacgantaatcgaaaaaaaacgtcgacacccctaccgaaacctaaaacgaacgatatcgccactatttcatcgcgaaaaaaaatataaacgacttacttcgtatccgtcaacgttaccaaaaacttacccaaaataataaaaaacta

SEQ ID NO: 13101 - DNA, 916 bp, Artificial Sequence
  chemically treated genomic DNA (Homo sapiens) CpG-island No: 13101
  unsure (798)
ggttttggtcggcggtttggcgtaggttttttttggttgtcgcgatgatgcggatatttagcgggattaattggttggagtcgagtcgttcgattattcgtttttgtagtaggcgtaatagtttgatttgtacgtttaggtttatgttttcgatttcgtcgaggaatagggtgtcgttattggcgtattcgaatttgtcgatgcggcgtttttgtcgtcggatgaaggcgtcggtttcgtgatcgaatagttcgttttttattatcgattcggcgagggcgtcggcgttgatcgcgacgaacggttcgtcgcgtttgttcgataggttatgtagggttcgcgcgattatttttttgtcggcgtcggtttcgttaaggattagtacgtcggtttggatcgtcgttagcgagtcgatttgttcgcgtagcgttgtatgtcggtcgagcgttcgattaggcgtttatgtagttcgtggcgttcggttagggttaggcgtagggtgcggttttttaggattagtcggcgtatttttagggcgcggcgtacgttgtcgagtagggcgtcgttggggaagggtttttttaggaagttataggcgtcgcgcgtatggtttggatcgttagcggacgtcgtcgtggtcggtgattaggattacggtaggtcggcgttttgttcgtgtaattggcggatagttttatgttatcgatgtcgggtatgcggatgtcgttgattataattttgggtaagttttgtattgcgcggtattaatttgcgcgcgtcgttaaggtcgcgatttgnattcggtaaggttaacgtttggcgtagggttttttataatagtcgggcggcgtaaatttggtggtagtaaaattagagtaaatgtgtgtagtttgttaattttttcgtttggtatttg

SEQ ID NO: 13102 - DNA, 916 bp, Artificial Sequence
  chemically treated genomic DNA (Homo sapiens) CpG-island No: 13102
  unsure (119)
caaataccaaacgaaaaaattaacaaactacacacatttactctaattttactaccaccaaatttacgccgcccgactattataaaaaaccctacgccaaacgttaaccttaccgaatncaaatcgcgaccttaacgacgcgcgcaaattaataccgcgcaatacaaaacttacccaaaattataatcaacgacatccgcatacccgacatcgataacataaaactatccgccaattacacgaacaaaacgccgacctaccgtaatcctaatcaccgaccacgacgacgtccgctaacgatccaaaccatacgcgcgacgcctataacttcctaaaaaaacccttccccaacgacgccctactcgacaacgtacgccgcgccctaaaaatacgccgactaatcctaaaaaaccgcaccctacgcctaaccctaaccgaacgccacgaactacataaacgcctaatcgaacgctcgaccgacatacaacgctacgcgaacaaatcgactcgctaacgacgatccaaaccgacgtactaatccttaacgaaaccgacgccgacaaaaaaataatcgcgcgaaccctacataacctatcgaacaaacgcgacgaaccgttcgtcgcgatcaacgccgacgccctcgccgaatcgataataaaaaacgaactattcgatcacgaaaccgacgccttcatccgacgacaaaaacgccgcatcgacaaattcgaatacgccaataacgacaccctattcctcgacgaaatcgaaaacataaacctaaacgtacaaatcaaactattacgcctactacaaaaacgaataatcgaacgactcgactccaaccaattaatcccgctaaatatccgcatcatcgcgacaaccaaaaaaaacctacgccaaaccgccgaccaaaacc

SEQ ID NO: 13103 - DNA, 916 bp, Artificial Sequence
  chemically treated genomic DNA (Homo sapiens) CpG-island No: 13103
  unsure (119)
tagatattagacggaaagattggtaaattgtatatatttgttttgattttgttgttattagatttgcgtcgttcgattattataaaaggttttgcgttagacgttgattttgtcgggtntaagtcgcgattttgacgacgcgcgtaagttgatatcgcgtagtgtaagatttgtttagggttgtggttagcgatattcgtatgttcggtatcgatggtatggaattgttcgttaattgtacgaataggacgtcgatttgtcgtgattttgattatcggttacggcgacgttcgttggcggtttaggttatgcgcgcggcgtttatgattttttggaaaagtttttttttagcgacgttttgttcgatagcgtgcgtcgcgttttggaggtgcgtcggttggttttggagaatcgtattttgcgtttggttttggtcgaacgttacgagttgtatgggcgtttgatcggacgttcggtcggtatgtagcgttgcgcgagtaggtcggttcgttggcggcgatttaggtcgacgtgttggtttttggcgaaatcggcgtcggtaaggaggtggtcgcgcgggttttgtatgatttgtcgagtagacgcgacggatcgttcgtcgcgattaacgtcggcgttttcgtcgaatcggtggtggaaagcgaattgttcggttacgaggtcggcgtttttattcggcggtagaagcgtcgtatcggtaagttcgagtacgttaatggcggtattttgtttttcgacgagatcgagagtatgagtttggacgtgtaggttaagttgttgcgtttgttgtaggaacgggtagtcgagcggttcggttttaattagttgatttcgttggatattcgtattatcgcggtaattaaggaagatttgcgttaggtcgtcgattagggtt

SEQ ID NO: 13104 - DNA, 916 bp, Artificial Sequence
  chemically treated genomic DNA (Homo sapiens) CpG-island No: 13104
  unsure (798)
aaccctaatcgacgacctaacgcaaatcttccttaattaccgcgataatacgaatatccaacgaaatcaactaattaaaaccgaaccgctcgactacccgttcctacaacaaacgcaacaacttaacctacacgtccaaactcatactctcgatctcgtcgaaaaacaaaataccgccattaacgtactcgaacttaccgatacgacgcttctaccgccgaataaaaacgccgacctcgtaaccgaacaattcgctttccaccaccgattcgacgaaaacgccgacgttaatcgcgacgaacgatccgtcgcgtctactcgacaaatcatacaaaacccgcgcgaccacctccttaccgacgccgatttcgccaaaaaccaacacgtcgacctaaatcgccgccaacgaaccgacctactcgcgcaacgctacataccgaccgaacgtccgatcaaacgcccatacaactcgtaacgttcgaccaaaaccaaacgcaaaatacgattctccaaaaccaaccgacgcacctccaaaacgcgacgcacgctatcgaacaaaacgtcgctaaaaaaaaacttttccaaaaaatcataaacgccgcgcgcataacctaaaccgccaacgaacgtcgccgtaaccgataatcaaaatcacgacaaatcgacgtcctattcgtacaattaacgaacaattccataccatcgataccgaacatacgaatatcgctaaccacaaccctaaacaaatcttacactacgcgatatcaacttacgcgcgtcgtcaaaatcgcgacttanacccgacaaaatcaacgtctaacgcaaaaccttttataataatcgaacgacgcaaatctaataacaacaaaatcaaaacaaatatatacaatttaccaatctttccgtctaatatcta

SEQ ID NO: 13105 - DNA, 612 bp, Artificial Sequence
  chemically treated genomic DNA (Homo sapiens) CpG-island No: 13105
tcgtcgattatttttagttcgtcgttaatcggaacgttatgagcgattcggttggtttttacgttatattgcgcgtaaagttcggtaatgtagttagcggtattttatttttaatcgtggggttggtggcgaggattattttagtgatttttttttttgttagacgttgttttagacgattaagttcgatattattcggatcgatgtcgtttagcggtgatagatgttttattaatattaaataacgatttgaaaattgtttcgtttgtttaatggcgtagatgttcgtcggattttttattacgtagatttgatcgtttttttgacgacgcggattcgaatagatgttatagattttttgttcggtgaaagtgcggtaatcggcgtagtggtcgattttcgatatcgttcgggtgagcgtttgcgttagacgtatttcgtcgttacgatcgcgttgaagtagcgtgaacgttatacgttgcgtcgatttcgggttaacgttcggtagatagcgtagtgtttttataagttgtgttaatacggtgttggtttgtattagaacggtattttaaagttaggcggtagttgtatttcggaagatatagagggtat

SEQ ID NO: 13106 - DNA, 612 bp, Artificial Sequence
  chemically treated genomic DNA (Homo sapiens) CpG-island No: 13106
ataccctctatatcttccgaaatacaactaccgcctaactttaaaataccgttctaatacaaaccaacaccgtattaacacaacttataaaaacactacgctatctaccgaacgttaacccgaaatcgacgcaacgtataacgttcacgctacttcaacgcgatcgtaacgacgaaatacgtctaacgcaaacgctcacccgaacgatatcgaaaatcgaccactacgccgattaccgcactttcaccgaacaaaaaatctataacatctattcgaatccgcgtcgtcaaaaaaacgatcaaatctacgtaataaaaaatccgacgaacatctacgccattaaacaaacgaaacaattttcaaatcgttatttaatattaataaaacatctatcaccgctaaacgacatcgatccgaataatatcgaacttaatcgtctaaaacaacgtctaacaaaaaaaaaaatcactaaaataatcctcgccaccaaccccacgattaaaaataaaataccgctaactacattaccgaactttacgcgcaatataacgtaaaaaccaaccgaatcgctcataacgttccgattaacgacgaactaaaaataatcgacga

SEQ ID NO: 13107 - DNA, 612 bp, Artificial Sequence
  chemically treated genomic DNA (Homo sapiens) CpG-island No: 13107
atgttttttgtatttttcggaatgtagttgtcgtttggttttaagatgtcgttttgatgtaaattagtatcgtgttaatatagtttatggaagtattgcgttgtttgtcgggcgttggttcgaagtcggcgtagcgtatggcgtttacgttgttttagcgcgatcgtagcggcgggatgcgtttggcgtaggcgtttattcgggcgatgtcggaaatcggttattgcgtcgattgtcgtatttttatcgaataggaagtttgtaatatttgttcgaattcgcgtcgttaggaaaacggttaaatttgcgtggtggagagttcggcggatatttacgttattgagtagacggggtagtttttaggtcgttatttggtgttgatggggtatttgttatcgttggacggtatcggttcggatgatatcgggtttgatcgtttggaatagcgtttggtagaggaaaaaattattgaagtgattttcgttattaattttacggttgaaggtgaagtatcgttaattatattgtcgagttttgcgcgtaatatgacgtggaagttagtcgaatcgtttatggcgtttcggttggcggcgagttggaaatggtcgacgg

SEQ ID NO: 13108 - DNA, 612 bp, Artificial Sequence
  chemically treated genomic DNA (Homo sapiens) CpG-island No: 13108
ccgtcgaccatttccaactcgccgccaaccgaaacgccataaacgattcgactaacttccacgtcatattacgcgcaaaactcgacaatataattaacgatacttcaccttcaaccgtaaaattaataacgaaaatcacttcaataattttttcctctaccaaacgctattccaaacgatcaaacccgatatcatccgaaccgataccgtccaacgataacaaataccccatcaacaccaaataacgacctaaaaactaccccgtctactcaataacgtaaatatccgccgaactctccaccacgcaaatttaaccgttttcctaacgacgcgaattcgaacaaatattacaaacttcctattcgataaaaatacgacaatcgacgcaataaccgatttccgacatcgcccgaataaacgcctacgccaaacgcatcccgccgctacgatcgcgctaaaacaacgtaaacgccatacgctacgccgacttcgaaccaacgcccgacaaacaacgcaatacttccataaactatattaacacgatactaatttacatcaaaacgacatcttaaaaccaaacgacaactacattccgaaaaatacaaaaaacat

SEQ ID NO: 13109 - DNA, 673 bp, Artificial Sequence
  chemically treated genomic DNA (Homo sapiens) CpG-island No: 13109
ttttggttgcggttatcgacggtacgttagcggcggatgttcgttcgttggtgcgttttttcgtgagcgttttcgtcgaagaagatggtaaacgcgaacgcggtgttagtggcggcggcggtcgttttggttatgaatttttttttgtcgatttcgacggcgaagttcgtgcggatgtatgggtaaaagaagtagtgcgtatggcgttggttaatttttttgtcgttgttgtattagcgggtattatgtcggtagtatttggcgtaggttggtcgggcgtgttgttgtatgaagcggttggttacggtttggaaggcgattttaatcgtcgtggtattttagtatttagtggataggtcggggagttggtggttttagaattgtgtatcgtggttgatgatggtacgatggtcgatcgtcgaggttcggtggcgattgatgacgaaggtacgttaggttagtataacgtgttgattgagaacggtattttgaaaggttatatgtaggataaatttaacgcgcgtttgatggggatgacgtcgattggtaacggtcgtcgtgaattttacgtttatttgtttatgtcgcgtatgattaatatttatatgttgtcgggtaaatcgatttcgtaggaaattattgaattcgttgagtacggtatttatgtatcgaa

SEQ ID NO: 13110 - DNA, 673 bp, Artificial Sequence
  chemically treated genomic DNA (Homo sapiens) CpG-island No: 13110
ttcgatacataaataccgtactcaacgaattcaataatttcctacgaaatcgatttacccgacaacatataaatattaatcatacgcgacataaacaaataaacgtaaaattcacgacgaccgttaccaatcgacgtcatccccatcaaacgcgcgttaaatttatcctacatataacctttcaaaataccgttctcaatcaacacgttatactaacctaacgtaccttcgtcatcaatcgccaccgaacctcgacgatcgaccatcgtaccatcatcaaccacgatacacaattctaaaaccaccaactccccgacctatccactaaatactaaaataccacgacgattaaaatcgccttccaaaccgtaaccaaccgcttcatacaacaacacgcccgaccaacctacgccaaatactaccgacataatacccgctaatacaacaacgacaaaaaaattaaccaacgccatacgcactacttcttttacccatacatccgcacgaacttcgccgtcgaaatcgacaaaaaaaaattcataaccaaaacgaccgccgccgccactaacaccgcgttcgcgtttaccatcttcttcgacgaaaacgctcacgaaaaaacgcaccaacgaacgaacatccgccgctaacgtaccgtcgataaccgcaaccaaaa

SEQ ID NO: 13111 - DNA, 673 bp, Artificial Sequence
  chemically treated genomic DNA (Homo sapiens) CpG-island No: 13111
ttcggtgtatagatatcgtatttaacggatttaataattttttgcggggtcgatttattcggtagtatataggtgttggttatacgcggtatgggtagatgggcgtaggatttacggcgatcgttgttagtcggcgttatttttattaaacgcgcgttgagtttattttgtatgtagttttttagaatgtcgtttttaattagtacgttgtattggtttggcgtattttcgttattaatcgttatcgaatttcggcgatcgattatcgtgttattattaattacggtatatagttttgaagttattagtttttcgatttgtttattaaatattgaagtgttacggcggttgaagtcgttttttagatcgtgattaatcgttttatgtaatagtacgttcggttaatttgcgttaagtattatcggtatggtgttcgttggtgtagtaacggtagaaagattgattagcgttatacgtattgttttttttgtttatgtattcgtacggatttcgtcgtcgagatcggtaaggaagaatttataattaaaacgatcgtcgtcgttattggtatcgcgttcgcgtttgttatttttttcgacgagaacgtttacggaaagacgtattagcggacggatattcgtcgttagcgtgtcgtcggtggtcgtaattaaaa

SEQ ID NO: 13112 - DNA, 673 bp, Artificial Sequence
  chemically treated genomic DNA (Homo sapiens) CpG-island No: 13112
ttttaattacgaccaccgacgacacgctaacgacgaatatccgtccgctaatacgtctttccgtaaacgttctcgtcgaaaaaaataacaaacgcgaacgcgataccaataacgacgacgatcgttttaattataaattcttccttaccgatctcgacgacgaaatccgtacgaatacataaacaaaaaaaacaatacgtataacgctaatcaatctttctaccgttactacaccaacgaacaccataccgataatacttaacgcaaattaaccgaacgtactattacataaaacgattaatcacgatctaaaaaacgacttcaaccgccgtaacacttcaatatttaataaacaaatcgaaaaactaataacttcaaaactatataccgtaattaataataacacgataatcgatcgccgaaattcgataacgattaataacgaaaatacgccaaaccaatacaacgtactaattaaaaacgacattctaaaaaactacatacaaaataaactcaacgcgcgtttaataaaaataacgccgactaacaacgatcgccgtaaatcctacgcccatctacccataccgcgtataaccaacacctatatactaccgaataaatcgaccccgcaaaaaattattaaatccgttaaatacgatatctatacaccgaa

SEQ ID NO: 13113 - DNA, 1384 bp, Artificial Sequence
  chemically treated genomic DNA (Homo sapiens) CpG-island No: 13113
cgtcggatagtggaaacgttatgaagcgaggtcgggcgaattgatcgttcgttagttcgtcgcggatgttttattatgggcgtttcggcggatttagtttcggcgtttttcgttagtatttatttttagtgattttcgttcgcgcgtttcggttaggggtgtcgaacgtttgttattgtgaggtaggtcggttcggcgggcgacgtttattggtatattttaatttacgtggtttttggtaggggttattattaggagaggaggcgttatgtttattattatttttttcgacggtagttaacgttttttcgattattcggttttcgtggtcgaggtggtttaatttatcggcgcgggtttggttaaggcgattttcgtcggtaaggtcgacggtcgtttggtcgacgtttgttatattatcgatcgtaacggattttgtagattattacgtttaaggacgaggaaggattggagattattcgttatttttgcgtttatttggtcggttatgcggttaagtagttttattcgatcgcgaagatggttatcggttcggtgatcgaggaaggtttttattacgatatttttttcgagcgtttttttattttcgaggatatggcggcgatttagtagcgtatgcgcgagttgatcgataaggattacgacgtgattaagaagatgatttcgcgcgtcgaggttatcgagttgtttaagtttcgtggcgaagattataagttgcgtttgatcgacgatatgtcggacgagaaggttatgggttgtatttttatgaggagtacgtggatatgtgtcgcggttcgtatgtgtcgaatattcgtttttttaaggcgttttaattgattaagattttcggcgtttattggcgcggcgattcgaagaacgagtagttgtaacgtatttacggtatcgtttgggtcgataagaagtaattggcggtttatatttagcgtatcgaagaggtcgagaagcgcgattatcgtcgtatcggtaagtagttcgatttgttttatttgtaggaagaagcgtcgggtatggtgttttggtattcgaatggttggagcgtttattaggtgttcgagtagtatatgcgtaaggtttagcgcgattatggttatgtcgaagtgcgtatttcgtaggtggtcgatcgtattttttgggagcgttcgggttattggtcgaattacgtcgagaatattgtttatattttttcggaaatcgcgattatcggttaaatcgatgaattgtttttatttatgttgtcggtcgattttagacgttttttttacgcggtatggtaattaaaacggagacgggacgttgaattagataattattagaggtgattattaatagatgaaataacgat

SEQ ID NO: 13114 - DNA, 1384 bp, Artificial Sequence
  chemically treated genomic DNA (Homo sapiens) CpG-island No: 13114
atcgttatttcatctattaataatcacctctaataattatctaattcaacgtcccgtctccgttttaattaccataccgcgtaaaaaaaacgtctaaaatcgaccgacaacataaataaaaacaattcatcgatttaaccgataatcgcgatttccgaaaaaatataaacaatattctcgacgtaattcgaccaataacccgaacgctcccaaaaaatacgatcgaccacctacgaaatacgcacttcgacataaccataatcgcgctaaaccttacgcatatactactcgaacacctaataaacgctccaaccattcgaataccaaaacaccatacccgacgcttcttcctacaaataaaacaaatcgaactacttaccgatacgacgataatcgcgcttctcgacctcttcgatacgctaaatataaaccgccaattacttcttatcgacccaaacgataccgtaaatacgttacaactactcgttcttcgaatcgccgcgccaataaacgccgaaaatcttaatcaattaaaacgccttaaaaaaacgaatattcgacacatacgaaccgcgacacatatccacgtactcctcataaaaatacaacccataaccttctcgtccgacatatcgtcgatcaaacgcaacttataatcttcgccacgaaacttaaacaactcgataacctcgacgcgcgaaatcatcttcttaatcacgtcgtaatccttatcgatcaactcgcgcatacgctactaaatcgccgccatatcctcgaaaataaaaaaacgctcgaaaaaaatatcgtaataaaaaccttcctcgatcaccgaaccgataaccatcttcgcgatcgaataaaactacttaaccgcataaccgaccaaataaacgcaaaaataacgaataatctccaatccttcctcgtccttaaacgtaataatctacaaaatccgttacgatcgataatataacaaacgtcgaccaaacgaccgtcgaccttaccgacgaaaatcgccttaaccaaacccgcgccgataaattaaaccacctcgaccacgaaaaccgaataatcgaaaaaacgttaactaccgtcgaaaaaaataataataaacataacgcctcctctcctaataataacccctaccaaaaaccacgtaaattaaaatataccaataaacgtcgcccgccgaaccgacctacctcacaataacaaacgttcgacacccctaaccgaaacgcgcgaacgaaaatcactaaaaataaatactaacgaaaaacgccgaaactaaatccgccgaaacgcccataataaaacatccgcgacgaactaacgaacgatcaattcgcccgacctcgcttcataacgtttccactatccgacg

SEQ ID NO: 13115 - DNA, 1384 bp, Artificial Sequence
  chemically treated genomic DNA (Homo sapiens) CpG-island No: 13115
atcgttattttatttgttggtgattatttttagtaattatttggtttagcgtttcgttttcgttttggttgttatatcgcgtggggggagcgtttagagtcgatcggtagtatggataggggtagtttatcggtttgatcggtagtcgcgattttcgaaggagtgtgaataatgttttcggcgtagttcgattagtggttcgaacgtttttagaggatgcggtcgattatttgcggggtacgtatttcgatatagttatggtcgcgttggattttgcgtatgtattgttcgagtatttggtagacgttttagttattcgggtgttagaatattatgttcggcgtttttttttgtaggtggaataggtcgagttgtttgtcgatgcggcgatggtcgcgtttttcggttttttcgatgcgttggatgtaggtcgttagttgttttttgtcggtttaggcggtgtcgtagatgcgttgtaattgttcgtttttcgagtcgtcgcgttagtaggcgtcggaaattttggttagttggaacgttttgaggaagcgggtgttcggtatatgcgggtcgcggtatatgtttacgtattttttatggaagtatagtttatggttttttcgttcggtatgtcgtcgattaggcgtagtttgtagttttcgttacgggatttgaatagttcgatgatttcggcgcgcggggttatttttttgattacgtcgtagtttttgtcgattagttcgcgtatgcgttgttggatcgtcgttatgttttcgggggtgaaggggcgttcgaagaaaatgtcgtagtagaagtttttttcgattatcgggtcgatgattattttcgcggtcggatagagttgtttgatcgtatggtcgattaggtgggcgtaggagtggcggatgatttttagttttttttcgtttttgggcgtgatgatttgtagggttcgttgcgatcgatggtgtggtaggcgtcgattaggcggtcgtcgattttgtcggcgagggtcgttttggttaggttcgcgtcgatggattgggttatttcggttacggagatcgggtgatcgaaggaacgttgattgtcgtcgggaagagtaatgatgggtatggcgtttttttttttagtggtgatttttattaaaggttacgtgggttgggatgtgttagtaagcgtcgttcgtcgggtcggtttgttttatagtggtaggcgttcggtatttttggtcgaagcgcgcggacggagattattgggaatggatattgacgaaaaacgtcggagttgagttcgtcgaagcgtttatggtaaagtattcgcggcgagttgacgagcggttagttcgttcggtttcgttttatgacgtttttattgttcggcg

SEQ ID NO: 13116 - DNA, 1384 bp, Artificial Sequence
  chemically treated genomic DNA (Homo sapiens) CpG-island No: 13116
cgccgaacaataaaaacgtcataaaacgaaaccgaacgaactaaccgctcgtcaactcgccgcgaatactttaccataaacgcttcgacgaactcaactccgacgtttttcgtcaatatccattcccaataatctccgtccgcgcgcttcgaccaaaaataccgaacgcctaccactataaaacaaaccgacccgacgaacgacgcttactaacacatcccaacccacgtaacctttaataaaaatcaccactaaaaaaaaaaacgccatacccatcattactcttcccgacgacaatcaacgttccttcgatcacccgatctccgtaaccgaaataacccaatccatcgacgcgaacctaaccaaaacgaccctcgccgacaaaatcgacgaccgcctaatcgacgcctaccacaccatcgatcgcaacgaaccctacaaatcatcacgcccaaaaacgaaaaaaaactaaaaatcatccgccactcctacgcccacctaatcgaccatacgatcaaacaactctatccgaccgcgaaaataatcatcgacccgataatcgaaaaaaacttctactacgacattttcttcgaacgccccttcacccccgaaaacataacgacgatccaacaacgcatacgcgaactaatcgacaaaaactacgacgtaatcaaaaaaataaccccgcgcgccgaaatcatcgaactattcaaatcccgtaacgaaaactacaaactacgcctaatcgacgacataccgaacgaaaaaaccataaactatacttccataaaaaatacgtaaacatataccgcgacccgcatataccgaacacccgcttcctcaaaacgttccaactaaccaaaatttccgacgcctactaacgcgacgactcgaaaaacgaacaattacaacgcatctacgacaccgcctaaaccgacaaaaaacaactaacgacctacatccaacgcatcgaaaaaaccgaaaaacgcgaccatcgccgcatcgacaaacaactcgacctattccacctacaaaaaaaaacgccgaacataatattctaacacccgaataactaaaacgtctaccaaatactcgaacaatacatacgcaaaatccaacgcgaccataactatatcgaaatacgtaccccgcaaataatcgaccgcatcctctaaaaacgttcgaaccactaatcgaactacgccgaaaacattattcacactccttcgaaaatcgcgactaccgatcaaaccgataaactacccctatccatactaccgatcgactctaaacgctccccccacgcgatataacaaccaaaacgaaaacgaaacgctaaaccaaataattactaaaaataatcaccaacaaataaaataacgat

SEQ ID NO: 13117 - DNA, 1197 bp, Artificial Sequence
  chemically treated genomic DNA (Homo sapiens) CpG-island No: 13117
ttggttgtttttgatttttcgtttcgtaagtaaggtacgtttttatttttcggatattttgcgtttgtggtttatcgattatcgttcggcgcgtcgttcgttacgcggttttcgtattcgtcgggtgtatatcgaggaggattgggcggcgattaatcgtttgtatttggcgcgcggtatgttttcggtgtagatcgagcgttttagttcgcgatattagggcgggtcgatttattggttggtcgaggacgtcgatattggcgtcgcggtaggtacggtgatgggttttaattacgttaaggcgttttaggattcggagggcggttttagtttttggtgtttggcggtggattcgtaatgtagtcggtcgggcgtcggcgaggcgttggtacggtatttggtcgagtattttatgagtcgcgaattggtttatttcgatttttcggtgttgtataataattagtaggttaaggcgttttatcgtaagttcggttttcgcgaattggcgatttttattattaagcgtaagaacggtattaattagtcgttgtttttcggtttcggttcggaggaagattttaatttttacgttcggattatcgtcgacgaagtttatcggcgcggtatcgaggtgcgcgtcgacgacgtcgagggcggtttgtttattttgatttagggcggtcggtagattcgttgtcgtgaatcgtttttcgatttgattacggcggtgagtatgattttttgttaggataaggtttttatttatcgcgttttgtagtacgtcggtttgcgttagttatagtagcgtttggtcggtagcgcggaggaaaacgtcgcgtttttcgtcgagtacggttcgttggtggttaagtcggtggacggcgagtagggttagggcgtggcggtggatttgcgtattcggaagaggtcgaggaggtatcgaggtcgttttattttattcgggtgttttgagattatacgcggtacgattggcgtttggtattgttacgagtgtgcgcgtatcgttttcgcgcgtatcgtacgttgttatatcgttattatgagttagacgcgcgtagcgtacggggaaacgatcgtgatagaatacgatttcgcgcgttatgtgatatttgtacggaattgttcggattattaacggattagatatattatcgttgaggtgattgtatttgaagt

SEQ ID NO: 13118 - DNA, 1197 bp, Artificial Sequence
  chemically treated genomic DNA (Homo sapiens) CpG-island No: 13118
acttcaaatacaatcacctcaacgataatatatctaatccgttaataatccgaacaattccgtacaaatatcacataacgcgcgaaatcgtattctatcacgatcgtttccccgtacgctacgcgcgtctaactcataataacgatataacaacgtacgatacgcgcgaaaacgatacgcgcacactcgtaacaataccaaacgccaatcgtaccgcgtataatctcaaaacacccgaataaaataaaacgacctcgatacctcctcgacctcttccgaatacgcaaatccaccgccacgccctaaccctactcgccgtccaccgacttaaccaccaacgaaccgtactcgacgaaaaacgcgacgttttcctccgcgctaccgaccaaacgctactataactaacgcaaaccgacgtactacaaaacgcgataaataaaaaccttatcctaacaaaaaatcatactcaccgccgtaatcaaatcgaaaaacgattcacgacaacgaatctaccgaccgccctaaatcaaaataaacaaaccgccctcgacgtcgtcgacgcgcacctcgataccgcgccgataaacttcgtcgacgataatccgaacgtaaaaattaaaatcttcctccgaaccgaaaccgaaaaacaacgactaattaataccgttcttacgcttaataataaaaatcgccaattcgcgaaaaccgaacttacgataaaacgccttaacctactaattattatacaacaccgaaaaatcgaaataaaccaattcgcgactcataaaatactcgaccaaataccgtaccaacgcctcgccgacgcccgaccgactacattacgaatccaccgccaaacaccaaaaactaaaaccgccctccgaatcctaaaacgccttaacgtaattaaaacccatcaccgtacctaccgcgacgccaatatcgacgtcctcgaccaaccaataaatcgacccgccctaatatcgcgaactaaaacgctcgatctacaccgaaaacataccgcgcgccaaatacaaacgattaatcgccgcccaatcctcctcgatatacacccgacgaatacgaaaaccgcgtaacgaacgacgcgccgaacgataatcgataaaccacaaacgcaaaatatccgaaaaataaaaacgtaccttacttacgaaacgaaaaatcaaaaacaaccaa

SEQ ID NO: 13119 - DNA, 1197 bp, Artificial Sequence
  chemically treated genomic DNA (Homo sapiens) CpG-island No: 13119
attttaaatgtaattattttagcgatagtgtatttaattcgttagtggttcgagtagtttcgtgtaagtgttatatagcgcgcgaggtcgtgttttgttacgatcgttttttcgtgcgttgcgcgcgtttggtttatagtagcgatgtggtagcgtgcgatacgcgcggagacgatgcgcgtatattcgtagtaatattagacgttagtcgtgtcgcgtgtagttttagagtattcgaatgaaatggggcggtttcgatgttttttcgatttttttcgggtgcgtaggtttatcgttacgttttggttttgttcgtcgtttatcggtttgattattagcgaatcgtgttcggcgaggaacgcggcgttttttttcgcgttgtcggttaggcgttgttgtagttgacgtaggtcggcgtgttgtagggcgcggtgggtgaggattttgttttggtagagggttatgtttatcgtcgtggttaggtcggagagcgatttacggtagcggatttgtcggtcgttttgggttagggtgaataggtcgttttcggcgtcgtcgacgcgtatttcgatgtcgcgtcggtgggtttcgtcgacgatgattcgggcgtaggggttgaggttttttttcgggtcggggtcgaggaatagcgattggttgatgtcgtttttgcgtttgatggtgaaggtcgttagttcgcggaagtcgagtttgcggtagagcgttttggtttgttggttgttgtgtagtatcgagaggtcgaggtaagttagttcgcggtttatgaagtgttcgattaggtgtcgtattagcgtttcgtcgacgttcggtcggttgtattgcgggtttatcgttaggtattagaggttggagtcgtttttcggattttggaacgttttggcgtggttgaggtttattatcgtgtttatcgcgacgttagtgtcggcgttttcggttagttagtagatcggttcgttttggtgtcgcgggttgaggcgttcggtttgtatcggaagtatgtcgcgcgttaggtataggcggttgatcgtcgtttagtttttttcggtatgtattcggcggatgcggaaatcgcgtggcggacggcgcgtcgggcggtagtcggtgaattataggcgtagggtattcgagggatgggaacgtattttatttgcggaacgggaagttaaaggtagttag

SEQ ID NO: 13120 - DNA, 1197 bp, Artificial Sequence
  chemically treated genomic DNA (Homo sapiens) CpG-island No: 13120
ctaactacctttaacttcccgttccgcaaataaaatacgttcccatccctcgaataccctacgcctataattcaccgactaccgcccgacgcgccgtccgccacgcgatttccgcatccgccgaatacataccgaaaaaaactaaacgacgatcaaccgcctatacctaacgcgcgacatacttccgatacaaaccgaacgcctcaacccgcgacaccaaaacgaaccgatctactaactaaccgaaaacgccgacactaacgtcgcgataaacacgataataaacctcaaccacgccaaaacgttccaaaatccgaaaaacgactccaacctctaatacctaacgataaacccgcaatacaaccgaccgaacgtcgacgaaacgctaatacgacacctaatcgaacacttcataaaccgcgaactaacttacctcgacctctcgatactacacaacaaccaacaaaccaaaacgctctaccgcaaactcgacttccgcgaactaacgaccttcaccatcaaacgcaaaaacgacatcaaccaatcgctattcctcgaccccgacccgaaaaaaaacctcaacccctacgcccgaatcatcgtcgacgaaacccaccgacgcgacatcgaaatacgcgtcgacgacgccgaaaacgacctattcaccctaacccaaaacgaccgacaaatccgctaccgtaaatcgctctccgacctaaccacgacgataaacataaccctctaccaaaacaaaatcctcacccaccgcgccctacaacacgccgacctacgtcaactacaacaacgcctaaccgacaacgcgaaaaaaaacgccgcgttcctcgccgaacacgattcgctaataatcaaaccgataaacgacgaacaaaaccaaaacgtaacgataaacctacgcacccgaaaaaaatcgaaaaaacatcgaaaccgccccatttcattcgaatactctaaaactacacgcgacacgactaacgtctaatattactacgaatatacgcgcatcgtctccgcgcgtatcgcacgctaccacatcgctactataaaccaaacgcgcgcaacgcacgaaaaaacgatcgtaacaaaacacgacctcgcgcgctatataacacttacacgaaactactcgaaccactaacgaattaaatacactatcgctaaaataattacatttaaaat

SEQ ID NO: 13121 - DNA, 775 bp, Artificial Sequence
  chemically treated genomic DNA (Homo sapiens) CpG-island No: 13121
ttaatcgtcgtacgcgacgaatggtagtattacgcggtatggttgtaggaggcgttttgtaatgtgagtgacgaagtcgggttaatgcgcgattgcggttatttcggcggcgtattatggtgcgtatcgtttgggcgtaaacgttggtattggttattgaagagagtatattgtagtagtttagttatttggcggagacgttgattgttgcggcgcgtgattggttgtatgacgtttgttgtcgcgagtggggaacgtcgtgtaatgcgtagggcgaacgtatatcgttgttgattttaggtatgggtaagttgggcggtggggagttgaattttttttttgatatcgatttgatttttgtttggtcggaatatggttgtacgtagggtggacgtcgggaattggataacgcgtagttttttattcgtatggggtagcggttgattaaagtgttggattaattaacgtaggatggtttcgtttatcgcgtggatatgcggttgcgttcgtttggcgaaagtggttcgttggtgttgagttttgtcgcgttggaagattattattaggagtaggggcgcgattgggaacgttacgcgatggttaaggcgcggattatcggcgatacgaaggcgtttattttaacgagttgcgtttattttgcgttcgtttgttttcggtcgtatatcgattttagcgttatttacgacgtagacgattttagaagattttttaggtttataggtgtatcgtattcggtaaattatatttatattaa

SEQ ID NO: 13122 - DNA, 775 bp, Artificial Sequence
  chemically treated genomic DNA (Homo sapiens) CpG-island No: 13122
ttaatataaatataatttaccgaatacgatacacctataaacctaaaaaatcttctaaaatcgtctacgtcgtaaataacgctaaaatcgatatacgaccgaaaacaaacgaacgcaaaataaacgcaactcgttaaaataaacgccttcgtatcgccgataatccgcgccttaaccatcgcgtaacgttcccaatcgcgcccctactcctaataataatcttccaacgcgacaaaactcaacaccaacgaaccactttcgccaaacgaacgcaaccgcatatccacgcgataaacgaaaccatcctacgttaattaatccaacactttaatcaaccgctaccccatacgaataaaaaactacgcgttatccaattcccgacgtccaccctacgtacaaccatattccgaccaaacaaaaatcaaatcgatatcaaaaaaaaaattcaactccccaccgcccaacttacccatacctaaaatcaacaacgatatacgttcgccctacgcattacacgacgttccccactcgcgacaacaaacgtcatacaaccaatcacgcgccgcaacaatcaacgtctccgccaaataactaaactactacaatatactctcttcaataaccaataccaacgtttacgcccaaacgatacgcaccataatacgccgccgaaataaccgcaatcgcgcattaacccgacttcgtcactcacattacaaaacgcctcctacaaccataccgcgtaatactaccattcgtcgcgtacgacgattaa

SEQ ID NO: 13123 - DNA, 775 bp, Artificial Sequence
  chemically treated genomic DNA (Homo sapiens) CpG-island No: 13123
ttgatgtgagtatggtttgtcggatacggtgtatttgtaggtttgggggattttttagagtcgtttgcgtcgtaaataacgttgaaatcgatgtacgatcgaagatagacgggcgtagaatggacgtaattcgttagaatagacgttttcgtatcgtcgataattcgcgttttgattatcgcgtaacgtttttagtcgcgtttttgtttttggtaataattttttaacgcggtaaagtttagtattagcgggttattttcgttaaacggacgtagtcgtatatttacgcgatagacgaagttattttgcgttggttgatttagtattttaattagtcgttgttttatgcgggtaaaaaattgcgcgttatttagttttcggcgtttattttgcgtataattatgtttcggttaggtaaaaattagatcgatattagaggagaaatttagttttttatcgtttagtttatttatgtttaaaattagtagcggtatgcgttcgttttgcgtattgtacggcgttttttattcgcggtagtaggcgttatatagttagttacgcgtcgtaataattagcgttttcgttagatagttgagttgttgtaatatgttttttttagtaattagtgttagcgtttgcgtttaggcgatgcgtattataatgcgtcgtcggaatagtcgtagtcgcgtattaattcggtttcgttatttatattatagagcgttttttgtaattatgtcgcgtaatgttgttattcgtcgcgtgcggcggttgg

SEQ ID NO: 13124 - DNA, 775 bp, Artificial Sequence
  chemically treated genomic DNA (Homo sapiens) CpG-island No: 13124
ccaaccgccgcacgcgacgaataacaacattacgcgacataattacaaaaaacgctctataatataaataacgaaaccgaattaatacgcgactacgactattccgacgacgcattataatacgcatcgcctaaacgcaaacgctaacactaattactaaaaaaaacatattacaacaactcaactatctaacgaaaacgctaattattacgacgcgtaactaactatataacgcctactaccgcgaataaaaaacgccgtacaatacgcaaaacgaacgcataccgctactaattttaaacataaataaactaaacgataaaaaactaaatttctcctctaatatcgatctaatttttacctaaccgaaacataattatacgcaaaataaacgccgaaaactaaataacgcgcaattttttacccgcataaaacaacgactaattaaaatactaaatcaaccaacgcaaaataacttcgtctatcgcgtaaatatacgactacgtccgtttaacgaaaataacccgctaatactaaactttaccgcgttaaaaaattattaccaaaaacaaaaacgcgactaaaaacgttacgcgataatcaaaacgcgaattatcgacgatacgaaaacgtctattctaacgaattacgtccattctacgcccgtctatcttcgatcgtacatcgatttcaacgttatttacgacgcaaacgactctaaaaaatcccccaaacctacaaatacaccgtatccgacaaaccatactcacatcaa

SEQ ID NO: 13125 - DNA, 795 bp, Artificial Sequence
  chemically treated genomic DNA (Homo sapiens) CpG-island No: 13125
tggtcgaagatttgcgggtttttattagtttggtcggttagtttattattttgttttttttcggtttcgttttcgtcgtatcgttgttcggttggttgattcggcgtatcgaacgtcgtcgtttgttgttggcgattttgttgttgttcgtttttagtaacgcgttcgtcgttttcgtttcgggttatttcggtttgtttttggttcgtttgggaatgtcggtttgttgcgggttgttgatcgttttcgttagtttgttcgtcgtcgagttggtcgtttcggtttagcgcggtcgggcgatcggtttgatttttatgggtattagcggttcgttggtgttcggcgtgttattgggcgtatagattagcgattggttcggttggcgttggattttcgtcggtatcgcggtttattcgttgtttttgtgtttgttgttttggcgttatttgtcgtaacgttaggtcggcgatttgttcggtcgcgaaggttatttgcggtagttgcgttagatcgcgttgtggttcgcgtaattggtatcgattttgttgttcggcgggtattttattttgttcgtttattttatttcgtatttggcgagtatggtcggtattcgttcgtttagcgagattagtttgatatttttgttgatcggttggtacgttgagcgcggttatatcggcggtgtttgcgatattcggtacgcgtgttcgttgtgcgcgtttgttggttggcgtcgtattggaatggtttcgatatgttattatataattcggtaatttttaatttttttaatcg

SEQ ID NO: 13126 - DNA, 795 bp, Artificial Sequence
  chemically treated genomic DNA (Homo sapiens) CpG-island No: 13126
cgattaaaaaaattaaaaattaccgaattatataataacatatcgaaaccattccaatacgacgccaaccaacaaacgcgcacaacgaacacgcgtaccgaatatcgcaaacaccgccgatataaccgcgctcaacgtaccaaccgatcaacaaaaatatcaaactaatctcgctaaacgaacgaataccgaccatactcgccaaatacgaaataaaataaacgaacaaaataaaatacccgccgaacaacaaaatcgataccaattacgcgaaccacaacgcgatctaacgcaactaccgcaaataaccttcgcgaccgaacaaatcgccgacctaacgttacgacaaataacgccaaaacaacaaacacaaaaacaacgaataaaccgcgataccgacgaaaatccaacgccaaccgaaccaatcgctaatctatacgcccaataacacgccgaacaccaacgaaccgctaatacccataaaaatcaaaccgatcgcccgaccgcgctaaaccgaaacgaccaactcgacgacgaacaaactaacgaaaacgatcaacaacccgcaacaaaccgacattcccaaacgaaccaaaaacaaaccgaaataacccgaaacgaaaacgacgaacgcgttactaaaaacgaacaacaacaaaatcgccaacaacaaacgacgacgttcgatacgccgaatcaaccaaccgaacaacgatacgacgaaaacgaaaccgaaaaaaaacaaaataataaactaaccgaccaaactaataaaaacccgcaaatcttcgacca

SEQ ID NO: 13127 - DNA, 795 bp, Artificial Sequence
  chemically treated genomic DNA (Homo sapiens) CpG-island No: 13127
cgattgagaggattgaagattatcgaattatatggtagtatatcgagattattttagtacgacgttagttagtaagcgcgtataacgagtacgcgtgtcgagtgtcgtaagtatcgtcgatatagtcgcgtttagcgtgttagtcgattagtaggagtattaggttgatttcgttgggcgagcgaatatcggttatgttcgttaggtacggggtgaaataggcgaatagggtgaagtgttcgtcgagtaataggatcgatattagttgcgcgagttatagcgcggtttggcgtaattgtcgtaggtagttttcgcggtcgggtaggtcgtcggtttggcgttgcggtaggtagcgttagagtagtaggtataagggtagcgaatagatcgcgatgtcggcgaagatttagcgttagtcgaattagtcgttgatttgtacgtttagtggtacgtcgaatattagcgaatcgttgatgtttatgaagattaggtcgatcgttcggtcgcgttgggtcggggcggttagttcggcggcgagtaggttggcgaggacgattagtagttcgtaataggtcgatatttttaggcgagttaggagtaggtcgagatagttcggagcgagggcggcgagcgcgttgttgagggcgaatagtagtagggtcgttagtagtaggcggcggcgttcgatgcgtcgggttagttagtcgagtagcggtgcggcgagggcgaagtcgagggagaatagggtggtgagttggtcggttaggttgatggagattcgtaggttttcggtta

SEQ ID NO: 13128 - DNA, 795 bp, Artificial Sequence
  chemically treated genomic DNA (Homo sapiens) CpG-island No: 13128
taaccgaaaacctacgaatctccatcaacctaaccgaccaactcaccaccctattctccctcgacttcgccctcgccgcaccgctactcgactaactaacccgacgcatcgaacgccgccgcctactactaacgaccctactactattcgccctcaacaacgcgctcgccgccctcgctccgaactatctcgacctactcctaactcgcctaaaaatatcgacctattacgaactactaatcgtcctcgccaacctactcgccgccgaactaaccgccccgacccaacgcgaccgaacgatcgacctaatcttcataaacatcaacgattcgctaatattcgacgtaccactaaacgtacaaatcaacgactaattcgactaacgctaaatcttcgccgacatcgcgatctattcgctacccttatacctactactctaacgctacctaccgcaacgccaaaccgacgacctacccgaccgcgaaaactacctacgacaattacgccaaaccgcgctataactcgcgcaactaatatcgatcctattactcgacgaacacttcaccctattcgcctatttcaccccgtacctaacgaacataaccgatattcgctcgcccaacgaaatcaacctaatactcctactaatcgactaacacgctaaacgcgactatatcgacgatacttacgacactcgacacgcgtactcgttatacgcgcttactaactaacgtcgtactaaaataatctcgatatactaccatataattcgataatcttcaatcctctcaatcg

SEQ ID NO: 13129 - DNA, 770 bp, Artificial Sequence
  chemically treated genomic DNA (Homo sapiens) CpG-island No: 13129
cgtatattagggcgcgtttgcgcggtttttatttttttggcgacggcgagtaaaatcgttattttcggtgtggtgatgcgtttgtttttttacgtatcggtgggtgatagcgacggattcgcgtggtgttggcgattatcgtttttgtttttattattttcggtaatttgatggcgttgagtagattaatattaaacgtttgttcggttatttatttattttttatttcggttatttgttggtagcgttgattgcgttgtaaatcggcgagatgtcgatggaagcggtaggggtttatttggtcggttatttgtttagtagtttcggcgcgttcggcgtggttagtttgatgtttagttcgtatcgtggttcggatgttgattttttgtttttttatcgcggtttgttttggtatcgttcgattttcgcggtagtgatgacggtgatgatgttgtttttggtcggtatttcgatgacgttgggttttatcggtaagttttacgtgttggcggtcggtgtttaggtatatttgtggtggttggtgggtgtcgtggttgtcggttcggtaatcggtttttattattatttgcgcgtggcggtgagtttgtatttttacgtttcggaataatcgggtcgcgatgtattattaaattggtagtatagcgcgggcggtatcgttgtgttgatttttgtattgttggtattggtgttgggtgtatggttataatcgttgattagtattgtgcgtttggtaatgtcgttgatgtaat

SEQ ID NO: 13130 - DNA, 770 bp, Artificial Sequence
  chemically treated genomic DNA (Homo sapiens) CpG-island No: 13130
attacatcaacgacattaccaaacgcacaatactaatcaacgattataaccatacacccaacaccaataccaacaatacaaaaatcaacacaacgataccgcccgcgctatactaccaatttaataatacatcgcgacccgattattccgaaacgtaaaaatacaaactcaccgccacgcgcaaataataataaaaaccgattaccgaaccgacaaccacgacacccaccaaccaccacaaatatacctaaacaccgaccgccaacacgtaaaacttaccgataaaacccaacgtcatcgaaataccgaccaaaaacaacatcatcaccgtcatcactaccgcgaaaatcgaacgataccaaaacaaaccgcgataaaaaaacaaaaaatcaacatccgaaccacgatacgaactaaacatcaaactaaccacgccgaacgcgccgaaactactaaacaaataaccgaccaaataaacccctaccgcttccatcgacatctcgccgatttacaacgcaatcaacgctaccaacaaataaccgaaataaaaaataaataaataaccgaacaaacgtttaatattaatctactcaacgccatcaaattaccgaaaataataaaaacaaaaacgataatcgccaacaccacgcgaatccgtcgctatcacccaccgatacgtaaaaaaacaaacgcatcaccacaccgaaaataacgattttactcgccgtcgccaaaaaaataaaaaccgcgcaaacgcgccctaatatacg

SEQ ID NO: 13131 - DNA, 770 bp, Artificial Sequence
  chemically treated genomic DNA (Homo sapiens) CpG-island No: 13131
attatattagcggtattgttaaacgtataatgttaattagcggttgtggttatatatttagtattagtattaatagtgtagagattagtataacgatatcgttcgcgttgtattgttagtttgatggtgtatcgcgattcggttgtttcggggcgtgaagatataggtttatcgttacgcgtaggtagtagtagaggtcgattgtcgaatcgataattacggtatttattagttattataagtgtgtttggatatcgatcgttagtacgtagaatttatcgataaagtttagcgttatcgggatatcggttagagatagtattattatcgttattattgtcgcgaggatcggacgatgttagaatagatcgcggtaagagaatagggaattagtattcgggttacgatacgggttggatattaggttgattacgtcgaacgcgtcgaggttgttgaatagataatcggttaggtaaatttttatcgtttttatcgatatttcgtcggtttgtagcgtaattagcgttattagtagatagtcgaggtgagagatagatgagtaatcgagtagacgtttgatattggtttgtttagcgttattaggttatcgaagatgatggaggtaaaggcgataatcgttagtattacgcgaattcgtcgttgttatttatcggtgcgtagaggaatagacgtattattatatcgaagatagcgattttgttcgtcgtcgttaggaaagtggaaatcgcgtaggcgcgttttggtatacg

SEQ ID NO: 13132 - DNA, 770 bp, Artificial Sequence
  chemically treated genomic DNA (Homo sapiens) CpG-island No: 13132
cgtataccaaaacgcgcctacgcgatttccactttcctaacgacgacgaacaaaatcgctatcttcgatataataatacgtctattcctctacgcaccgataaataacaacgacgaattcgcgtaatactaacgattatcgcctttacctccatcatcttcgataacctaataacgctaaacaaaccaatatcaaacgtctactcgattactcatctatctctcacctcgactatctactaataacgctaattacgctacaaaccgacgaaatatcgataaaaacgataaaaatttacctaaccgattatctattcaacaacctcgacgcgttcgacgtaatcaacctaatatccaacccgtatcgtaacccgaatactaattccctattctcttaccgcgatctattctaacatcgtccgatcctcgcgacaataataacgataataatactatctctaaccgatatcccgataacgctaaactttatcgataaattctacgtactaacgatcgatatccaaacacacttataataactaataaataccgtaattatcgattcgacaatcgacctctactactacctacgcgtaacgataaacctatatcttcacgccccgaaacaaccgaatcgcgatacaccatcaaactaacaatacaacgcgaacgatatcgttatactaatctctacactattaatactaatactaaatatataaccacaaccgctaattaacattatacgtttaacaataccgctaatataat

SEQ ID NO: 13133 - DNA, 842 bp, Artificial Sequence
  chemically treated genomic DNA (Homo sapiens) CpG-island No: 13133
cgttcggatgttgagtaggcggatgtgtttattattgaagcgtacgttatcgggattgttagtgtagaatagttgatcgaaattattaaataagcgggttatgacgtatttgtaagttatttaaaggttaaatcgttggcggagttattaatttcgtcggaagtattgatagcggtttttgaggcgttttcggtagcgatcgtcgatgacgatgatagttagtagttgttgttgagcggtatgagttgcgttagttgtgttattcgcgtataaaatgcgttgtaaagcgtatcgggcgttatttaggtacgggtaaatttggcggacgtattgcgttggtgatgggtagtgtttttttataagatttagtgtaggcggtggaaaaagcgggttacggcgcggaagcgattgaagatgacgttaaacgtcgcgagcgttataagaaatcgtcgtcgttacgatgaagcgttttcgttggtaggtaattgtcgtattggcggtgggtatttcggtgatggtttgggggatgatcggcgataatatgatggttatcgttgataatcgtagtttgtggttggttatcggtttgataattttggtagtgatggttttcgtcggcggttatttttatcgtagtgtatggaaaagtttgttgaacggtgcggcgacgatggatacgttggtggcgttgggtattggcgtggcgtggttttattcgacgaaatatttgtttacgagtaaaatcgaacgtcgtcgtcgtttcgatatgttttttcggtattgttataaaagtattacggaacgtttcggtaaaataagtatcgtagataaaatcgagagtg

SEQ ID NO: 13134 - DNA, 842 bp, Artificial Sequence
  chemically treated genomic DNA (Homo sapiens) CpG-island No: 13134
cactctcgattttatctacgatacttattttaccgaaacgttccgtaatacttttataacaataccgaaaaaacatatcgaaacgacgacgacgttcgattttactcgtaaacaaatatttcgtcgaataaaaccacgccacgccaatacccaacgccaccaacgtatccatcgtcgccgcaccgttcaacaaacttttccatacactacgataaaaataaccgccgacgaaaaccatcactaccaaaattatcaaaccgataaccaaccacaaactacgattatcaacgataaccatcatattatcgccgatcatcccccaaaccatcaccgaaatacccaccgccaatacgacaattacctaccaacgaaaacgcttcatcgtaacgacgacgatttcttataacgctcgcgacgtttaacgtcatcttcaatcgcttccgcgccgtaacccgctttttccaccgcctacactaaatcttataaaaaaacactacccatcaccaacgcaatacgtccgccaaatttacccgtacctaaataacgcccgatacgctttacaacgcattttatacgcgaataacacaactaacgcaactcataccgctcaacaacaactactaactatcatcgtcatcgacgatcgctaccgaaaacgcctcaaaaaccgctatcaatacttccgacgaaattaataactccgccaacgatttaacctttaaataacttacaaatacgtcataacccgcttatttaataatttcgatcaactattctacactaacaatcccgataacgtacgcttcaataataaacacatccgcctactcaacatccgaacg

SEQ ID NO: 13135 - DNA, 842 bp, Artificial Sequence
  chemically treated genomic DNA (Homo sapiens) CpG-island No: 13135
tattttcggttttatttacggtgtttattttatcgaaacgtttcgtggtgtttttatggtagtgtcgaaaggatatatcgaggcggcgacggcgttcggttttattcgtgggtaagtgtttcgtcgaataaagttacgttacgttagtatttagcgttattagcgtatttatcgtcgtcgtatcgtttagtaagtttttttatgtattgcggtaaaaatggtcgtcggcgaaaattattattgttagggttattaggtcgataattaattataggttgcggttgttagcggtgattattatgttatcgtcgattattttttagattattatcgggatatttatcgttagtgcgataattgtttgttagcggaagcgttttatcgtagcgacggcggttttttgtggcgttcgcggcgtttagcgttatttttaatcgttttcgcgtcgtagttcgttttttttatcgtttgtattaaattttgtggggaggtattgtttattattagcgtagtacgttcgttaggtttattcgtgtttgagtgacgttcggtacgttttgtagcgtattttgtacgcgggtgatatagttggcgtagtttatgtcgtttagtagtaattgttggttgttatcgttatcggcggtcgttgtcggaagcgttttagaaatcgttgttagtgttttcgacgggattgatgatttcgttagcggtttagtttttgggtggtttatagatgcgttataattcgtttgtttgatggtttcgattagttgttttgtattggtagtttcggtaacgtgcgttttagtgatagatatattcgtttgtttaatattcggacg

SEQ ID NO: 13136 - DNA, 842 bp, Artificial Sequence
  chemically treated genomic DNA (Homo sapiens) CpG-island No: 13136
cgtccgaatattaaacaaacgaatatatctatcactaaaacgcacgttaccgaaactaccaatacaaaacaactaatcgaaaccatcaaacaaacgaattataacgcatctataaaccacccaaaaactaaaccgctaacgaaatcatcaatcccgtcgaaaacactaacaacgatttctaaaacgcttccgacaacgaccgccgataacgataacaaccaacaattactactaaacgacataaactacgccaactatatcacccgcgtacaaaatacgctacaaaacgtaccgaacgtcactcaaacacgaataaacctaacgaacgtactacgctaataataaacaatacctccccacaaaatttaatacaaacgataaaaaaaacgaactacgacgcgaaaacgattaaaaataacgctaaacgccgcgaacgccacaaaaaaccgccgtcgctacgataaaacgcttccgctaacaaacaattatcgcactaacgataaatatcccgataataatctaaaaaataatcgacgataacataataatcaccgctaacaaccgcaacctataattaattatcgacctaataaccctaacaataataattttcgccgacgaccatttttaccgcaatacataaaaaaacttactaaacgatacgacgacgataaatacgctaataacgctaaatactaacgtaacgtaactttattcgacgaaacacttacccacgaataaaaccgaacgccgtcgccgcctcgatatatcctttcgacactaccataaaaacaccacgaaacgtttcgataaaataaacaccgtaaataaaaccgaaaata

SEQ ID NO: 13137 - DNA, 500 bp, Artificial Sequence
  chemically treated genomic DNA (Homo sapiens) CpG-island No: 13137
gtcgttttttgattcggttacgcgcgtggtgttgacgatatcggtttttgtcgatgttaatagcgaagaagtgacggaaattttgtttatcgtagcgcgtcgttgttcgttggtgatcgataattcggtatcggaagtttttttggtggatttgtaataggggatttagattttcgagttgcgtatttacgtcgttgagatgggttatcgtatgtcgttacgttatgagattttatagttgattttggttggtttttatgtttacggtatcgatatgttattttcgttttttagatgcgtttggaaagttttaacggtaaataaacggggagacggagaacgtcgttcgtttttttgggtggttggcgattagggcgtttatcgcgttaatatgtaattagagcgcgaattaagcgcggtgaacgtattgtcgtaattaatttgcgtatatttgacgagatttaatttgcgtttgtcggtaaagggattttttttcgttt

SEQ ID NO: 13138 - DNA, 500 bp, Artificial Sequence
  chemically treated genomic DNA (Homo sapiens) CpG-island No: 13138
aaacgaaaaaaaatccctttaccgacaaacgcaaattaaatctcgtcaaatatacgcaaattaattacgacaatacgttcaccgcgcttaattcgcgctctaattacatattaacgcgataaacgccctaatcgccaaccacccaaaaaaacgaacgacgttctccgtctccccgtttatttaccgttaaaactttccaaacgcatctaaaaaacgaaaataacatatcgataccgtaaacataaaaaccaaccaaaatcaactataaaatctcataacgtaacgacatacgataacccatctcaacgacgtaaatacgcaactcgaaaatctaaatcccctattacaaatccaccaaaaaaacttccgataccgaattatcgatcaccaacgaacaacgacgcgctacgataaacaaaatttccgtcacttcttcgctattaacatcgacaaaaaccgatatcgtcaacaccacgcgcgtaaccgaatcaaaaaacgac

SEQ ID NO: 13139 - DNA, 500 bp, Artificial Sequence
  chemically treated genomic DNA (Homo sapiens) CpG-island No: 13139
aagcgaagaaaaatttttttgtcgataggcgtaaattaaatttcgttaggtgtacgtaggttagttacggtaatgcgtttatcgcgtttggttcgcgttttgattgtatattggcgcgataaacgttttgatcgttaattatttaggagagcggacgacgtttttcgttttttcgtttgtttatcgttgaggttttttagacgtatttgaagggcggaaatggtatatcgatatcgtgggtatggaagttagttagaattagttgtgggattttatggcgtagcggtatacggtgatttattttagcggcgtaaatacgtagttcgaaaatttgaattttttgttgtagatttattaggaagattttcggtgtcgggttgtcgattattagcgagtagcgacgcgttgcggtgagtaggattttcgttattttttcgttattggtatcggtaggggtcggtatcgttaatattacgcgcgtgatcgagttagagagcgat

SEQ ID NO: 13140 - DNA, 500 bp, Artificial Sequence
  chemically treated genomic DNA (Homo sapiens) CpG-island No: 13140
atcgctctctaactcgatcacgcgcgtaatattaacgataccgacccctaccgataccaataacgaaaaaataacgaaaatcctactcaccgcaacgcgtcgctactcgctaataatcgacaacccgacaccgaaaatcttcctaataaatctacaacaaaaaattcaaattttcgaactacgtatttacgccgctaaaataaatcaccgtataccgctacgccataaaatcccacaactaattctaactaacttccatacccacgatatcgatataccatttccgcccttcaaatacgtctaaaaaacctcaacgataaacaaacgaaaaaacgaaaaacgtcgtccgctctcctaaataattaacgatcaaaacgtttatcgcgccaatatacaatcaaaacgcgaaccaaacgcgataaacgcattaccgtaactaacctacgtacacctaacgaaatttaatttacgcctatcgacaaaaaaatttttcttcgctt

SEQ ID NO: 13141 - DNA, 806 bp, Artificial Sequence
  chemically treated genomic DNA (Homo sapiens) CpG-island No: 13141
  unsure (692)
tggttggttcgcgcgggcgaaaaaacgtcgtcggatgcgttggaaaaatttatcgattttttgatgttcgtcgtagtaatggttagcgtcggtaaagcggatgtttgtatcgcgggtaattttttttttacggtaaatgtgttgcgtgtcggattacgtattatcggtttgtagttaggttgtaaaacgtttttttttatttttttgatgttgttatagtatagcggttcggcgttgggttttgtcgattgtagcgtggtgttatagtcgacggcggcgtagttggcggatatcgcgtttgttagtgtcgaaatttggcgcgttattatcggagaagagtcgcgcgtggcgatgttgtcgttttttagtaatggtagcgttcgttatttttgtgttgttaacgtttagtaggcgatagaaatcgttcgtgagcgcgtattaaagttggtggtggatggcgagttatagtttgacgtcgttttcgtgtcggaagtggcggcgtaaaaagcgtttgttagttcgttatagggtaaggttaatgtgatggttttttcgtcgttggaagtcggaaatattggttataaaatcgtataacgattcggcggatatcgtgtcgtcgggttattgatataaggatttgtcgcgtcgatgtacgatttttttcgtggttgtagcgtgtaggaaattatcgnagtggcgttggtggtagttgtgtcgcgttagatagaagtgaatcgcgaaagtagtttataaatattggttgaatgaacggtttcgttttggattttgataaagaggaaagtata

SEQ ID NO: 13142 - DNA, 806 bp, Artificial Sequence
  chemically treated genomic DNA (Homo sapiens) CpG-island No: 13142
  unsure (115)
tatactttcctctttatcaaaatccaaaacgaaaccgttcattcaaccaatatttataaactactttcgcgattcacttctatctaacgcgacacaactaccaccaacgccactncgataatttcctacacgctacaaccacgaaaaaaatcgtacatcgacgcgacaaatccttatatcaataacccgacgacacgatatccgccgaatcgttatacgattttataaccaatatttccgacttccaacgacgaaaaaaccatcacattaaccttaccctataacgaactaacaaacgctttttacgccgccacttccgacacgaaaacgacgtcaaactataactcgccatccaccaccaactttaatacgcgctcacgaacgatttctatcgcctactaaacgttaacaacacaaaaataacgaacgctaccattactaaaaaacgacaacatcgccacgcgcgactcttctccgataataacgcgccaaatttcgacactaacaaacgcgatatccgccaactacgccgccgtcgactataacaccacgctacaatcgacaaaacccaacgccgaaccgctatactataacaacatcaaaaaaataaaaaaaaacgttttacaacctaactacaaaccgataatacgtaatccgacacgcaacacatttaccgtaaaaaaaaaattacccgcgatacaaacatccgctttaccgacgctaaccattactacgacgaacatcaaaaaatcgataaatttttccaacgcatccgacgacgttttttcgcccgcgcgaaccaacca

SEQ ID NO: 13143 - DNA, 806 bp, Artificial Sequence
  chemically treated genomic DNA (Homo sapiens) CpG-island No: 13143
  unsure (115)
tgtgtttttttttttattagggtttagaacgggatcgtttatttaattagtgtttgtaaattgttttcgcggtttatttttgtttgacgcggtatagttgttattagcgttattncgataattttttgtacgttataattacgagagagatcgtgtatcggcgcggtaagtttttgtattagtggttcgacggtacgatattcgtcgagtcgttgtgcgattttgtaattaatattttcggtttttagcgacggaaaaattattatattggttttgttttgtagcgggttggtaggcgttttttgcgtcgttattttcggtacgaaggcggcgttaaattgtaattcgttatttattattagttttggtgcgcgtttacggacgatttttgtcgtttgttggacgttagtaatataggggtgacgggcgttattattgttggaaaacgatagtatcgttacgcgcggttttttttcggtgatggcgcgttaggtttcggtattggtaagcgcgatattcgttagttgcgtcgtcgtcggttgtggtattacgttgtaatcggtaaagtttaacgtcgggtcgttgtattgtggtaatattaggaaaatggaagagagcgttttatagtttggttgtaagtcgataatgcgtaattcggtacgtagtatatttgtcgtggaagagaggttgttcgcgatatagatattcgttttatcggcgttgattattgttgcggcgaatattagagggtcggtaagtttttttagcgtattcggcggcgttttttcgttcgcgcgggttagtta

SEQ ID NO: 13144 - DNA, 806 bp, Artificial Sequence
  chemically treated genomic DNA (Homo sapiens) CpG-island No: 13144
  unsure (692)
taactaacccgcgcgaacgaaaaaacgccgccgaatacgctaaaaaaacttaccgaccctctaatattcgccgcaacaataatcaacgccgataaaacgaatatctatatcgcgaacaacctctcttccacgacaaatatactacgtaccgaattacgcattatcgacttacaaccaaactataaaacgctctcttccattttcctaatattaccacaatacaacgacccgacgttaaactttaccgattacaacgtaataccacaaccgacgacgacgcaactaacgaatatcgcgcttaccaataccgaaacctaacgcgccatcaccgaaaaaaaaccgcgcgtaacgatactatcgttttccaacaataataacgcccgtcacccctatattactaacgtccaacaaacgacaaaaatcgtccgtaaacgcgcaccaaaactaataataaataacgaattacaatttaacgccgccttcgtaccgaaaataacgacgcaaaaaacgcctaccaacccgctacaaaacaaaaccaatataataatttttccgtcgctaaaaaccgaaaatattaattacaaaatcgcacaacgactcgacgaatatcgtaccgtcgaaccactaatacaaaaacttaccgcgccgatacacgatctctctcgtaattataacgtacaaaaaattatcgnaataacgctaataacaactataccgcgtcaaacaaaaataaaccgcgaaaacaatttacaaacactaattaaataaacgatcccgttctaaaccctaataaaaaaaaaaacaca

SEQ ID NO: 13145 - DNA, 507 bp, Artificial Sequence
  chemically treated genomic DNA (Homo sapiens) CpG-island No: 13145
gttcggttcggtattggtgggtagagaaaatcgtcggggatattttagttcgttacggcgtaaaaatgggttagtaacgttttattgagcgtttttatcgttagcggattggtaaagtttacgtttgtttttcggcgggtgtaagcgtgaggaattgatagatagcgggttaaagaacgcgtattttagtagtacgttttgtgtttcgttatttacgttagagtgttcgttatcgaagatgtcgtttatcgttagcgttttgttgtggtcggcgatgattagagtgttagtatttagtttcgttttagtatcgtcgagtagtattagcgtttcgttttttttcgttattcgtagtataatgtcgtttttaatgcgatttttatcgaaagcgtgtatcggttggtttagttcgagtagtatatagttggtgacgttaataattgtatcgatagaacggatttcgtaacgacgtagttttttttttatttatagcggagttggcgtttt

SEQ ID NO: 13146 - DNA, 507 bp, Artificial Sequence
  chemically treated genomic DNA (Homo sapiens) CpG-island No: 13146
aaaacgccaactccgctataaataaaaaaaaaactacgtcgttacgaaatccgttctatcgatacaattattaacgtcaccaactatatactactcgaactaaaccaaccgatacacgctttcgataaaaatcgcattaaaaacgacattatactacgaataacgaaaaaaaacgaaacgctaatactactcgacgatactaaaacgaaactaaatactaacactctaatcatcgccgaccacaacaaaacgctaacgataaacgacatcttcgataacgaacactctaacgtaaataacgaaacacaaaacgtactactaaaatacgcgttctttaacccgctatctatcaattcctcacgcttacacccgccgaaaaacaaacgtaaactttaccaatccgctaacgataaaaacgctcaataaaacgttactaacccatttttacgccgtaacgaactaaaatatccccgacgattttctctacccaccaataccgaaccgaac

SEQ ID NO: 13147 - DNA, 507 bp, Artificial Sequence
  chemically treated genomic DNA (Homo sapiens) CpG-island No: 13147
aaagcgttaatttcgttgtggatgaaagaaaaattgcgtcgttgcgggattcgttttatcgatgtagttgttgacgttattaattatgtgttgttcgaattgggttagtcgatgtacgttttcgataaagatcgtattgaaggcggtattgtgttgcggatggcgaaagagggcgaaacgttggtgttgttcgacggtattgaagcgaagttgaatgttgatattttggttatcgtcgattataataaggcgttggcgatgggcggtattttcggtggcgaatattttggcgtgaatgacgaaatataaaacgtgttgttggaatgcgcgttttttagttcgttgtttattaattttttacgtttatattcgtcggggagtaaacgtagattttgttaattcgttggcggtgaaggcgtttaataaggcgttgttggtttatttttacgtcgtagcgaattgggatattttcgacggttttttttgtttattagtatcgggtcgggt

SEQ ID NO: 13148 - DNA, 507 bp, Artificial Sequence
  chemically treated genomic DNA (Homo sapiens) CpG-island No: 13148
acccgacccgatactaataaacaaaaaaaaccgtcgaaaatatcccaattcgctacgacgtaaaaataaaccaacaacgccttattaaacgccttcaccgccaacgaattaacaaaatctacgtttactccccgacgaatataaacgtaaaaaattaataaacaacgaactaaaaaacgcgcattccaacaacacgttttatatttcgtcattcacgccaaaatattcgccaccgaaaataccgcccatcgccaacgccttattataatcgacgataaccaaaatatcaacattcaacttcgcttcaataccgtcgaacaacaccaacgtttcgccctctttcgccatccgcaacacaataccgccttcaatacgatctttatcgaaaacgtacatcgactaacccaattcgaacaacacataattaataacgtcaacaactacatcgataaaacgaatcccgcaacgacgcaatttttctttcatccacaacgaaattaacgcttt

SEQ ID NO: 13149 - DNA, 536 bp, Artificial Sequence
  chemically treated genomic DNA (Homo sapiens) CpG-island No: 13149
gtttatattagtttgttatatgtagatattttttcgttcggtttcgtcgatgagtatatcgagacggagaaaatgttggttgattttggtatcgtttatattttgttgcgtaacggttggtatagcgaaaattatttcgttagcgtttcggtagtattggaatacggcgtatttatcggtgcggcgggcgatggtaaaatcgttttagtaacgcgggtagattatgcggtagttgcggtacgcgtgattagcgaacgcggttacgaaggtaaggtttacgaattggcgggcgatagtgtttggacgttgatatagttagcggtagagttgattaaatagagcggtaaataggttatttattaaaatttgagcgaacgcgatttcgtcgcggtattgaaaagcgtcggattgttcgacggattggcggatatgttggcggattttgacgttggcgtatcgaaaggcggtttgtttgatgatagtaaaatatttagtatattgattggtttattaacgataacgttagtcgaaagcgt

SEQ ID NO: 13150 - DNA, 536 bp, Artificial Sequence
  chemically treated genomic DNA (Homo sapiens) CpG-island No: 13150
acgctttcgactaacgttatcgttaataaaccaatcaatatactaaatattttactatcatcaaacaaaccgcctttcgatacgccaacgtcaaaatccgccaacatatccgccaatccgtcgaacaatccgacgcttttcaataccgcgacgaaatcgcgttcgctcaaattttaataaataacctatttaccgctctatttaatcaactctaccgctaactatatcaacgtccaaacactatcgcccgccaattcgtaaaccttaccttcgtaaccgcgttcgctaatcacgcgtaccgcaactaccgcataatctacccgcgttactaaaacgattttaccatcgcccgccgcaccgataaatacgccgtattccaatactaccgaaacgctaacgaaataattttcgctataccaaccgttacgcaacaaaatataaacgataccaaaatcaaccaacattttctccgtctcgatatactcatcgacgaaaccgaacgaaaaaatatctacatataacaaactaatataaac

SEQ ID NO: 13151 - DNA, 536 bp, Artificial Sequence
  chemically treated genomic DNA (Homo sapiens) CpG-island No: 13151
acgttttcggttaacgttgtcgttggtgggttaattaatgtgttaagtgttttgttgttattaaatagatcgtttttcgatgcgttaacgttagaattcgttagtatattcgttagttcgtcgggtagttcgacgttttttagtgtcgcggcgaaatcgcgttcgtttagattttgataggtaatttgtttgtcgttttgtttggttagttttgtcgttaattgtgttaacgtttaagtattatcgttcgttagttcgtaaattttgttttcgtgatcgcgttcgttaattacgcgtgtcgtagttgtcgtataatttgttcgcgttgttgaggcgattttgttatcgttcgtcgtatcgataaatacgtcgtgttttagtgttgtcggggcgttggcgaggtagttttcgttgtattagtcgttgcgtagtagggtgtaaacgatgttagaattagttagtatttttttcgtttcgatgtgtttatcggcgaggtcgagcggggaggtatttgtatgtagtaggttggtataagt

SEQ ID NO: 13152 - DNA, 536 bp, Artificial Sequence
  chemically treated genomic DNA (Homo sapiens) CpG-island No: 13152
acttataccaacctactacatacaaatacctccccgctcgacctcgccgataaacacatcgaaacgaaaaaaatactaactaattctaacatcgtttacaccctactacgcaacgactaatacaacgaaaactacctcgccaacgccccgacaacactaaaacacgacgtatttatcgatacgacgaacgataacaaaatcgcctcaacaacgcgaacaaattatacgacaactacgacacgcgtaattaacgaacgcgatcacgaaaacaaaatttacgaactaacgaacgataatacttaaacgttaacacaattaacgacaaaactaaccaaacaaaacgacaaacaaattacctatcaaaatctaaacgaacgcgatttcgccgcgacactaaaaaacgtcgaactacccgacgaactaacgaatatactaacgaattctaacgttaacgcatcgaaaaacgatctatttaataacaacaaaacacttaacacattaattaacccaccaacgacaacgttaaccgaaaacgt

SEQ ID NO: 13153 - DNA, 1402 bp, Artificial Sequence
  chemically treated genomic DNA (Homo sapiens) CpG-island No: 13153
cggtgaggacggttatagtcgtagcgagttattgtggttggtgcgcggcggcgtggcgaaattggatgaaggttatcggttggtcgtattttggtaggcgttgtcggaagaatttcgtttaagttcgtatcgttatttggcgataaatagttcgtaggggtcgtggtggttgttcggttggtgtgagcgggtgtcggaagcggatgaggtgttgtttgcgtcgttgtcgtcgtatcgggtattgatcgggttggtggatcgtttcgggcgtatatagacgttttatcgcgaatcgtcggtgaatttagcggcgaaattatcggcgtgacggatggtgtcgggcgttattttcggttggtattgattacgtatgcgtacgaggtagaagaagttcggtagtaggttattttcggcgggacggaatcgttcgttttttttgatattttgtcgggttatatcgaatatggtcgggataacggtattcgtttgtttgtcgtgtggttgacgtacgattcggaatattcggagaatttattttgcgcgtcgttggtgcgttatggttggacgtttcgcggcgaattggcggtggtgtatgatcgtagtggtaaataggtgcgtagttttatttacgatgataaatatcggggtcggatggtggcgtatcgttatacgggtcggtcggaaattcgttatcgttacgatagcgacgggcgggtgatagaatagttaaattcggtaggtttaagttatacgtattagtatgagaaagatcgtattattattatcgatagtttggatcgtcgtgaagtgttgtatacgtagggcgaagtcgggttgaagcgggtggtgaaaaaggaatacgcggacggtagcgttacgtagagttagtttgacgtcgtgggtaggtttagggtatagacggatgtcgtaggtaggataatagagtatagttcggatgtggtgacgggttttattacgcgtataattacgtcggatggtagggtatcggcgttttattataattattataattagttaacgttagttatcgggtttgacgggttggaattgcgtcgggaatatgatgaattgggtcgtttgatttaggaaattgtttttgacggcgatattattcgttatcgttatgataatttatatagtgatttattttgcgtaacggaagatgttattgtagtcggaaaattatgacgtggagtcgttacggttagttgttgagttttatcgattgtttcggttatgtaattcgttatgtttatgattgtttcgggtagatgatcggtcggttatcgcgaggaagggtttaattagtatcgcgtatacgaaagtcgttgatcgtatattgtcgttaaagatacgtagggttattaaaattcggtttgaa

SEQ ID NO: 13154 - DNA, 1402 bp, Artificial Sequence
  chemically treated genomic DNA (Homo sapiens) CpG-island No: 13154
ttcaaaccgaattttaataaccctacgtatctttaacgacaatatacgatcaacgactttcgtatacgcgatactaattaaacccttcctcgcgataaccgaccgatcatctacccgaaacaatcataaacataacgaattacataaccgaaacaatcgataaaactcaacaactaaccgtaacgactccacgtcataattttccgactacaataacatcttccgttacgcaaaataaatcactatataaattatcataacgataacgaataatatcgccgtcaaaaacaatttcctaaatcaaacgacccaattcatcatattcccgacgcaattccaacccgtcaaacccgataactaacgttaactaattataataattataataaaacgccgataccctaccatccgacgtaattatacgcgtaataaaacccgtcaccacatccgaactatactctattatcctacctacgacatccgtctataccctaaacctacccacgacgtcaaactaactctacgtaacgctaccgtccgcgtattcctttttcaccacccgcttcaacccgacttcgccctacgtatacaacacttcacgacgatccaaactatcgataataataatacgatctttctcatactaatacgtataacttaaacctaccgaatttaactattctatcacccgcccgtcgctatcgtaacgataacgaatttccgaccgacccgtataacgatacgccaccatccgaccccgatatttatcatcgtaaataaaactacgcacctatttaccactacgatcatacaccaccgccaattcgccgcgaaacgtccaaccataacgcaccaacgacgcgcaaaataaattctccgaatattccgaatcgtacgtcaaccacacgacaaacaaacgaataccgttatcccgaccatattcgatataacccgacaaaatatcaaaaaaaacgaacgattccgtcccgccgaaaataacctactaccgaacttcttctacctcgtacgcatacgtaatcaataccaaccgaaaataacgcccgacaccatccgtcacgccgataatttcgccgctaaattcaccgacgattcgcgataaaacgtctatatacgcccgaaacgatccaccaacccgatcaatacccgatacgacgacaacgacgcaaacaacacctcatccgcttccgacacccgctcacaccaaccgaacaaccaccacgacccctacgaactatttatcgccaaataacgatacgaacttaaacgaaattcttccgacaacgcctaccaaaatacgaccaaccgataaccttcatccaatttcgccacgccgccgcgcaccaaccacaataactcgctacgactataaccgtcctcaccg

SEQ ID NO: 13155 - DNA, 1402 bp, Artificial Sequence
  chemically treated genomic DNA (Homo sapiens) CpG-island No: 13155
tttaaatcgggttttaatggttttgcgtgtttttaacggtaatatacggttaacggttttcgtatgcgcggtattgattaagttttttttcgcggtgatcggtcggttatttgttcgaagtagttatgggtataacgggttatataatcggaatagtcggtgaagtttagtaattgatcgtaacggttttacgttatggtttttcggttgtagtggtatttttcgttgcgtagggtaagttattgtgtggattattataacggtagcgagtgatatcgtcgttaggggtagttttttgaattagacggtttaatttattatattttcggcgtaattttagttcgttaggttcggtggttgacgttaattggttgtggtggttatagtaaaacgtcgatgttttgttattcggcgtggttatgcgcgtgatgaggttcgttattatattcgggttgtattttgttgttttgtttgcggtattcgtttgtgttttgagtttgtttacggcgttaaattgattttgcgtgacgttgtcgttcgcgtgttttttttttattattcgttttagttcggtttcgttttgcgtgtgtagtattttacggcggtttaggttgtcggtgatggtgatgcggttttttttatattgatacgtgtagtttaagtttgtcgggtttagttgttttgttattcgttcgtcgttgtcgtaacggtaacggattttcggtcggttcgtgtgacggtgcgttattattcggtttcggtatttattatcgtaagtaaagttgcgtatttgtttgttattacggttatatattatcgttagttcgtcgcggggcgtttagttatagcgtattagcggcgcgtagggtaaatttttcgggtatttcgggtcgtgcgttagttatacggtagatagacggatgtcgttgtttcggttatattcggtgtaattcggtagggtattaggaaaagcggacggtttcgtttcgtcggaaatggtttgttgtcgggttttttttgtttcgtgcgtatgcgtggttagtattagtcggaagtgacgttcggtattattcgttacgtcggtgatttcgtcgttgaatttatcggcggttcgcggtggaacgtttgtgtgcgttcgaagcggtttattagttcggttagtattcggtacggcggtagcggcgtaggtagtattttattcgttttcggtattcgtttatattagtcgagtagttattacggtttttgcggattgtttgtcgttagataacgatgcggatttaagcggagttttttcggtagcgtttgttagagtgcggttagtcggtgatttttatttagtttcgttacgtcgtcgcgtattagttatagtgattcgttgcggttgtaatcgtttttatcg

SEQ ID NO: 13156 - DNA, 1402 bp, Artificial Sequence
  chemically treated genomic DNA (Homo sapiens) CpG-island No: 13156
cgataaaaacgattacaaccgcaacgaatcactataactaatacgcgacgacgtaacgaaactaaataaaaatcaccgactaaccgcactctaacaaacgctaccgaaaaaactccgcttaaatccgcatcgttatctaacgacaaacaatccgcaaaaaccgtaataactactcgactaatataaacgaataccgaaaacgaataaaatactacctacgccgctaccgccgtaccgaatactaaccgaactaataaaccgcttcgaacgcacacaaacgttccaccgcgaaccgccgataaattcaacgacgaaatcaccgacgtaacgaataataccgaacgtcacttccgactaatactaaccacgcatacgcacgaaacaaaaaaaacccgacaacaaaccatttccgacgaaacgaaaccgtccgcttttcctaataccctaccgaattacaccgaatataaccgaaacaacgacatccgtctatctaccgtataactaacgcacgacccgaaatacccgaaaaatttaccctacgcgccgctaatacgctataactaaacgccccgcgacgaactaacgataatatataaccgtaataacaaacaaatacgcaactttacttacgataataaataccgaaaccgaataataacgcaccgtcacacgaaccgaccgaaaatccgttaccgttacgacaacgacgaacgaataacaaaacaactaaacccgacaaacttaaactacacgtatcaatataaaaaaaaccgcatcaccatcaccgacaacctaaaccgccgtaaaatactacacacgcaaaacgaaaccgaactaaaacgaataataaaaaaaaaacacgcgaacgacaacgtcacgcaaaatcaatttaacgccgtaaacaaactcaaaacacaaacgaataccgcaaacaaaacaacaaaatacaacccgaatataataacgaacctcatcacgcgcataaccacgccgaataacaaaacatcgacgttttactataaccaccacaaccaattaacgtcaaccaccgaacctaacgaactaaaattacgccgaaaatataataaattaaaccgtctaattcaaaaaactacccctaacgacgatatcactcgctaccgttataataatccacacaataacttaccctacgcaacgaaaaataccactacaaccgaaaaaccataacgtaaaaccgttacgatcaattactaaacttcaccgactattccgattatataacccgttatacccataactacttcgaacaaataaccgaccgatcaccgcgaaaaaaaacttaatcaataccgcgcatacgaaaaccgttaaccgtatattaccgttaaaaacacgcaaaaccattaaaacccgatttaaa

SEQ ID NO: 13157 - DNA, 557 bp, Artificial Sequence
  chemically treated genomic DNA (Homo sapiens) CpG-island No: 13157
atttagtagcggacgtagtagaaaatcgtcgaggcgtagggtttgtattttcgttatatagtgtgaacgattggttttttttatacgttcgttaaatcgcgtttgttgacgaaattgttggataacgtttatgttattgatgatttcgttaaagtcgtcgttgatattcgttaaataggcgcgtatacgacggataatcggcgtgttgtaacgttggtatattattattattattagtattatcgggaaaattattatcgttattagtgttattcgttagtcgaggttgaatatcgttattagtatcgcgtttattagcgcggtattgcgtaggatagtttgtattacggtaacgtagagatcgcggattattttagtgttattagtgacgcggggaattatttgttcgacgggttgggtattaaattcgtttaaatgttggcgtaatttagattattggtaggcgaaaaagttgattatcgatgttttcgaatgggaagttttgttggatggcgaaaaagtgggcgaagtgaaatggtcgttggtaggcgaatata

SEQ ID NO: 13158 - DNA, 557 bp, Artificial Sequence
  chemically treated genomic DNA (Homo sapiens) CpG-island No: 13158
tatattcgcctaccaacgaccatttcacttcgcccactttttcgccatccaacaaaacttcccattcgaaaacatcgataatcaactttttcgcctaccaataatctaaattacgccaacatttaaacgaatttaatacccaacccgtcgaacaaataattccccgcgtcactaataacactaaaataatccgcgatctctacgttaccgtaatacaaactatcctacgcaataccgcgctaataaacgcgatactaataacgatattcaacctcgactaacgaataacactaataacgataataattttcccgataatactaataataataataatataccaacgttacaacacgccgattatccgtcgtatacgcgcctatttaacgaatatcaacgacgactttaacgaaatcatcaataacataaacgttatccaacaatttcgtcaacaaacgcgatttaacgaacgtataaaaaaaaccaatcgttcacactatataacgaaaatacaaaccctacgcctcgacgattttctactacgtccgctactaaat

SEQ ID NO: 13159 - DNA, 557 bp, Artificial Sequence
  chemically treated genomic DNA (Homo sapiens) CpG-island No: 13159
tatgttcgtttattagcgattattttatttcgtttattttttcgttatttagtaaaattttttattcggaagtatcggtggttagttttttcgtttgttagtgatttgggttacgttagtatttaagcgagtttgatatttaattcgtcgggtaggtgatttttcgcgttattaatgatattgaagtgattcgcgatttttacgttatcgtagtgtaaattgttttgcgtagtgtcgcgttggtgggcgcgatgttggtggcgatgtttagtttcgattggcgaatggtattggtggcgataatgattttttcggtggtgttggtggtaatggtgatatattagcgttatagtacgtcgattgttcgtcgtgtgcgcgtttatttggcggatattaacgacggttttaacgaaattattaatggtatgagcgttatttagtagtttcgttagtaggcgcgatttggcgaacgtatgggggaggttagtcgtttatattatatggcgaggatgtaaattttgcgtttcgacggttttttgttgcgttcgttgttgagt

SEQ ID NO: 13160 - DNA, 557 bp, Artificial Sequence
  chemically treated genomic DNA (Homo sapiens) CpG-island No: 13160
actcaacaacgaacgcaacaaaaaaccgtcgaaacgcaaaatttacatcctcgccatataatataaacgactaacctcccccatacgttcgccaaatcgcgcctactaacgaaactactaaataacgctcataccattaataatttcgttaaaaccgtcgttaatatccgccaaataaacgcgcacacgacgaacaatcgacgtactataacgctaatatatcaccattaccaccaacaccaccgaaaaaatcattatcgccaccaataccattcgccaatcgaaactaaacatcgccaccaacatcgcgcccaccaacgcgacactacgcaaaacaatttacactacgataacgtaaaaatcgcgaatcacttcaatatcattaataacgcgaaaaatcacctacccgacgaattaaatatcaaactcgcttaaatactaacgtaacccaaatcactaacaaacgaaaaaactaaccaccgatacttccgaataaaaaattttactaaataacgaaaaaataaacgaaataaaataatcgctaataaacgaacata

SEQ ID NO: 13161 - DNA, 502 bp, Artificial Sequence
  chemically treated genomic DNA (Homo sapiens) CpG-island No: 13161
gttggatgtcgggtaatcgttcgtatttatgggcgttggttttaatacgatttttcgttatttaaaaaatttaggtcgtagtcggtaatttcgcgtatatagtcgggtagtgacgttatcgtttgcgcggaaatggacgaatagtggggatacgtcggggttaaatcgcgttagtattggttgttttacgcgtatgataggtttcggaagacggttgttgcgtacgtattcggtgaacgtattatggcgacgttggggcgttttatgaagttgttgttattttttgacgtggtgatatggatgacggatggttggtcgttgtatgaatttcgtttgaagggaaagttgtacgtaattagtaagcgatatacgtagcgaattgagcggtataatttgaatttgaggtagtatttggtacggttgggacggaagtcgttgtcgtttttaaaatcggtggagttgtatgataaagttatcgggtattatttgaatataaaatatt

SEQ ID NO: 13162 - DNA, 502 bp, Artificial Sequence
  chemically treated genomic DNA (Homo sapiens) CpG-island No: 13162
aatattttatattcaaataatacccgataactttatcatacaactccaccgattttaaaaacgacaacgacttccgtcccaaccgtaccaaatactacctcaaattcaaattataccgctcaattcgctacgtatatcgcttactaattacgtacaactttcccttcaaacgaaattcatacaacgaccaaccatccgtcatccatatcaccacgtcaaaaaataacaacaacttcataaaacgccccaacgtcgccataatacgttcaccgaatacgtacgcaacaaccgtcttccgaaacctatcatacgcgtaaaacaaccaatactaacgcgatttaaccccgacgtatccccactattcgtccatttccgcgcaaacgataacgtcactacccgactatatacgcgaaattaccgactacgacctaaattttttaaataacgaaaaatcgtattaaaaccaacgcccataaatacgaacgattacccgacatccaac

SEQ ID NO: 13163 - DNA, 502 bp, Artificial Sequence
  chemically treated genomic DNA (Homo sapiens) CpG-island No: 13163
agtgttttatgtttagataatgttcgatgattttgttatgtagttttatcgattttgagaacgatagcgattttcgttttagtcgtgttaggtgttgttttagatttaggttatgtcgtttaattcgttgcgtatatcgtttgttgattacgtgtagttttttttttaggcgggatttatatagcggttagttattcgttatttatattattacgttaaagggtgatagtagttttataagacgttttagcgtcgttatagtgcgtttatcgaatacgtgcgtaataatcgtttttcggagtttgttatacgcgtaaaatagttagtgttggcgcgatttagtttcgacgtatttttattgttcgtttattttcgcgtagacgatgacgttattgttcggttgtatgcgcgaggttatcgattgcggtttgagttttttaaatggcggaaaatcgtgttgaggttaacgtttataagtgcgggcggttgttcggtatttaat

SEQ ID NO: 13164 - DNA, 502 bp, Artificial Sequence
  chemically treated genomic DNA (Homo sapiens) CpG-island No: 13164
attaaataccgaacaaccgcccgcacttataaacgttaacctcaacacgattttccgccatttaaaaaactcaaaccgcaatcgataacctcgcgcatacaaccgaacaataacgtcatcgtctacgcgaaaataaacgaacaataaaaatacgtcgaaactaaatcgcgccaacactaactattttacgcgtataacaaactccgaaaaacgattattacgcacgtattcgataaacgcactataacgacgctaaaacgtcttataaaactactatcaccctttaacgtaataatataaataacgaataactaaccgctatataaatcccgcctaaaaaaaaaactacacgtaatcaacaaacgatatacgcaacgaattaaacgacataacctaaatctaaaacaacacctaacacgactaaaacgaaaatcgctatcgttctcaaaatcgataaaactacataacaaaatcatcgaacattatctaaacataaaacact

SEQ ID NO: 13165 - DNA, 752 bp, Artificial Sequence
  chemically treated genomic DNA (Homo sapiens) CpG-island No: 13165
  unsure (153, 694, 726)
gtcgtaggtcgtcgtttagttgtcgtagttgttcgttttgttcgcggttatggtcgattagtcgtaggtttttttcgtttagggcgtggatgcgttcgttgtgcgagcgaatttcgtcgatcgtttggttttgttgggtcgagttttcggtantgcgttcggttattacgtcgatggtatggatcgcggcgattatttcgtttagcgcgtttttcgtcgcgtcggttttgttcggcggtgcgttcggtatgttcgatttggttgcgtatggtttttatcgattgtcgcgcggtttgttgtaggcggtcgatgagttgttggattttttcggtggcgtcggcggtgcgttgggttagcgagcggattttttcggcgattacggcgaacgttggtttttggtcgtcggcgcgggcggtttcgatggcggtattgagggcgagtaggttggtttgttcggcgatcgagcggattatcgttagtacgttgtcgatggtcgtcgatttttcggttaggcgttcgatcgattgggcgttgtatttatttcgtcgattagttcgcgtagtcgtttaggttttcgtcgattattcgttggttatgtttaattgtatggtttgcgttgcgattggcgttagcggtttggttggcgttttcggcgaaattgttgatcgcgtttttatgttagcgaggcgtcgtngatttgtaggtatcgttagttgcgttgatttngcgttaagcgttgttatttcgtagta

SEQ ID NO: 13166 - DNA, 752 bp, Artificial Sequence
  chemically treated genomic DNA (Homo sapiens) CpG-island No: 13166
  unsure (27, 59, 600)
tactacgaaataacaacgcttaacgcnaaatcaacgcaactaacgatacctacaaatcnacgacgcctcgctaacataaaaacgcgatcaacaatttcgccgaaaacgccaaccaaaccgctaacgccaatcgcaacgcaaaccatacaattaaacataaccaacgaataatcgacgaaaacctaaacgactacgcgaactaatcgacgaaataaatacaacgcccaatcgatcgaacgcctaaccgaaaaatcgacgaccatcgacaacgtactaacgataatccgctcgatcgccgaacaaaccaacctactcgccctcaataccgccatcgaaaccgcccgcgccgacgaccaaaaaccaacgttcgccgtaatcgccgaaaaaatccgctcgctaacccaacgcaccgccgacgccaccgaaaaaatccaacaactcatcgaccgcctacaacaaaccgcgcgacaatcgataaaaaccatacgcaaccaaatcgaacataccgaacgcaccgccgaacaaaaccgacgcgacgaaaaacgcgctaaacgaaataatcgccgcgatccataccatcgacgtaataaccgaacgcantaccgaaaactcgacccaacaaaaccaaacgatcgacgaaattcgctcgcacaacgaacgcatccacgccctaaacgaaaaaaacctacgactaatcgaccataaccgcgaacaaaacgaacaactacgacaactaaacgacgacctacgac

SEQ ID NO: 13167 - DNA, 752 bp, Artificial Sequence
  chemically treated genomic DNA (Homo sapiens) CpG-island No: 13167
  unsure (27, 59, 600)
tgttgcgaagtagtagcgtttgacgtnaggttagcgtagttagcgatatttgtagattngcgacgtttcgttgatatgaaagcgcgattagtagtttcgtcggagacgttagttagatcgttgacgttagtcgtagcgtaggttatgtagttgagtatggttagcgggtgatcggcgagagtttgggcggttgcgcgagttggtcgacgaggtgaatgtaacgtttagtcgatcgagcgtttagtcgaggagtcggcgattatcggtagcgtgttgacggtgattcgttcgatcgtcgaatagattaatttgttcgtttttaatgtcgttatcgaggtcgttcgcgtcggcgattaagggttagcgttcgtcgtggtcgtcgaggaagttcgttcgttggtttagcgtatcgtcggcgttatcgaggagatttagtagtttatcggtcgtttgtaataggtcgcgcggtaatcggtggaggttatgcgtagttaggtcgagtatgtcgaacgtatcgtcgaataaggtcggcgcggcggaaggcgcgttggacgaagtggtcgtcgcgatttatattatcggcgtgatggtcgaacgtantgtcgaaggttcgatttagtagagttaggcggtcggcgagattcgttcgtatagcgaacgtatttacgttttgggcggggaaaatttgcggttgatcggttatagtcgcgaatagggcgagtaattgcggtaattgggcggcgatttgcgat

SEQ ID NO: 13168 - DNA, 752 bp, Artificial Sequence
  chemically treated genomic DNA (Homo sapiens) CpG-island No: 13168
  unsure (153, 694, 726)
atcgcaaatcgccgcccaattaccgcaattactcgccctattcgcgactataaccgatcaaccgcaaattttccccgcccaaaacgtaaatacgttcgctatacgaacgaatctcgccgaccgcctaactctactaaatcgaaccttcgacantacgttcgaccatcacgccgataatataaatcgcgacgaccacttcgtccaacgcgccttccgccgcgccgaccttattcgacgatacgttcgacatactcgacctaactacgcataacctccaccgattaccgcgcgacctattacaaacgaccgataaactactaaatctcctcgataacgccgacgatacgctaaaccaacgaacgaacttcctcgacgaccacgacgaacgctaacccttaatcgccgacgcgaacgacctcgataacgacattaaaaacgaacaaattaatctattcgacgatcgaacgaatcaccgtcaacacgctaccgataatcgccgactcctcgactaaacgctcgatcgactaaacgttacattcacctcgtcgaccaactcgcgcaaccgcccaaactctcgccgatcacccgctaaccatactcaactacataacctacgctacgactaacgtcaacgatctaactaacgtctccgacgaaactactaatcgcgctttcatatcaacgaaacgtcgcnaatctacaaatatcgctaactacgctaacctnacgtcaaacgctactacttcgcaaca

SEQ ID NO: 13169 - DNA, 767 bp, Artificial Sequence
  chemically treated genomic DNA (Homo sapiens) CpG-island No: 13169
tcggcgtcgatagtaatgacgaggtcggttagttgtagcgggcgttgggcgagatgtaggagaatttgcggtagatggttattattattcgttaggaaagcgaagaattttacgatattttttagtttatcggttagatttcgtagtcgatcgtttacggcgttagtaataggtcgatagcgttattagtatggtcgcgagtatggaagagatgattattaatatttcgtagattttcgattacgtcgataacgttagggtgatttcggttaagttcgaggagttggttagtagtggcgggtaggtgatttttaacgtggtggaagggatgagtcgtatcgtcgacgtggttaattagttttttattagtattatcgttttcggttagtcgtcggacgagatttattcgattatttaggtgattaaggggatcgtcgagtagattaatttgttggcgttgaacgtcgttatcgaggttgcgcgggtcggagaggtcgggcgcggtttcgtcgtggtcgtcgacgaggtacgcgggttggcggcgcggattatttagtcgatttaggagattatcgcgatgatcgagcgtattcgcgttagtatcggggtaagcgattaatagtatggaggttggcgtgagaggttttaaacgagggggtgtcgttcgttcgttagtaaggggtgtcgattaacgagattttcgatggaattcgttatgtcgcgtcggtggtcgattagatttttagataatcgcgagtagttgtcgt

SEQ ID NO: 13170 - DNA, 767 bp, Artificial Sequence
  chemically treated genomic DNA (Homo sapiens) CpG-island No: 13170
acgacaactactcgcgattatctaaaaatctaatcgaccaccgacgcgacataacgaattccatcgaaaatctcgttaatcgacaccccttactaacgaacgaacgacaccccctcgtttaaaacctctcacgccaacctccatactattaatcgcttaccccgatactaacgcgaatacgctcgatcatcgcgataatctcctaaatcgactaaataatccgcgccgccaacccgcgtacctcgtcgacgaccacgacgaaaccgcgcccgacctctccgacccgcgcaacctcgataacgacgttcaacgccaacaaattaatctactcgacgatccccttaatcacctaaataatcgaataaatctcgtccgacgactaaccgaaaacgataatactaataaaaaactaattaaccacgtcgacgatacgactcatcccttccaccacgttaaaaatcacctacccgccactactaaccaactcctcgaacttaaccgaaatcaccctaacgttatcgacgtaatcgaaaatctacgaaatattaataatcatctcttccatactcgcgaccatactaataacgctatcgacctattactaacgccgtaaacgatcgactacgaaatctaaccgataaactaaaaaatatcgtaaaattcttcgctttcctaacgaataataataaccatctaccgcaaattctcctacatctcgcccaacgcccgctacaactaaccgacctcgtcattactatcgacgccga

SEQ ID NO: 13171 - DNA, 767 bp, Artificial Sequence
  chemically treated genomic DNA (Homo sapiens) CpG-island No: 13171
gcggtaattgttcgcgattgtttgggaatttaatcgattatcgacgcggtatgacgggttttatcgagaatttcgttgatcgatattttttgttggcgggcgaacgatattttttcgtttagaattttttacgttagtttttatgttgttgatcgtttgtttcgatgttggcgcggatgcgttcgattatcgcggtgattttttgggtcgattgggtggttcgcgtcgttagttcgcgtatttcgtcggcgattacggcgaaatcgcgttcggttttttcggttcgcgtagtttcgatggcggcgtttaacgttagtaggttggtttgttcggcgatttttttgattatttggatgatcgaatggatttcgttcgacgattggtcgagagcggtgatgttggtggaggattggttgattacgtcggcgatgcggtttattttttttattacgttgaggattatttgttcgttattgttggttagtttttcggatttggtcgagattattttggcgttgtcggcgtggtcggaaatttgcgagatattggtgattattttttttatgttcgcggttatgttggtggcgttgtcggtttgttgttggcgtcgtggacgatcgattgcgaggtttggtcgatggattgggaggtgtcgtggagtttttcgtttttttggcggatgatggtgattatttgtcgtaggtttttttgtatttcgtttaacgttcgttgtaattggtcggtttcgttattgttgtcgacgtcga

SEQ ID NO: 13172 - DNA, 767 bp, Artificial Sequence
  chemically treated genomic DNA (Homo sapiens) CpG-island No: 13172
tcgacgtcgacaacaataacgaaaccgaccaattacaacgaacgttaaacgaaatacaaaaaaacctacgacaaataatcaccatcatccgccaaaaaaacgaaaaactccacgacacctcccaatccatcgaccaaacctcgcaatcgatcgtccacgacgccaacaacaaaccgacaacgccaccaacataaccgcgaacataaaaaaaataatcaccaatatctcgcaaatttccgaccacgccgacaacgccaaaataatctcgaccaaatccgaaaaactaaccaacaataacgaacaaataatcctcaacgtaataaaaaaaataaaccgcatcgccgacgtaatcaaccaatcctccaccaacatcaccgctctcgaccaatcgtcgaacgaaatccattcgatcatccaaataatcaaaaaaatcgccgaacaaaccaacctactaacgttaaacgccgccatcgaaactacgcgaaccgaaaaaaccgaacgcgatttcgccgtaatcgccgacgaaatacgcgaactaacgacgcgaaccacccaatcgacccaaaaaatcaccgcgataatcgaacgcatccgcgccaacatcgaaacaaacgatcaacaacataaaaactaacgtaaaaaattctaaacgaaaaaatatcgttcgcccgccaacaaaaaatatcgatcaacgaaattctcgataaaacccgtcataccgcgtcgataatcgattaaattcccaaacaatcgcgaacaattaccgc

SEQ ID NO: 13173 - DNA, 677 bp, Artificial Sequence
  chemically treated genomic DNA (Homo sapiens) CpG-island No: 13173
taaatgggtttgggttcgggtgcgggttgtagtttttggtcgggtgagcgtcgagggtttcgtttaggtttcgcgtagggagcgtagagcgtcgacggcggtcgtcgtaatcgggagtggtttaggattcgggggcggtttttttgcgcgagtgtggaacgtagaagttgagtttgcggagtcgcgggtagtggtagttaggttttttcgttttgtgttatttgcggttcggttttttttcgcgtttttattcgcgttgcgatgacgcgtttattgtttaagggaaatttttgggtaagtcgtggggtcgatagcggatcgcggggtttaggattcggttcgggcgggaggttaacgcggcgggcgtggggggttttttagtttcggcgttattcggtgatcgcgcgttcgggggtttggcggagttcgcgcgtgaagggatcggggttttagttttattgttcgaggggtagatttggagcggacgtcgggttgttgttttttttttgtttttcgttatttatcgcgtgttcgcgagtttcgggggttcggattttagggtttattttttgtcgttcgcgtttttagtagcgcgtgtttttgaggacgtagagagtcgagatattttagagttaggatattaatttttttttttataggcgaagtagagattttta

SEQ ID NO: 13174 - DNA, 677 bp, Artificial Sequence
  chemically treated genomic DNA (Homo sapiens) CpG-island No: 13174
taaaaatctctacttcgcctataaaaaaaaaaattaatatcctaactctaaaatatctcgactctctacgtcctcaaaaacacgcgctactaaaaacgcgaacgacaaaaaataaaccctaaaatccgaacccccgaaactcgcgaacacgcgataaataacgaaaaacaaaaaaaaaacaacaacccgacgtccgctccaaatctacccctcgaacaataaaactaaaaccccgatcccttcacgcgcgaactccgccaaacccccgaacgcgcgatcaccgaataacgccgaaactaaaaaaccccccacgcccgccgcgttaacctcccgcccgaaccgaatcctaaaccccgcgatccgctatcgaccccacgacttacccaaaaatttcccttaaacaataaacgcgtcatcgcaacgcgaataaaaacgcgaaaaaaaaccgaaccgcaaataacacaaaacgaaaaaacctaactaccactacccgcgactccgcaaactcaacttctacgttccacactcgcgcaaaaaaaccgcccccgaatcctaaaccactcccgattacgacgaccgccgtcgacgctctacgctccctacgcgaaacctaaacgaaaccctcgacgctcacccgaccaaaaactacaacccgcacccgaacccaaacccattta

SEQ ID NO: 13175 - DNA, 677 bp, Artificial Sequence
  chemically treated genomic DNA (Homo sapiens) CpG-island No: 13175
taagggtttttgtttcgtttgtgagaggaggggttgatgttttgattttaaggtgtttcggttttttgcgtttttaggagtacgcgttgttgggggcgcgggcggtagagggtgggttttggagttcgagttttcgggattcgcgggtacgcggtgggtagcgggggatagagagggaatagtagttcggcgttcgttttaagtttgtttttcgagtagtggggttggggtttcgatttttttacgcgcgagtttcgttaagttttcgggcgcgcggttatcgagtggcgtcggagttggggagttttttacgttcgtcgcgttggtttttcgttcgggtcgggttttgagtttcgcgattcgttgtcggttttacgatttatttaaaagttttttttgaatagtgagcgcgttatcgtagcgcgagtgggggcgcggaggagagtcgggtcgtaggtagtatagagcggggaggtttgattgttattgttcgcggtttcgtagatttaatttttgcgttttatattcgcgtagggaagtcgttttcgggttttaaattattttcgattgcgacggtcgtcgtcggcgttttgcgttttttgcgcgagatttgggcgggattttcggcgtttattcggttaggggttgtagttcgtattcggatttaggtttattta

SEQ ID NO: 13176 - DNA, 677 bp, Artificial Sequence
  chemically treated genomic DNA (Homo sapiens) CpG-island No: 13176
taaataaacctaaatccgaatacgaactacaacccctaaccgaataaacgccgaaaatcccgcccaaatctcgcgcaaaaaacgcaaaacgccgacgacgaccgtcgcaatcgaaaataatttaaaacccgaaaacgacttccctacgcgaatataaaacgcaaaaattaaatctacgaaaccgcgaacaataacaatcaaacctccccgctctatactacctacgacccgactctcctccgcgcccccactcgcgctacgataacgcgctcactattcaaaaaaaacttttaaataaatcgtaaaaccgacaacgaatcgcgaaactcaaaacccgacccgaacgaaaaaccaacgcgacgaacgtaaaaaactccccaactccgacgccactcgataaccgcgcgcccgaaaacttaacgaaactcgcgcgtaaaaaaatcgaaaccccaaccccactactcgaaaaacaaacttaaaacgaacgccgaactactattccctctctatcccccgctacccaccgcgtacccgcgaatcccgaaaactcgaactccaaaacccaccctctaccgcccgcgcccccaacaacgcgtactcctaaaaacgcaaaaaaccgaaacaccttaaaatcaaaacatcaacccctcctctcacaaacgaaacaaaaaccctta

SEQ ID NO: 13177 - DNA, 832 bp, Artificial Sequence
  chemically treated genomic DNA (Homo sapiens) CpG-island No: 13177
ttacgcgttttagttattgcggggtacgttagtatgagaagtaggtgagtttttcgcgtgttcgttttattaatttcgatttttagcgttggtttgttgtatcgggatagggtatggtcgtttcgatttttagcgttggttcgttgtatcgggatagggtatggtcgtttcgatttttagcgttggttcgttgtatcgggatagggtatggtcgtttcgatttttagcgttggttcgttgtatcgggatagggtatggtcgtttcgatttttagcgttggttcgttgtatcgggatagggtatggtcgtttcgatttttagcgttggttcgttgtatcgggatagggtatggtcgtttcgatttttagcgttggttcgttgtatcgggatagggtatggtcgtttcgatttttagcgttggttcgttgtatcgggatagggtatggtcgtttcgatttttagcgttggttcgttgtatcgggatagggtatggtcgtttcgatttttagcgttggttcgttgtatcgggatagggtatggtcgtttcgatttttagcgttggtttgttgtatcgggatagggtatggtcgtttcgatttttagcgttggtttgttgtatcgggatagggtatggtcgtttcgatttttagcgttggtttgttgtatcgggatagggtatggtcgtttcgatttttagcgttggtttgttgtatcgggatagggtatggtcgtttcgatttttagcgttggtttgttgtatcgggatagggtatggtcgtttcgtttattttttgtgattttgttgatatcgttgcgttttgtattattttta

SEQ ID NO: 13178 - DNA, 832 bp, Artificial Sequence
  chemically treated genomic DNA (Homo sapiens) CpG-island No: 13178
taaaaataatacaaaacgcaacgatatcaacaaaatcacaaaaaataaacgaaacgaccataccctatcccgatacaacaaaccaacgctaaaaatcgaaacgaccataccctatcccgatacaacaaaccaacgctaaaaatcgaaacgaccataccctatcccgatacaacaaaccaacgctaaaaatcgaaacgaccataccctatcccgatacaacaaaccaacgctaaaaatcgaaacgaccataccctatcccgatacaacaaaccaacgctaaaaatcgaaacgaccataccctatcccgatacaacgaaccaacgctaaaaatcgaaacgaccataccctatcccgatacaacgaaccaacgctaaaaatcgaaacgaccataccctatcccgatacaacgaaccaacgctaaaaatcgaaacgaccataccctatcccgatacaacgaaccaacgctaaaaatcgaaacgaccataccctatcccgatacaacgaaccaacgctaaaaatcgaaacgaccataccctatcccgatacaacgaaccaacgctaaaaatcgaaacgaccataccctatcccgatacaacgaaccaacgctaaaaatcgaaacgaccataccctatcccgatacaacgaaccaacgctaaaaatcgaaacgaccataccctatcccgatacaacgaaccaacgctaaaaatcgaaacgaccataccctatcccgatacaacaaaccaacgctaaaaatcgaaattaataaaacgaacacgcgaaaaactcacctacttctcatactaacgtaccccgcaataactaaaacgcgtaa

SEQ ID NO: 13179 - DNA, 832 bp, Artificial Sequence
  chemically treated genomic DNA (Homo sapiens) CpG-island No: 13179
tggaggtggtgtagggcgtagcggtgttagtagagttataagaggtgggcgagacggttatgttttgtttcggtatagtaggttagcgttaaggatcgagacggttatgttttgtttcggtatagtaggttagcgttaaggatcgagacggttatgttttgtttcggtatagtaggttagcgttaaggatcgagacggttatgttttgtttcggtatagtaggttagcgttaaggatcgagacggttatgttttgtttcggtatagtaggttagcgttaaggatcgagacggttatgttttgtttcggtatagcgggttagcgttaaggatcgagacggttatgttttgtttcggtatagcgggttagcgttaaggatcgagacggttatgttttgtttcggtatagcgggttagcgttaaggatcgagacggttatgttttgtttcggtatagcgggttagcgttaaggatcgagacggttatgttttgtttcggtatagcgggttagcgttaaggatcgagacggttatgttttgtttcggtatagcgggttagcgttaaggatcgagacggttatgttttgtttcggtatagcgggttagcgttaaggatcgagacggttatgttttgtttcggtatagcgggttagcgttaaggatcgagacggttatgttttgtttcggtatagcgggttagcgttaaggatcgagacggttatgttttgtttcggtatagtaggttagcgttaaggatcgaggttaatgagacgggtacgcgaggggtttatttgttttttatgttaacgtgtttcgtagtggttggaacgcgtga

SEQ ID NO: 13180 - DNA, 832 bp, Artificial Sequence
  chemically treated genomic DNA (Homo sapiens) CpG-island No: 13180
tcacgcgttccaaccactacgaaacacgttaacataaaaaacaaataaacccctcgcgtacccgtctcattaacctcgatccttaacgctaacctactataccgaaacaaaacataaccgtctcgatccttaacgctaacccgctataccgaaacaaaacataaccgtctcgatccttaacgctaacccgctataccgaaacaaaacataaccgtctcgatccttaacgctaacccgctataccgaaacaaaacataaccgtctcgatccttaacgctaacccgctataccgaaacaaaacataaccgtctcgatccttaacgctaacccgctataccgaaacaaaacataaccgtctcgatccttaacgctaacccgctataccgaaacaaaacataaccgtctcgatccttaacgctaacccgctataccgaaacaaaacataaccgtctcgatccttaacgctaacccgctataccgaaacaaaacataaccgtctcgatccttaacgctaacccgctataccgaaacaaaacataaccgtctcgatccttaacgctaacctactataccgaaacaaaacataaccgtctcgatccttaacgctaacctactataccgaaacaaaacataaccgtctcgatccttaacgctaacctactataccgaaacaaaacataaccgtctcgatccttaacgctaacctactataccgaaacaaaacataaccgtctcgatccttaacgctaacctactataccgaaacaaaacataaccgtctcgcccacctcttataactctactaacaccgctacgccctacaccacctcca

SEQ ID NO: 13181 - DNA, 609 bp, Artificial Sequence
  chemically treated genomic DNA (Homo sapiens) CpG-island No: 13181
atttcgtcgcgtagtgggatagagagttgtagttcggcgtaggttcgatttcgtagggaatcgcgattcggggataggtagttttggattgtattgatttgggattttgtcggttttatagatatatatacgcgcgcgtatatatatatatatgtatatacgtacgtatatatatacgtacgtatagtcgttaggtttagagtttatttttttaggggttggtggggatttcgttttcgcggcgggcggcggtattggaatgttaattgaaacggagttggcgagcgcggcgtagataagcgtcgtttagtagcgttttcgtttgcggtttttcgaattagcgattcgggaaggtttcgtcgtttttttggtcgttgagggtttttttttttacgttgaaggagtggaacgcgcgcggaggtagttcggcgttcgtaaattttcggagttagttttcgacggtttgttttagaattaaacggttttcgttatttaaagtcgagaagttaagaggtcggttgggggagggtgatacggagaaatggagaagtttatttagcggttatatatcggtagatttttattttttttaattggttggttttttta

SEQ ID NO: 13182 - DNA, 609 bp, Artificial Sequence
  chemically treated genomic DNA (Homo sapiens) CpG-island No: 13182
taaaaaaaccaaccaattaaaaaaaataaaaatctaccgatatataaccgctaaataaacttctccatttctccgtatcaccctcccccaaccgacctcttaacttctcgactttaaataacgaaaaccgtttaattctaaaacaaaccgtcgaaaactaactccgaaaatttacgaacgccgaactacctccgcgcgcgttccactccttcaacgtaaaaaaaaaaaccctcaacgaccaaaaaaacgacgaaaccttcccgaatcgctaattcgaaaaaccgcaaacgaaaacgctactaaacgacgcttatctacgccgcgctcgccaactccgtttcaattaacattccaataccgccgcccgccgcgaaaacgaaatccccaccaacccctaaaaaaataaactctaaacctaacgactatacgtacgtatatatatacgtacgtatatacatatatatatatatacgcgcgcgtatatatatctataaaaccgacaaaatcccaaatcaatacaatccaaaactacctatccccgaatcgcgattccctacgaaatcgaacctacgccgaactacaactctctatcccactacgcgacgaaat

SEQ ID NO: 13183 - DNA, 609 bp, Artificial Sequence
  chemically treated genomic DNA (Homo sapiens) CpG-island No: 13183
tagaagaattaattagttaaaggaaataaaaatttgtcggtatgtaatcgttgggtgggtttttttattttttcgtgttatttttttttagtcggttttttagtttttcggttttgggtggcggagatcgtttagttttgggatagatcgtcgggggttgatttcgggggtttgcgggcgtcgagttgttttcgcgcgcgttttatttttttagcgtggaaaagaaaatttttagcggttagagaggcggcggggttttttcggatcgttgattcggggagtcgtaggcggggacgttgttgggcgacgtttatttgcgtcgcgttcgttagtttcgttttaattaatattttagtgtcgtcgttcgtcgcgggagcggagtttttattagtttttggaaaaataaattttaggtttagcggttgtgcgtgcgtgtgtgtgtgcgtgcgtgtgtgtatgtgtgtgtgtgtgcgcgcgcgtgtgtgtgtttgtagagtcgatagagttttagattagtgtagtttagagttgtttattttcgggtcgcggttttttgcggggtcgagtttgcgtcgggttgtagttttttgttttattgcgcggcgggat

SEQ ID NO: 13184 - DNA, 609 bp, Artificial Sequence
  chemically treated genomic DNA (Homo sapiens) CpG-island No: 13184
atcccgccgcgcaataaaacaaaaaactacaacccgacgcaaactcgaccccgcaaaaaaccgcgacccgaaaataaacaactctaaactacactaatctaaaactctatcgactctacaaacacacacacgcgcgcgcacacacacacacatacacacacgcacgcacacacacacgcacgcacaaccgctaaacctaaaatttatttttccaaaaactaataaaaactccgctcccgcgacgaacgacgacactaaaatattaattaaaacgaaactaacgaacgcgacgcaaataaacgtcgcccaacaacgtccccgcctacgactccccgaatcaacgatccgaaaaaaccccgccgcctctctaaccgctaaaaattttcttttccacgctaaaaaaataaaacgcgcgcgaaaacaactcgacgcccgcaaacccccgaaatcaacccccgacgatctatcccaaaactaaacgatctccgccacccaaaaccgaaaaactaaaaaaccgactaaaaaaaaataacacgaaaaaataaaaaaacccacccaacgattacataccgacaaatttttatttcctttaactaattaattcttcta

SEQ ID NO: 13185 - DNA, 816 bp, Artificial Sequence
  chemically treated genomic DNA (Homo sapiens) CpG-island No: 13185
ggcgtcgatcgcgggtggcgcggggcgggattcgtttttgggacggtggagggcggtggcgttgtagtcgcgtcggtttttgagttttagggagcggagggtacggagtcgggcgagttttgcggtgttagaattttgcgtcgttttgacgttggggtttagggtttatttcgggggcgcgcgcgtggttgcggaggcgggaaggtttttttgtttgtcgtcgcggagtttcgcgtttttgtatttcgagttttgggggttcgttttgggttgtttttttttttcggtttcgtcgtttatttggttcggtttttgttagcgtttcggtttttttcggcgcggcgcggggttcggtgtttagttggtcgttttgcgtttcggcgcggttgcgttttttttttggttttggttttggtttcggtttcgggtcgcgttgtttttggttgttcgtgcggtcgttttgtcgttgcgcgtcgtttcgtaggatgttttggatgaggaaggacgtgagcggtttggacggggtcggcggcgcggtttttttcgttttcgttttttcgggtcgcggtttcggaattttgagtatttcggcggtttcgttttggtttgaatgtattcgttcggttcgtatcgtttttatttttcgtttttcggttcgtttatagtttaggggagcgggtcgcgtcgtttttttattggtcgcgggacgggtcgcgtcgcggattggtcgttttgagttttaggtgatttcgtcgatttgcgagttttgagtattgtttcgtttcgtttttttttaggggattttttttttagttt

SEQ ID NO: 13186 - DNA, 816 bp, Artificial Sequence
  chemically treated genomic DNA (Homo sapiens) CpG-island No: 13186
aaactaaaaaaaaaatcccctaaaaaaaaacgaaacgaaacaatactcaaaactcgcaaatcgacgaaatcacctaaaactcaaaacgaccaatccgcgacgcgacccgtcccgcgaccaataaaaaaacgacgcgacccgctcccctaaactataaacgaaccgaaaaacgaaaaataaaaacgatacgaaccgaacgaatacattcaaaccaaaacgaaaccgccgaaatactcaaaattccgaaaccgcgacccgaaaaaacgaaaacgaaaaaaaccgcgccgccgaccccgtccaaaccgctcacgtccttcctcatccaaaacatcctacgaaacgacgcgcaacgacaaaacgaccgcacgaacaaccaaaaacaacgcgacccgaaaccgaaaccaaaaccaaaaccaaaaaaaaaacgcaaccgcgccgaaacgcaaaacgaccaactaaacaccgaaccccgcgccgcgccgaaaaaaaccgaaacgctaacaaaaaccgaaccaaataaacgacgaaaccgaaaaaaaaaaacaacccaaaacgaacccccaaaactcgaaatacaaaaacgcgaaactccgcgacgacaaacaaaaaaaccttcccgcctccgcaaccacgcgcgcgcccccgaaataaaccctaaaccccaacgtcaaaacgacgcaaaattctaacaccgcaaaactcgcccgactccgtaccctccgctccctaaaactcaaaaaccgacgcgactacaacgccaccgccctccaccgtcccaaaaacgaatcccgccccgcgccacccgcgatcgacgcc

SEQ ID NO: 13187 - DNA, 816 bp, Artificial Sequence
  chemically treated genomic DNA (Homo sapiens) CpG-island No: 13187
gaattggggaaggaattttttagggaggagcggagcggggtagtgtttagggttcgtagatcggcggggttatttggggtttagggcggttaattcgcggcgcggttcgtttcgcggttaatgggagggcggcgcggttcgtttttttgggttataagcgagtcgggaggcggaaagtgaaagcggtgcgggtcgggcgggtgtatttaggttaaggcggggtcgtcgggatgtttagggtttcggagtcgcggttcggggaggcgaaagcggagggggtcgcgtcgtcgatttcgtttaagtcgtttacgtttttttttatttaggatattttgcgggacggcgcgtagcggtaaggcggtcgtacgagtagttagagatagcgcgattcggagtcggagttagagttagagttagagggaggacgtagtcgcgtcggggcgtagaacgattagttgagtatcgggtttcgcgtcgcgtcggaggaggtcgagacgttggtagagatcgagttaggtaagcggcgaggtcggggaaggggggtagtttaaggcggatttttagagttcggggtgtagggacgcggggtttcgcggcgataggtagagggattttttcgttttcgtagttacgcgcgcgttttcggaatgaattttgagttttagcgttagggcggcgtaggattttgatatcgtaggattcgttcggtttcgtgtttttcgttttttggggtttagaagtcggcgcgattgtagcgttatcgttttttatcgttttaggagcggatttcgtttcgcgttattcgcgatcggcgtt

SEQ ID NO: 13188 - DNA, 816 bp, Artificial Sequence
  chemically treated genomic DNA (Homo sapiens) CpG-island No: 13188
aacgccgatcgcgaataacgcgaaacgaaatccgctcctaaaacgataaaaaacgataacgctacaatcgcgccgacttctaaaccccaaaaaacgaaaaacacgaaaccgaacgaatcctacgatatcaaaatcctacgccgccctaacgctaaaactcaaaattcattccgaaaacgcgcgcgtaactacgaaaacgaaaaaatccctctacctatcgccgcgaaaccccgcgtccctacaccccgaactctaaaaatccgccttaaactaccccccttccccgacctcgccgcttacctaactcgatctctaccaacgtctcgacctcctccgacgcgacgcgaaacccgatactcaactaatcgttctacgccccgacgcgactacgtcctccctctaactctaactctaactccgactccgaatcgcgctatctctaactactcgtacgaccgccttaccgctacgcgccgtcccgcaaaatatcctaaataaaaaaaaacgtaaacgacttaaacgaaatcgacgacgcgaccccctccgctttcgcctccccgaaccgcgactccgaaaccctaaacatcccgacgaccccgccttaacctaaatacacccgcccgacccgcaccgctttcactttccgcctcccgactcgcttataacccaaaaaaacgaaccgcgccgccctcccattaaccgcgaaacgaaccgcgccgcgaattaaccgccctaaaccccaaataaccccgccgatctacgaaccctaaacactaccccgctccgctcctccctaaaaaattccttccccaattc

SEQ ID NO: 13189 - DNA, 678 bp, Artificial Sequence
  chemically treated genomic DNA (Homo sapiens) CpG-island No: 13189
tagcggagcggggcgtcgggtcgtacgtcggggttgtttacgatcgtttatacgtcgtcgtgtacgaattcgttttgtagggagcggtcgtagtataggtagtttgtttcggttagtagcgtcgcggtttcggtcggcgcgagttcgtagtttagtcgtcgggagggtgtgcggttttcgtcgtcgtttcgggtagaggtggttattattatcgcgtcgtcgtcgtcgttgttgttttggtttttttcgggcgtttggtatttttttttatcggggtttcggcggcgcgcggcgtttgttcggaggggggttcgggtatggtgttgtagtagttggattcgtcgcgagtttttcgcgtttcgtcgtcgtttgcgtcgcggagttggtttagttgtaaataaatagtagttttttcgtttttttcggttatcgttattttttgcgttttaattgcgtatgttcgttcgtttttttttttatcgttttttaatttcgggacgcgggtcggttttttcgtatagttcggcgttttttgttttcggttcgttttgtttgtaggtggatcggggttcgcggcgcgcggttgttcgggagttgcggggaaggatattttaggtttttatttgcggtgttcggttgtgtttatttttacgttttcgtttttatttttttttttcg

SEQ ID NO: 13190 - DNA, 678 bp, Artificial Sequence
  chemically treated genomic DNA (Homo sapiens) CpG-island No: 13190
cgaaaaaaaaaaataaaaacgaaaacgtaaaaataaacacaaccgaacaccgcaaataaaaacctaaaatatccttccccgcaactcccgaacaaccgcgcgccgcgaaccccgatccacctacaaacaaaacgaaccgaaaacaaaaaacgccgaactatacgaaaaaaccgacccgcgtcccgaaattaaaaaacgataaaaaaaaaaacgaacgaacatacgcaattaaaacgcaaaaaataacgataaccgaaaaaaacgaaaaaactactatttatttacaactaaaccaactccgcgacgcaaacgacgacgaaacgcgaaaaactcgcgacgaatccaactactacaacaccatacccgaacccccctccgaacaaacgccgcgcgccgccgaaaccccgataaaaaaaaataccaaacgcccgaaaaaaaccaaaacaacaacgacgacgacgacgcgataataataaccacctctacccgaaacgacgacgaaaaccgcacaccctcccgacgactaaactacgaactcgcgccgaccgaaaccgcgacgctactaaccgaaacaaactacctatactacgaccgctccctacaaaacgaattcgtacacgacgacgtataaacgatcgtaaacaaccccgacgtacgacccgacgccccgctccgcta

SEQ ID NO: 13191 - DNA, 678 bp, Artificial Sequence
  chemically treated genomic DNA (Homo sapiens) CpG-island No: 13191
cgggggagaaggatgggggcgggggcgtgggggtgagtatagtcggatatcgtaagtgggaatttggggtgttttttttcgtagttttcgggtagtcgcgcgtcgcgaatttcggtttatttgtaagtaaggcgggtcgggggtagagggcgtcgggttgtgcgggggaatcggttcgcgtttcgggattggggggcggtggaagagagagcgagcgggtatgcgtagttggggcgtaggaggtggcgatggtcgggggaggcggggggattgttgtttatttgtagttgggttaatttcgcggcgtaggcggcggcggagcgcggggagttcgcggcgggtttagttgttgtagtattatgttcgagttttttttcgggtagacgtcgcgcgtcgtcggggtttcggtaggggaggatgttagacgttcgggagaggttagggtagtagcggcggcggcggcgcgatggtggtgattatttttgttcgaggcggcggcggggatcgtatattttttcggcggttgggttgcgggttcgcgtcggtcggggtcgcggcgttgttggtcggggtaagttgtttgtgttacggtcgttttttgtagggcgagttcgtgtacgacgacgtgtgggcgatcgtgaataatttcgacgtgcggttcggcgtttcgtttcgttg

SEQ ID NO: 13192 - DNA, 678 bp, Artificial Sequence
  chemically treated genomic DNA (Homo sapiens) CpG-island No: 13192
caacgaaacgaaacgccgaaccgcacgtcgaaattattcacgatcgcccacacgtcgtcgtacacgaactcgccctacaaaaaacgaccgtaacacaaacaacttaccccgaccaacaacgccgcgaccccgaccgacgcgaacccgcaacccaaccgccgaaaaaatatacgatccccgccgccgcctcgaacaaaaataatcaccaccatcgcgccgccgccgccgctactaccctaacctctcccgaacgtctaacatcctcccctaccgaaaccccgacgacgcgcgacgtctacccgaaaaaaaactcgaacataatactacaacaactaaacccgccgcgaactccccgcgctccgccgccgcctacgccgcgaaattaacccaactacaaataaacaacaatccccccgcctcccccgaccatcgccacctcctacgccccaactacgcatacccgctcgctctctcttccaccgccccccaatcccgaaacgcgaaccgattcccccgcacaacccgacgccctctacccccgacccgccttacttacaaataaaccgaaattcgcgacgcgcgactacccgaaaactacgaaaaaaaacaccccaaattcccacttacgatatccgactatactcacccccacgcccccgcccccatccttctcccccg

SEQ ID NO: 13193 - DNA, 1083 bp, Artificial Sequence
  chemically treated genomic DNA (Homo sapiens) CpG-island No: 13193
  unsure (887)
agaattacggcgcggtagtagcggtagcggtagttttaatattgcggtagcggtaatttgcgtttggttattggcgtttttttagttttcgtagcggtgtagtgtattattattaagacgagtgattgttatatcgttatcggtaaagatcgcgggatcgtaggtgcggtaagttttattaatgataatgttattggtagtattaaggttggtttcgcgagttagttgttcgttggcgttgatagatttagaggatttcgttgacgcgtattttacgtatcgtaacggtattaaagtcgtcgtcgttgcgggcgtgatttgcgtaatttagtttggcggttttattcgtaatgacgaattgattgtagtcgtcgacgagtacggtattgcgatgttttttatcgatatgcgttattttcgttattaatggagtaatagatgaaagtattagtgattggtaacggcgggcgcgagtacgcgttggtttggaaagcggtttagtcgtcgttggttgagattgtttttgttgtttcgggtaatgtaggtattgtattggaattcgcgttgtaaaacgttgttattggcgtgatcgatatttcggcgttgttggatttcgtataaaacgaaaagattgatttgattatcgtcggttcggaagcgtcgttggtgaaaggcgtggtcgatatttttcgcgtcgtcgggttgaaaattttcggtttaatcgtagtgcggtttaattggaaggtttaaaagcgtttattaaagattttttggttcgttataagatttttacggcggaatattagaattttatcgaggtagaatttgcgttggcgtatttgcgtgagaaacgcgcgttaatcgttattagagttgatagtttggtntgtagggaacgcgttatcgtggcgatgacgtttgaagaagcgaaacgtttgtttacgatatgttggcgggtaatttttttcgcgacgcgcgttatcgtatcggtatcgaagagtttttcgatggttaagatacgtagttttatcgtgatggtggatcggtagtatgtattggcgaatgttattagttaggattata

SEQ ID NO: 13194 - DNA, 1083 bp, Artificial Sequence
  chemically treated genomic DNA (Homo sapiens) CpG-island No: 13194
  unsure (197)
tataatcctaactaataacattcgccaatacatactaccgatccaccatcacgataaaactacgtatcttaaccatcgaaaaactcttcgataccgatacgataacgcgcgtcgcgaaaaaaattacccgccaacatatcgtaaacaaacgtttcgcttcttcaaacgtcatcgccacgataacgcgttccctacanaccaaactatcaactctaataacgattaacgcgcgtttctcacgcaaatacgccaacgcaaattctacctcgataaaattctaatattccgccgtaaaaatcttataacgaaccaaaaaatctttaataaacgcttttaaaccttccaattaaaccgcactacgattaaaccgaaaattttcaacccgacgacgcgaaaaatatcgaccacgcctttcaccaacgacgcttccgaaccgacgataatcaaatcaatcttttcgttttatacgaaatccaacaacgccgaaatatcgatcacgccaataacaacgttttacaacgcgaattccaatacaatacctacattacccgaaacaacaaaaacaatctcaaccaacgacgactaaaccgctttccaaaccaacgcgtactcgcgcccgccgttaccaatcactaatactttcatctattactccattaataacgaaaataacgcatatcgataaaaaacatcgcaataccgtactcgtcgacgactacaatcaattcgtcattacgaataaaaccgccaaactaaattacgcaaatcacgcccgcaacgacgacgactttaataccgttacgatacgtaaaatacgcgtcaacgaaatcctctaaatctatcaacgccaacgaacaactaactcgcgaaaccaaccttaatactaccaataacattatcattaataaaacttaccgcacctacgatcccgcgatctttaccgataacgatataacaatcactcgtcttaataataatacactacaccgctacgaaaactaaaaaaacgccaataaccaaacgcaaattaccgctaccgcaatattaaaactaccgctaccgctactaccgcgccgtaattct

SEQ ID NO: 13195 - DNA, 1083 bp, Artificial Sequence
  chemically treated genomic DNA (Homo sapiens) CpG-island No: 13195
  unsure (197)
tgtaattttggttggtagtattcgttagtatatgttgtcggtttattattacgataaagttgcgtattttagttatcgagaaatttttcgatatcgatgcgatgacgcgcgtcgcgaaaaaggttgttcgttagtatatcgtgaatagacgtttcgtttttttaagcgttatcgttacgataacgcgttttttgtangttagattgttagttttaatgacgattagcgcgcgttttttacgtagatacgttagcgtaggttttatttcggtgaagttttggtatttcgtcgtagggattttatggcgggttaggaaatttttggtaaacgtttttgagttttttagttgggtcgtattgcggttgggtcgaagatttttagttcggcggcgcggaaggtatcgattacgttttttattagcggcgttttcgggtcgacgatggttagattaattttttcgttttgtgcgaaatttaatagcgtcgggatatcggttacgttaatagtaacgttttgtagcgcgggttttagtgtagtgtttgtattattcggagtaataaaaatagttttaattagcggcgattgggtcgttttttaggttagcgcgtgttcgcgttcgtcgttattaattattaatatttttatttattgttttattaatggcggaagtggcgtatgtcggtgaagagtatcgtaatatcgtgttcgtcggcggttgtaattagttcgttattacggatagaatcgttaggttggattacgtaggttacgttcgtagcggcggcggttttaatatcgttgcggtacgtgaagtacgcgttagcgggattttttgagtttattagcgttaacgagtaattggttcgcgaggttaattttgatattgttaatggtattgttattgatgaggtttgtcgtatttgcgatttcgcgatttttgtcggtggcgatgtggtaattattcgttttgataatggtgtattatatcgttgcgaaagttgggaaaacgttaataattaggcgtaaattgtcgttgtcgtaatgttagggttatcgttatcgttattgtcgcgtcgtggtttt

SEQ ID NO: 13196 - DNA, 1083 bp, Artificial Sequence
  chemically treated genomic DNA (Homo sapiens) CpG-island No: 13196
  unsure (887)
aaaaccacgacgcgacaataacgataacgataaccctaacattacgacaacgacaatttacgcctaattattaacgttttcccaactttcgcaacgatataatacaccattatcaaaacgaataattaccacatcgccaccgacaaaaatcgcgaaatcgcaaatacgacaaacctcatcaataacaataccattaacaatatcaaaattaacctcgcgaaccaattactcgttaacgctaataaactcaaaaaatcccgctaacgcgtacttcacgtaccgcaacgatattaaaaccgccgccgctacgaacgtaacctacgtaatccaacctaacgattctatccgtaataacgaactaattacaaccgccgacgaacacgatattacgatactcttcaccgacatacgccacttccgccattaataaaacaataaataaaaatattaataattaataacgacgaacgcgaacacgcgctaacctaaaaaacgacccaatcgccgctaattaaaactatttttattactccgaataatacaaacactacactaaaacccgcgctacaaaacgttactattaacgtaaccgatatcccgacgctattaaatttcgcacaaaacgaaaaaattaatctaaccatcgtcgacccgaaaacgccgctaataaaaaacgtaatcgataccttccgcgccgccgaactaaaaatcttcgacccaaccgcaatacgacccaactaaaaaactcaaaaacgtttaccaaaaatttcctaacccgccataaaatccctacgacgaaataccaaaacttcaccgaaataaaacctacgctaacgtatctacgtaaaaaacgcgcgctaatcgtcattaaaactaacaatctaacntacaaaaaacgcgttatcgtaacgataacgcttaaaaaaacgaaacgtctattcacgatatactaacgaacaacctttttcgcgacgcgcgtcatcgcatcgatatcgaaaaatttctcgataactaaaatacgcaactttatcgtaataataaaccgacaacatatactaacgaatactaccaaccaaaattaca

SEQ ID NO: 13197 - DNA, 1364 bp, Artificial Sequence
  chemically treated genomic DNA (Homo sapiens) CpG-island No: 13197
atttcgcgggaatacgaaatttttattcgcgaagacgcgacgttttcgtcgtattttcgcgtaggtgaagattcggttttttagtttcgcgtgtgcggtagtatgatatttagagtgcgtcggcgtttagcgcgagcgtattttacgataatttcgtttttcgttggggttcgtagttcgcggatttcggggttttttcgtttaaatgcggcggcgcgatcgtttcgtttcgcggttagggcgtttcgcgtttgtttcggttattttagtttattcgcgtagcgcggacgttaacgtattttattttcgttgggcgttaggggcgcggggtttagtggggtcgcggttttcgtattcggttgggattcgagggcggggtggtcgcggttgacgtgggttttgcggtttcgggttagagagtagtttgggggacggtgggttttttttcggtttgggagggaacgggggcgttcgcgcgggaggacggtaggcgagggacggcggtcgcgggcgatttagattcggggcgggcgggtatacgtcggagcgcggcggttatacgttcgttcggggagcgttattgtgcgttttagtcggcgttttttttcgtttgttcgcgtcggttggagaaaggaaggacggcgattttcgcgttcggttcgcgttattagttcgtttcggcgtcgagcgcgggttatatttagcgtttcgggaggcggcggaggttgggcggttcgggttgcggaatgttcggtttagtcgagttttcgtttcggtcgcgtaggttttttcgcgttcgttcgcgttttgtatttttagtcggttcggcgtggagggggttttgggtttatttttgtgtcgagcgtcggttttttcgtttcgggtcggagtcggggttcgggggcgcggtcgttaggggaggcgtcgcggcggtggcggtttttgcggttcggagggcgggtcgagcgggagtcgttgtttgggtcgcgcgtcgttcggagttcgtttcgcgttgtcggcgtttgtagcggagggcgtagttagttcggttttcggattggatttttttattgatataatttcggttcggtcgttttacgtagggatattttcgtttttcgtaggttgttttcgttcgtcgattcgttcgtttttttttcggtgttatttattaggagtatatattttagtcggcgtttttcgttttcgttcgtaaatatagcgttgtttacgtttttttcgggttttgtattcgtttatacgtacgttttgatatagatttcgtttttttatacgttttttttagttttttttttattttattttttagaagaattttagtatagttttcgtattttgtttgt

SEQ ID NO: 13198 - DNA, 1364 bp, Artificial Sequence
  chemically treated genomic DNA (Homo sapiens) CpG-island No: 13198
acaaacaaaatacgaaaactatactaaaattcttctaaaaaataaaataaaaaaaaaactaaaaaaaacgtataaaaaaacgaaatctatatcaaaacgtacgtataaacgaatacaaaacccgaaaaaaacgtaaacaacgctatatttacgaacgaaaacgaaaaacgccgactaaaatatatactcctaataaataacaccgaaaaaaaaacgaacgaatcgacgaacgaaaacaacctacgaaaaacgaaaatatccctacgtaaaacgaccgaaccgaaattatatcaataaaaaaatccaatccgaaaaccgaactaactacgccctccgctacaaacgccgacaacgcgaaacgaactccgaacgacgcgcgacccaaacaacgactcccgctcgacccgccctccgaaccgcaaaaaccgccaccgccgcgacgcctcccctaacgaccgcgcccccgaaccccgactccgacccgaaacgaaaaaaccgacgctcgacacaaaaataaacccaaaaccccctccacgccgaaccgactaaaaatacaaaacgcgaacgaacgcgaaaaaacctacgcgaccgaaacgaaaactcgactaaaccgaacattccgcaacccgaaccgcccaacctccgccgcctcccgaaacgctaaatataacccgcgctcgacgccgaaacgaactaataacgcgaaccgaacgcgaaaatcgccgtccttcctttctccaaccgacgcgaacaaacgaaaaaaaacgccgactaaaacgcacaataacgctccccgaacgaacgtataaccgccgcgctccgacgtatacccgcccgccccgaatctaaatcgcccgcgaccgccgtccctcgcctaccgtcctcccgcgcgaacgcccccgttccctcccaaaccgaaaaaaaacccaccgtcccccaaactactctctaacccgaaaccgcaaaacccacgtcaaccgcgaccaccccgccctcgaatcccaaccgaatacgaaaaccgcgaccccactaaaccccgcgcccctaacgcccaacgaaaataaaatacgttaacgtccgcgctacgcgaataaactaaaataaccgaaacaaacgcgaaacgccctaaccgcgaaacgaaacgatcgcgccgccgcatttaaacgaaaaaaccccgaaatccgcgaactacgaaccccaacgaaaaacgaaattatcgtaaaatacgctcgcgctaaacgccgacgcactctaaatatcatactaccgcacacgcgaaactaaaaaaccgaatcttcacctacgcgaaaatacgacgaaaacgtcgcgtcttcgcgaataaaaatttcgtattcccgcgaaat

SEQ ID NO: 13199 - DNA, 1364 bp, Artificial Sequence
  chemically treated genomic DNA (Homo sapiens) CpG-island No: 13199
gtaagtaaagtgcggaagttgtattgggatttttttagaaagtggggtgggaaaggagttagggagggcgtgtggagggacgagatttgtgttagaacgtgcgtgtgagcggatataaaattcgagagaggcgtgagtagcgttgtgtttgcgagcgggagcgaggggcgtcggttggggtgtgtgtttttggtgagtgatatcgaggggaaggcgggcgggtcggcgggcgggggtagtttgcgaggggcgggagtgtttttgcgtggggcggtcgagtcggagttgtgttagtgaaggaatttagttcgggggtcgagttggttgcgtttttcgttgtaagcgtcggtagcgcggggcgagtttcggacggcgcgcggtttaggtagcggttttcgttcggttcgtttttcgagtcgtaggggtcgttatcgtcgcggcgttttttttggcgatcgcgttttcgggtttcggtttcggttcgggacggaggagtcggcgttcgatatagaggtaagtttaggattttttttacgtcgggtcggttggggatgtagggcgcgggcggacgcggaggggtttgcgcggtcgggacggagattcggttgggtcgagtatttcgtagttcgggtcgtttagttttcgtcgtttttcggagcgttgggtgtggttcgcgttcggcgtcgaggcgggttggtggcgcggatcggacgcgaaggtcgtcgttttttttttttttagtcggcgcgggtaagcgggaggaggcgtcggttgggacgtatagtggcgtttttcgggcgagcgtgtggtcgtcgcgtttcgacgtgtattcgttcgtttcggatttgaatcgttcgcggtcgtcgtttttcgtttgtcgttttttcgcgcgggcgttttcgtttttttttaagtcggaaagagatttatcgttttttaggttgttttttggttcggagtcgtaaagtttacgttagtcgcgattatttcgttttcggattttagtcgggtgcgggggtcgcggttttattgaatttcgcgtttttggcgtttagcgggagtgggatgcgttggcgttcgcgttgcgcgggtgggttggggtggtcggagtagacgcggagcgttttggtcgcgggacgaagcggtcgcgtcgtcgtatttgggcggggggatttcggagttcgcgggttgcggattttagcgggagacggggttgtcgtaggatgcgttcgcgttggacgtcggcgtattttgaatattatgttgtcgtatacgcggggttgaagggtcgagtttttatttgcgcggggatgcggcggaagcgtcgcgttttcgcgagtggaggtttcgtgttttcgcggggt

SEQ ID NO: 13200 - DNA, 1364 bp, Artificial Sequence
  chemically treated genomic DNA (Homo sapiens) CpG-island No: 13200
accccgcgaaaacacgaaacctccactcgcgaaaacgcgacgcttccgccgcatccccgcgcaaataaaaactcgacccttcaaccccgcgtatacgacaacataatattcaaaatacgccgacgtccaacgcgaacgcatcctacgacaaccccgtctcccgctaaaatccgcaacccgcgaactccgaaatccccccgcccaaatacgacgacgcgaccgcttcgtcccgcgaccaaaacgctccgcgtctactccgaccaccccaacccacccgcgcaacgcgaacgccaacgcatcccactcccgctaaacgccaaaaacgcgaaattcaataaaaccgcgacccccgcacccgactaaaatccgaaaacgaaataatcgcgactaacgtaaactttacgactccgaaccaaaaaacaacctaaaaaacgataaatctctttccgacttaaaaaaaaacgaaaacgcccgcgcgaaaaaacgacaaacgaaaaacgacgaccgcgaacgattcaaatccgaaacgaacgaatacacgtcgaaacgcgacgaccacacgctcgcccgaaaaacgccactatacgtcccaaccgacgcctcctcccgcttacccgcgccgactaaaaaaaaaaaaaacgacgaccttcgcgtccgatccgcgccaccaacccgcctcgacgccgaacgcgaaccacacccaacgctccgaaaaacgacgaaaactaaacgacccgaactacgaaatactcgacccaaccgaatctccgtcccgaccgcgcaaacccctccgcgtccgcccgcgccctacatccccaaccgacccgacgtaaaaaaaatcctaaacttacctctatatcgaacgccgactcctccgtcccgaaccgaaaccgaaacccgaaaacgcgatcgccaaaaaaaacgccgcgacgataacgacccctacgactcgaaaaacgaaccgaacgaaaaccgctacctaaaccgcgcgccgtccgaaactcgccccgcgctaccgacgcttacaacgaaaaacgcaaccaactcgacccccgaactaaattccttcactaacacaactccgactcgaccgccccacgcaaaaacactcccgcccctcgcaaactacccccgcccgccgacccgcccgccttcccctcgatatcactcaccaaaaacacacaccccaaccgacgcccctcgctcccgctcgcaaacacaacgctactcacgcctctctcgaattttatatccgctcacacgcacgttctaacacaaatctcgtccctccacacgccctccctaactcctttcccaccccactttctaaaaaaatcccaatacaacttccgcactttacttac

SEQ ID NO: 13201 - DNA, 786 bp, Artificial Sequence
  chemically treated genomic DNA (Homo sapiens) CpG-island No: 13201
  unsure (585, 665, 670, 678, 702, 726)
gttggagtagggttttaatatcgttcgtaacgcggcgttgttggtagaagtattatattttgtttcggcggttatcgttaatcgtttgtgtggtttatttatgtaggtattgtatgacgtagtacgaatgattatgattggcgatgcgtaggtatgtttggttggcggcgtggagtatatgggttatgtgtcgatgagttacggcgtcgatttttatttcggtttgagtcgtaatgtcgttaaagcggcgggtatgatgggtttaacggtagaaatgttggcgcgtatgtacggtattagtcgtgaaatgtaggatgtttttgtcgcgcggttatacgttcgcgtttgggtcgttacgtagtcggtcgtatttaaaaatgaaattatttcgatcggtggttacgatgtcgacggcgttttgaagtagtttaattacgacgaagtgattcgttcggaaattatcgtggaagttttcgttacgttgcgttcggcgtttgatttagtaaacggtatggtaacggcgggtatattttttgtatttttcgatggcgtagttgttatgttggtgatgagtgaaagttgcgnttatgaattaggttttaaagcgcgcgttcgtgtgcgttcgatggcggtcgttggttgtgatcgatcgattatgggttatngtttnggtttcgnttcgaaattggtcgttgaaaaagncggggttttttgttagcgatattngcgtggttgaaaataatcgaagtttttggcgcgtagaatttgttatgtattaaagatttg

SEQ ID NO: 13202 - DNA, 786 bp, Artificial Sequence
  chemically treated genomic DNA (Homo sapiens) CpG-island No: 13202
  unsure (61, 85, 109, 117, 122, 202)
caaatctttaatacataacaaattctacgcgccaaaaacttcgattattttcaaccacgcnaatatcgctaacaaaaaaccccgnctttttcaacgaccaatttcgaancgaaaccnaaacnataacccataatcgatcgatcacaaccaacgaccgccatcgaacgcacacgaacgcgcgctttaaaacctaattcataancgcaactttcactcatcaccaacataacaactacgccatcgaaaaatacaaaaaatatacccgccgttaccataccgtttactaaatcaaacgccgaacgcaacgtaacgaaaacttccacgataatttccgaacgaatcacttcgtcgtaattaaactacttcaaaacgccgtcgacatcgtaaccaccgatcgaaataatttcatttttaaatacgaccgactacgtaacgacccaaacgcgaacgtataaccgcgcgacaaaaacatcctacatttcacgactaataccgtacatacgcgccaacatttctaccgttaaacccatcatacccgccgctttaacgacattacgactcaaaccgaaataaaaatcgacgccgtaactcatcgacacataacccatatactccacgccgccaaccaaacatacctacgcatcgccaatcataatcattcgtactacgtcatacaatacctacataaataaaccacacaaacgattaacgataaccgccgaaacaaaatataatacttctaccaacaacgccgcgttacgaacgatattaaaaccctactccaac

SEQ ID NO: 13203 - DNA, 786 bp, Artificial Sequence
  chemically treated genomic DNA (Homo sapiens) CpG-island No: 13203
  unsure (61, 85, 109, 117, 122, 202)
tagatttttaatatatggtagattttgcgcgttaaaggtttcggttatttttaattacgtngatatcgttggtaggaagtttcgntttttttagcggttagtttcgagncggaattngggtngtaatttataatcgatcggttataattaacgatcgttatcgaacgtatacgagcgcgcgttttaagatttaatttatggncgtagtttttatttattattagtatggtagttgcgttatcggaaagtgtagaagatgtgttcgtcgttattatatcgtttattggattaaacgtcggacgtagcgtggcgagggtttttacggtggttttcgggcgaattatttcgtcgtaattaaattgttttaggacgtcgtcggtatcgtgattatcggtcgggatgattttatttttaaatgcggtcgattgcgtggcggtttaggcgcgggcgtgtgatcgcgcggtaaaggtattttgtattttacggttgatatcgtgtatacgcgttagtatttttgtcgttaagtttattatgttcgtcgttttggcgatattgcggtttaggtcggggtgaaaatcgacgtcgtgatttatcggtatatggtttatatgttttacgtcgttaattagatatgtttgcgtatcgttagttatgattattcgtgttgcgttatgtagtgtttgtatggatgaattatataagcgattaacggtaatcgtcgggatagagtgtggtatttttgttagtagcgtcgcgttacgggcgatattaaaattttgttttagt

SEQ ID NO: 13204 - DNA, 786 bp, Artificial Sequence
  chemically treated genomic DNA (Homo sapiens) CpG-island No: 13204
  unsure (585, 665, 670, 678, 702, 726)
actaaaacaaaattttaatatcgcccgtaacgcgacgctactaacaaaaataccacactctatcccgacgattaccgttaatcgcttatataattcatccatacaaacactacataacgcaacacgaataatcataactaacgatacgcaaacatatctaattaacgacgtaaaacatataaaccatataccgataaatcacgacgtcgattttcaccccgacctaaaccgcaatatcgccaaaacgacgaacataataaacttaacgacaaaaatactaacgcgtatacacgatatcaaccgtaaaatacaaaatacctttaccgcgcgatcacacgcccgcgcctaaaccgccacgcaatcgaccgcatttaaaaataaaatcatcccgaccgataatcacgataccgacgacgtcctaaaacaatttaattacgacgaaataattcgcccgaaaaccaccgtaaaaaccctcgccacgctacgtccgacgtttaatccaataaacgatataataacgacgaacacatcttctacactttccgataacgcaactaccatactaataataaataaaaactacgnccataaattaaatcttaaaacgcgcgctcgtatacgttcgataacgatcgttaattataaccgatcgattataaattacnacccnaattccgnctcgaaactaaccgctaaaaaaancgaaacttcctaccaacgatatcnacgtaattaaaaataaccgaaacctttaacgcgcaaaatctaccatatattaaaaatcta

SEQ ID NO: 13205 - DNA, 577 bp, Artificial Sequence
  chemically treated genomic DNA (Homo sapiens) CpG-island No: 13205
  unsure (561)
ttcgttcgttattttgcgggcggtatagtattaacgaggtatatcgtggtaaaagttttaaaacgcgtttttgtttgtaatgaatgcggggtcgattattcgcgttggtaggggtagtgtagtgtttgttatgtttggaatattattatcgaggtgcgttttgttgcgtcgttaatggtggcgcgtaacgagcgttttagcggttatgtcggtagcgtcggggtggtaaaagtttagaaatttttcgatattagttttgaagagttgtcgcgtttttttatcggatttaaagagttcgatcgcgtattaggcggcggcgtggtgttaggaagtgttattttgattggcggtaattttggtgcggggaaatttacgttgttattgtaaacgttgtgtaaattggtttagtagatgaatacgttgtatgttatcggcgaagagtcgttgtaataagtggtaatgcgcgtttatcgttttgggttgtcgattgataattttaatatgtggtcggaaattagtatcgaatagatttgttttgattgtttcgaagaagagtaacgngaagttggaatgggaa

SEQ ID NO: 13206 - DNA, 577 bp, Artificial Sequence
  chemically treated genomic DNA (Homo sapiens) CpG-island No: 13206
  unsure (17)
ttcccattccaacttcncgttactcttcttcgaaacaatcaaaacaaatctattcgatactaatttccgaccacatattaaaattatcaatcgacaacccaaaacgataaacgcgcattaccacttattacaacgactcttcgccgataacatacaacgtattcatctactaaaccaatttacacaacgtttacaataacaacgtaaatttccccgcaccaaaattaccgccaatcaaaataacacttcctaacaccacgccgccgcctaatacgcgatcgaactctttaaatccgataaaaaaacgcgacaactcttcaaaactaatatcgaaaaatttctaaacttttaccaccccgacgctaccgacataaccgctaaaacgctcgttacgcgccaccattaacgacgcaacaaaacgcacctcgataataatattccaaacataacaaacactacactacccctaccaacgcgaataatcgaccccgcattcattacaaacaaaaacgcgttttaaaacttttaccacgatatacctcgttaatactataccgcccgcaaaataacgaacgaa

SEQ ID NO: 13207 - DNA, 577 bp, Artificial Sequence
  chemically treated genomic DNA (Homo sapiens) CpG-island No: 13207
  unsure (17)
tttttattttagttttncgttgttttttttcggggtaattagggtagatttgttcgatgttggttttcgattatatattgagattgttagtcggtagtttaaggcgatgagcgcgtattgttatttgttgtagcgatttttcgtcggtgatatatagcgtatttatttgttgggttagtttgtatagcgtttgtagtagtagcgtggattttttcgtattagggttatcgttaattagaatggtattttttggtattacgtcgtcgtttagtacgcggtcgaattttttaaattcggtggaaaaacgcggtagttttttaaggttgatatcggagagtttttggatttttgttatttcggcgttatcggtatagtcgttgagacgttcgttacgcgttattattggcgacgtagtaagacgtatttcggtgatggtgttttaggtatgataggtattgtattgtttttgttagcgcggataatcggtttcgtatttattataaataaaggcgcgttttggagtttttgttacggtgtatttcgttaatgttgtgtcgttcgtaggatggcgggcgag

SEQ ID NO: 13208 - DNA, 577 bp, Artificial Sequence
  chemically treated genomic DNA (Homo sapiens) CpG-island No: 13208
  unsure (561)
ctcgcccgccatcctacgaacgacacaacattaacgaaatacaccgtaacaaaaactccaaaacgcgcctttatttataataaatacgaaaccgattatccgcgctaacaaaaacaatacaatacctatcatacctaaaacaccatcaccgaaatacgtcttactacgtcgccaataataacgcgtaacgaacgtctcaacgactataccgataacgccgaaataacaaaaatccaaaaactctccgatatcaaccttaaaaaactaccgcgtttttccaccgaatttaaaaaattcgaccgcgtactaaacgacgacgtaataccaaaaaataccattctaattaacgataaccctaatacgaaaaaatccacgctactactacaaacgctatacaaactaacccaacaaataaatacgctatatatcaccgacgaaaaatcgctacaacaaataacaatacgcgctcatcgccttaaactaccgactaacaatctcaatatataatcgaaaaccaacatcgaacaaatctaccctaattaccccgaaaaaaaacaacgnaaaactaaaataaaaa

SEQ ID NO: 13209 - DNA, 942 bp, Artificial Sequence
  chemically treated genomic DNA (Homo sapiens) CpG-island No: 13209
ttgttatcgttttgcggtttcgttatttacggtgcggtgcgtgaggcggtttgtttcgttatagtgttagtgggtgattagttttttattttcgttgcggataagtttgtcggttaggtcgtggtgataacgttgtgtgcggtcgttaaagtcggttttttgtattagtcggtcgagtatatcgtaacggaaggtggtgtggttgtcgtttttattggttaggcggatgattcgttcggtagtatcgtattttatattgcgcgttagatcgttttgcgtggtatagatggtttttttttacgtatcgtattgtgtttcgtttttgttgtcgttcggggtaatgacggtggttaggttatcggcggcgttgtatttatatcgcgttttatggttttgcgtgttttttacggtaattaattgtttacggttgtcgtatgcgcggtattgatttagttttttttcgcggtgtatcgtcgttatttgttcgaagcggttatggttataacgggttatataatcggaatagtcggtgaagtttagtaattgatcgtaacggttttacgttatggtttttcggttgtcggtggtatttttcgttgcgtagggtaagttattgtgtggattattataacggtagcgggtgatatcgtcgttaggggtagttttttgaattagacggtttaatttattatattttcggcgtaattttagttcgttaggttcggtggttgacgttaattggttgtggtggttatagtaaaacgtcgatgttttgtattcggcgtggttatgcgcgtgatgaggttcgttattatattcgggttgtattttgttgatatttgcggtattcgtttgtgttttgagtttgtttacggcgttaaattgattttgcgtgacgttgtcgttcgggggattttttagtagagtttcgtttcgtttttt

SEQ ID NO: 13210 - DNA, 942 bp, Artificial Sequence
  chemically treated genomic DNA (Homo sapiens) CpG-island No: 13210
aaaaaacgaaacgaaactctactaaaaaatcccccgaacgacaacgtcacgcaaaatcaatttaacgccgtaaacaaactcaaaacacaaacgaataccgcaaatatcaacaaaatacaacccgaatataataacgaacctcatcacgcgcataaccacgccgaatacaaaacatcgacgttttactataaccaccacaaccaattaacgtcaaccaccgaacctaacgaactaaaattacgccgaaaatataataaattaaaccgtctaattcaaaaaactacccctaacgacgatatcacccgctaccgttataataatccacacaataacttaccctacgcaacgaaaaataccaccgacaaccgaaaaaccataacgtaaaaccgttacgatcaattactaaacttcaccgactattccgattatataacccgttataaccataaccgcttcgaacaaataacgacgatacaccgcgaaaaaaaactaaatcaataccgcgcatacgacaaccgtaaacaattaattaccgtaaaaaacacgcaaaaccataaaacgcgatataaatacaacgccgccgataacctaaccaccgtcattaccccgaacgacaacaaaaacgaaacacaatacgatacgtaaaaaaaaaccatctataccacgcaaaacgatctaacgcgcaatataaaatacgatactaccgaacgaatcatccgcctaaccaataaaaacgacaaccacaccaccttccgttacgatatactcgaccgactaatacaaaaaaccgactttaacgaccgcacacaacgttatcaccacgacctaaccgacaaacttatccgcaacgaaaataaaaaactaatcacccactaacactataacgaaacaaaccgcctcacgcaccgcaccgtaaataacgaaaccgcaaaacgataacaa

SEQ ID NO: 13211 - DNA, 942 bp, Artificial Sequence
  chemically treated genomic DNA (Homo sapiens) CpG-island No: 13211
gggggacggagcgagattttgttagaggatttttcggacggtagcgttacgtagagttagtttgacgtcgtgggtaggtttagggtatagacggatgtcgtaggtattaatagagtatagttcggatgtggtgacgggttttattacgcgtataattacgtcggatgtagggtatcggcgttttattataattattataattagttaacgttagttatcgggtttgacgggttggaattgcgtcgggaatatgatgaattgggtcgtttgatttaggaaattgtttttgacggcgatattattcgttatcgttatgataatttatatagtgatttattttgcgtaacggaagatgttatcggtagtcggaaaattatgacgtggagtcgttacggttagttgttgagttttatcgattgtttcggttatgtaattcgttatgattatgatcgtttcgggtagatgacggcggtgtatcgcgaggaagggttgagttagtatcgcgtatacgatagtcgtggatagttaattgtcgtgaaagatacgtagggttatgaaacgcggtatgaatataacgtcgtcggtgatttgattatcgttattgtttcggacggtagtagaaacgggatatagtacgatgcgtggggaaaagttatttgtattacgtagggcggtttgacgcgtagtatggaatacgatgttgtcggacgggttattcgtttgattagtgaaaacggtagttatattatttttcgttacgatgtattcgatcggttgatataggaaatcggttttgacggtcgtatatagcgttattattacgatttgatcggtaaatttattcgtagcgaggatgaggggttggttatttattggtattatgacgaagtagatcgttttacgtatcgtatcgtgaatggcgaaatcgtagagcggtggtag

SEQ ID NO: 13212 - DNA, 942 bp, Artificial Sequence
  chemically treated genomic DNA (Homo sapiens) CpG-island No: 13212
ctaccaccgctctacgatttcgccattcacgatacgatacgtaaaacgatctacttcgtcataataccaataaataaccaacccctcatcctcgctacgaataaatttaccgatcaaatcgtaataataacgctatatacgaccgtcaaaaccgatttcctatatcaaccgatcgaatacatcgtaacgaaaaataatataactaccgttttcactaatcaaacgaataacccgtccgacaacatcgtattccatactacgcgtcaaaccgccctacgtaatacaaataacttttccccacgcatcgtactatatcccgtttctactaccgtccgaaacaataacgataatcaaatcaccgacgacgttatattcataccgcgtttcataaccctacgtatctttcacgacaattaactatccacgactatcgtatacgcgatactaactcaacccttcctcgcgatacaccgccgtcatctacccgaaacgatcataatcataacgaattacataaccgaaacaatcgataaaactcaacaactaaccgtaacgactccacgtcataattttccgactaccgataacatcttccgttacgcaaaataaatcactatataaattatcataacgataacgaataatatcgccgtcaaaaacaatttcctaaatcaaacgacccaattcatcatattcccgacgcaattccaacccgtcaaacccgataactaacgttaactaattataataattataataaaacgccgataccctacatccgacgtaattatacgcgtaataaaacccgtcaccacatccgaactatactctattaatacctacgacatccgtctataccctaaacctacccacgacgtcaaactaactctacgtaacgctaccgtccgaaaaatcctctaacaaaatctcgctccgtccccc

SEQ ID NO: 13213 - DNA, 538 bp, Artificial Sequence
  chemically treated genomic DNA (Homo sapiens) CpG-island No: 13213
taattagcgtcggttcgttgtttagacgtttttcgtatggcgggttgtttaatattgtgtcgtacggttttttcggtagcggattggttagttgcgcgatattttttattttaaaggtgattagtttattaattttcgtaagacgggcgttagtgcgtgtacgttgaattattcgtgcgtcgttgttcgaatcgtaaaaatgagagttatatttagttaggtttttacgggcgcgagtttgcgttttcgtttttattttttgttagatagttttattatgttgcgtttagtcgttaaagttttaacgtttacggtgtaagtttggtgcgcgatcggtcgttagtatcgttgttttaattagtaacgtatcggaattatatatcggatcgagtagcggtgtttttggttgttagtcggatcgtattataatagcggttgttagggtttttttgatcggcgtaatattagtacgatcgcgatagttacgtagatgtaaattattattatttagattaagagcgatattggcggttttttt

SEQ ID NO: 13214 - DNA, 538 bp, Artificial Sequence
  chemically treated genomic DNA (Homo sapiens) CpG-island No: 13214
aaaaaaaccgccaatatcgctcttaatctaaataataataatttacatctacgtaactatcgcgatcgtactaatattacgccgatcaaaaaaaccctaacaaccgctattataatacgatccgactaacaaccaaaaacaccgctactcgatccgatatataattccgatacgttactaattaaaacaacgatactaacgaccgatcgcgcaccaaacttacaccgtaaacgttaaaactttaacgactaaacgcaacataataaaactatctaacaaaaaataaaaacgaaaacgcaaactcgcgcccgtaaaaacctaactaaatataactctcatttttacgattcgaacaacgacgcacgaataattcaacgtacacgcactaacgcccgtcttacgaaaattaataaactaatcacctttaaaataaaaaatatcgcgcaactaaccaatccgctaccgaaaaaaccgtacgacacaatattaaacaacccgccatacgaaaaacgtctaaacaacgaaccgacgctaatta

SEQ ID NO: 13215 - DNA, 538 bp, Artificial Sequence
  chemically treated genomic DNA (Homo sapiens) CpG-island No: 13215
aaagaaatcgttagtatcgtttttgatttgagtggtgatggtttatatttgcgtggttatcgcgatcgtgttggtattgcgtcgattaaagaaattttggtagtcgttattgtgatgcgattcggttggtagttaggaatatcgttgttcgattcgatgtgtggtttcggtacgttgttgattgaagtagcgatgttggcgatcgatcgcgtattaggtttgtatcgtgggcgttggggttttagcggttgggcgtagtatgatgaagttatttggtaggaagtgaaagcggaagcgtaaattcgcgttcgtaaaggtttggttgagtatagtttttatttttacggttcggatagcgacgtacgggtgatttaacgtgtacgtattaacgttcgttttgcggggattggtgaattgattatttttgaggtgaaagatgtcgcgtaattgattaattcgttgtcgaaagggtcgtacggtatagtgttgagtaattcgttatacggggaacgtttggatagcgaatcggcgttgattg

SEQ ID NO: 13216 - DNA, 538 bp, Artificial Sequence
  chemically treated genomic DNA (Homo sapiens) CpG-island No: 13216
caatcaacgccgattcgctatccaaacgttccccgtataacgaattactcaacactataccgtacgaccctttcgacaacgaattaatcaattacgcgacatctttcacctcaaaaataatcaattcaccaatccccgcaaaacgaacgttaatacgtacacgttaaatcacccgtacgtcgctatccgaaccgtaaaaataaaaactatactcaaccaaacctttacgaacgcgaatttacgcttccgctttcacttcctaccaaataacttcatcatactacgcccaaccgctaaaaccccaacgcccacgatacaaacctaatacgcgatcgatcgccaacatcgctacttcaatcaacaacgtaccgaaaccacacatcgaatcgaacaacgatattcctaactaccaaccgaatcgcatcacaataacgactaccaaaatttctttaatcgacgcaataccaacacgatcgcgataaccacgcaaatataaaccatcaccactcaaatcaaaaacgatactaacgatttcttt

SEQ ID NO: 13217 - DNA, 758 bp, Artificial Sequence
  chemically treated genomic DNA (Homo sapiens) CpG-island No: 13217
gttggaaaaatagtgcgagcgcggtttgttggcgaaagatttttttttatttattgtgattcgtattagcgcggtattcgatgcgcgtatgggcggcgttacgttttcggttatgagtaatttcggttcgggtaattaggggattatcgtaataatgtttgtggtggtggtagtagaatatttcggagcggatgatgaacggttggcgcgtgcgttgatgttttcgtatttgagcgtaatttatatttataattagttatcgcgtttgtttgcgttgtgtgtcgtaacgatcgtagtaatgggggtcgtcgtcgggatggtatggttggtggatgggcgttatgaaattatttcgatggcgattagtagtatgatcggcgatgttagcggtatgatttgcgatggtgcgtcgaatagttgcgcgatgaaggtttcgattagtgtttcggttgcgtggatcgcggtgttaatggcgttggatgatatcgtcgtgatcggtaatgaagggattgtggcgtatgatgttgagtagtcgattgttaatttgtgtgcgttagtaagttattcgatgtagtaaacggatcggcgagattatcgagattatggcgagtaaggttagataaacgttaggttttggggatcgtgtcggatgcgatgttggcgtattttgttcggtttacgggttgtttaattcgttaatgttgttggattttgtaggtcggataaggcgttttcgtcgtattcggtaatttgttttt

SEQ ID NO: 13218 - DNA, 758 bp, Artificial Sequence
  chemically treated genomic DNA (Homo sapiens) CpG-island No: 13218
aaaaacaaattaccgaatacgacgaaaacgccttatccgacctacaaaatccaacaacattaacgaattaaacaacccgtaaaccgaacaaaatacgccaacatcgcatccgacacgatccccaaaacctaacgtttatctaaccttactcgccataatctcgataatctcgccgatccgtttactacatcgaataacttactaacgcacacaaattaacaatcgactactcaacatcatacgccacaatcccttcattaccgatcacgacgatatcatccaacgccattaacaccgcgatccacgcaaccgaaacactaatcgaaaccttcatcgcgcaactattcgacgcaccatcgcaaatcataccgctaacatcgccgatcatactactaatcgccatcgaaataatttcataacgcccatccaccaaccataccatcccgacgacgacccccattactacgatcgttacgacacacaacgcaaacaaacgcgataactaattataaatataaattacgctcaaatacgaaaacatcaacgcacgcgccaaccgttcatcatccgctccgaaatattctactaccaccaccacaaacattattacgataatcccctaattacccgaaccgaaattactcataaccgaaaacgtaacgccgcccatacgcgcatcgaataccgcgctaatacgaatcacaataaataaaaaaaaatctttcgccaacaaaccgcgctcgcactatttttccaac

SEQ ID NO: 13219 - DNA, 758 bp, Artificial Sequence
  chemically treated genomic DNA (Homo sapiens) CpG-island No: 13219
aaagataggttgtcggatgcggcgaaaacgttttattcggtttataaaatttaataatattaacgaattaaataattcgtaggtcggataagatgcgttagtatcgtattcggtacgatttttaaaatttggcgtttatttggttttgttcgttataatttcgataatttcgtcgattcgtttgttgtatcgaatggtttgttaacgtatataggttggtaatcgattgtttaatattatgcgttataatttttttattgtcggttacggcggtattatttagcgttattaatatcgcggtttacgtagtcgaagtattggtcgaaatttttatcgcgtagttgttcgacgtattatcgtaaattatgtcgttgatatcgtcgattatattgttgatcgttatcgagatggttttataacgtttatttattagttatgttatttcggcggcggtttttattgttgcggtcgttgcggtatatagcgtagataaacgcggtaattggttatggatgtaaattgcgtttaaatgcgaaagtattagcgtacgcgttagtcgtttattattcgtttcgaagtgttttgttattattattataggtattgttgcggtaattttttggttattcgagtcggagttatttatagtcggaagcgtagcgtcgtttatacgcgtatcggatgtcgcgttggtacgaattataatggatgaagagagatttttcgttagtaaatcgcgttcgtattgtttttttagt

SEQ ID NO: 13220 - DNA, 758 bp, Artificial Sequence
  chemically treated genomic DNA (Homo sapiens) CpG-island No: 13220
actaaaaaaacaatacgaacgcgatttactaacgaaaaatctctcttcatccattataattcgtaccaacgcgacatccgatacgcgtataaacgacgctacgcttccgactataaataactccgactcgaataaccaaaaaattaccgcaacaatacctataataataataacaaaacacttcgaaacgaataataaacgactaacgcgtacgctaatactttcgcatttaaacgcaatttacatccataaccaattaccgcgtttatctacgctatataccgcaacgaccgcaacaataaaaaccgccgccgaaataacataactaataaataaacgttataaaaccatctcgataacgatcaacaatataatcgacgatatcaacgacataatttacgataatacgtcgaacaactacgcgataaaaatttcgaccaatacttcgactacgtaaaccgcgatattaataacgctaaataataccgccgtaaccgacaataaaaaaattataacgcataatattaaacaatcgattaccaacctatatacgttaacaaaccattcgatacaacaaacgaatcgacgaaattatcgaaattataacgaacaaaaccaaataaacgccaaattttaaaaatcgtaccgaatacgatactaacgcatcttatccgacctacgaattatttaattcgttaatattattaaattttataaaccgaataaaacgttttcgccgcatccgacaacctatcttt

SEQ ID NO: 13221 - DNA, 665 bp, Artificial Sequence
  chemically treated genomic DNA (Homo sapiens) CpG-island No: 13221
ttgttgttatcggggttttttaattcggagataagcgtaagcggttattattacgtatagtaatattatattcgaagacgattaggtagttattttcgtttggtggttcgtgatattgaaggtcggatggtttggcgggtatggaattttgagtcggatgtcggtgaaggttttaatcgttatattcgtattttaggtattcgtatagatacggttattcgttgatcgcgaagtatttattcgtatttattttttcgaatatattttatatttttatacgttagttatcgtcgttggcgtttttattgacggagatatatttatgataatatagacgtagtacgatttcgtattcgttaattaattcgaatttgaattgatcgttacgtcggttttcgatgaatagcgtatcgatttttggttatagtattttggcgttatttcgtagtggttatttttggagtcgtatattttcgtttggatggatcgtttttgtgagggttatagcggtggtatttggtcgttttatatttttagtaatggcggcgtatttatgtttttcgagtttgataacgatgagatatggcgtttgtttaattgtttgaacggtaacgatgtttaaatgagtgtagaagtagtaggtattgttgtttgtttgattgcgt

SEQ ID NO: 13222 - DNA, 665 bp, Artificial Sequence
  chemically treated genomic DNA (Homo sapiens) CpG-island No: 13222
acgcaatcaaacaaacaacaatacctactacttctacactcatttaaacatcgttaccgttcaaacaattaaacaaacgccatatctcatcgttatcaaactcgaaaaacataaatacgccgccattactaaaaatataaaacgaccaaataccaccgctataaccctcacaaaaacgatccatccaaacgaaaatatacgactccaaaaataaccactacgaaataacgccaaaatactataaccaaaaatcgatacgctattcatcgaaaaccgacgtaacgatcaattcaaattcgaattaattaacgaatacgaaatcgtactacgtctatattatcataaatatatctccgtcaataaaaacgccaacgacgataactaacgtataaaaatataaaatatattcgaaaaaataaatacgaataaatacttcgcgatcaacgaataaccgtatctatacgaatacctaaaatacgaatataacgattaaaaccttcaccgacatccgactcaaaattccatacccgccaaaccatccgaccttcaatatcacgaaccaccaaacgaaaataactacctaatcgtcttcgaatataatattactatacgtaataataaccgcttacgcttatctccgaattaaaaaaccccgataacaacaa

SEQ ID NO: 13223 - DNA, 665 bp, Artificial Sequence
  chemically treated genomic DNA (Homo sapiens) CpG-island No: 13223
acgtaattaggtagatagtaatatttgttgtttttgtatttatttgggtatcgttatcgtttaggtagttaaatagacgttatgttttatcgttgttaggttcgggggatataaatgcgtcgttattgttgagggtgtagaacgattagatattatcgttgtagtttttatagaagcggtttatttaggcgaagatatgcggttttaggagtagttattgcgggatagcgttaaagtattgtggttagaaatcgatacgttgtttatcggggatcggcgtgacggttagtttaaattcgggttggttagcgggtgcgaggtcgtgttgcgtttgtgttgttatgggtatgttttcgttaataaaaacgttagcggcgatggttggcgtatggggatataaagtgtgttcggggaggtgaatgcgggtaaatgtttcgcgattagcgggtggtcgtgtttgtacggatgtttgaggtgcggatatagcggttaagatttttatcggtattcggtttaaagttttatgttcgttagattattcggtttttagtattacgaattattagacggaagtgattgtttggtcgttttcgagtgtgatattgttgtacgtggtagtgatcgtttgcgtttgttttcgggttgaaaggtttcggtggtagtaa

SEQ ID NO: 13224 - DNA, 665 bp, Artificial Sequence
  chemically treated genomic DNA (Homo sapiens) CpG-island No: 13224
ttactaccaccgaaacctttcaacccgaaaacaaacgcaaacgatcactaccacgtacaacaatatcacactcgaaaacgaccaaacaatcacttccgtctaataattcgtaatactaaaaaccgaataatctaacgaacataaaactttaaaccgaataccgataaaaatcttaaccgctatatccgcacctcaaacatccgtacaaacacgaccacccgctaatcgcgaaacatttacccgcattcacctccccgaacacactttatatccccatacgccaaccatcgccgctaacgtttttattaacgaaaacatacccataacaacacaaacgcaacacgacctcgcacccgctaaccaacccgaatttaaactaaccgtcacgccgatccccgataaacaacgtatcgatttctaaccacaatactttaacgctatcccgcaataactactcctaaaaccgcatatcttcgcctaaataaaccgcttctataaaaactacaacgataatatctaatcgttctacaccctcaacaataacgacgcatttatatcccccgaacctaacaacgataaaacataacgtctatttaactacctaaacgataacgatacccaaataaatacaaaaacaacaaatattactatctacctaattacgt

SEQ ID NO: 13225 - DNA, 510 bp, Artificial Sequence
  chemically treated genomic DNA (Homo sapiens) CpG-island No: 13225
  unsure (125, 138, 140..141, 149..150, 172..173, 190..191, 203)
ttcgcgttgggatcggattttcgaaaaattcggaagcggcgggcgagggatttcgcgggtttgttcggtttggggtcgttcggatagatttttcgttcgttcgtggtagtttcggcgtttttcgngtttggtttattntnntttttagnnntattttgttttcgggtagtanngcgttttttagtcgtgnngggtcgacgatnattcgcgagattttcggtttcgagtgcgaatggtggtgatggtggtgaggggtcgtcgggggtatttgcgtttgggattgaggtggttgcgatttttcggggggttgcggcggtcgtttttttttcgagttcgtttcgtaatttttgtttagcgtttgttcgtatattttggtgttggcggttggttggtaggtgatagttcgtaaaagttttatggtcgttttggcgtttcgtattgttcgttgttattttttaagcgcggttatacgttcgagtcgggcgtggttttcgcgattttgtttttggt

SEQ ID NO: 13226 - DNA, 510 bp, Artificial Sequence
  chemically treated genomic DNA (Homo sapiens) CpG-island No: 13226
  unsure (308, 320..321, 338..339, 360..361, 370..371, 373, 386)
accaaaaacaaaatcgcgaaaaccacgcccgactcgaacgtataaccgcgcttaaaaaataacaacgaacaatacgaaacgccaaaacgaccataaaacttttacgaactatcacctaccaaccaaccgccaacaccaaaatatacgaacaaacgctaaacaaaaattacgaaacgaactcgaaaaaaaaacgaccgccgcaaccccccgaaaaatcgcaaccacctcaatcccaaacgcaaatacccccgacgacccctcaccaccatcaccaccattcgcactcgaaaccgaaaatctcgcgaatnatcgtcgacccnncacgactaaaaaacgcnntactacccgaaaacaaaatannnctaaaaannanaataaaccaaacncgaaaaacgccgaaactaccacgaacgaacgaaaaatctatccgaacgaccccaaaccgaacaaacccgcgaaatccctcgcccgccgcttccgaatttttcgaaaatccgatcccaacgcgaa

SEQ ID NO: 13227 - DNA, 510 bp, Artificial Sequence
  chemically treated genomic DNA (Homo sapiens) CpG-island No: 13227
  unsure (308, 320..321, 338..339, 360..361, 370..371, 373, 386)
attagagataaggtcgcgaggattacgttcggttcgaacgtgtgatcgcgtttagggggtgatagcggatagtgcggggcgttaaggcgattatggagtttttgcggattattatttattagttagtcgttagtattaaaatgtgcgagtaggcgttgggtaagggttgcggagcggattcgaagaagaagcggtcgtcgtagtttttcgaggaatcgtagttattttagttttaggcgtaagtgttttcggcggttttttattattattattattattcgtattcggggtcggagatttcgcggatnatcgtcgatttnntacgattgggaagcgtnntattgttcggaggtaaagtgnnnttgggaannanggtgaattaagtncggagggcgtcgaggttgttacgggcgggcgggaggtttgttcgggcgattttaagtcgggtaagttcgcggggtttttcgttcgtcgttttcgggtttttcgggggttcgattttagcgcgag

SEQ ID NO: 13228 - DNA, 510 bp, Artificial Sequence
  chemically treated genomic DNA (Homo sapiens) CpG-island No: 13228
  unsure (125, 138, 140..141, 149..150, 172..173, 190..191, 203)
ctcgcgctaaaatcgaacccccgaaaaacccgaaaacgacgaacgaaaaaccccgcgaacttacccgacttaaaatcgcccgaacaaacctcccgcccgcccgtaacaacctcgacgccctccgnacttaattcaccntnnttcccaannncactttacctccgaacaatannacgcttcccaatcgtannaaatcgacgatnatccgcgaaatctccgaccccgaatacgaataataataataataataaaaaaccgccgaaaacacttacgcctaaaactaaaataactacgattcctcgaaaaactacgacgaccgcttcttcttcgaatccgctccgcaacccttacccaacgcctactcgcacattttaatactaacgactaactaataaataataatccgcaaaaactccataatcgccttaacgccccgcactatccgctatcaccccctaaacgcgatcacacgttcgaaccgaacgtaatcctcgcgaccttatctctaat

SEQ ID NO: 13229 - DNA, 580 bp, Artificial Sequence
  chemically treated genomic DNA (Homo sapiens) CpG-island No: 13229
ttttgcgtatcgttaatacgtcgaagcgagagattggttcggttacgttgaaaaagttgggtgagtgggcgatgacgcgtaataaaagtatgtttatcgttagttttgatatgggtttgagttagacgtttagcggacgtggttatgaagtattgattcgttttatttattggttggtagaaatttagcgtttggcggagcgggagtcgattgtcgcggtgcgtgatttgatttatggtatggattatgaattttggttgtacgaaatatcgtttagttcgaaagtcgtcgaaatgcgtatgaagaacgttaattaattgtttagttggatgacggagatgttggaaggtagtgaattgggatgagtcgatgacgtttatttaggggtgttgacgcgttttatttgtgcgcgatatgatggagcgtgttgatcggagtatattgttagaaggttttatcggtggcgtagtcgtgtgttttcggatagcgttttgttagtatatcgtttagacgttgttcgttaattagtgttcgtatttgggaaagtagttgttcgggataattttgaagataagtaaga

SEQ ID NO: 13230 - DNA, 580 bp, Artificial Sequence
  chemically treated genomic DNA (Homo sapiens) CpG-island No: 13230
tcttacttatcttcaaaattatcccgaacaactactttcccaaatacgaacactaattaacgaacaacgtctaaacgatatactaacaaaacgctatccgaaaacacacgactacgccaccgataaaaccttctaacaatatactccgatcaacacgctccatcatatcgcgcacaaataaaacgcgtcaacacccctaaataaacgtcatcgactcatcccaattcactaccttccaacatctccgtcatccaactaaacaattaattaacgttcttcatacgcatttcgacgactttcgaactaaacgatatttcgtacaaccaaaattcataatccataccataaatcaaatcacgcaccgcgacaatcgactcccgctccgccaaacgctaaatttctaccaaccaataaataaaacgaatcaatacttcataaccacgtccgctaaacgtctaactcaaacccatatcaaaactaacgataaacatacttttattacgcgtcatcgcccactcacccaactttttcaacgtaaccgaaccaatctctcgcttcgacgtattaacgatacgcaaaa

SEQ ID NO: 13231 - DNA, 580 bp, Artificial Sequence
  chemically treated genomic DNA (Homo sapiens) CpG-island No: 13231
ttttatttatttttagggttatttcgagtagttatttttttaggtgcgaatattgattaacgaatagcgtttgggcgatgtgttggtaaaacgttattcgggaatatacgattacgttatcgataaagttttttggtaatatatttcggttaatacgttttattatgtcgcgtataagtaaagcgcgttaatatttttgggtgagcgttatcggtttattttagtttattgttttttagtattttcgttatttagttaaatagttggttgacgttttttatgcgtatttcggcggttttcgggttgggcgatgtttcgtatagttaggatttataatttatgttatggattagattacgtatcgcggtaatcggttttcgtttcgttagacgttggatttttgttaattagtgagtgaagcgggttaatgttttataattacgttcgttaagcgtttgatttaggtttatattaaagttggcggtaaatatgtttttattgcgcgttatcgtttatttatttagtttttttagcgtagtcgggttaatttttcgtttcggcgtgttaacgatacgtagaa

SEQ ID NO: 13232 - DNA, 580 bp, Artificial Sequence
  chemically treated genomic DNA (Homo sapiens) CpG-island No: 13232
ttctacgtatcgttaacacgccgaaacgaaaaattaacccgactacgctaaaaaaactaaataaataaacgataacgcgcaataaaaacatatttaccgccaactttaatataaacctaaatcaaacgcttaacgaacgtaattataaaacattaacccgcttcactcactaattaacaaaaatccaacgtctaacgaaacgaaaaccgattaccgcgatacgtaatctaatccataacataaattataaatcctaactatacgaaacatcgcccaacccgaaaaccgccgaaatacgcataaaaaacgtcaaccaactatttaactaaataacgaaaatactaaaaaacaataaactaaaataaaccgataacgctcacccaaaaatattaacgcgctttacttatacgcgacataataaaacgtattaaccgaaatatattaccaaaaaactttatcgataacgtaatcgtatattcccgaataacgttttaccaacacatcgcccaaacgctattcgttaatcaatattcgcacctaaaaaaataactactcgaaataaccctaaaaataaataaaa

SEQ ID NO: 13233 - DNA, 612 bp, Artificial Sequence
  chemically treated genomic DNA (Homo sapiens) CpG-island No: 13233
  unsure (386, 413, 493, 593)
ttataggcgtgggaagcggcggatgaatatttgttgtaatagttggacgatatagaaattcgcggttcggtgttgattttgaatgatgtttttggtgcgttaagttgcgtattggcggaatataagtcgtatagtattggcgatttatatattagtgaattggcgacgcgcgagaatttacgttttaacgggattgatgagtcgagcgtgaagtttttcgatagtatcgtcgattattcgtaatagtcgggtgtggtgttgattaaagtgtcgaaaatattggtattgttggaatataatttgcgtgcgttgcgtaaagtggttacgtcggatatacgtattattgtcggtgttaaggttcgtgatatttatacgtttacgttggnattgttcgaaaaagtgttcggtataantttatatacgttggtatggaaatagcgcgtttgattaattgtatttttaatgatcgtagttggtcgatgcgcgtagattngtattggagttggaaggattgattgattattataatatgcgatgttttttttgattggttgaatcgcgcgttttttattaaattgtagaattcgaggganatttattcggtcgtatgcg

SEQ ID NO: 13234 - DNA, 612 bp, Artificial Sequence
  chemically treated genomic DNA (Homo sapiens) CpG-island No: 13234
  unsure (20, 120, 200, 227)
cgcatacgaccgaataaatntccctcgaattctacaatttaataaaaaacgcgcgattcaaccaatcaaaaaaaacatcgcatattataataatcaatcaatccttccaactccaatacnaatctacgcgcatcgaccaactacgatcattaaaaatacaattaatcaaacgcgctatttccataccaacgtatataaanttataccgaacactttttcgaacaatnccaacgtaaacgtataaatatcacgaaccttaacaccgacaataatacgtatatccgacgtaaccactttacgcaacgcacgcaaattatattccaacaataccaatattttcgacactttaatcaacaccacacccgactattacgaataatcgacgatactatcgaaaaacttcacgctcgactcatcaatcccgttaaaacgtaaattctcgcgcgtcgccaattcactaatatataaatcgccaatactatacgacttatattccgccaatacgcaacttaacgcaccaaaaacatcattcaaaatcaacaccgaaccgcgaatttctatatcgtccaactattacaacaaatattcatccgccgcttcccacgcctataa

SEQ ID NO: 13235 - DNA, 612 bp, Artificial Sequence
  chemically treated genomic DNA (Homo sapiens) CpG-island No: 13235
  unsure (20, 120, 200, 227)
cgtatacgatcggatgaatntttttcggattttgtagtttgataagaggcgcgcgatttagttagttagagaagatatcgtatgttgtggtagttagttagtttttttagttttagtatnggtttgcgcgtatcggttagttgcggttattgaaagtgtaattaattaggcgcgttgtttttatgttagcgtgtgtaggnttgtgtcgagtattttttcgaatagtnttagcgtggacgtgtgaatgttacgggttttggtatcggtaataatacgtgtattcgacgtgattattttgcgtagcgtacgtaagttgtgttttagtaatgttagtgttttcggtattttgattagtattatattcggttgttgcgggtagtcggcggtgttgtcgagaaattttacgttcgatttattaatttcgttgaggcgtaaattttcgcgcgtcgttagtttattgatgtatgagtcgttaatgttgtacggtttatgtttcgttagtgcgtagtttaacgtattaaaggtattatttaggattaatatcgggtcgcggatttttgtgtcgtttaattgttgtagtaaatatttattcgtcgttttttacgtttgtag

SEQ ID NO: 13236 - DNA, 612 bp, Artificial Sequence
  chemically treated genomic DNA (Homo sapiens) CpG-island No: 13236
  unsure (386, 413, 493, 593)
ctacaaacgtaaaaaacgacgaataaatatttactacaacaattaaacgacacaaaaatccgcgacccgatattaatcctaaataatacctttaatacgttaaactacgcactaacgaaacataaaccgtacaacattaacgactcatacatcaataaactaacgacgcgcgaaaatttacgcctcaacgaaattaataaatcgaacgtaaaatttctcgacaacaccgccgactacccgcaacaaccgaatataatactaatcaaaataccgaaaacactaacattactaaaacacaacttacgtacgctacgcaaaataatcacgtcgaatacacgtattattaccgataccaaaacccgtaacattcacacgtccacgctaanactattcgaaaaaatactcgacacaancctacacacgctaacataaaaacaacgcgcctaattaattacactttcaataaccgcaactaaccgatacgcgcaaaccnatactaaaactaaaaaaactaactaactaccacaacatacgatatcttctctaactaactaaatcgcgcgcctcttatcaaactacaaaatccgaaaaanattcatccgatcgtatacg

SEQ ID NO: 13237 - DNA, 666 bp, Artificial Sequence
  chemically treated genomic DNA (Homo sapiens) CpG-island No: 13237
  unsure (562..)
acgttggttttagaaaattcggatgaagtcgggcgttatagtatggacgttgagtacggttagtatagcgttattttgttggtggaaggattttcgtcgttatatgtcgggattattatcgtgtatgaagatttttaattcggtacgttgaatgattttttcggtgttatgacggaggatgatgttcgttcggaggtattgcgtcgttttgaattgatggtggaagaggtggcgcgtaacgcgttcgcggtggtatagaatacggtagtcgcgaagaagttagttagtgatgttagtatattagttcgtgaggcggtaatttatgcggttgatgttgcggatttagtacgcgtacgtagtacgttagtcggataggtcgcgtcgtcggtttagttagcgttttttagcgtaggaacggtattaataaaggttattgaagtattaaaaagtgttgtcgttgtagagtttttaaaaagcgcggcggttattagtgtcggtgcggcgaaaacgttagaaacgaatgttttagcgttattataattagtagttatatttgtatttnnacgcgatacgagagtattagaagttgcgatttcggttcgggatgcggcggttttaaaagaagcggtaaaattatttagaattttaaatatattaattggtata

SEQ ID NO: 13238 - DNA, 666 bp, Artificial Sequence
  chemically treated genomic DNA (Homo sapiens) CpG-island No: 13238
  unsure (104..)
tataccaattaatatatttaaaattctaaataattttaccgcttcttttaaaaccgccgcatcccgaaccgaaatcgcaacttctaatactctcgtatcgcgtnnaaatacaaatataactactaattataataacgctaaaacattcgtttctaacgttttcgccgcaccgacactaataaccgccgcgctttttaaaaactctacaacgacaacactttttaatacttcaataacctttattaataccgttcctacgctaaaaaacgctaactaaaccgacgacgcgacctatccgactaacgtactacgtacgcgtactaaatccgcaacatcaaccgcataaattaccgcctcacgaactaatatactaacatcactaactaacttcttcgcgactaccgtattctataccaccgcgaacgcgttacgcgccacctcttccaccatcaattcaaaacgacgcaatacctccgaacgaacatcatcctccgtcataacaccgaaaaaatcattcaacgtaccgaattaaaaatcttcatacacgataataatcccgacatataacgacgaaaatccttccaccaacaaaataacgctatactaaccgtactcaacgtccatactataacgcccgacttcatccgaattttctaaaaccaacgt

SEQ ID NO: 13239 - DNA, 666 bp, Artificial Sequence
  chemically treated genomic DNA (Homo sapiens) CpG-island No: 13239
  unsure (104..)
tatgttagttgatgtatttgaaattttgaatgattttgtcgttttttttgaggtcgtcgtatttcgggtcgaggtcgtagtttttgatgttttcgtgtcgcgtnnggatgtagatgtagttgttgattgtagtgacgttgaagtattcgtttttgacgttttcgtcgtatcggtattggtggtcgtcgcgttttttgaggattttgtagcggtagtattttttgatgttttagtggtttttgttgatgtcgtttttgcgttggaagacgttgattgagtcgacgacgcggtttgttcggttgacgtgttgcgtgcgcgtgttgagttcgtagtattagtcgtatgggttgtcgttttacgggttgatgtgttggtattattggttgattttttcgcggttgtcgtgttttgtgttatcgcggacgcgttacgcgttattttttttattattagtttaaaacggcgtagtgttttcggacgggtattatttttcgttatggtatcgagaaaattatttagcgtatcgggttgagaatttttatatacggtaatggtttcggtatgtgacggcgggaatttttttattaatagaataacgttgtattgatcgtatttaacgtttatgttgtaacgttcggttttattcggattttttgaggttagcgt

SEQ ID NO: 13240 - DNA, 666 bp, Artificial Sequence
  chemically treated genomic DNA (Homo sapiens) CpG-island No: 13240
  unsure (562..)
acgctaacctcaaaaaatccgaataaaaccgaacgttacaacataaacgttaaatacgatcaatacaacgttattctattaataaaaaaattcccgccgtcacataccgaaaccattaccgtatataaaaattctcaacccgatacgctaaataattttctcgataccataacgaaaaataatacccgtccgaaaacactacgccgttttaaactaataataaaaaaaataacgcgtaacgcgtccgcgataacacaaaacacgacaaccgcgaaaaaatcaaccaataataccaacacatcaacccgtaaaacgacaacccatacgactaatactacgaactcaacacgcgcacgcaacacgtcaaccgaacaaaccgcgtcgtcgactcaatcaacgtcttccaacgcaaaaacgacatcaacaaaaaccactaaaacatcaaaaaatactaccgctacaaaatcctcaaaaaacgcgacgaccaccaataccgatacgacgaaaacgtcaaaaacgaatacttcaacgtcactacaatcaacaactacatctacatccnnacgcgacacgaaaacatcaaaaactacgacctcgacccgaaatacgacgacctcaaaaaaaacgacaaaatcattcaaaatttcaaatacatcaactaacata

SEQ ID NO: 13241 - DNA, 959 bp, Artificial Sequence
  chemically treated genomic DNA (Homo sapiens) CpG-island No: 13241
  unsure (20, 55)
tttcgcgtgagattttcgangtatgtgttatttattcgcgttgtggtttcgtgtnggtttttttttttttaaaggggtgcgtggcgggggcggttattatttacgggggggcgtgtgaatggcgttgtggttttatttttttcgttaagcgtttataatttgtttttttttataacgttttgttttttttaacgataaatcgtcgttagcggtttttgtcgtttttcgtgtttttatttttcgagtgcgtatcgggcgtttcgttcgggcgggggtgtgtttttttttttagttaggggtttttttacgtcgcggcgatagagattacgtttaatgcgcgttaaattaggttttggtttacgcggttcgtttaggtttgttaggataatttttagtatacgttttgcgatatcgcggtgacgttgagttattgttagtatcggatattgtaagaagtcgagtagttcgttatcgttaaaggtggtaattgttaggttagaaggtagtttgtcgtcgcgacgtagcgtgatatttattattttttgtaataacgtaaacgacgttgtgaatagcgtttgcggtatcggatgcgtttttagttatttttcgaataattgggtagtcgtttttcgtttatagttgttggtatataggaaatgtatttcgcgcggattatttttttaggtagtacggaaattttgtttacgtaggaagttgatagaaagtttcggtagcgtattaagataaagtatcgtttcggcgggaaatttacgtaattttttcgttagtatttcggtattattttgatcggtattaattacgttggtgaagtgtttacgatcgagggcgcggtttagcgcgataatcgggaacgggtcgttagtttagcgttgataaaaaggatgtttaggaggtaacgacgtcgaaataataatggtattaatttgacgttgtaaaag

SEQ ID NO: 13242 - DNA, 959 bp, Artificial Sequence
  chemically treated genomic DNA (Homo sapiens) CpG-island No: 13242
  unsure (905, 940)
cttttacaacgtcaaattaataccattattatttcgacgtcgttacctcctaaacatcctttttatcaacgctaaactaacgacccgttcccgattatcgcgctaaaccgcgccctcgatcgtaaacacttcaccaacgtaattaataccgatcaaaataataccgaaatactaacgaaaaaattacgtaaatttcccgccgaaacgatactttatcttaatacgctaccgaaactttctatcaacttcctacgtaaacaaaatttccgtactacctaaaaaaataatccgcgcgaaatacatttcctatataccaacaactataaacgaaaaacgactacccaattattcgaaaaataactaaaaacgcatccgataccgcaaacgctattcacaacgtcgtttacgttattacaaaaaataataaatatcacgctacgtcgcgacgacaaactaccttctaacctaacaattaccacctttaacgataacgaactactcgacttcttacaatatccgatactaacaataactcaacgtcaccgcgatatcgcaaaacgtatactaaaaattatcctaacaaacctaaacgaaccgcgtaaaccaaaacctaatttaacgcgcattaaacgtaatctctatcgccgcgacgtaaaaaaacccctaactaaaaaaaaaaacacacccccgcccgaacgaaacgcccgatacgcactcgaaaaataaaaacacgaaaaacgacaaaaaccgctaacgacgatttatcgttaaaaaaaacaaaacgttataaaaaaaaacaaattataaacgcttaacgaaaaaaataaaaccacaacgccattcacacgcccccccgtaaataataaccgcccccgccacgcacccctttaaaaaaaaaaaaaccnacacgaaaccacaacgcgaataaataacacatacntcgaaaatctcacgcgaaa

SEQ ID NO: 13243 - DNA, 959 bp, Artificial Sequence
  chemically treated genomic DNA (Homo sapiens) CpG-island No: 13243
  unsure (905, 940)
tttttatagcgttaggttgatgttattattgtttcgacgtcgttgttttttgagtattttttttattaacgttgggttaacgattcgttttcgattgtcgcgttggatcgcgttttcgatcgtgaatattttattagcgtggttggtgtcgattaggatgatgtcgaaatgttggcggaagagttacgtaagtttttcgtcgagacggtgttttattttggtgcgttatcggagttttttgttagttttttgcgtgaataaggttttcgtattgtttggaaagatgattcgcgcgaagtgtattttttgtatgttaatagttatgagcgggaggcggttgtttagttattcgaaaaatggttggaaacgtattcgatgtcgtaggcgttgtttataacgtcgtttgcgttgttgtaaggagtgatggatgttacgttgcgtcgcgacggtaaattgttttttgatttggtaattgttatttttggcgataacgaattgttcgattttttatagtgttcggtgttggtagtggtttaacgttatcgcgatgtcgtagagcgtgtgttggagattgttttggtaagtttggacgaatcgcgtaagttaaaatttggtttaacgcgtattaaacgtaatttttatcgtcgcggcgtggggaggtttttaattggaggggggggtatattttcgttcgggcgaaacgttcgatgcgtattcggggggtaaaaatacggagggcggtagaaatcgttggcgacggtttgtcgttggggaaagtagaacgttatagaggaggataggttatgggcgtttggcgggaagagtggggttatagcgttatttatacgttttttcgtggatgatagtcgttttcgttacgtatttttttggggagaggagggttnatacgggattatagcgcgggtgagtaatatatatntcgagggttttacgcgaga

SEQ ID NO: 13244 - DNA, 959 bp, Artificial Sequence
  chemically treated genomic DNA (Homo sapiens) CpG-island No: 13244
  unsure (20, 55)
tctcgcgtaaaaccctcganatatatattactcacccgcgctataatcccgtatnaaccctcctctccccaaaaaaatacgtaacgaaaacgactatcatccacgaaaaaacgtataaataacgctataaccccactcttcccgccaaacgcccataacctatcctcctctataacgttctactttccccaacgacaaaccgtcgccaacgatttctaccgccctccgtatttttaccccccgaatacgcatcgaacgtttcgcccgaacgaaaatatacccccccctccaattaaaaacctccccacgccgcgacgataaaaattacgtttaatacgcgttaaaccaaattttaacttacgcgattcgtccaaacttaccaaaacaatctccaacacacgctctacgacatcgcgataacgttaaaccactaccaacaccgaacactataaaaaatcgaacaattcgttatcgccaaaaataacaattaccaaatcaaaaaacaatttaccgtcgcgacgcaacgtaacatccatcactccttacaacaacgcaaacgacgttataaacaacgcctacgacatcgaatacgtttccaaccatttttcgaataactaaacaaccgcctcccgctcataactattaacatacaaaaaatacacttcgcgcgaatcatctttccaaacaatacgaaaaccttattcacgcaaaaaactaacaaaaaactccgataacgcaccaaaataaaacaccgtctcgacgaaaaacttacgtaactcttccgccaacatttcgacatcatcctaatcgacaccaaccacgctaataaaatattcacgatcgaaaacgcgatccaacgcgacaatcgaaaacgaatcgttaacccaacgttaataaaaaaaatactcaaaaaacaacgacgtcgaaacaataataacatcaacctaacgctataaaaa

SEQ ID NO: 13245 - DNA, 520 bp, Artificial Sequence
  chemically treated genomic DNA (Homo sapiens) CpG-island No: 13245
cgcgttgggggtttttttacgtagttttcggtgtataaattattttcgtattttttttttgggggggagagttttttttagagtgtcgtgcgcggatatcgtacgataagagttttttagcgagagatatcgtacgagatttattattttcgcggttgatattttagcgcgttgggaataattttttttatttttttttatattagaagaaatatatattcgtacgtaagaaatatatatatttcgcggcgcgtttgttgtgtgtgcgcgggcgcgcgcgtcgtgtagatgttttttttacgtgtatatgtcggcggagagcgttgtagagttacgagcgagagaaaatgagcgcgtggaaatattcggggagagcgcgggagagatttgcgtataaggagacgtcggaggattttgcgcgcgttttcgcgtaaaattttacgtcgggcgttattagagagggggagatttcgcgtgtttttaaaaaaaaaaaataaaaaaaaaaaatgtaattgttttg

SEQ ID NO: 13246 - DNA, 520 bp, Artificial Sequence
  chemically treated genomic DNA (Homo sapiens) CpG-island No: 13246
caaaacaattacattttttttttttattttttttttttaaaaacacgcgaaatctccccctctctaataacgcccgacgtaaaattttacgcgaaaacgcgcgcaaaatcctccgacgtctccttatacgcaaatctctcccgcgctctccccgaatatttccacgcgctcattttctctcgctcgtaactctacaacgctctccgccgacatatacacgtaaaaaaaacatctacacgacgcgcgcgcccgcgcacacacaacaaacgcgccgcgaaatatatatatttcttacgtacgaatatatatttcttctaatataaaaaaaaataaaaaaaattattcccaacgcgctaaaatatcaaccgcgaaaataataaatctcgtacgatatctctcgctaaaaaactcttatcgtacgatatccgcgcacgacactctaaaaaaaactctcccccccaaaaaaaaaatacgaaaataatttatacaccgaaaactacgtaaaaaaacccccaacgcg

SEQ ID NO: 13247 - DNA, 520 bp, Artificial Sequence
  chemically treated genomic DNA (Homo sapiens) CpG-island No: 13247
taaaataattatattttttttttttgttttttttttttgggagtacgcggggtttttttttttttggtggcgttcggcgtggggttttgcgcgggggcgcgcgtaagatttttcggcgtttttttgtgcgtaaatttttttcgcgtttttttcgggtgtttttacgcgtttattttttttcgttcgtggttttatagcgtttttcgtcgatatgtatacgtgagggggatatttatacggcgcgcgcgttcgcgtatatataatagacgcgtcgcggggtgtatatattttttgcgtgcgggtatgtattttttttaatgtaaggagagatggggggggttgtttttagcgcgttggggtgttagtcgcgaggatgatgggtttcgtgcgatatttttcgttgagaaatttttgtcgtgcgatattcgcgtacgatattttaaagagggtttttttttttagaggaggggtgcgggggtggtttgtatatcgaggattgcgtgggagagtttttaacgcg

SEQ ID NO: 13248 - DNA, 520 bp, Artificial Sequence
  chemically treated genomic DNA (Homo sapiens) CpG-island No: 13248
cgcgttaaaaactctcccacgcaatcctcgatatacaaaccacccccgcacccctcctctaaaaaaaaaaaccctctttaaaatatcgtacgcgaatatcgcacgacaaaaatttctcaacgaaaaatatcgcacgaaacccatcatcctcgcgactaacaccccaacgcgctaaaaacaaccccccccatctctccttacattaaaaaaaatacatacccgcacgcaaaaaatatatacaccccgcgacgcgtctattatatatacgcgaacgcgcgcgccgtataaatatccccctcacgtatacatatcgacgaaaaacgctataaaaccacgaacgaaaaaaaataaacgcgtaaaaacacccgaaaaaaacgcgaaaaaaatttacgcacaaaaaaacgccgaaaaatcttacgcgcgcccccgcgcaaaaccccacgccgaacgccaccaaaaaaaaaaaaaccccgcgtactcccaaaaaaaaaaaacaaaaaaaaaaaatataattatttta

SEQ ID NO: 13249 - DNA, 959 bp, Artificial Sequence
  chemically treated genomic DNA (Homo sapiens) CpG-island No: 13249
gattacggttgcggatagcgttttttttttcgggtgtatttatcgttcggattgcgaatagttgtatcggtttagtaagttgagtttgtagagatgtaggttatcgtagggtttttggtagtatttgcgacggtagattcgggttcgagtggtggttattatcgatcgggtgatttcggtttcgtcgtcggtttttaatattataaagcggtcgggttcggttatttgtagtattttatagagttgcggtttagatagcgcgattttttggagtagcgcgtttagggttatgcggttttcgtgggcgtataggattttggtgatgaagtagtatattttcgggttcgttatggcgcgttggttgtgttggttttgtcgcggcgcgggattcggtttcgcggaaatcggaaatcgaaatttataagtgtttaggggcgggcgcgggcggtgttattgttgggcgcgttcggagttagcgagggcgcgtttttcgtcgtcgttagtttagtttagcgatttattttcggtttttaggttaagaggttagattttatcgatcgggttttagtggtaggtttatagtcggtcgtaagggtaattgggtggaaagaaagagaacgcgcgggtaaatttgttggtgatcgtttggggtggttttttttcggttttaggttcggtcgagggtgaggttttttagtcgggtttcgcgagtattttttagaaagaagagaaattagaagcgattttggggttttggtcggtgttttataatttagtcgattgaggcgtgtgacgtaagttttgagagttttgttgaggagtgcgtattttacgttattttcggaaagagtagattttagcgagcgttttttgcgagtcgtgcgttttgtttttgttggtagtgaatttttttagtaattttatatggtagatattattatttttattttgaatttgag

SEQ ID NO: 13250 - DNA, 959 bp, Artificial Sequence
  chemically treated genomic DNA (Homo sapiens) CpG-island No: 13250
ctcaaattcaaaataaaaataataatatctaccatataaaattactaaaaaaattcactaccaacaaaaacaaaacgcacgactcgcaaaaaacgctcgctaaaatctactctttccgaaaataacgtaaaatacgcactcctcaacaaaactctcaaaacttacgtcacacgcctcaatcgactaaattataaaacaccgaccaaaaccccaaaatcgcttctaatttctcttctttctaaaaaatactcgcgaaacccgactaaaaaacctcaccctcgaccgaacctaaaaccgaaaaaaaaccaccccaaacgatcaccaacaaatttacccgcgcgttctctttctttccacccaattacccttacgaccgactataaacctaccactaaaacccgatcgataaaatctaacctcttaacctaaaaaccgaaaataaatcgctaaactaaactaacgacgacgaaaaacgcgccctcgctaactccgaacgcgcccaacaataacaccgcccgcgcccgcccctaaacacttataaatttcgatttccgatttccgcgaaaccgaatcccgcgccgcgacaaaaccaacacaaccaacgcgccataacgaacccgaaaatatactacttcatcaccaaaatcctatacgcccacgaaaaccgcataaccctaaacgcgctactccaaaaaatcgcgctatctaaaccgcaactctataaaatactacaaataaccgaacccgaccgctttataatattaaaaaccgacgacgaaaccgaaatcacccgatcgataataaccaccactcgaacccgaatctaccgtcgcaaatactaccaaaaaccctacgataacctacatctctacaaactcaacttactaaaccgatacaactattcgcaatccgaacgataaatacacccgaaaaaaaaaacgctatccgcaaccgtaatc

SEQ ID NO: 13251 - DNA, 959 bp, Artificial Sequence
  chemically treated genomic DNA (Homo sapiens) CpG-island No: 13251
tttaagtttagggtgaggataataatatttattatgtggagttgttgggaagatttattattaatagaggtagagcgtacggttcgtaggaagcgttcgttagggtttgtttttttcgggaatggcgtggggtgcgtattttttaatagggtttttaggatttgcgttatacgttttagtcggttggattataaaatatcggttagagttttaagatcgtttttagttttttttttttttaaagaatgttcgcggagttcggttggagaattttattttcgatcgagtttagaatcgagagggggttattttaggcggttattagtagatttgttcgcgcgttttttttttttttatttagttgtttttgcggtcggttgtaaatttgttattaggattcggtcggtgagatttagttttttgatttgagagtcgagagtggatcgttgggttgggttaacggcgacggagagcgcgttttcgttgatttcgggcgcgtttagtagtagtatcgttcgcgttcgtttttggatatttgtaagtttcgattttcgattttcgcggaatcgagtttcgcgtcgcggtagagttagtatagttagcgcgttatggcggattcggaggtgtgttgttttattattaaaattttgtgcgtttacgggggtcgtatggttttggacgcgttgttttaggagatcgcgttgtttgagtcgtagttttgtgaggtgttgtaggtggtcgggttcgatcgttttgtggtgttggagatcggcggcgaggtcgggattattcgatcggtggtggttattattcgagttcgggtttgtcgtcgtaagtattgttagagattttgcgataatttgtatttttgtaaatttaatttgttgggtcggtgtaattattcgtagttcgagcggtgagtgtattcggagggaggggcgttgttcgtagtcgtggtt

SEQ ID NO: 13252 - DNA, 959 bp, Artificial Sequence
  chemically treated genomic DNA (Homo sapiens) CpG-island No: 13252
aaccacgactacgaacaacgcccctccctccgaatacactcaccgctcgaactacgaataattacaccgacccaacaaattaaatttacaaaaatacaaattatcgcaaaatctctaacaatacttacgacgacaaacccgaactcgaataataaccaccaccgatcgaataatcccgacctcgccgccgatctccaacaccacaaaacgatcgaacccgaccacctacaacacctcacaaaactacgactcaaacaacgcgatctcctaaaacaacgcgtccaaaaccatacgacccccgtaaacgcacaaaattttaataataaaacaacacacctccgaatccgccataacgcgctaactatactaactctaccgcgacgcgaaactcgattccgcgaaaatcgaaaatcgaaacttacaaatatccaaaaacgaacgcgaacgatactactactaaacgcgcccgaaatcaacgaaaacgcgctctccgtcgccgttaacccaacccaacgatccactctcgactctcaaatcaaaaaactaaatctcaccgaccgaatcctaataacaaatttacaaccgaccgcaaaaacaactaaataaaaaaaaaaaaaacgcgcgaacaaatctactaataaccgcctaaaataaccccctctcgattctaaactcgatcgaaaataaaattctccaaccgaactccgcgaacattctttaaaaaaaaaaaaaactaaaaacgatcttaaaactctaaccgatattttataatccaaccgactaaaacgtataacgcaaatcctaaaaaccctattaaaaaatacgcaccccacgccattcccgaaaaaaacaaaccctaacgaacgcttcctacgaaccgtacgctctacctctattaataataaatcttcccaacaactccacataataaatattattatcctcaccctaaacttaaa

SEQ ID NO: 13253 - DNA, 565 bp, Artificial Sequence
  chemically treated genomic DNA (Homo sapiens) CpG-island No: 13253
gagggagtcgtagtaggttttatcggtgtagtcgttggtattatcgaatttattataggacgggacgtcgaggaaagttacgtcgatatttagttcgtcgttttgtattagatgtatacgatcgtcgtgagagtggatttgtatcggttttgttagtagattacgggagatttttttcgttagtggattacgtaggtcggaggtataaatgcgggtaattacgttttggcgaatgtgttttattagcggcgtatggtaattatttagggagttggacgttagggttaggtttttaaagtttattttcgcgatgacgtttattattatattgacggttaggttatcgttacggaaagcgtgatggaaggaaatcgttatgtcgttttgtaaattagagcgacgaatcgttttttttaggttggcgtatagtttgcgatcgcgcgtttttttagtttggtaggtttgttttggcgagttttggaaagcggtaagatcgtatttagcgcgacgattttaggtcgttattcgtttttgtcgttgagattgtttaattttttgcgttatt

SEQ ID NO: 13254 - DNA, 565 bp, Artificial Sequence
  chemically treated genomic DNA (Homo sapiens) CpG-island No: 13254
aataacgcaaaaaattaaacaatctcaacgacaaaaacgaataacgacctaaaatcgtcgcgctaaatacgatcttaccgctttccaaaactcgccaaaacaaacctaccaaactaaaaaaacgcgcgatcgcaaactatacgccaacctaaaaaaaacgattcgtcgctctaatttacaaaacgacataacgatttccttccatcacgctttccgtaacgataacctaaccgtcaatataataataaacgtcatcgcgaaaataaactttaaaaacctaaccctaacgtccaactccctaaataattaccatacgccgctaataaaacacattcgccaaaacgtaattacccgcatttatacctccgacctacgtaatccactaacgaaaaaaatctcccgtaatctactaacaaaaccgatacaaatccactctcacgacgatcgtatacatctaatacaaaacgacgaactaaatatcgacgtaactttcctcgacgtcccgtcctataataaattcgataataccaacgactacaccgataaaacctactacgactccctc

SEQ ID NO: 13255 - DNA, 565 bp, Artificial Sequence
  chemically treated genomic DNA (Homo sapiens) CpG-island No: 13255
aatgacgtagaaaattgaataattttaacgataagaacgggtagcggtttggaatcgtcgcgttgaatgcgattttgtcgttttttagaattcgttaaagtaaatttattaggttgaaaaagcgcgcgatcgtaaattgtgcgttaatttggaagaagcgattcgtcgttttggtttataggacggtatgacggtttttttttattacgtttttcgtggcggtgatttgatcgttaatatggtgatggacgttatcgcgaagatgggttttaaaaatttgattttggcgtttagttttttgagtgattgttatgcgtcgttggtagaatatattcgttagggcgtggttattcgtatttatattttcggtttgcgtggtttattggcggaagagatttttcgtggtttgttggtagaatcggtgtagatttatttttacggcggtcgtgtgtatttggtatagagcggcgaattgaatatcgacgtggtttttttcggcgtttcgttttgtgatgaattcggtaatgttaacggttatatcggtaaagtttgttgcggttttttt

SEQ ID NO: 13256 - DNA, 565 bp, Artificial Sequence
  chemically treated genomic DNA (Homo sapiens) CpG-island No: 13256
aaaaaaaccgcaacaaactttaccgatataaccgttaacattaccgaattcatcacaaaacgaaacgccgaaaaaaaccacgtcgatattcaattcgccgctctataccaaatacacacgaccgccgtaaaaataaatctacaccgattctaccaacaaaccacgaaaaatctcttccgccaataaaccacgcaaaccgaaaatataaatacgaataaccacgccctaacgaatatattctaccaacgacgcataacaatcactcaaaaaactaaacgccaaaatcaaatttttaaaacccatcttcgcgataacgtccatcaccatattaacgatcaaatcaccgccacgaaaaacgtaataaaaaaaaaccgtcataccgtcctataaaccaaaacgacgaatcgcttcttccaaattaacgcacaatttacgatcgcgcgctttttcaacctaataaatttactttaacgaattctaaaaaacgacaaaatcgcattcaacgcgacgattccaaaccgctacccgttcttatcgttaaaattattcaattttctacgtcatt

SEQ ID NO: 13257 - DNA, 1478 bp, Artificial Sequence
  chemically treated genomic DNA (Homo sapiens) CpG-island No: 13257
  unsure (1336)
ttcgttacgggtacgtagtcgcgtcgtaatattttgcgttacgtatcgttaagggaatattttagtaggtaataagggttatgcggttgttgtttaagtaacgttgttagatgcgtttcgtagattttatttaggtttgtcgtcgtttgtatggggttattggggcgcggtgattgaatgtcgataatcgattattgtggatcgagataacgcgagagtacgttgaattgttaggtaaaatcggacgtaggatggaaataaaatagcgtcgggttattatttttacgtaacggtagaatggtttcgaattttatacgtcgggtgttgttttttttagtattaataatcgttgttagtttggcgatagttgacgcgattattatttgtttcggcgttatttggcgggtaatttgtcgatttaattgcgttgttagttttattgttagtagcgaatgatcgttaagcgcgaagaaattagtatcggtattttgtacgttatattttagtaacgacgagaatgtcgcggcgataatcgttttattgttcgttttcggcgtacgttttggcgtttgtgtttttagtttaggtaacggtaaggttttgcgatttagtttgtcgttggcgttaagtggtaattgtggaagttgtagtagaattatcggtattatatgtggtggtaatgttttacgaagttgcgtttgtaatgcgttggtatttaacggtaggttcgattgcgatattagatagtttattaattgacgcgtattattatcggtggtagtcgtttggttaattatataggcgtgggtaacggtttgttcgatattcggtagcgtttgtattacgcgatcgatttcgtttagttcgatacgttgttcgcgaatttttagttgattattattgcgttcgaggtattttatcgcgtcgttatttagttagcgggtaacgttttcggtacgtatattcgtttatttggggtaaaaggatcggtaataaagcggttggcggttagatcggggcgttcgagatagttttgcgttagttgaatgttagtgagatagagattattcgttatattcggcggtatcggatgtattatcgtattaagaatacgtagattcgtattttatatcggataattaatcggtatattgttgtcgcgtatttgtgttagtttttcgttaaaagtcggatattagttgatatttatcgtcgttttcgtcgggttatatagattatgtaacggcgcgttagttaattgttgttattcgcggtataaattagtcggtaaggttttatattatagaaaattgttttacgtcgcgtattttggcgnacggttgtcgcgtacgaggtaataatgttgtatatcgacgtataagtcgtggtcgtacgtatattcgtataatgttgtatacgacggttcggttttttcgttagtatatagtttgtttcgataacgtagaaaattatacgga

SEQ ID NO: 13258 - DNA, 1478 bp, Artificial Sequence
  chemically treated genomic DNA (Homo sapiens) CpG-island No: 13258
  unsure (143)
tccgtataattttctacgttatcgaaacaaactatatactaacgaaaaaaccgaaccgtcgtatacaacattatacgaatatacgtacgaccacgacttatacgtcgatatacaacattattacctcgtacgcgacaaccgtncgccaaaatacgcgacgtaaaacaattttctataatataaaaccttaccgactaatttataccgcgaataacaacaattaactaacgcgccgttacataatctatataacccgacgaaaacgacgataaatatcaactaatatccgacttttaacgaaaaactaacacaaatacgcgacaacaatataccgattaattatccgatataaaatacgaatctacgtattcttaatacgataatacatccgataccgccgaatataacgaataatctctatctcactaacattcaactaacgcaaaactatctcgaacgccccgatctaaccgccaaccgctttattaccgatccttttaccccaaataaacgaatatacgtaccgaaaacgttacccgctaactaaataacgacgcgataaaatacctcgaacgcaataataatcaactaaaaattcgcgaacaacgtatcgaactaaacgaaatcgatcgcgtaatacaaacgctaccgaatatcgaacaaaccgttacccacgcctatataattaaccaaacgactaccaccgataataatacgcgtcaattaataaactatctaatatcgcaatcgaacctaccgttaaataccaacgcattacaaacgcaacttcgtaaaacattaccaccacatataataccgataattctactacaacttccacaattaccacttaacgccaacgacaaactaaatcgcaaaaccttaccgttacctaaactaaaaacacaaacgccaaaacgtacgccgaaaacgaacaataaaacgattatcgccgcgacattctcgtcgttactaaaatataacgtacaaaataccgatactaatttcttcgcgcttaacgatcattcgctactaacaataaaactaacaacgcaattaaatcgacaaattacccgccaaataacgccgaaacaaataataatcgcgtcaactatcgccaaactaacaacgattattaatactaaaaaaaacaacacccgacgtataaaattcgaaaccattctaccgttacgtaaaaataataacccgacgctattttatttccatcctacgtccgattttacctaacaattcaacgtactctcgcgttatctcgatccacaataatcgattatcgacattcaatcaccgcgccccaataaccccatacaaacgacgacaaacctaaataaaatctacgaaacgcatctaacaacgttacttaaacaacaaccgcataacccttattacctactaaaatattcccttaacgatacgtaacgcaaaatattacgacgcgactacgtacccgtaacgaa

SEQ ID NO: 13259 - DNA, 1478 bp, Artificial Sequence
  chemically treated genomic DNA (Homo sapiens) CpG-island No: 13259
  unsure (143)
ttcgtgtgattttttgcgttatcgaggtaaattgtatgttgacggaaggatcggatcgtcgtatgtagtattatgcgaatatgcgtacgattacgatttgtgcgtcgatgtgtagtattgttgtttcgtacgcgataatcgtncgttagagtgcgcgacgtgaaatagttttttgtagtgtgaggttttatcggttgatttatgtcgcgaatggtaatagttaattggcgcgtcgttgtataatttatatggttcgacggaagcggcggtagatgttagttggtattcggtttttggcgaggaattggtataggtgcgcggtagtagtgtgtcgattggttattcggtatggaatacgggtttgcgtatttttgatgcgatgatgtattcggtgtcgtcgggtgtggcgggtgatttttattttattggtatttaattggcgtagggttatttcggacgtttcgatttgatcgttagtcgttttattgtcgatttttttgttttaggtgaacggatgtacgtatcggagacgttgttcgttggttggataacggcgcggtggagtatttcgggcgtagtgatgattagttaaaaattcgcgggtagcgtatcgaattgggcgaaatcgatcgcgtgatgtaggcgttgtcggatgtcgaataagtcgttatttacgtttgtgtgattaattaggcggttgttatcggtggtgatgcgcgttaattggtgggttatttggtgtcgtaatcgggtttgtcgttggatattagcgtattgtaggcgtagtttcgtgaaatattgttattatatatggtatcggtggttttgttgtaatttttatagttattatttagcgttaacggtaagttggatcgtaaagttttatcgttgtttgaattgaaggtataagcgttagggcgtgcgtcgaaagcgggtagtgaaacgattatcgtcgcggtattttcgtcgttgttggggtgtgacgtgtaggatgtcgatgttgattttttcgcgtttggcggttattcgttattggtaatgaaattggtagcgtagttaagtcggtaggttgttcgttaggtgacgtcggggtaagtgatggtcgcgttaattgtcgttaaattggtaacgattattgatgttgaagaagatagtattcggcgtatgggattcgaaattattttgtcgttgcgtgaaggtaatggttcgacgttgttttgtttttattttgcgttcggttttgtttggtagtttagcgtgttttcgcgttatttcgatttataatggtcgattatcggtatttagttatcgcgttttaatggttttatgtagacggcggtaaatttggatgaagtttgcgaagcgtatttggtaacgttatttgaataataatcgtatggtttttattatttgttggggtatttttttggcggtacgtggcgtagggtattgcggcgcgattgcgtgttcgtggcgaa

SEQ ID NO: 13260 - DNA, 1478 bp, Artificial Sequence
  chemically treated genomic DNA (Homo sapiens) CpG-island No: 13260
  unsure (1336)
ttcgccacgaacacgcaatcgcgccgcaataccctacgccacgtaccgccaaaaaaataccccaacaaataataaaaaccatacgattattattcaaataacgttaccaaatacgcttcgcaaacttcatccaaatttaccgccgtctacataaaaccattaaaacgcgataactaaataccgataatcgaccattataaatcgaaataacgcgaaaacacgctaaactaccaaacaaaaccgaacgcaaaataaaaacaaaacaacgtcgaaccattaccttcacgcaacgacaaaataatttcgaatcccatacgccgaatactatcttcttcaacatcaataatcgttaccaatttaacgacaattaacgcgaccatcacttaccccgacgtcacctaacgaacaacctaccgacttaactacgctaccaatttcattaccaataacgaataaccgccaaacgcgaaaaaatcaacatcgacatcctacacgtcacaccccaacaacgacgaaaataccgcgacgataatcgtttcactacccgctttcgacgcacgccctaacgcttataccttcaattcaaacaacgataaaactttacgatccaacttaccgttaacgctaaataataactataaaaattacaacaaaaccaccgataccatatataataacaatatttcacgaaactacgcctacaatacgctaatatccaacgacaaacccgattacgacaccaaataacccaccaattaacgcgcatcaccaccgataacaaccgcctaattaatcacacaaacgtaaataacgacttattcgacatccgacaacgcctacatcacgcgatcgatttcgcccaattcgatacgctacccgcgaatttttaactaatcatcactacgcccgaaatactccaccgcgccgttatccaaccaacgaacaacgtctccgatacgtacatccgttcacctaaaacaaaaaaatcgacaataaaacgactaacgatcaaatcgaaacgtccgaaataaccctacgccaattaaataccaataaaataaaaatcacccgccacacccgacgacaccgaatacatcatcgcatcaaaaatacgcaaacccgtattccataccgaataaccaatcgacacactactaccgcgcacctataccaattcctcgccaaaaaccgaataccaactaacatctaccgccgcttccgtcgaaccatataaattatacaacgacgcgccaattaactattaccattcgcgacataaatcaaccgataaaacctcacactacaaaaaactatttcacgtcgcgcactctaacgnacgattatcgcgtacgaaacaacaatactacacatcgacgcacaaatcgtaatcgtacgcatattcgcataatactacatacgacgatccgatccttccgtcaacatacaatttacctcgataacgcaaaaaatcacacgaa

SEQ ID NO: 13261 - DNA, 518 bp, Artificial Sequence
  chemically treated genomic DNA (Homo sapiens) CpG-island No: 13261
tggttatgacggatggattggcgattttatcgaagagcgtcgttttaatggtttaaaatagatcgagcgtattttcgaagcgttggtagaagtggggcggtaaaggtatcgtcgtttcggttgcgtggggtatgtttatttttcgtttatcgtcgatgatttcgtcgatatgggcgcgatatagtagttattcgtttttatcggtagttagacgtttagtttggttaacggtaatatcgtaattacgcgtttaattttttgtcgttttgttcggtttgtttttagcgtcgaacgtttgggtaatcgtcgggtcgcgtttttcgattttacgattcggttgcgttttcgttaggttagttatttttagcgttagacgacgcggatagtaaattattgaacggtgtcgtgtgcgaggttagcgttatttagtttcgtagtaaagttcgtagtaaaggatttagttaggttgcgtagtgtttttggtggtagttttttagtgtcgatttttattagaaaag

SEQ ID NO: 13262 - DNA, 518 bp, Artificial Sequence
  chemically treated genomic DNA (Homo sapiens) CpG-island No: 13262
cttttctaataaaaatcgacactaaaaaactaccaccaaaaacactacgcaacctaactaaatcctttactacgaactttactacgaaactaaataacgctaacctcgcacacgacaccgttcaataatttactatccgcgtcgtctaacgctaaaaataactaacctaacgaaaacgcaaccgaatcgtaaaatcgaaaaacgcgacccgacgattacccaaacgttcgacgctaaaaacaaaccgaacaaaacgacaaaaaattaaacgcgtaattacgatattaccgttaaccaaactaaacgtctaactaccgataaaaacgaataactactatatcgcgcccatatcgacgaaatcatcgacgataaacgaaaaataaacataccccacgcaaccgaaacgacgatacctttaccgccccacttctaccaacgcttcgaaaatacgctcgatctattttaaaccattaaaacgacgctcttcgataaaatcgccaatccatccgtcataacca

SEQ ID NO: 13263 - DNA, 518 bp, Artificial Sequence
  chemically treated genomic DNA (Homo sapiens) CpG-island No: 13263
tttttttggtggaaatcggtattgaagagttgttattaaaagtattgcgtagtttggttgagttttttgttgcgaattttattgcggagttggataacgttggtttcgtatacggtatcgtttaatggtttgttgttcgcgtcgtttggcgttgaaagtagttaatttggcggaagcgtaatcggatcgtgaaatcgaaaaacgcggttcggcgattgtttaggcgttcgacgttgaaggtaaatcgagtaaagcggtagaaggttgggcgcgtggttgcggtattatcgttgattaggttgagcgtttgattatcgataaaggcgaatggttgttgtatcgcgtttatgtcggcgaggttatcggcggtaagcggaaggtaaatatgttttacgtagtcggaacgacgatgtttttatcgttttatttttgttagcgtttcgagaatgcgttcgatttgttttaagttattaagacgacgtttttcgataaagtcgttaatttattcgttatagtta

SEQ ID NO: 13264 - DNA, 518 bp, Artificial Sequence
  chemically treated genomic DNA (Homo sapiens) CpG-island No: 13264
taactataacgaataaattaacgactttatcgaaaaacgtcgtcttaataacttaaaacaaatcgaacgcattctcgaaacgctaacaaaaataaaacgataaaaacatcgtcgttccgactacgtaaaacatatttaccttccgcttaccgccgataacctcgccgacataaacgcgatacaacaaccattcgcctttatcgataatcaaacgctcaacctaatcaacgataataccgcaaccacgcgcccaaccttctaccgctttactcgatttaccttcaacgtcgaacgcctaaacaatcgccgaaccgcgtttttcgatttcacgatccgattacgcttccgccaaattaactactttcaacgccaaacgacgcgaacaacaaaccattaaacgataccgtatacgaaaccaacgttatccaactccgcaataaaattcgcaacaaaaaactcaaccaaactacgcaatacttttaataacaactcttcaataccgatttccaccaaaaaaa

SEQ ID NO: 13265 - DNA, 559 bp, Artificial Sequence
  chemically treated genomic DNA (Homo sapiens) CpG-island No: 13265
tcgtagcgttatgtagttgtcgttagaaatcgtttacgtttagacgttgtattaaattggcgcgttggtaacgattgttcgtgcgtaaggcggcgtaatgcgttatgttaaatcgtacggtatgttgtataattaggcggcgaaagaagtataattggtagacgttatcgttagagcggtatacgtttgcgatttagtattgattttcgtcgggttggcgggaagcgagttgattcgtgtaggtaagtaatatggtttgataacgcgcgatgaagtgtttgtcgatcgcggttattaggttgacggttcgttggtgtcgcgaacgtagttaggcgcgttgattgaaaacgaagaatatgcgttggcgtaaacgttggagatggtgtaatacggtagatttaaaagtattatcggcgaatgggtaacggtcgcggcgtaaacggtttgtttgtatggcgacggcgagtacgtattggcgttcgttcgtcgtttacgttttgtatttgtcgaataggggattgttgtcgtagtataatttcgattaataaagaatgaaaaa

SEQ ID NO: 13266 - DNA, 559 bp, Artificial Sequence
  chemically treated genomic DNA (Homo sapiens) CpG-island No: 13266
tttttcattctttattaatcgaaattatactacgacaacaatcccctattcgacaaatacaaaacgtaaacgacgaacgaacgccaatacgtactcgccgtcgccatacaaacaaaccgtttacgccgcgaccgttacccattcgccgataatacttttaaatctaccgtattacaccatctccaacgtttacgccaacgcatattcttcgttttcaatcaacgcgcctaactacgttcgcgacaccaacgaaccgtcaacctaataaccgcgatcgacaaacacttcatcgcgcgttatcaaaccatattacttacctacacgaatcaactcgcttcccgccaacccgacgaaaatcaatactaaatcgcaaacgtataccgctctaacgataacgtctaccaattatacttctttcgccgcctaattatacaacataccgtacgatttaacataacgcattacgccgccttacgcacgaacaatcgttaccaacgcgccaatttaatacaacgtctaaacgtaaacgatttctaacgacaactacataacgctacga

SEQ ID NO: 13267 - DNA, 559 bp, Artificial Sequence
  chemically treated genomic DNA (Homo sapiens) CpG-island No: 13267
ttttttattttttattaatcggggttatgttgcgataataattttttattcggtaaatgtagagcgtagacggcgagcgaacgttagtgcgtgttcgtcgtcgttatgtaggtagatcgtttgcgtcgcgatcgttgtttattcgtcggtgatatttttgaatttgtcgtgttgtattatttttagcgtttgcgttagcgtatgtttttcgtttttaattaacgcgtttgattgcgttcgcggtattagcgagtcgttagtttgataatcgcgatcggtaaatattttatcgcgcgttgttagattatattgtttgtttgtacgaattagttcgtttttcgttagttcgacgagaattaatgttggatcgtaagcgtatatcgttttagcgatggcgtttgttagttgtgtttttttcgtcgtttggttgtataatatgtcgtgcggtttgatatgacgtattacgtcgttttgcgtacgggtaatcgttgttagcgcgttaatttgatatagcgtttgggcgtaaacggtttttggcggtagttgtatggcgttgcga

SEQ ID NO: 13268 - DNA, 559 bp, Artificial Sequence
  chemically treated genomic DNA (Homo sapiens) CpG-island No: 13268
tcgcaacgccatacaactaccgccaaaaaccgtttacgcccaaacgctatatcaaattaacgcgctaacaacgattacccgtacgcaaaacgacgtaatacgtcatatcaaaccgcacgacatattatacaaccaaacgacgaaaaaaacacaactaacaaacgccatcgctaaaacgatatacgcttacgatccaacattaattctcgtcgaactaacgaaaaacgaactaattcgtacaaacaaacaatataatctaacaacgcgcgataaaatatttaccgatcgcgattatcaaactaacgactcgctaataccgcgaacgcaatcaaacgcgttaattaaaaacgaaaaacatacgctaacgcaaacgctaaaaataatacaacacgacaaattcaaaaatatcaccgacgaataaacaacgatcgcgacgcaaacgatctacctacataacgacgacgaacacgcactaacgttcgctcgccgtctacgctctacatttaccgaataaaaaattattatcgcaacataaccccgattaataaaaaataaaaaa

SEQ ID NO: 13269 - DNA, 580 bp, Artificial Sequence
  chemically treated genomic DNA (Homo sapiens) CpG-island No: 13269
tgttggtggcgtggtacggtattcgtcgtatgttgtttatttcgttggtaaaaattattgtttatattcgcgaaatcgtcggtggtaatttggcgaatattttgattattgacgggcgtagtgaaatgggcgatttggcgtagagcgttttatatatgtaacgttttttgattgatatcgttatttatgttcgcgaaggtttagatgttatttatgtcggtattcgtgaaattgcggcgggtaatatcgattttttttttcgtattgaatagtaggtattcgcgttggaagaaattgttcgtagtatggagtagtttatttagttattacgcgtttggtagtattttgatgttagatagtcgtagtaggtttgcgaattgttttatgtcgcgttgtattattcggagaatttaagcgaaggtcgtttatcggggtaaattgataacgatatttggttttggtaggcgatatgcgttaacgcgtagggcgatgaaattgaagcgacgcgttgtttacgtttggcggcgatcggcgatcgtattattaatatttatagttattataacgattagtcggttga

SEQ ID NO: 13270 - DNA, 580 bp, Artificial Sequence
  chemically treated genomic DNA (Homo sapiens) CpG-island No: 13270
tcaaccgactaatcgttataataactataaatattaataatacgatcgccgatcgccgccaaacgtaaacaacgcgtcgcttcaatttcatcgccctacgcgttaacgcatatcgcctaccaaaaccaaatatcgttatcaatttaccccgataaacgaccttcgcttaaattctccgaataatacaacgcgacataaaacaattcgcaaacctactacgactatctaacatcaaaatactaccaaacgcgtaataactaaataaactactccatactacgaacaatttcttccaacgcgaatacctactattcaatacgaaaaaaaaaatcgatattacccgccgcaatttcacgaataccgacataaataacatctaaaccttcgcgaacataaataacgatatcaatcaaaaaacgttacatatataaaacgctctacgccaaatcgcccatttcactacgcccgtcaataatcaaaatattcgccaaattaccaccgacgatttcgcgaatataaacaataatttttaccaacgaaataaacaacatacgacgaataccgtaccacgccaccaaca

SEQ ID NO: 13271 - DNA, 580 bp, Artificial Sequence
  chemically treated genomic DNA (Homo sapiens) CpG-island No: 13271
ttaatcggttgatcgttgtaataattgtgaatgttaatagtgcgatcgtcggtcgtcgttagacgtaaataacgcgtcgttttagttttatcgttttgcgcgttggcgtatatcgtttgttagaattagatgtcgttattagtttgtttcggtaaacggttttcgtttaaatttttcggataatgtagcgcggtatgaagtagttcgtaggtttgttgcggttgtttggtattaagatgttgttaagcgcgtaataattgggtgagttgttttatgttgcgggtagttttttttagcgcggatgtttgttgtttagtacgggaggaaagatcggtgttgttcgtcgtaattttacgggtatcggtatagatggtatttgaattttcgcggatatgagtgacggtgttagttaaagagcgttgtatatgtgaaacgttttgcgttaggtcgtttattttattgcgttcgttaatggttagggtattcgttaggttattatcggcgatttcgcgaatgtgagtaataatttttgttagcggagtaagtaatatacggcgaatgtcgtattacgttattagta

SEQ ID NO: 13272 - DNA, 580 bp, Artificial Sequence
  chemically treated genomic DNA (Homo sapiens) CpG-island No: 13272
tactaataacgtaatacgacattcgccgtatattacttactccgctaacaaaaattattactcacattcgcgaaatcgccgataataacctaacgaataccctaaccattaacgaacgcaataaaataaacgacctaacgcaaaacgtttcacatatacaacgctctttaactaacaccgtcactcatatccgcgaaaattcaaataccatctataccgatacccgtaaaattacgacgaacaacaccgatctttcctcccgtactaaacaacaaacatccgcgctaaaaaaaactacccgcaacataaaacaactcacccaattattacgcgcttaacaacatcttaataccaaacaaccgcaacaaacctacgaactacttcataccgcgctacattatccgaaaaatttaaacgaaaaccgtttaccgaaacaaactaataacgacatctaattctaacaaacgatatacgccaacgcgcaaaacgataaaactaaaacgacgcgttatttacgtctaacgacgaccgacgatcgcactattaacattcacaattattacaacgatcaaccgattaa

SEQ ID NO: 13273 - DNA, 665 bp, Artificial Sequence
  chemically treated genomic DNA (Homo sapiens) CpG-island No: 13273
cgggtagtgttattggtatgataattcgaatattagtgatgcgtttatttcggttttttcgtattaggagtagttttttttagttttttagcgtttacggtagatagggatcgaattgttttacgacgttttaaatttagttcgcgtattattttaaatggcgaatagttatatttttgggatttattttagttttaggatgtgatgagtcgatatcgaggtgttaaatatcgtcgtcgatatgaatttttgggcggtattagtttgttattttcggagtattttttattcgttgagcgatggtttttttatttagaattatcggattattatgatttgttttcgtatttgttcgcgtcgttacgttcgtagttaagttggtttatgttattgtattaattttttgatgttcgattaggattagttaattttcgttattatttaggcgttttgtaaaaagtacgaagggcgggaatattcgttcgtgtaggcgttgattgatgaatatcgtttcgatttggtgattttgttggagaataatacgtcgtgggtggcggatggtttacgtagtttcggtagttcggtggatcgtaaagagttttagaatttgttggtggagatgttcgaaggaataatatcgaatttgtgcgggttgaagaggaaga

SEQ ID NO: 13274 - DNA, 665 bp, Artificial Sequence
  chemically treated genomic DNA (Homo sapiens) CpG-island No: 13274
tcttcctcttcaacccgcacaaattcgatattattccttcgaacatctccaccaacaaattctaaaactctttacgatccaccgaactaccgaaactacgtaaaccatccgccacccacgacgtattattctccaacaaaatcaccaaatcgaaacgatattcatcaatcaacgcctacacgaacgaatattcccgcccttcgtactttttacaaaacgcctaaataataacgaaaattaactaatcctaatcgaacatcaaaaaattaatacaataacataaaccaacttaactacgaacgtaacgacgcgaacaaatacgaaaacaaatcataataatccgataattctaaataaaaaaaccatcgctcaacgaataaaaaatactccgaaaataacaaactaataccgcccaaaaattcatatcgacgacgatatttaacacctcgatatcgactcatcacatcctaaaactaaaataaatcccaaaaatataactattcgccatttaaaataatacgcgaactaaatttaaaacgtcgtaaaacaattcgatccctatctaccgtaaacgctaaaaaactaaaaaaaactactcctaatacgaaaaaaccgaaataaacgcatcactaatattcgaattatcataccaataacactacccg

SEQ ID NO: 13275 - DNA, 665 bp, Artificial Sequence
  chemically treated genomic DNA (Homo sapiens) CpG-island No: 13275
tttttttttttaattcgtataaattcgatattgttttttcgagtatttttattagtaagttttggaattttttgcgatttatcgaattgtcgaggttgcgtaaattattcgttatttacggcgtgttgttttttagtaggattattagatcgaaacggtatttattaattagcgtttgtacgaacggatgttttcgtttttcgtattttttgtagaacgtttgagtggtgacgaaggttggttaattttggtcggatattaggaggttagtgtaatggtataagttagtttgattgcgagcgtgacggcgcgagtaggtgcgaaagtaggttatagtgattcggtggttttgaatggaagggttatcgtttaacggataaaaggtatttcggggataataggttgatatcgtttaagagtttatatcgacggcggtgtttggtatttcgatgtcggtttattatattttggggttgaagtaggttttaagggtatggttgttcgttatttaaagtggtacgcgagttgggtttagaacgtcgtgagatagttcggtttttatttgtcgtgggcgttggagaattgaggggggttgtttttagtacgagaggatcggagtggacgtattattggtgttcgggttgttatgttaatggtattgttcg

SEQ ID NO: 13276 - DNA, 665 bp, Artificial Sequence
  chemically treated genomic DNA (Homo sapiens) CpG-island No: 13276
cgaacaataccattaacataacaacccgaacaccaataatacgtccactccgatcctctcgtactaaaaacaacccccctcaattctccaacgcccacgacaaataaaaaccgaactatctcacgacgttctaaacccaactcgcgtaccactttaaataacgaacaaccatacccttaaaacctacttcaaccccaaaatataataaaccgacatcgaaataccaaacaccgccgtcgatataaactcttaaacgatatcaacctattatccccgaaataccttttatccgttaaacgataacccttccattcaaaaccaccgaatcactataacctactttcgcacctactcgcgccgtcacgctcgcaatcaaactaacttataccattacactaacctcctaatatccgaccaaaattaaccaaccttcgtcaccactcaaacgttctacaaaaaatacgaaaaacgaaaacatccgttcgtacaaacgctaattaataaataccgtttcgatctaataatcctactaaaaaacaacacgccgtaaataacgaataatttacgcaacctcgacaattcgataaatcgcaaaaaattccaaaacttactaataaaaatactcgaaaaaacaatatcgaatttatacgaattaaaaaaaaaaa

SEQ ID NO: 13277 - DNA, 534 bp, Artificial Sequence
  chemically treated genomic DNA (Homo sapiens) CpG-island No: 13277
  unsure (345)
gtcgatcgttattatggtcggcgtattagatgcgcgcggttataacgttattgttatcgattcggtcgaaaaattgttggtagtggggtattatttcgaatttatcgtcgatattgttgagtttattcgtcgtattgcggtaagtcgtatttcggttgattatatggtgttgatggtaggttttatcgtcggtaatgaaaaaggcgaattggtggtgtttggacgtaacggtttcgattattttgttgcggtgttggttgtttgtttacgcgtcgattgttgcgagatttggacggacgttgacggggtttatatttgcgattcgcgttaggtgttcgatgcgangttgttgaagtcgatgttttattaggaagcgatggagtttttttatttcggcgttaaagttttttattttcgtattattatttttatcgtttagttttagattttttgtttgattaaaaatatcggaaatttttaagtattaggtacgtttattggtgttagtcgtgatgaagacgaattatcggttaa

SEQ ID NO: 13278 - DNA, 534 bp, Artificial Sequence
  chemically treated genomic DNA (Homo sapiens) CpG-island No: 13278
  unsure (190)
ttaaccgataattcgtcttcatcacgactaacaccaataaacgtacctaatacttaaaaatttccgatatttttaatcaaacaaaaaatctaaaactaaacgataaaaataataatacgaaaataaaaaactttaacgccgaaataaaaaaactccatcgcttcctaataaaacatcgacttcaacaacntcgcatcgaacacctaacgcgaatcgcaaatataaaccccgtcaacgtccgtccaaatctcgcaacaatcgacgcgtaaacaaacaaccaacaccgcaacaaaataatcgaaaccgttacgtccaaacaccaccaattcgcctttttcattaccgacgataaaacctaccatcaacaccatataatcaaccgaaatacgacttaccgcaatacgacgaataaactcaacaatatcgacgataaattcgaaataataccccactaccaacaatttttcgaccgaatcgataacaataacgttataaccgcgcgcatctaatacgccgaccataataacgatcgac

SEQ ID NO: 13279 - DNA, 534 bp, Artificial Sequence
  chemically treated genomic DNA (Homo sapiens) CpG-island No: 13279
  unsure (190)
ttgatcggtaattcgtttttattacggttggtattaatgagcgtatttggtgtttgaggattttcggtatttttaattaggtaagggatttggaattgggcgatgggggtaatggtgcgggggtgaagaattttagcgtcgaagtaggaaagttttatcgttttttggtaggatatcgattttaataatntcgtatcgggtatttgacgcgggtcgtaggtatagatttcgttaacgttcgtttaaatttcgtaataatcggcgcgtaaataggtagttagtatcgtagtagagtagtcggaatcgttgcgtttaagtattattagttcgttttttttattatcggcggtgaaatttgttattagtattatgtgattagtcggaatgcggtttgtcgtaatacggcgggtggatttagtaatatcgacggtagattcgaggtaatgttttattgttagtagtttttcgatcggatcgataatagtaacgttgtgatcgcgcgtatttaatacgtcggttataatggcgatcgat

SEQ ID NO: 13280 - DNA, 534 bp, Artificial Sequence
  chemically treated genomic DNA (Homo sapiens) CpG-island No: 13280
  unsure (345)
atcgatcgccattataaccgacgtattaaatacgcgcgatcacaacgttactattatcgatccgatcgaaaaactactaacaataaaacattacctcgaatctaccgtcgatattactaaatccacccgccgtattacgacaaaccgcattccgactaatcacataatactaataacaaatttcaccgccgataataaaaaaaacgaactaataatacttaaacgcaacgattccgactactctactacgatactaactacctatttacgcgccgattattacgaaatttaaacgaacgttaacgaaatctatacctacgacccgcgtcaaatacccgatacganattattaaaatcgatatcctaccaaaaaacgataaaactttcctacttcgacgctaaaattcttcacccccgcaccattacccccatcgcccaattccaaatcccttacctaattaaaaataccgaaaatcctcaaacaccaaatacgctcattaataccaaccgtaataaaaacgaattaccgatcaa

SEQ ID NO: 13281 - DNA, 541 bp, Artificial Sequence
  chemically treated genomic DNA (Homo sapiens) CpG-island No: 13281
ttgttttgcgcgacgaatattcggaagtgttgaatgtcgataataaaggtttgcgcgattatatcgaattggtaattcgttggttgtggcgtaagttggacgaaggtaaaacgttatcgttgaaatcgttgtcgttgaaagtggtttattatatttcgtgttatatggaaaaaatgggttggacgttttatattttggagttgttgcgtaatatttcggggtttgagttaacggtgttggatttttagtgttgcggtattgcgggtatttacggttttaaaaaagagaattattttattttataagttatcggcgtattattgtttcgttagatagaagaaagcggcgtagatttggtggttatcgattgcgaaatttgtaaatggtagattgagatgtttataagttttcgttgcgaatattcgattacgttattggtttaggcgttggtttaaatttttttttgatgttcggtaagtatgtggttatcgggtatttttgcgtatacgatttcgtgtttaatgtatgcgttgtaattagt

SEQ ID NO: 13282 - DNA, 541 bp, Artificial Sequence
  chemically treated genomic DNA (Homo sapiens) CpG-island No: 13282
actaattacaacgcatacattaaacacgaaatcgtatacgcaaaaatacccgataaccacatacttaccgaacatcaaaaaaaaatttaaaccaacgcctaaaccaataacgtaatcgaatattcgcaacgaaaacttataaacatctcaatctaccatttacaaatttcgcaatcgataaccaccaaatctacgccgctttcttctatctaacgaaacaataatacgccgataacttataaaataaaataattctcttttttaaaaccgtaaatacccgcaataccgcaacactaaaaatccaacaccgttaactcaaaccccgaaatattacgcaacaactccaaaatataaaacgtccaacccattttttccatataacacgaaatataataaaccactttcaacgacaacgatttcaacgataacgttttaccttcgtccaacttacgccacaaccaacgaattaccaattcgatataatcgcgcaaacctttattatcgacattcaacacttccgaatattcgtcgcgcaaaacaa

SEQ ID NO: 13283 - DNA, 541 bp, Artificial Sequence
  chemically treated genomic DNA (Homo sapiens) CpG-island No: 13283
attggttgtaacgtatatattgggtacggaatcgtgtacgtaaaaatgttcggtaattatatgtttatcgggtattagaaaggagtttaagttagcgtttgggttagtagcgtaatcggatgttcgtagcgaagatttgtggatattttaatttgttatttataggtttcgtagtcggtgattattagatttgcgtcgtttttttttatttggcggaatagtggtgcgtcgatggtttgtgaggtggggtagtttttttttttgaaatcgtaagtattcgtaatatcgtagtattgggaatttagtatcgttaatttaagtttcgggatgttacgtaatagttttagggtgtagagcgtttagtttattttttttatatggtacggagtgtgataaattatttttagcggtagcggttttagcggtaacgttttgttttcgtttagtttgcgttatagttagcgggttgttagttcgatatgatcgcgtaagtttttgttgtcgatatttagtattttcgggtattcgtcgcgtagggtaa

SEQ ID NO: 13284 - DNA, 541 bp, Artificial Sequence
  chemically treated genomic DNA (Homo sapiens) CpG-island No: 13284
ttaccctacgcgacgaatacccgaaaatactaaatatcgacaacaaaaacttacgcgatcatatcgaactaacaacccgctaactataacgcaaactaaacgaaaacaaaacgttaccgctaaaaccgctaccgctaaaaataatttatcacactccgtaccatataaaaaaaataaactaaacgctctacaccctaaaactattacgtaacatcccgaaacttaaattaacgatactaaattcccaatactacgatattacgaatacttacgatttcaaaaaaaaaaactaccccacctcacaaaccatcgacgcaccactattccgccaaataaaaaaaaacgacgcaaatctaataatcaccgactacgaaacctataaataacaaattaaaatatccacaaatcttcgctacgaacatccgattacgctactaacccaaacgctaacttaaactcctttctaatacccgataaacatataattaccgaacatttttacgtacacgattccgtacccaatatatacgttacaaccaat

SEQ ID NO: 13285 - DNA, 603 bp, Artificial Sequence
  chemically treated genomic DNA (Homo sapiens) CpG-island No: 13285
ggtggtcgagtcgtaagcgatggttattttgtcgtagattttcggtagttagaacgggaaagtcgaatatgtatattttgaaggttggaaagtgtgggagaacgttagcgcgttgtagtaaataatgtttttgatgagtgaaaagaatgagtgatgtcgtcgagatattagattttttgcgtttgtttttatagggtgagcgtttgattgaagtttttgtcggtataggtaaaaatttttacgattgcggcgttttatttgcgtttgttatttggattaggcggtttcgcgttttttttcgttcgttgatcgttgaagaattgttggtggttatttttatcgaggttgttacggtagaattgcgcggtcgtattcgtagtaatatttacgagttgcgtatcgtttgtttgcgtgaaattatcgataatttattgtacgaacgtttgttggaagagatcgacgataaagcgtaagtcgcgtagtggttgttgttagtcgaacggtagatggatgaagcggtagtttttattatttacggtttttgttagcgtatgtttaatttgaatgtttttgaattcggtatgttgtttgagtagtagttga

SEQ ID NO: 13286 - DNA, 603 bp, Artificial Sequence
  chemically treated genomic DNA (Homo sapiens) CpG-island No: 13286
tcaactactactcaaacaacataccgaattcaaaaacattcaaattaaacatacgctaacaaaaaccgtaaataataaaaactaccgcttcatccatctaccgttcgactaacaacaaccactacgcgacttacgctttatcgtcgatctcttccaacaaacgttcgtacaataaattatcgataatttcacgcaaacaaacgatacgcaactcgtaaatattactacgaatacgaccgcgcaattctaccgtaacaacctcgataaaaataaccaccaacaattcttcaacgatcaacgaacgaaaaaaaacgcgaaaccgcctaatccaaataacaaacgcaaataaaacgccgcaatcgtaaaaatttttacctataccgacaaaaacttcaatcaaacgctcaccctataaaaacaaacgcaaaaaatctaatatctcgacgacatcactcattcttttcactcatcaaaaacattatttactacaacgcgctaacgttctcccacactttccaaccttcaaaatatacatattcgactttcccgttctaactaccgaaaatctacgacaaaataaccatcgcttacgactcgaccacc

SEQ ID NO: 13287 - DNA, 603 bp, Artificial Sequence
  chemically treated genomic DNA (Homo sapiens) CpG-island No: 13287
ttagttgttgtttaaatagtatgtcggatttaaaggtatttaggttgagtatgcgttggtaaaagtcgtgaatagtaaagattgtcgttttatttatttgtcgttcggttaataataattattgcgcggtttgcgttttatcgtcgattttttttagtaggcgttcgtatagtggattgtcggtggttttacgtagataggcgatgcgtaattcgtggatattgttacggatacgatcgcgtaattttgtcgtggtagtttcggtaaaggtgattattagtagttttttaacggttagcgggcggggaaaggcgcggaatcgtttagtttaagtaataggcgtaaatagagcgtcgtaatcgtaaaggtttttgtttgtgtcggtagaggttttaattaggcgtttattttgtaagggtaagcgtaaaggatttagtgtttcggcgatattatttattttttttatttattaggggtattgtttgttgtaacgcgttgacgtttttttatattttttagtttttagggtgtatatattcggttttttcgttttggttgtcggaaatttgcgatagaatagttatcgtttgcggttcgattatt

SEQ ID NO: 13288 - DNA, 603 bp, Artificial Sequence
  chemically treated genomic DNA (Homo sapiens) CpG-island No: 13288
aataatcgaaccgcaaacgataactattctatcgcaaatttccgacaaccaaaacgaaaaaaccgaatatatacaccctaaaaactaaaaaatataaaaaaacgtcaacgcgttacaacaaacaatacccctaataaataaaaaaaataaataatatcgccgaaacactaaatcctttacgcttacccttacaaaataaacgcctaattaaaacctctaccgacacaaacaaaaacctttacgattacgacgctctatttacgcctattacttaaactaaacgattccgcgcctttccccgcccgctaaccgttaaaaaactactaataatcacctttaccgaaactaccacgacaaaattacgcgatcgtatccgtaacaatatccacgaattacgcatcgcctatctacgtaaaaccaccgacaatccactatacgaacgcctactaaaaaaaatcgacgataaaacgcaaaccgcgcaataattattattaaccgaacgacaaataaataaaacgacaatctttactattcacgacttttaccaacgcatactcaacctaaatacctttaaatccgacatactatttaaacaacaactaa

SEQ ID NO: 13289 - DNA, 584 bp, Artificial Sequence
  chemically treated genomic DNA (Homo sapiens) CpG-island No: 13289
cgtcgatttttggcgtcgttattgttattcgttgtcgcgtgaaatagtttaggtcgtttttgaaatttggaaagggtcgtagcgttgttgcgcgatattaatcgttatttgtaaggcgaacgatcggttattaaagtatcgtcgttcgatgatgaaacgttggtttttcgttacgcgtaaattgtggcgcgttgatatcggttagattattattgttattcgtatttaggcgggtattgtttagcggttggcggtagataacgttagcgtgaagtagagcgggtagtttatcgaataattatcgttgggcgtttacgacgcggtgcgtcgtttgttgggtcggttacgttcgcgttagttggatgattttattttggagtaggttattcgtttattgatgcgggaaatggagttggaagggcgcggtattgttagttatttcgaatggcgaatcgatgaattagcgttaagcgaaaattagcgcgtgacgttgtttcgtgtttgttaggaagggttgaataatattgtgaaatatgttgatgttagcgcggttattttgtaaggttggtagtaggatgaacggt

SEQ ID NO: 13290 - DNA, 584 bp, Artificial Sequence
  chemically treated genomic DNA (Homo sapiens) CpG-island No: 13290
accgttcatcctactaccaaccttacaaaataaccgcgctaacatcaacatatttcacaatattattcaacccttcctaacaaacacgaaacaacgtcacgcgctaattttcgcttaacgctaattcatcgattcgccattcgaaataactaacaataccgcgcccttccaactccatttcccgcatcaataaacgaataacctactccaaaataaaatcatccaactaacgcgaacgtaaccgacccaacaaacgacgcaccgcgtcgtaaacgcccaacgataattattcgataaactacccgctctacttcacgctaacgttatctaccgccaaccgctaaacaatacccgcctaaatacgaataacaataataatctaaccgatatcaacgcgccacaatttacgcgtaacgaaaaaccaacgtttcatcatcgaacgacgatactttaataaccgatcgttcgccttacaaataacgattaatatcgcgcaacaacgctacgaccctttccaaatttcaaaaacgacctaaactatttcacgcgacaacgaataacaataacgacgccaaaaatcgacg

SEQ ID NO: 13291 - DNA, 584 bp, Artificial Sequence
  chemically treated genomic DNA (Homo sapiens) CpG-island No: 13291
atcgtttattttgttgttagttttgtagggtgatcgcgttggtattagtatgttttataatgttgtttagttttttttggtagatacgaaatagcgttacgcgttggttttcgtttaacgttgatttatcgattcgttattcgagatggttgataatatcgcgtttttttagttttatttttcgtattagtgagcggatggtttgttttagggtgagattatttaattggcgcggacgtaatcgatttaataaacggcgtatcgcgtcgtaaacgtttagcgatagttgttcgatgagttgttcgttttgttttacgttggcgttatttgtcgttagtcgttgaataatgttcgtttgagtacgaatagtagtgatggtttgatcgatattaacgcgttataatttgcgcgtgacgggaagttagcgttttattatcgggcggcggtgttttgataatcggtcgttcgttttgtagataacgattaatatcgcgtagtaacgttgcggttttttttaggttttaaagacgatttgggttattttacgcggtagcgggtagtagtggcgacgttagaaatcggcg

SEQ ID NO: 13292 - DNA, 584 bp, Artificial Sequence
  chemically treated genomic DNA (Homo sapiens) CpG-island No: 13292
cgccgatttctaacgtcgccactactacccgctaccgcgtaaaataacccaaatcgtctttaaaacctaaaaaaaaccgcaacgttactacgcgatattaatcgttatctacaaaacgaacgaccgattatcaaaacaccgccgcccgataataaaacgctaacttcccgtcacgcgcaaattataacgcgttaatatcgatcaaaccatcactactattcgtactcaaacgaacattattcaacgactaacgacaaataacgccaacgtaaaacaaaacgaacaactcatcgaacaactatcgctaaacgtttacgacgcgatacgccgtttattaaatcgattacgtccgcgccaattaaataatctcaccctaaaacaaaccatccgctcactaatacgaaaaataaaactaaaaaaacgcgatattatcaaccatctcgaataacgaatcgataaatcaacgttaaacgaaaaccaacgcgtaacgctatttcgtatctaccaaaaaaaactaaacaacattataaaacatactaataccaacgcgatcaccctacaaaactaacaacaaaataaacgat

SEQ ID NO: 13293 - DNA, 1335 bp, Artificial Sequence
  chemically treated genomic DNA (Homo sapiens) CpG-island No: 13293
gggaagcgcgggttattttttttttttttttatttttcgtttttttttcgcgcgttattcgtttttttttttttttcgttaataacggttgggtggttgggggaggagggaaggtggtttcggcggagtttgggcgggcgttttttatttagtcgttagtcgtcgtgggagtcggaggatggcggcggtaatagcggtcgtcggagaggaggcggtggggaggttcggggcgttaagcgcgacggtagaaagcggtagcggttcgttatggcgtatcgaaattagcggtagtcgtacggttatttgagtcgtttttttttgttggagttagcgaggggtgtttgtagtcgggatattttttttttcgcgttttttcgtttttcgcgttcgcgttaggtcgttagttttgtttatcgtttcgagaagagcgcgtcgggcgtcgattgtttttcggggcgtcgagcggcggttttggacgtgcgggggtttttttgggtcggtcgcggcgtttcggttttgttttttagttttcgcgttcgtttttatttttttggttttcggggtatagcgcgcggttcggttcggagtagggcggataggagcgttaggtagagcggtttggtcgtcgttaacggcgtacgcgcgcgtattcggttcggatttattttttagtagtagcggagtggttaatgggatcgggattagggttgggggtcggggggtcgtcgtcgcggggaggttttcggtttaggtgtttagcgtttattagtttagcgtttcgggcggcgtcgcggtggtttcggtagtttcgcgtagttgttttttggggggcgtggcgtcgggggttcgcgcggcgtagtttttttttagtatttcgaatagtagtagcggttcgtaggattcgtaggattcggtgtatagtagttttgaggatggcggcggcggcggttagtatcggtcggtgggcgggagtttcggcgggtcgcgtttggtgatcggttttttattagtttattttttatcgcgtatgtttggaggtacggatttttttttacgcgttcgcgttcggttttttcgcggttgtacgtgggtcgtggtcgtcggttatttttatcgtttttttttttttttttcgtcggggcgtcgggggttgtttttcggtttagttcgttaggggttgtttttcggtttagttcgcgtcggtttttattttgggaagaaattcggtacgtaatatttgcggtgtcgttgtcgcgtagatacgtggttttgtttttaaatatcgtgagtatttatattttagcgggtatttagtagagatagtttattttttag

SEQ ID NO: 13294 - DNA, 1335 bp, Artificial Sequence
  chemically treated genomic DNA (Homo sapiens) CpG-island No: 13294
ctaaaaaataaactatctctactaaatacccgctaaaatataaatactcacgatatttaaaaacaaaaccacgtatctacgcgacaacgacaccgcaaatattacgtaccgaatttcttcccaaaataaaaaccgacgcgaactaaaccgaaaaacaacccctaacgaactaaaccgaaaaacaacccccgacgccccgacgaaaaaaaaaaaaaaaaacgataaaaataaccgacgaccacgacccacgtacaaccgcgaaaaaaccgaacgcgaacgcgtaaaaaaaaatccgtacctccaaacatacgcgataaaaaataaactaataaaaaaccgatcaccaaacgcgacccgccgaaactcccgcccaccgaccgatactaaccgccgccgccgccatcctcaaaactactatacaccgaatcctacgaatcctacgaaccgctactactattcgaaatactaaaaaaaaactacgccgcgcgaacccccgacgccacgccccccaaaaaacaactacgcgaaactaccgaaaccaccgcgacgccgcccgaaacgctaaactaataaacgctaaacacctaaaccgaaaacctccccgcgacgacgaccccccgacccccaaccctaatcccgatcccattaaccactccgctactactaaaaaataaatccgaaccgaatacgcgcgcgtacgccgttaacgacgaccaaaccgctctacctaacgctcctatccgccctactccgaaccgaaccgcgcgctataccccgaaaaccaaaaaaataaaaacgaacgcgaaaactaaaaaacaaaaccgaaacgccgcgaccgacccaaaaaaacccccgcacgtccaaaaccgccgctcgacgccccgaaaaacaatcgacgcccgacgcgctcttctcgaaacgataaacaaaactaacgacctaacgcgaacgcgaaaaacgaaaaaacgcgaaaaaaaaaatatcccgactacaaacacccctcgctaactccaacaaaaaaaaacgactcaaataaccgtacgactaccgctaatttcgatacgccataacgaaccgctaccgctttctaccgtcgcgcttaacgccccgaacctccccaccgcctcctctccgacgaccgctattaccgccgccatcctccgactcccacgacgactaacgactaaataaaaaacgcccgcccaaactccgccgaaaccaccttccctcctcccccaaccacccaaccgttattaacgaaaaaaaaaaaaaaacgaataacgcgcgaaaaaaaaacgaaaaataaaaaaaaaaaaaaaataacccgcgcttccc

SEQ ID NO: 13295 - DNA, 1335 bp, Artificial Sequence
  chemically treated genomic DNA (Homo sapiens) CpG-island No: 13295
ttggaaaatagattatttttattgagtattcgttgaggtgtgggtgtttacgatgtttaaaaataaaattacgtgtttacgcggtagcgatatcgtaggtgttacgtgtcgggtttttttttaggatggagatcggcgcgggttgggtcgggaagtagtttttggcgggttgggtcgggaagtagttttcggcgtttcggcggaaggagaaaaggagaacggtaaaaatagtcggcggttacggtttacgtgtagtcgcgggagaatcgagcgcgggcgcgtggagaggggttcgtatttttaaatatgcgcggtgagaggtgagttggtaaggagtcgattattaggcgcggttcgtcggggttttcgtttatcggtcggtgttggtcgtcgtcgtcgttatttttagggttgttgtgtatcgagttttgcgagttttgcggatcgttgttgttgttcgggatgttgaaggaggattgcgtcgcgcgggttttcgacgttacgttttttaggaaatagttgcgcggggttgtcggggttatcgcggcgtcgttcgaggcgttgggttggtgagcgttgggtatttgagtcgggaattttttcgcggcggcggtttttcggtttttagttttggtttcggttttattggttatttcgttgttattggaaggtagattcgagtcgagtacgcgcgcgtgcgtcgttagcggcggttaggtcgttttgtttggcgtttttgttcgttttgtttcggatcgggtcgcgcgttgtgtttcgagagttaagagggtaggagcgaacgcgggagttagagggtagggtcgaggcgtcgcggtcggtttagagaggttttcgtacgtttagggtcgtcgttcggcgtttcgaggggtagtcggcgttcggcgcgtttttttcggggcggtgggtaaggttggcggtttgacgcgggcgcgggagacgaggagacgcggagaggaaggtgtttcggttgtaggtatttttcgttggttttagtaggaaggggcgatttaggtggtcgtgcgattgtcgttggtttcggtgcgttatgacgggtcgttgtcgttttttgtcgtcgcgtttggcgtttcgggtttttttatcgtttttttttcggcggtcgttgttatcgtcgttatttttcggtttttacggcgattggcggttgagtgggaggcgttcgtttagatttcgtcggagttattttttttttttttttagttatttagtcgttattaacggagaaagaggaaaaacgggtggcgcgcgaggggaggacgaagaatgagagggagggaggggtggttcgcgtttttt

SEQ ID NO: 13296 - DNA, 1335 bp, Artificial Sequence
  chemically treated genomic DNA (Homo sapiens) CpG-island No: 13296
aaaaaacgcgaaccacccctccctccctctcattcttcgtcctcccctcgcgcgccacccgtttttcctctttctccgttaataacgactaaataactaaaaaaaaaaaaaaaataactccgacgaaatctaaacgaacgcctcccactcaaccgccaatcgccgtaaaaaccgaaaaataacgacgataacaacgaccgccgaaaaaaaaacgataaaaaaacccgaaacgccaaacgcgacgacaaaaaacgacaacgacccgtcataacgcaccgaaaccaacgacaatcgcacgaccacctaaatcgccccttcctactaaaaccaacgaaaaatacctacaaccgaaacaccttcctctccgcgtctcctcgtctcccgcgcccgcgtcaaaccgccaaccttacccaccgccccgaaaaaaacgcgccgaacgccgactacccctcgaaacgccgaacgacgaccctaaacgtacgaaaacctctctaaaccgaccgcgacgcctcgaccctaccctctaactcccgcgttcgctcctaccctcttaactctcgaaacacaacgcgcgacccgatccgaaacaaaacgaacaaaaacgccaaacaaaacgacctaaccgccgctaacgacgcacgcgcgcgtactcgactcgaatctaccttccaataacaacgaaataaccaataaaaccgaaaccaaaactaaaaaccgaaaaaccgccgccgcgaaaaaattcccgactcaaatacccaacgctcaccaacccaacgcctcgaacgacgccgcgataaccccgacaaccccgcgcaactatttcctaaaaaacgtaacgtcgaaaacccgcgcgacgcaatcctccttcaacatcccgaacaacaacaacgatccgcaaaactcgcaaaactcgatacacaacaaccctaaaaataacgacgacgacgaccaacaccgaccgataaacgaaaaccccgacgaaccgcgcctaataatcgactccttaccaactcacctctcaccgcgcatatttaaaaatacgaacccctctccacgcgcccgcgctcgattctcccgcgactacacgtaaaccgtaaccgccgactatttttaccgttctccttttctccttccgccgaaacgccgaaaactacttcccgacccaacccgccaaaaactacttcccgacccaacccgcgccgatctccatcctaaaaaaaaacccgacacgtaacacctacgatatcgctaccgcgtaaacacgtaattttatttttaaacatcgtaaacacccacacctcaacgaatactcaataaaaataatctattttccaa

SEQ ID NO: 13297 - DNA, 848 bp, Artificial Sequence
  chemically treated genomic DNA (Homo sapiens) CpG-island No: 13297
cggcgagatttcgttgtttagttattattagatcgagttatagatcgagttcgttttttagcgtgaagtttttttgtcgtttggtggttttatcgtaatcggtacgatcgaagcgttgacggtcgtcgatatttgggtcgtaagcggcgattcgcggcggcgtatatcgaagaaatcgcgtataatattgatcgggtagtcgtcgttgcgagtagacgatagtagcggttgcgtagatttcgcggcgtgattgtattcgagtgtatcgatatgacgttagaacgttacgatcgtgtaggagtaagtcgtttgcgtgagtcgatgcgttatgattagggttcggaattaaattagggatgatttttggtttaagttgtgttggaaagtattttcgttagcgcgttgagtttattattcgggtttaatttaggtacgtacgcgtgcgttaggtttttcgtagtatttgtagcgtgcgagataacgagtcgttgtcgggttttattcggcgggcgatcggcgcggagcggttgaagttaatatttaacgacggtattcgagggatcgtgtcgtagttgattttgagttattgaatcgataacgttttcgggtaaagcgtatcgaagttcgttacgattcgtttcgtcgggtaataatcggagagtatttattacgagagtcgtagttgataattgcggcgtttgcggaaatagattggaaatttcgtttttaagttattaggagttagcggtgtttgatggattattcgggggtatttttaagtatgttttttcgggaaacgttttttgttgtggtgatcgttgagttagtaggttatgttagtgaattat

SEQ ID NO: 13298 - DNA, 848 bp, Artificial Sequence
  chemically treated genomic DNA (Homo sapiens) CpG-island No: 13298
ataattcactaacataacctactaactcaacgatcaccacaacaaaaaacgtttcccgaaaaaacatacttaaaaatacccccgaataatccatcaaacaccgctaactcctaataacttaaaaacgaaatttccaatctatttccgcaaacgccgcaattatcaactacgactctcgtaataaatactctccgattattacccgacgaaacgaatcgtaacgaacttcgatacgctttacccgaaaacgttatcgattcaataactcaaaatcaactacgacacgatccctcgaataccgtcgttaaatattaacttcaaccgctccgcgccgatcgcccgccgaataaaacccgacaacgactcgttatctcgcacgctacaaatactacgaaaaacctaacgcacgcgtacgtacctaaattaaacccgaataataaactcaacgcgctaacgaaaatactttccaacacaacttaaaccaaaaatcatccctaatttaattccgaaccctaatcataacgcatcgactcacgcaaacgacttactcctacacgatcgtaacgttctaacgtcatatcgatacactcgaatacaatcacgccgcgaaatctacgcaaccgctactatcgtctactcgcaacgacgactacccgatcaatattatacgcgatttcttcgatatacgccgccgcgaatcgccgcttacgacccaaatatcgacgaccgtcaacgcttcgatcgtaccgattacgataaaaccaccaaacgacaaaaaaacttcacgctaaaaaacgaactcgatctataactcgatctaataataactaaacaacgaaatctcgccg

SEQ ID NO: 13299 - DNA, 848 bp, Artificial Sequence
  chemically treated genomic DNA (Homo sapiens) CpG-island No: 13299
atgatttattggtatagtttattgatttagcgattattataatagggagcgtttttcgggaaaatatatttgagaatgttttcgaatgatttattaggtatcgttagtttttgatagtttaagggcgggatttttagtttattttcgtaagcgtcgtagttgttagttacgattttcgtgatgaatgtttttcggttattattcggcggaacgagtcgtgacgggtttcgatgcgttttattcgagaacgttatcgatttagtagtttagaattaattgcggtacgatttttcgagtgtcgtcgttgagtgttagttttagtcgtttcgcgtcgatcgttcgtcgaatagggttcggtagcgattcgttgtttcgtacgttgtaggtattacggagagtttggcgtacgcgtgcgtgtttggattgagttcgagtgatgggtttagcgcgttgacggaaatattttttagtatagtttaagttagagattatttttgatttggtttcgggttttggttatgacgtatcggtttacgtagacggtttatttttgtacggtcgtggcgttttgacgttatgtcgatgtattcgagtatagttacgtcgcggagtttacgtagtcgttgttgtcgtttattcgtaacggcggttattcggttagtgttatacgcggttttttcgatatacgtcgtcgcgggtcgtcgtttgcggtttagatgtcgacggtcgttaacgtttcggtcgtgtcgattacgatggaattattagacggtagaagaattttacgttggaaggcggattcgatttgtgattcgatttggtagtggttgaatagcgggatttcgtcg

SEQ ID NO: 13300 - DNA, 848 bp, Artificial Sequence
  chemically treated genomic DNA (Homo sapiens) CpG-island No: 13300
cgacgaaatcccgctattcaaccactaccaaatcgaatcacaaatcgaatccgccttccaacgtaaaattcttctaccgtctaataattccatcgtaatcgacacgaccgaaacgttaacgaccgtcgacatctaaaccgcaaacgacgacccgcgacgacgtatatcgaaaaaaccgcgtataacactaaccgaataaccgccgttacgaataaacgacaacaacgactacgtaaactccgcgacgtaactatactcgaatacatcgacataacgtcaaaacgccacgaccgtacaaaaataaaccgtctacgtaaaccgatacgtcataaccaaaacccgaaaccaaatcaaaaataatctctaacttaaactatactaaaaaatatttccgtcaacgcgctaaacccatcactcgaactcaatccaaacacgcacgcgtacgccaaactctccgtaatacctacaacgtacgaaacaacgaatcgctaccgaaccctattcgacgaacgatcgacgcgaaacgactaaaactaacactcaacgacgacactcgaaaaatcgtaccgcaattaattctaaactactaaatcgataacgttctcgaataaaacgcatcgaaacccgtcacgactcgttccgccgaataataaccgaaaaacattcatcacgaaaatcgtaactaacaactacgacgcttacgaaaataaactaaaaatcccgcccttaaactatcaaaaactaacgatacctaataaatcattcgaaaacattctcaaatatattttcccgaaaaacgctccctattataataatcgctaaatcaataaactataccaataaatcat

SEQ ID NO: 13301 - DNA, 645 bp, Artificial Sequence
  chemically treated genomic DNA (Homo sapiens) CpG-island No: 13301
ttgacggtgtagaatcggttgtcggtagtttttacggcgtggtcgttggtgaagtggttgagtgtgcgttattcgaacgttgataaattgcgtgtgataaaagtgaatgtcggcggcgatcgtttgttggatatcgtttgcggtgcgttaaattgtcgttagggtttgtgtgtagcggtagcgattattggtgttgttttgtcgggtgattttaaaattaaagcggcgaaattgcgtggcgaatcgtttgaagggatgttgtgttttttttttgaattgggtatttttgacgattatagcggtattatcgaattgtttgcggatgcgtcgattggtatcgatattcgtgaatatttgaaatttgatgataatattatcgaaattagcgtgacgttaaatcgtgtcgattgtttaggtattattggtgttgcgcgtgacgttgtcgtgttgaattagttgtcgttggtttaatcggaaatcgtttcggttggtgcgattatcgacgatacgttgtcgattatagtcgaagcgtcggaagtttgtacgcgttattttggtcgtgtggtaaaaggtattaacgttaaagcgttaatttcgttgtggatgaaagaaaattgcgtcgttgcggggattcgttttatcgat

SEQ ID NO: 13302 - DNA, 645 bp, Artificial Sequence
  chemically treated genomic DNA (Homo sapiens) CpG-island No: 13302
atcgataaaacgaatccccgcaacgacgcaattttctttcatccacaacgaaattaacgctttaacgttaataccttttaccacacgaccaaaataacgcgtacaaacttccgacgcttcgactataatcgacaacgtatcgtcgataatcgcaccaaccgaaacgatttccgattaaaccaacgacaactaattcaacacgacaacgtcacgcgcaacaccaataatacctaaacaatcgacacgatttaacgtcacgctaatttcgataatattatcatcaaatttcaaatattcacgaatatcgataccaatcgacgcatccgcaaacaattcgataataccgctataatcgtcaaaaatacccaattcaaaaaaaaaacacaacatcccttcaaacgattcgccacgcaatttcgccgctttaattttaaaatcacccgacaaaacaacaccaataatcgctaccgctacacacaaaccctaacgacaatttaacgcaccgcaaacgatatccaacaaacgatcgccgccgacattcacttttatcacacgcaatttatcaacgttcgaataacgcacactcaaccacttcaccaacgaccacgccgtaaaaactaccgacaaccgattctacaccgtcaa

SEQ ID NO: 13303 - DNA, 645 bp, Artificial Sequence
  chemically treated genomic DNA (Homo sapiens) CpG-island No: 13303
atcgatagaacggattttcgtaacgacgtagtttttttttatttatagcggagttggcgttttaacgttaatgttttttattatacggttaagataacgcgtgtaggttttcggcgtttcgattgtaatcggtagcgtgtcgtcgatggtcgtattaatcggaacgattttcggttgaattagcggtagttggtttagtacggtaacgttacgcgtaatattaatgatgtttaagtagtcggtacggtttggcgttacgttgatttcgatggtgttgttattaagttttaggtatttacggatatcggtgttaatcggcgtattcgtaggtagttcgataatgtcgttgtgatcgttagaaatgtttagtttagagaaggagtatagtatttttttagacggttcgttacgtagtttcgtcgttttaattttgaaattattcggtagaatagtattaatggtcgttatcgttatatataggttttgacggtagtttggcgtatcgtagacgatgtttagtaggcgatcgtcgtcgatatttatttttgttatacgtagtttgttagcgttcggatggcgtatatttaattattttattaacgattacgtcgtggaagttgtcggtaatcggttttatatcgttaa

SEQ ID NO: 13304 - DNA, 645 bp, Artificial Sequence
  chemically treated genomic DNA (Homo sapiens) CpG-island No: 13304
ttaacgatataaaaccgattaccgacaacttccacgacgtaatcgttaataaaataattaaatatacgccatccgaacgctaacaaactacgtataacaaaaataaatatcgacgacgatcgcctactaaacatcgtctacgatacgccaaactaccgtcaaaacctatatataacgataacgaccattaatactattctaccgaataatttcaaaattaaaacgacgaaactacgtaacgaaccgtctaaaaaaatactatactccttctctaaactaaacatttctaacgatcacaacgacattatcgaactacctacgaatacgccgattaacaccgatatccgtaaatacctaaaacttaataacaacaccatcgaaatcaacgtaacgccaaaccgtaccgactacttaaacatcattaatattacgcgtaacgttaccgtactaaaccaactaccgctaattcaaccgaaaatcgttccgattaatacgaccatcgacgacacgctaccgattacaatcgaaacgccgaaaacctacacgcgttatcttaaccgtataataaaaaacattaacgttaaaacgccaactccgctataaataaaaaaaaactacgtcgttacgaaaatccgttctatcgat

SEQ ID NO: 13305 - DNA, 889 bp, Artificial Sequence
  chemically treated genomic DNA (Homo sapiens) CpG-island No: 13305
  unsure (80, 204..205, 210, 508)
ttatttcggcgttgcgtatattttgtattgagtcggttattcgtcgtatatcgtttagacgaatcgcgtcgtcgttgttngtagtgaataattaacggttgatatttagcggcgggttttagtttattattggtttggatttgttagcggtgagtgttattttttagcgcgttttgcgggttacgtacgttggtattgttgatnngcgtncgtacgtcgtttagcgatacgttttgaattaatagcgtttgcggattaagttcgacgcgtacggcgggtagtgagttgtttcgatatcgatattattaatatcgtcgatttgcgaaatcgtcggagttagttgcgtcgaggcgaaatcgtatagtttatttgcgatataagtatcggacgttagcgtgaggattataattggcgtattcgacgggttcgttttgcgataggtcgggcggttgggtattttattgggtagtaaattttgtgtagcgttgatcgtcgtttgtatattatngcgtgcgtcgttgatatttcggttaaaattaaattgtaaaataatacgcgtgttgtcgagcgaattgttggaggttattttattgatttcggtaatgcgtttaagtgagcgttttagcggcgtggtaacggaagacgttattgtttttggtgacgtatcgggtagcgaggcgttgacgataattatcggaaaatcgatttgcggtagcggggcgatcggtagtatacggaagtttagtatgtcgtatagggtaatggtaatcgatagtaaaatcgtcgttatcgggcggtaaatgaagagggtaaaaaattttatttacgttttttttttatgacgggtaaagcggtttttggtttataatgttaggcggtcgaatagtaa

SEQ ID NO: 13306 - DNA, 889 bp, Artificial Sequence
  chemically treated genomic DNA (Homo sapiens) CpG-island No: 13306
  unsure (382, 680, 685..686, 810)
ttactattcgaccgcctaacattataaaccaaaaaccgctttacccgtcataaaaaaaaaacgtaaataaaattttttaccctcttcatttaccgcccgataacgacgattttactatcgattaccattaccctatacgacatactaaacttccgtatactaccgatcgccccgctaccgcaaatcgattttccgataattatcgtcaacgcctcgctacccgatacgtcaccaaaaacaataacgtcttccgttaccacgccgctaaaacgctcacttaaacgcattaccgaaatcaataaaataacctccaacaattcgctcgacaacacgcgtattattttacaatttaattttaaccgaaatatcaacgacgcacgcnataatatacaaacgacgatcaacgctacacaaaatttactacccaataaaatacccaaccgcccgacctatcgcaaaacgaacccgtcgaatacgccaattataatcctcacgctaacgtccgatacttatatcgcaaataaactatacgatttcgcctcgacgcaactaactccgacgatttcgcaaatcgacgatattaataatatcgatatcgaaacaactcactacccgccgtacgcgtcgaacttaatccgcaaacgctattaattcaaaacgtatcgctaaacgacgtacgnacgcnnatcaacaataccaacgtacgtaacccgcaaaacgcgctaaaaaataacactcaccgctaacaaatccaaaccaataataaactaaaacccgccgctaaatatcaaccgttaattattcactacnaacaacgacgacgcgattcgtctaaacgatatacgacgaataaccgactcaatacaaaatatacgcaacgccgaaataa

SEQ ID NO: 13307 - DNA, 889 bp, Artificial Sequence
  chemically treated genomic DNA (Homo sapiens) CpG-island No: 13307
  unsure (382, 680, 685..686, 810)
ttgttgttcgatcgtttggtattgtggattaaaagtcgttttgttcgttatgaagaggaggcgtaagtgaagttttttgttttttttatttatcgttcggtggcgacgattttattgtcggttgttattattttgtgcggtatattgggttttcgtatgttgtcggtcgtttcgttgtcgtaggtcgatttttcggtgattatcgttagcgtttcgttgttcggtgcgttattagaaataatggcgtttttcgttgttacgtcgttggagcgtttatttgggcgtattgtcggagttagtgaaatgatttttagtagttcgttcggtagtacgcgtattattttgtagtttgattttgatcgggatattaacggcgtacgtngtgatgtgtaggcggcgattaacgttgtataaagtttgttgtttagtgggatgtttagtcgttcgatttatcgtaaagcgaattcgtcggatgcgttaattatgatttttacgttgacgttcgatatttatatcgtaggtgaattgtacgatttcgtttcgacgtagttggtttcgacgatttcgtaaatcgacggtgttggtgatgtcgatgtcggagtagtttattgttcgtcgtacgcgtcgggtttaattcgtaggcgttgttaatttagggcgtgtcgttggacgacgtacgnacgtnngttagtaatgttaacgtgcgtaattcgtagggcgcgttggaagatggtatttatcgttggtagatttagattaatgatgagttaaaattcgtcgttgaatattagtcgttggttatttattatnaataacggcggcgcggttcgtttgggcgatgtgcgacgggtgatcgatttagtgtaggatgtgcgtaacgtcgggatga

SEQ ID NO: 13308 - DNA, 889 bp, Artificial Sequence
  chemically treated genomic DNA (Homo sapiens) CpG-island No: 13308
  unsure (80, 204..205, 210, 508)
tcatcccgacgttacgcacatcctacactaaatcgatcacccgtcgcacatcgcccaaacgaaccgcgccgccgttattnataataaataaccaacgactaatattcaacgacgaattttaactcatcattaatctaaatctaccaacgataaataccatcttccaacgcgccctacgaattacgcacgttaacattactaacnnacgtncgtacgtcgtccaacgacacgccctaaattaacaacgcctacgaattaaacccgacgcgtacgacgaacaataaactactccgacatcgacatcaccaacaccgtcgatttacgaaatcgtcgaaaccaactacgtcgaaacgaaatcgtacaattcacctacgatataaatatcgaacgtcaacgtaaaaatcataattaacgcatccgacgaattcgctttacgataaatcgaacgactaaacatcccactaaacaacaaactttatacaacgttaatcgccgcctacacatcacnacgtacgccgttaatatcccgatcaaaatcaaactacaaaataatacgcgtactaccgaacgaactactaaaaatcatttcactaactccgacaatacgcccaaataaacgctccaacgacgtaacaacgaaaaacgccattatttctaataacgcaccgaacaacgaaacgctaacgataatcaccgaaaaatcgacctacgacaacgaaacgaccgacaacatacgaaaacccaatataccgcacaaaataataacaaccgacaataaaatcgtcgccaccgaacgataaataaaaaaaacaaaaaacttcacttacgcctcctcttcataacgaacaaaacgacttttaatccacaataccaaacgatcgaacaacaa

SEQ ID NO: 13309 - DNA, 624 bp, Artificial Sequence
  chemically treated genomic DNA (Homo sapiens) CpG-island No: 13309
tattacgtttattatcggtatcgttaaatatgtttagtagttgttgtttaatgttatgtagacgcgcgtagtaggcgtagaagtatagatcgtgagtgttattggtagtgtcgtacggtaggttttggcgaataatttttagttttttgttatttttttttagattaacgcgggtgaggtgagaggttttcgaacgtcgtcgtcgtcgatttttttcgtggtttttttggtgcgttcgattaatattttttgatcgtgaacgtttattcggttgagttgttttaaggtgtgttttaacgttggataatatatagttgtcgtcgtattaagtcgtttttaatcgtcgttttataaagcgtcgttttttttttatatcgatatcgtcgagcgttaaagtaatgatattatcgttatttagcggttattgatgttttgttagatacgtcgttgtatgggtatgatgatgtagtatcgtttgcgtcggtagatttattttacgcgtttattggttggagatatagttcggatgcgcgttatgtataacgtattgcggggtaaaatcgtagatgttttgtattaggttgtaacgttcgcgttattgtatttggatgttatcgttattta

SEQ ID NO: 13310 - DNA, 624 bp, Artificial Sequence
  chemically treated genomic DNA (Homo sapiens) CpG-island No: 13310
taaataacgataacatccaaatacaataacgcgaacgttacaacctaatacaaaacatctacgattttaccccgcaatacgttatacataacgcgcatccgaactatatctccaaccaataaacgcgtaaaataaatctaccgacgcaaacgatactacatcatcatacccatacaacgacgtatctaacaaaacatcaataaccgctaaataacgataatatcattactttaacgctcgacgatatcgatataaaaaaaaaacgacgctttataaaacgacgattaaaaacgacttaatacgacgacaactatatattatccaacgttaaaacacaccttaaaacaactcaaccgaataaacgttcacgatcaaaaaatattaatcgaacgcaccaaaaaaaccacgaaaaaaatcgacgacgacgacgttcgaaaacctctcacctcacccgcgttaatctaaaaaaaaataacaaaaaactaaaaattattcgccaaaacctaccgtacgacactaccaataacactcacgatctatacttctacgcctactacgcgcgtctacataacattaaacaacaactactaaacatatttaacgataccgataataaacgtaata

SEQ ID NO: 13311 - DNA, 624 bp, Artificial Sequence
  chemically treated genomic DNA (Homo sapiens) CpG-island No: 13311
taagtgacgatggtatttagatgtagtggcgcgaacgttatagtttgatgtaaaatatttacgattttatttcgtaatacgttgtgtatgacgcgtattcgggttatgtttttagttagtgggcgcgtgaaatgaatttgtcgacgtaaacggtattgtattattatgtttatgtagcggcgtgtttggtagagtattagtggtcgttggatggcggtgatgttattgttttgacgttcgacggtatcggtatggggggagaacggcgttttgtggggcggcgattaaaaacggtttgatgcggcggtagttatgtgttgtttagcgttggaatatattttgaagtagtttaatcggatgagcgtttacgattagaagatgttgatcgggcgtattaaagaggttacgaaagagatcgacggcgacgacgttcgggaattttttattttattcgcgttgatttgaaagaagatggtaaagggttgaagattgttcgttagagtttgtcgtacggtattgttagtggtatttacggtttgtatttttgcgtttattgcgcgcgtttgtataatattgagtagtaattgttgagtatgtttggcgatatcgatggtaagcgtgatg

SEQ ID NO: 13312 - DNA, 624 bp, Artificial Sequence
  chemically treated genomic DNA (Homo sapiens) CpG-island No: 13312
catcacgcttaccatcgatatcgccaaacatactcaacaattactactcaatattatacaaacgcgcgcaataaacgcaaaaatacaaaccgtaaataccactaacaataccgtacgacaaactctaacgaacaatcttcaaccctttaccatcttctttcaaatcaacgcgaataaaataaaaaattcccgaacgtcgtcgccgtcgatctctttcgtaacctctttaatacgcccgatcaacatcttctaatcgtaaacgctcatccgattaaactacttcaaaatatattccaacgctaaacaacacataactaccgccgcatcaaaccgtttttaatcgccgccccacaaaacgccgttctccccccataccgataccgtcgaacgtcaaaacaataacatcaccgccatccaacgaccactaatactctaccaaacacgccgctacataaacataataatacaataccgtttacgtcgacaaattcatttcacgcgcccactaactaaaaacataacccgaatacgcgtcatacacaacgtattacgaaataaaatcgtaaatattttacatcaaactataacgttcgcgccactacatctaaataccatcgtcactta

SEQ ID NO: 13313 - DNA, 845 bp, Artificial Sequence
  chemically treated genomic DNA (Homo sapiens) CpG-island No: 13313
  unsure (601, 718, 755..)
ttttttttgtattttttcgtttaggattgtattcggtggtggatagcgtatagtggatcgaacgtttgttggatgtaggcgtacgtattttttagttacgtattaaagatcggcgcgatgaagaggtggaagtcgatgtcgtggcggtaattgcgttgggtcgtcgttataacgcgcgattgtttattaacgattattggcggttggcgattaagtattaggcgtatggcgtttatttggggtaggaagatttgtaagttatcgattttaatgttattcgcgcggtaggtttgcggttgggcgtttcgatatatgacgatatggaaatcgacgtcgcgttggtagtacgttttttttatatcgcgttgggatatgtgttttcgacgtaaattaaatagatgttttttgtatcgtagggttggaatagttggtacggtatgttgagcgattggcggattattttatcgtggcgattggcggtattagtttggtacgcgcgtttgcggtgatagtaacgggtgtcggtagtatcgtcgtcgttagcgttattatttaagtcgtagattggcgtttggtaacggtatagttgttggaaattgtnagagttcgcgatgaatgatcgtgattttatgcgttatagtcgttaaattttgttcgacgatatcgttttggacgggtagtaaaattgttcgatagttaggtgttgattattcgtttngggcggttgggtatattgttgcgttgtatttggcggnncgttgcgtcggaagtttgtattgtagatgcgacgatggtatttaatatttgtacgataattttttatattgaagtattatgtcgaatcg

SEQ ID NO: 13314 - DNA, 845 bp, Artificial Sequence
  chemically treated genomic DNA (Homo sapiens) CpG-island No: 13314
  unsure (90..91, 128, 245)
cgattcgacataatacttcaatataaaaaattatcgtacaaatattaaataccatcgtcgcatctacaatacaaacttccgacgcaacgnnccgccaaatacaacgcaacaatatacccaaccgcccnaaacgaataatcaacacctaactatcgaacaattttactacccgtccaaaacgatatcgtcgaacaaaatttaacgactataacgcataaaatcacgatcattcatcgcgaactctnacaatttccaacaactataccgttaccaaacgccaatctacgacttaaataataacgctaacgacgacgatactaccgacacccgttactatcaccgcaaacgcgcgtaccaaactaataccgccaatcgccacgataaaataatccgccaatcgctcaacataccgtaccaactattccaaccctacgatacaaaaaacatctatttaatttacgtcgaaaacacatatcccaacgcgatataaaaaaaacgtactaccaacgcgacgtcgatttccatatcgtcatatatcgaaacgcccaaccgcaaacctaccgcgcgaataacattaaaatcgataacttacaaatcttcctaccccaaataaacgccatacgcctaatacttaatcgccaaccgccaataatcgttaataaacaatcgcgcgttataacgacgacccaacgcaattaccgccacgacatcgacttccacctcttcatcgcgccgatctttaatacgtaactaaaaaatacgtacgcctacatccaacaaacgttcgatccactatacgctatccaccaccgaatacaatcctaaacgaaaaaatacaaaaaaaa

SEQ ID NO: 13315 - DNA, 845 bp, Artificial Sequence
  chemically treated genomic DNA (Homo sapiens) CpG-island No: 13315
  unsure (90..91, 128, 245)
cgattcggtatgatattttagtgtaagagattgtcgtgtagatgttaaatgttatcgtcgtatttgtagtataagttttcgacgtagcgnntcgttaggtatagcgtagtagtgtatttagtcgtttnagacggataattagtatttggttgtcgagtagttttgttgttcgtttagagcgatatcgtcgagtaggatttggcggttataacgtataaagttacggttatttatcgcgaattttngtaatttttagtaattgtgtcgttgttaaacgttagtttgcggtttgagtaatggcgttgacgacggcgatattgtcgatattcgttgttattatcgtaggcgcgcgtgttagattgatatcgttaatcgttacggtgggataattcgttagtcgtttaatatgtcgtgttagttgttttagttttgcggtgtagaaggtatttgtttggtttgcgtcgggaatatatgttttagcgcgatataagaggggcgtgttgttagcgcgacgtcgatttttatatcgttatgtgtcgaaacgtttagtcgtaggtttgtcgcgcggatggtattgagatcggtggtttgtaaatttttttgttttaaatggacgttatacgtttgatgtttgatcgttagtcgttagtaatcgttgataaataatcgcgcgttatagcggcggtttagcgtaattgtcgttacgatatcggtttttatttttttatcgcgtcgatttttgatgcgtagttggagagtacgtacgtttgtatttaatagacgttcgatttattgtacgttgtttattatcgggtatagttttgaacgaaaaggtataggaggaa

SEQ ID NO: 13316 - DNA, 845 bp, Artificial Sequence
  chemically treated genomic DNA (Homo sapiens) CpG-island No: 13316
  unsure (601, 718, 755..)
ttcctcctataccttttcgttcaaaactatacccgataataaacaacgtacaataaatcgaacgtctattaaatacaaacgtacgtactctccaactacgcatcaaaaatcgacgcgataaaaaaataaaaaccgatatcgtaacgacaattacgctaaaccgccgctataacgcgcgattatttatcaacgattactaacgactaacgatcaaacatcaaacgtataacgtccatttaaaacaaaaaaatttacaaaccaccgatctcaataccatccgcgcgacaaacctacgactaaacgtttcgacacataacgatataaaaatcgacgtcgcgctaacaacacgcccctcttatatcgcgctaaaacatatattcccgacgcaaaccaaacaaataccttctacaccgcaaaactaaaacaactaacacgacatattaaacgactaacgaattatcccaccgtaacgattaacgatatcaatctaacacgcgcgcctacgataataacaacgaatatcgacaatatcgccgtcgtcaacgccattactcaaaccgcaaactaacgtttaacaacgacacaattactaaaaattacnaaaattcgcgataaataaccgtaactttatacgttataaccgccaaatcctactcgacgatatcgctctaaacgaacaacaaaactactcgacaaccaaatactaattatccgtctnaaacgactaaatacactactacgctatacctaacganncgctacgtcgaaaacttatactacaaatacgacgataacatttaacatctacacgacaatctcttacactaaaatatcataccgaatcg

SEQ ID NO: 13317 - DNA, 617 bp, Artificial Sequence
  chemically treated genomic DNA (Homo sapiens) CpG-island No: 13317
gaagcgtcgtttagttgttcggttgtatttgcgaagtatttttcgtaatcgttgatttaaatagttcgtcgggtaaattttgaattaatattttttgttcggcggttattatcgttagttagcgtaggtgttttttagttggcgtacgttgtttggttacgttagacgcgttagagtagtttcggttttcggatgtagtaatttcgtttttacgtttagttcgcgcgcggtaatttgtaaaaaatggcgcgttagacggggaatattttttcgacgttcgcgtagcggcggtagatgaacgcggataacgtttaggcggtggaatagatttttacggaatttatttttttgtattcgttgttcgagattttggtgagtggtagcgataattcgtatatttatttttatcggcgtatagtcgttaacgcggtaaaattgatcgtttgttagtacgcgtagtaaacgcgtttgtatatttagcggtatattattaatttcgtcgaggaataatgtatcgttatcggtttgtttaaaacgtttttgacgaatggtattcgcgttagtaaacgcgtttttttcgtggttaaatagttttgattcgattaaattttttggga

SEQ ID NO: 13318 - DNA, 617 bp, Artificial Sequence
  chemically treated genomic DNA (Homo sapiens) CpG-island No: 13318
tcccaaaaaatttaatcgaatcaaaactatttaaccacgaaaaaaacgcgtttactaacgcgaataccattcgtcaaaaacgttttaaacaaaccgataacgatacattattcctcgacgaaattaataatataccgctaaatatacaaacgcgtttactacgcgtactaacaaacgatcaattttaccgcgttaacgactatacgccgataaaaataaatatacgaattatcgctaccactcaccaaaatctcgaacaacgaatacaaaaaaataaattccgtaaaaatctattccaccgcctaaacgttatccgcgttcatctaccgccgctacgcgaacgtcgaaaaaatattccccgtctaacgcgccattttttacaaattaccgcgcgcgaactaaacgtaaaaacgaaattactacatccgaaaaccgaaactactctaacgcgtctaacgtaaccaaacaacgtacgccaactaaaaaacacctacgctaactaacgataataaccgccgaacaaaaaatattaattcaaaatttacccgacgaactatttaaatcaacgattacgaaaaatacttcgcaaatacaaccgaacaactaaacgacgcttc

SEQ ID NO: 13319 - DNA, 617 bp, Artificial Sequence
  chemically treated genomic DNA (Homo sapiens) CpG-island No: 13319
ttttaaaagatttgatcgaattagaattgtttggttacgagaaaggcgcgtttattggcgcgaatattattcgttaggggcgttttgaataggtcgatggcggtatattatttttcgacgaaattggtgatatgtcgttggatgtgtagacgcgtttgttgcgcgtgttggtagacggttagttttatcgcgttggcggttatgcgtcggtgaaagtggatgtgcggattatcgttgttatttattagaatttcgaatagcgagtgtaggaaggtaagtttcgtgaggatttgttttatcgtttgaacgttattcgcgtttatttgtcgtcgttgcgcgaacgtcgggaagatatttttcgtttggcgcgttattttttataggttgtcgcgcgcgaattgggcgtagaagcgaagttattgtattcggaaatcgaagttgttttgacgcgtttggcgtggttaggtaacgtgcgttagttggaaaatatttgcgttggttaacggtgatggtcgtcgggtaggaagtgttgatttaggatttgttcggcgaattgtttgaattaacggttgcggagagtatttcgtaaatgtaatcggatagttgggcgacgtttt

SEQ ID NO: 13320 - DNA, 617 bp, Artificial Sequence
  chemically treated genomic DNA (Homo sapiens) CpG-island No: 13320
aaaacgtcgcccaactatccgattacatttacgaaatactctccgcaaccgttaattcaaacaattcgccgaacaaatcctaaatcaacacttcctacccgacgaccatcaccgttaaccaacgcaaatattttccaactaacgcacgttacctaaccacgccaaacgcgtcaaaacaacttcgatttccgaatacaataacttcgcttctacgcccaattcgcgcgcgacaacctataaaaaataacgcgccaaacgaaaaatatcttcccgacgttcgcgcaacgacgacaaataaacgcgaataacgttcaaacgataaaacaaatcctcacgaaacttaccttcctacactcgctattcgaaattctaataaataacaacgataatccgcacatccactttcaccgacgcataaccgccaacgcgataaaactaaccgtctaccaacacgcgcaacaaacgcgtctacacatccaacgacatatcaccaatttcgtcgaaaaataatataccgccatcgacctattcaaaacgcccctaacgaataatattcgcgccaataaacgcgcctttctcgtaaccaaacaattctaattcgatcaaatcttttaaaa

SEQ ID NO: 13321 - DNA, 693 bp, Artificial Sequence
  chemically treated genomic DNA (Homo sapiens) CpG-island No: 13321
  unsure (662)
gttatcggtaggcgtaacggttttatttgtgtcgcgtagtagtgtagagacgttttagcgtcgtacgcgtttgttttaggtttttttcgttgtagtttaattggttgcgatagtggttcgatattaggaagtaacgtacggttttcgcgtcgtagtattttagtatatcgcgtacggtaaagaagttatttagcgatttggatattttttcgcggttaattattattattttcgagtgtatttagtagtttatatattgattattatgggtataggtggattgcgcgatttcgttttcgtggtgcgggaatattaggtttgaatcgtcgtcgtggatattaaagtggttatttagttgtttgtagtttattgtcgaatatttaatgtgttagttaggacgattcgcgttttacggagacggttagttcggttcgttttttttcgatattttttatagaacgaagtttattgggttgcgtttgtcgtcgattacgttaacgcgcgcgtttgtttgtagttggtcgagattttgacgcgatagtacgttataagttggatcggtcgggacgtcgaatattacgtcgtcgttgttcgttatataagcgtgatttttggcgattagttgtttagtgagtttaataatttttgcgatatggtgcgtncgcgcggttttatattcgggcgtagaatgtt

SEQ ID NO: 13322 - DNA, 693 bp, Artificial Sequence
  chemically treated genomic DNA (Homo sapiens) CpG-island No: 13322
  unsure (32)
aacattctacgcccgaatataaaaccgcgcgnacgcaccatatcgcaaaaattattaaactcactaaacaactaatcgccaaaaatcacgcttatataacgaacaacgacgacgtaatattcgacgtcccgaccgatccaacttataacgtactatcgcgtcaaaatctcgaccaactacaaacaaacgcgcgcgttaacgtaatcgacgacaaacgcaacccaataaacttcgttctataaaaaatatcgaaaaaaaacgaaccgaactaaccgtctccgtaaaacgcgaatcgtcctaactaacacattaaatattcgacaataaactacaaacaactaaataaccactttaatatccacgacgacgattcaaacctaatattcccgcaccacgaaaacgaaatcgcgcaatccacctatacccataataatcaatatataaactactaaatacactcgaaaataataataattaaccgcgaaaaaatatccaaatcgctaaataacttctttaccgtacgcgatatactaaaatactacgacgcgaaaaccgtacgttacttcctaatatcgaaccactatcgcaaccaattaaactacaacgaaaaaaacctaaaacaaacgcgtacgacgctaaaacgtctctacactactacgcgacacaaataaaaccgttacgcctaccgataac

SEQ ID NO: 13323 - DNA, 693 bp, Artificial Sequence
  chemically treated genomic DNA (Homo sapiens) CpG-island No: 13323
  unsure (32)
aatattttgcgttcggatatggagtcgcgcgnacgtattatatcgtagaaattattgaatttattgaataattgatcgttaaaggttacgtttatgtggcggataacggcgacgtgatgttcgacgtttcgatcgatttaatttatggcgtgttgtcgcgttaggatttcgattagttgtaggtaggcgcgcgcgttgacgtggtcgacgataaacgtaatttaatggatttcgttttgtggaagatgtcgaaagagggcgaatcgagttggtcgttttcgtggggcgcgggtcgttttggttggtatattgaatgttcggtaatgaattgtaagtagttgggtaattattttgatatttacggcggcggtttagatttgatgttttcgtattacgaaaacgaaatcgcgtagtttatttgtgtttatgatggttagtatgtgaattattggatgtattcggggatggtgatggttgatcgcgagaagatgtttaaatcgttgggtaatttttttatcgtgcgcgatgtgttgaaatattacgacgcggaaatcgtgcgttattttttgatgtcgggttattatcgtagttagttgaattatagcgaagagaatttgaagtaggcgcgtgcggcgttggagcgtttttatattgttgcgcggtatagataaaatcgttgcgtttgtcggtggt

SEQ ID NO: 13324 - DNA, 693 bp, Artificial Sequence
  chemically treated genomic DNA (Homo sapiens) CpG-island No: 13324
  unsure (662)
accaccgacaaacgcaacgattttatctataccgcgcaacaatataaaaacgctccaacgccgcacgcgcctacttcaaattctcttcgctataattcaactaactacgataataacccgacatcaaaaaataacgcacgatttccgcgtcgtaatatttcaacacatcgcgcacgataaaaaaattacccaacgatttaaacatcttctcgcgatcaaccatcaccatccccgaatacatccaataattcacatactaaccatcataaacacaaataaactacgcgatttcgttttcgtaatacgaaaacatcaaatctaaaccgccgccgtaaatatcaaaataattacccaactacttacaattcattaccgaacattcaatataccaaccaaaacgacccgcgccccacgaaaacgaccaactcgattcgccctctttcgacatcttccacaaaacgaaatccattaaattacgtttatcgtcgaccacgtcaacgcgcgcgcctacctacaactaatcgaaatcctaacgcgacaacacgccataaattaaatcgatcgaaacgtcgaacatcacgtcgccgttatccgccacataaacgtaacctttaacgatcaattattcaataaattcaataatttctacgatataatacgtncgcgcgactccatatccgaacgcaaaatatt

SEQ ID NO: 13325 - DNA, 507 bp, Artificial Sequence
  chemically treated genomic DNA (Homo sapiens) CpG-island No: 13325
  unsure (204, 225, 381, 418, 460)
gtaaaatcgttagagtttgaatagtttgttgtcgtcgttacgtgaataattggacggttttcgtcgttagtttaggatagtttcggtaaagaagtataagaacgttatattttgatttacgaaattcgtaatttttagtaatttttacgcgttaatggtttaggaagcgattaatttgacgcgcgcgttgaaaagcgataatanaatttagggtattggggcgangtagtatgatagcggtgttggagttttagtttgcgtgaaggtatgatatgaatttagttatatcgaaatgacgttgttcgtcgatgtagttgatgttatcgtcgtttgcgtaggaaaagatgtgtgatgacgttaaatgacgttgtcgttatgatnttatttaacgcgagacgttatatcgcgaagcgttatnagatatatcggtcgtgcgtattatattcgttgttggattaangatattatattgtcgggtcgattttgattagtttgatgttatttcgt

SEQ ID NO: 13326 - DNA, 507 bp, Artificial Sequence
  chemically treated genomic DNA (Homo sapiens) CpG-island No: 13326
  unsure (48, 90, 127, 283, 304)
acgaaataacatcaaactaatcaaaatcgacccgacaatataatatcnttaatccaacaacgaatataatacgcacgaccgatatatctnataacgcttcgcgatataacgtctcgcgttaaataanatcataacgacaacgtcatttaacgtcatcacacatcttttcctacgcaaacgacgataacatcaactacatcgacgaacaacgtcatttcgatataactaaattcatatcataccttcacgcaaactaaaactccaacaccgctatcatactacntcgccccaataccctaaattntattatcgcttttcaacgcgcgcgtcaaattaatcgcttcctaaaccattaacgcgtaaaaattactaaaaattacgaatttcgtaaatcaaaatataacgttcttatacttctttaccgaaactatcctaaactaacgacgaaaaccgtccaattattcacgtaacgacgacaacaaactattcaaactctaacgattttac

SEQ ID NO: 13327 - DNA, 507 bp, Artificial Sequence
  chemically treated genomic DNA (Homo sapiens) CpG-island No: 13327
  unsure (48, 90, 127, 283, 304)
acgggataatattagattaattagagtcgattcggtagtgtgatattnttggtttagtaacggatatggtacgtacgatcgatatgtttngtagcgtttcgcggtgtagcgtttcgcgttaaatagngttatagcgatagcgttatttggcgttattatatatttttttttgcgtaggcgacgatgatattagttgtatcggcgagtagcgttatttcgatgtgattgggtttatattatatttttacgtagattgaagttttagtatcgttgttatattatntcgttttagtgttttgggttntattgtcgttttttagcgcgcgcgttaggttgatcgttttttgggttattggcgcgtgaaagttgttggagattgcgaatttcgtgggttagggtatggcgtttttgtgtttttttatcgaagttgttttgaattgacggcggaaatcgtttagttgtttacgtagcggcgataataggttgtttagattttgacggttttgt

SEQ ID NO: 13328 - DNA, 507 bp, Artificial Sequence
  chemically treated genomic DNA (Homo sapiens) CpG-island No: 13328
  unsure (204, 225, 381, 418, 460)
acaaaaccgtcaaaatctaaacaacctattatcgccgctacgtaaacaactaaacgatttccgccgtcaattcaaaacaacttcgataaaaaaacacaaaaacgccataccctaacccacgaaattcgcaatctccaacaactttcacgcgccaataacccaaaaaacgatcaacctaacgcgcgcgctaaaaaacgacaatanaacccaaaacactaaaacganataatataacaacgatactaaaacttcaatctacgtaaaaatataatataaacccaatcacatcgaaataacgctactcgccgatacaactaatatcatcgtcgcctacgcaaaaaaaaatatataataacgccaaataacgctatcgctataacnctatttaacgcgaaacgctacaccgcgaaacgctacnaaacatatcgatcgtacgtaccatatccgttactaaaccaanaatatcacactaccgaatcgactctaattaatctaatattatcccgt

SEQ ID NO: 13329 - DNA, 583 bp, Artificial Sequence
  chemically treated genomic DNA (Homo sapiens) CpG-island No: 13329
atattatttttgtttcgttatttcgaatttattcgttaattttacgtacgttcgtcgatattcggtggttagtcgcgtggatttcgtaggtgtttggtggggtggcgggcgtaagtttgtggatgtcgtgttgtttggggtcggcgggcgagggcgggtcggggtcgtggtgggtcggggcggattggtcgtaacgtagggaatcgggtgggggggggtggggggtgggggggcggggatattaatagcgtacgcgagtattttaattaatcgataatcgataatcgattagaatatttgcgtaacgttcgatttacgttacggtttaaaggtttatttggcgtcgatcgttatcgtttatagtacgaaatcgtttaatatttttttttatatttaacgttggggggagtgggggtagtatattaaaagggtttcggaggtatttaatgaagcgtatgcgtcgattcgttgatgttttttatcgtaatcgttttttagacgaaatggtttaatagatatttttatttttaatcgaatcgggttgttttgagatttttattttgggtgcgggtgcggatggggt

SEQ ID NO: 13330 - DNA, 583 bp, Artificial Sequence
  chemically treated genomic DNA (Homo sapiens) CpG-island No: 13330
accccatccgcacccgcacccaaaataaaaatctcaaaacaacccgattcgattaaaaataaaaatatctattaaaccatttcgtctaaaaaacgattacgataaaaaacatcaacgaatcgacgcatacgcttcattaaatacctccgaaacccttttaatatactacccccactccccccaacgttaaatataaaaaaaaatattaaacgatttcgtactataaacgataacgatcgacgccaaataaacctttaaaccgtaacgtaaatcgaacgttacgcaaatattctaatcgattatcgattatcgattaattaaaatactcgcgtacgctattaatatccccgcccccccaccccccacccccccccacccgattccctacgttacgaccaatccgccccgacccaccacgaccccgacccgccctcgcccgccgaccccaaacaacacgacatccacaaacttacgcccgccaccccaccaaacacctacgaaatccacgcgactaaccaccgaatatcgacgaacgtacgtaaaattaacgaataaattcgaaataacgaaacaaaaataatat

SEQ ID NO: 13331 - DNA, 583 bp, Artificial Sequence
  chemically treated genomic DNA (Homo sapiens) CpG-island No: 13331
attttattcgtattcgtatttagagtaaaaattttaaaataattcgattcggttgggagtggaggtatttgttagattatttcgtttaaagggcggttgcggtgggaggtattagcggatcggcgtatgcgttttattaggtattttcggagtttttttgatatattatttttattttttttaacgttgggtgtggaggagggtgttagacgatttcgtattatgggcggtagcggtcggcgttaggtgagtttttgggtcgtggcgtaagtcgagcgttgcgtaagtgttttagtcgattgtcgattgtcgattggttagggtgttcgcgtgcgttattgatattttcgtttttttattttttatttttttttattcgattttttacgttacgattagttcgtttcgatttattacggtttcggttcgttttcgttcgtcggttttaaataatacgatatttataaatttacgttcgttattttattagatatttacggaatttacgcggttaattatcgggtgtcgacgaacgtgcgtgaaattgacgagtgagttcgggatgacgaaatagaaatgatat

SEQ ID NO: 13332 - DNA, 583 bp, Artificial Sequence
  chemically treated genomic DNA (Homo sapiens) CpG-island No: 13332
atatcatttctatttcgtcatcccgaactcactcgtcaatttcacgcacgttcgtcgacacccgataattaaccgcgtaaattccgtaaatatctaataaaataacgaacgtaaatttataaatatcgtattatttaaaaccgacgaacgaaaacgaaccgaaaccgtaataaatcgaaacgaactaatcgtaacgtaaaaaatcgaataaaaaaaaataaaaaataaaaaaacgaaaatatcaataacgcacgcgaacaccctaaccaatcgacaatcgacaatcgactaaaacacttacgcaacgctcgacttacgccacgacccaaaaactcacctaacgccgaccgctaccgcccataatacgaaatcgtctaacaccctcctccacacccaacgttaaaaaaaataaaaataatatatcaaaaaaactccgaaaatacctaataaaacgcatacgccgatccgctaatacctcccaccgcaaccgccctttaaacgaaataatctaacaaatacctccactcccaaccgaatcgaattattttaaaatttttactctaaatacgaatacgaataaaat

SEQ ID NO: 13333 - DNA, 803 bp, Artificial Sequence
  chemically treated genomic DNA (Homo sapiens) CpG-island No: 13333
  unsure (145, 156, 159, 193, 196, 241, 281, 302)
gaagggttattttcgaggtgggcgtggagaggtttgagcggttggtgtttgaatgaggtttggggtgtttggggtggggcgattgcgttgaaatgatgttgtttttgggggcgcggggttgcgaggtagagatgtcggtttgggngaatggggttnttntgagcgggaatggcgtattgtaattattggtgtnttnagaattgtgcggtgcgtgtgtgaaagaggcggatagtcgttgcgngtgtcggggagagagttaatgacgcgggtgcgttaagttngggatgcgtgacgtttttgtnattgtgcgggcgtttcgtgtcgttcgaacgtagtcgtacgggattgtgcggaattaattggttcggcgaggtgatgcggtgacgtgatttttttttatttcggagtttggtttgtacgttggcgttggtcgattttttttgtttattttaaaggttattatattttgtttattcgtagatattttatcgcgacgaatatagttataatcggtttttggtagattcggtataatgtcgaaggttattagtttgttcgtttcggtatatggtatggtattacgtacggcggtacggaacgcgtttttatcggtaattatatgattcgtcgttaatattagtattaacgggtcgtttttcgggttatgacgttttgtcgttagcgtcgttagcgtaatggtaggtgtcgtgtttcgttttgtcggttcgagaataatgttttcggtaagtttgtttagttgacgtagttgtttcgcgataataaagcggtgttgtttattgtaa

SEQ ID NO: 13334 - DNA, 803 bp, Artificial Sequence
  chemically treated genomic DNA (Homo sapiens) CpG-island No: 13334
  unsure (502, 523, 563, 608, 611, 645, 648, 659)
ttacaataaacaacaccgctttattatcgcgaaacaactacgtcaactaaacaaacttaccgaaaacattattctcgaaccgacaaaacgaaacacgacacctaccattacgctaacgacgctaacgacaaaacgtcataacccgaaaaacgacccgttaatactaatattaacgacgaatcatataattaccgataaaaacgcgttccgtaccgccgtacgtaataccataccatataccgaaacgaacaaactaataaccttcgacattataccgaatctaccaaaaaccgattataactatattcgtcgcgataaaatatctacgaataaacaaaatataataacctttaaaataaacaaaaaaaatcgaccaacgccaacgtacaaaccaaactccgaaataaaaaaaaatcacgtcaccgcatcacctcgccgaaccaattaattccgcacaatcccgtacgactacgttcgaacgacacgaaacgcccgcacaatnacaaaaacgtcacgcatcccnaacttaacgcacccgcgtcattaactctctccccgacacncgcaacgactatccgcctctttcacacacgcaccgcacaattctnaanacaccaataattacaatacgccattcccgctcanaanaaccccattcncccaaaccgacatctctacctcgcaaccccgcgcccccaaaaacaacatcatttcaacgcaatcgccccaccccaaacaccccaaacctcattcaaacaccaaccgctcaaacctctccacgcccacctcgaaaataacccttc

SEQ ID NO: 13335 - DNA, 803 bp, Artificial Sequence
  chemically treated genomic DNA (Homo sapiens) CpG-island No: 13335
  unsure (502, 523, 563, 608, 611, 645, 648, 659)
ttgtaatgagtagtatcgttttattgtcgcggaatagttgcgttaattgaataaatttatcgagaatattattttcgaatcggtagggcgaaatacggtatttgttattgcgttggcggcgttggcggtaaaacgttatagttcggagagcgattcgttaatgttggtattggcggcggattatgtgattgtcgatgaagacgcgtttcgtgtcgtcgtgcgtaatgttatgttatatgtcgaagcgggtaagttggtgattttcggtattgtgtcggatttattagaaatcggttatggttatattcgtcgcggtgaagtgtttgcgggtgagtaggatatggtggtttttgaagtgggtaaaaggagtcgattaacgttagcgtataagttaaatttcggggtaagagagagttacgttatcgtattatttcgtcgggttagttgatttcgtataatttcgtacgattacgttcgagcggtacgaagcgttcgtataatnataagagcgttacgtattttngatttgacgtattcgcgttattgatttttttttcgatatncgtaacgattattcgttttttttatatacgtatcgtataattttnagngtattaatagttataatacgttattttcgtttanaanggttttatttntttagatcgatatttttatttcgtaatttcgcgtttttaaagatagtattattttaacgtagtcgttttattttaagtattttaagttttatttaaatattagtcgtttagatttttttacgtttatttcgagaataatttttt

SEQ ID NO: 13336 - DNA, 803 bp, Artificial Sequence
  chemically treated genomic DNA (Homo sapiens) CpG-island No: 13336
  unsure (145, 156, 159, 193, 196, 241, 281, 302)
aaaaaattattctcgaaataaacgtaaaaaaatctaaacgactaatatttaaataaaacttaaaatacttaaaataaaacgactacgttaaaataatactatctttaaaaacgcgaaattacgaaataaaaatatcgatctaaanaaataaaaccnttntaaacgaaaataacgtattataactattaatacnctnaaaattatacgatacgtatataaaaaaaacgaataatcgttacgnatatcgaaaaaaaaatcaataacgcgaatacgtcaaatcnaaaatacgtaacgctcttatnattatacgaacgcttcgtaccgctcgaacgtaatcgtacgaaattatacgaaatcaactaacccgacgaaataatacgataacgtaactctctcttaccccgaaatttaacttatacgctaacgttaatcgactccttttacccacttcaaaaaccaccatatcctactcacccgcaaacacttcaccgcgacgaatataaccataaccgatttctaataaatccgacacaataccgaaaatcaccaacttacccgcttcgacatataacataacattacgcacgacgacacgaaacgcgtcttcatcgacaatcacataatccgccgccaataccaacattaacgaatcgctctccgaactataacgttttaccgccaacgccgccaacgcaataacaaataccgtatttcgccctaccgattcgaaaataatattctcgataaatttattcaattaacgcaactattccgcgacaataaaacgatactactcattacaa

SEQ ID NO: 13337 - DNA, 575 bp, Artificial Sequence
  chemically treated genomic DNA (Homo sapiens) CpG-island No: 13337
  unsure (513, 530)
tttttcggtacgtttttttggttgtttttgtaattcgacggtagcgtgtcgtttatcgagttggtggattaggcgtggtagtagggtttaatcgaatttgattcgcgtgacgatttttttggtaaagacgtgatgcgtaagttggtgattttggcgcgtgaagtaggttataatatcgaatcggattaggtacgtgtggaatcgttggtgtttgtttattgcgaaggcggtagtatcgattatttttttgaaaatggcgatgaattgaacgagtagatggtgtaacggttggaagcggttcgcgaaatggggttggtgttgcgttacgtggcgcgtttcgatgttaacggtaaagcgcgtgtaggcgtggaagcggtgcgtgaagattattcgttggtattattgttgtcgtgcgataacgtttttgttatcgaaagtcgttggtatcgcgataattttttggtgattcgcggatttggcgttgggcgcgacgttatcgtcggggcgatttangtcgatattaatcgttngtatagttgttgtaatttagaaattaataatgttcgtatttatgt

SEQ ID NO: 13338 - DNA, 575 bp, Artificial Sequence
  chemically treated genomic DNA (Homo sapiens) CpG-island No: 13338
  unsure (46, 63)
acataaatacgaacattattaatttctaaattacaacaactatacnaacgattaatatcgacntaaatcgccccgacgataacgtcgcgcccaacgccaaatccgcgaatcaccaaaaaattatcgcgataccaacgactttcgataacaaaaacgttatcgcacgacaacaataataccaacgaataatcttcacgcaccgcttccacgcctacacgcgctttaccgttaacatcgaaacgcgccacgtaacgcaacaccaaccccatttcgcgaaccgcttccaaccgttacaccatctactcgttcaattcatcgccattttcaaaaaaataatcgatactaccgccttcgcaataaacaaacaccaacgattccacacgtacctaatccgattcgatattataacctacttcacgcgccaaaatcaccaacttacgcatcacgtctttaccaaaaaaatcgtcacgcgaatcaaattcgattaaaccctactaccacgcctaatccaccaactcgataaacgacacgctaccgtcgaattacaaaaacaaccaaaaaaacgtaccgaaaaa

SEQ ID NO: 13339 - DNA, 575 bp, Artificial Sequence
  chemically treated genomic DNA (Homo sapiens) CpG-island No: 13339
  unsure (46, 63)
atatgagtacgggtattattaatttttgaattataataattgtgtnagcggttgatatcgatntgaatcgtttcggcggtgacgtcgcgtttagcgttaggttcgcggattattagagggttatcgcgatattagcggttttcgatggtaaagacgttatcgtacggtagtagtgatgttaacggatgatttttacgtatcgtttttacgtttatacgcgttttatcgttggtatcgaaacgcgttacgtagcgtagtattagttttatttcgcgggtcgtttttagtcgttgtattatttgttcgtttagtttatcgttatttttaaagaaatggtcgatgttgtcgttttcgtaatgagtaggtattagcgattttatacgtatttgattcggttcgatgttgtaatttgttttacgcgttagaattattagtttgcgtattacgtttttgttagagagatcgttacgcgggttaggttcggttaagttttgttgttacgtttgatttattagttcggtaaacggtacgttatcgtcgaattgtaggaatagttaggagagcgtgtcggagaa

SEQ ID NO: 13340 - DNA, 575 bp, Artificial Sequence
  chemically treated genomic DNA (Homo sapiens) CpG-island No: 13340
  unsure (513, 530)
ttctccgacacgctctcctaactattcctacaattcgacgataacgtaccgtttaccgaactaataaatcaaacgtaacaacaaaacttaaccgaacctaacccgcgtaacgatctctctaacaaaaacgtaatacgcaaactaataattctaacgcgtaaaacaaattacaacatcgaaccgaatcaaatacgtataaaatcgctaatacctactcattacgaaaacgacaacatcgaccatttctttaaaaataacgataaactaaacgaacaaataatacaacgactaaaaacgacccgcgaaataaaactaatactacgctacgtaacgcgtttcgataccaacgataaaacgcgtataaacgtaaaaacgatacgtaaaaatcatccgttaacatcactactaccgtacgataacgtctttaccatcgaaaaccgctaatatcgcgataaccctctaataatccgcgaacctaacgctaaacgcgacgtcaccgccgaaacgattcanatcgatatcaaccgctnacacaattattataattcaaaaattaataatacccgtactcatat

SEQ ID NO: 13341 - DNA, 521 bp, Artificial Sequence
  chemically treated genomic DNA (Homo sapiens) CpG-island No: 13341
gtggtttaaatagatttcggcgttgatttcgttgaagaaatcggtttgatttttatcgaaaacgcgattttgaaagcgcgttatgcggtaaaagtgatcgttttatcggtaattgtcgacgattttggtttggcggtagatgtgtttggcggcgcgtcgggtatttatttcgcgcgttatttcggtgaagacgcgatcgattaaaagaatttgtaaaaattgttggaaataatgaaagacgtatcggacgattaacgttaggcgcgtttttattgcgtgttggtatatttgcgttacgcggaagattttatttcgttggtatgttacggtaattggtcgggcgtgattattcgtgaattagcgggtattggtggttttggttatgatttaatttttttcgtatttttcgaaggaaaatcgtcgtcgaattgattcgcgaagaaaagagcgttattttttatcgtgggttaggcgttgaaattgttgttggacgttttacgtaataaaaatgatcgttttgt

SEQ ID NO: 13342 - DNA, 521 bp, Artificial Sequence
  chemically treated genomic DNA (Homo sapiens) CpG-island No: 13342
acaaaacgatcatttttattacgtaaaacgtccaacaacaatttcaacgcctaacccacgataaaaaataacgctcttttcttcgcgaatcaattcgacgacgattttccttcgaaaaatacgaaaaaaattaaatcataaccaaaaccaccaatacccgctaattcacgaataatcacgcccgaccaattaccgtaacataccaacgaaataaaatcttccgcgtaacgcaaatataccaacacgcaataaaaacgcgcctaacgttaatcgtccgatacgtctttcattatttccaacaatttttacaaattcttttaatcgatcgcgtcttcaccgaaataacgcgcgaaataaatacccgacgcgccgccaaacacatctaccgccaaaccaaaatcgtcgacaattaccgataaaacgatcacttttaccgcataacgcgctttcaaaatcgcgttttcgataaaaatcaaaccgatttcttcaacgaaatcaacgccgaaatctatttaaaccac

SEQ ID NO: 13343 - DNA, 521 bp, Artificial Sequence
  chemically treated genomic DNA (Homo sapiens) CpG-island No: 13343
ataaaacggttatttttattacgtaaagcgtttagtagtagttttaacgtttgatttacggtgggaaatggcgttttttttttcgcgggttagttcggcggcggttttttttcggaaggtacgaagaagattggattataattaaagttattagtgttcgttggtttacgaataattacgttcggttagttatcgtggtatattagcggagtgggatttttcgcgtgacgtagatatattagtacgtagtggaaacgcgtttgacgttggtcgttcggtacgttttttattgtttttagtagtttttgtagatttttttgatcggtcgcgtttttatcggaataacgcgcggagtaaatgttcggcgcgtcgttaagtatatttatcgttagattagagtcgtcggtaattgtcggtaaagcggttatttttgtcgtatggcgcgtttttagaatcgcgttttcgataaaggttaggtcggtttttttagcggaattaacgtcgaggtttgtttgggttat

SEQ ID NO: 13344 - DNA, 521 bp, Artificial Sequence
  chemically treated genomic DNA (Homo sapiens) CpG-island No: 13344
ataacccaaacaaacctcgacgttaattccgctaaaaaaaccgacctaacctttatcgaaaacgcgattctaaaaacgcgccatacgacaaaaataaccgctttaccgacaattaccgacgactctaatctaacgataaatatacttaacgacgcgccgaacatttactccgcgcgttattccgataaaaacgcgaccgatcaaaaaaatctacaaaaactactaaaaacaataaaaaacgtaccgaacgaccaacgtcaaacgcgtttccactacgtactaatatatctacgtcacgcgaaaaatcccactccgctaatataccacgataactaaccgaacgtaattattcgtaaaccaacgaacactaataactttaattataatccaatcttcttcgtaccttccgaaaaaaaaccgccgccgaactaacccgcgaaaaaaaaaacgccatttcccaccgtaaatcaaacgttaaaactactactaaacgctttacgtaataaaaataaccgttttat

SEQ ID NO: 13345 - DNA, 711 bp, Artificial Sequence
  chemically treated genomic DNA (Homo sapiens) CpG-island No: 13345
gtattcggtttttcgtttggtcgaatacgatgttcgtcgtcgatttaaatatttcgttcgttatttttatttcgtcgtgtagatcgaattttttcgttatttgtttgtcgagcgtagtttggtcgttatggaacgtcggtagatagtgtaggaattttacgttcgggttgtcggttagcgttattatttgcgcgtttatttgatattcgcgtatagcgtaattcgttttgtttatttttttttggtttcgtttatcgatatttatacgtcggtatagataaagttcgcgtttttaacgtttgtcgttacgtttttcgttagagtaattttttcgtcgtgttttttcgttagcgcgttgtatttcgttattaggttttttttcggttagtaggttttcggggttaataggcgtagatttagttcggttagcgtcgtcgtttttagtatcgagttgtttatgttgttgcgcgtatcgttcgcgtagattagcgttatttcgttaaacgttttgttcggtaggtgtttttgtatggttattaggttcgttagtagttgggtcgggtggaattcgttggttagttcgttttatatcggtacgttcgtatatttgcgtacggatttcgatatttttttggcgtgatcgcgatattgaatgtagttatatattcgttcgagaaatcgcgcggtgtttttaattgattttttatgtta

SEQ ID NO: 13346 - DNA, 711 bp, Artificial Sequence
  chemically treated genomic DNA (Homo sapiens) CpG-island No: 13346
taacataaaaaatcaattaaaaacaccgcgcgatttctcgaacgaatatataactacattcaatatcgcgatcacgccaaaaaaatatcgaaatccgtacgcaaatatacgaacgtaccgatataaaacgaactaaccaacgaattccacccgacccaactactaacgaacctaataaccatacaaaaacacctaccgaacaaaacgtttaacgaaataacgctaatctacgcgaacgatacgcgcaacaacataaacaactcgatactaaaaacgacgacgctaaccgaactaaatctacgcctattaaccccgaaaacctactaaccgaaaaaaaacctaataacgaaatacaacgcgctaacgaaaaaacacgacgaaaaaattactctaacgaaaaacgtaacgacaaacgttaaaaacgcgaactttatctataccgacgtataaatatcgataaacgaaaccaaaaaaaaataaacaaaacgaattacgctatacgcgaatatcaaataaacgcgcaaataataacgctaaccgacaacccgaacgtaaaattcctacactatctaccgacgttccataacgaccaaactacgctcgacaaacaaataacgaaaaaattcgatctacacgacgaaataaaaataacgaacgaaatatttaaatcgacgacgaacatcgtattcgaccaaacgaaaaaccgaatac

SEQ ID NO: 13347 - DNA, 711 bp, Artificial Sequence
  chemically treated genomic DNA (Homo sapiens) CpG-island No: 13347
tggtataaagagttaattaaggatatcgcgcggtttttcgggcggatgtatgattgtatttagtatcgcggttacgttagaaaagtgtcgaaattcgtgcgtaagtatgcgggcgtgtcggtgtggaacgggttgattaacgagttttattcgatttagttgttggcggatttgatgattatgtaggagtatttgtcgggtaaggcgtttaacgagatgacgttggtttacgcgggcgatgcgcgtaataatatgggtaattcgatgttggaagcggcggcgttgatcgggttggatttgcgtttgttggtttcgaaagtttgttggtcggaagagagtttggtggcggagtgtagcgcgttggcggagaagtacggcgggaaaattattttgacggaagacgtggcggtaggcgttaagggcgcggattttatttatatcgacgtgtgggtgtcgatgggcgaggttaaagagaagtgggtagagcggattgcgttgtgcgcgggtattaggtgaacgcgtagatgatggcgttgatcgataattcgaacgtgaagtttttgtattgtttgtcggcgttttatgacgattagattacgttcggtaagtagatggcgaaggagttcgatttgtacggcgggatggaggtgacggacgaggtgtttgagtcggcggcgagtatcgtgttcgattaggcggaaaatcggatgt

SEQ ID NO: 13348 - DNA, 711 bp, Artificial Sequence
  chemically treated genomic DNA (Homo sapiens) CpG-island No: 13348
acatccgattttccgcctaatcgaacacgatactcgccgccgactcaaacacctcgtccgtcacctccatcccgccgtacaaatcgaactccttcgccatctacttaccgaacgtaatctaatcgtcataaaacgccgacaaacaatacaaaaacttcacgttcgaattatcgatcaacgccatcatctacgcgttcacctaatacccgcgcacaacgcaatccgctctacccacttctctttaacctcgcccatcgacacccacacgtcgatataaataaaatccgcgcccttaacgcctaccgccacgtcttccgtcaaaataattttcccgccgtacttctccgccaacgcgctacactccgccaccaaactctcttccgaccaacaaactttcgaaaccaacaaacgcaaatccaacccgatcaacgccgccgcttccaacatcgaattacccatattattacgcgcatcgcccgcgtaaaccaacgtcatctcgttaaacgccttacccgacaaatactcctacataatcatcaaatccgccaacaactaaatcgaataaaactcgttaatcaacccgttccacaccgacacgcccgcatacttacgcacgaatttcgacacttttctaacgtaaccgcgatactaaatacaatcatacatccgcccgaaaaaccgcgcgatatccttaattaactctttatacca

SEQ ID NO: 13349 - DNA, 792 bp, Artificial Sequence
  chemically treated genomic DNA (Homo sapiens) CpG-island No: 13349
tttttttcgggttgcgcgattttcgcgttttcggatgcgggtgcgagttttcgttttgtttcgtatttagttttcggcgttattatacgtttttggttttcgttttggtttgtcgtttttttcggggtcgggcgtttttttcgaggcgagattcgtcggtaattgggaaggggggtttttataaatttgatcgtaagtttagcgtcgattttcggtagggcgcgcggggtaggcggaggagaggtcgttgttcgtattttttgttatcgtcgttttaattgagtcggtaggaaaagttttttcgacgagggtaggcgtgttttttttatttaggggaggcgcgggttcggtagttttcgggtcggggtcgcgtagttaggttagagaagcggaggggaaaggaataagatcgcgaggagttaagttttataatttttgggcgggacggtcgggttcgttttcgcggtatcggtatcgttttcgtttatttcgattgagttttttcgtgttgttgtcgtcgtcgtcgtcgacgttgcggttgggtcgatgtgtatttcggatttcggggtttacggattgatgagtttttttagagttagcgttcgttcgttagattttttcgtttttcgtcgtttttattttttttttttcggatttaggtttcgcggggaggcgtagggggcgggcggcggtaacgcggaaagaaggaaaaggagagtagggaggaaaggatcgttttcggagagaagttcgttttagttgtagtcgttagttttttttttttttttcgtt

SEQ ID NO: 13350 - DNA, 792 bp, Artificial Sequence
  chemically treated genomic DNA (Homo sapiens) CpG-island No: 13350
aacgaaaaaaaaaaaaaaaactaacgactacaactaaaacgaacttctctccgaaaacgatcctttcctccctactctccttttccttctttccgcgttaccgccgcccgccccctacgcctccccgcgaaacctaaatccgaaaaaaaaaaaataaaaacgacgaaaaacgaaaaaatctaacgaacgaacgctaactctaaaaaaactcatcaatccgtaaaccccgaaatccgaaatacacatcgacccaaccgcaacgtcgacgacgacgacgacaacaacacgaaaaaactcaatcgaaataaacgaaaacgataccgataccgcgaaaacgaacccgaccgtcccgcccaaaaattataaaacttaactcctcgcgatcttattcctttcccctccgcttctctaacctaactacgcgaccccgacccgaaaactaccgaacccgcgcctcccctaaataaaaaaaacacgcctaccctcgtcgaaaaaacttttcctaccgactcaattaaaacgacgataacaaaaaatacgaacaacgacctctcctccgcctaccccgcgcgccctaccgaaaatcgacgctaaacttacgatcaaatttataaaaaccccccttcccaattaccgacgaatctcgcctcgaaaaaaacgcccgaccccgaaaaaaacgacaaaccaaaacgaaaaccaaaaacgtataataacgccgaaaactaaatacgaaacaaaacgaaaactcgcacccgcatccgaaaacgcgaaaatcgcgcaacccgaaaaaaa

SEQ ID NO: 13351 - DNA, 792 bp, Artificial Sequence
  chemically treated genomic DNA (Homo sapiens) CpG-island No: 13351
ggcgggaaagagggagggggttagcggttgtagttggagcgggttttttttcggggacggtttttttttttttgtttttttttttttttttttcgcgttgtcgtcgttcgttttttgcgttttttcgcggagtttgggttcgggagggggaaggtaggggcggcggggggcgggagagtttggcgagcggacgttagttttgaggaaatttattaattcgtgagtttcggagttcggggtgtatatcggtttagtcgtagcgtcggcggcggcggcggtagtagtacgaaggggtttagtcggggtaggcgggggcggtgtcggtgtcgcgggggcgggttcgatcgtttcgtttagaagttgtagggtttggtttttcgcgattttgtttttttttttttcgtttttttgatttagttgcgcggtttcggttcgggagttgtcgaattcgcgttttttttgggtgaggaggatacgtttgttttcgtcgagaaaattttttttgtcgatttagttggggcggcggtggtaggaagtgcgggtagcgatttttttttcgtttgtttcgcgcgttttgtcggaggtcggcgttgagtttgcgattaagtttgtgggggtttttttttttagttgtcggcgagtttcgtttcgagaggggcgttcgatttcggggagggcggtaggttagggcgaaggttaagggcgtgtggtggcgtcggagattaggtgcggagtaaggcggggattcgtattcgtattcgagagcgcggaggtcgcgtagttcgggagaag

SEQ ID NO: 13352 - DNA, 792 bp, Artificial Sequence
  chemically treated genomic DNA (Homo sapiens) CpG-island No: 13352
cttctcccgaactacgcgacctccgcgctctcgaatacgaatacgaatccccgccttactccgcacctaatctccgacgccaccacacgcccttaaccttcgccctaacctaccgccctccccgaaatcgaacgcccctctcgaaacgaaactcgccgacaactaaaaaaaaaaacccccacaaacttaatcgcaaactcaacgccgacctccgacaaaacgcgcgaaacaaacgaaaaaaaaatcgctacccgcacttcctaccaccgccgccccaactaaatcgacaaaaaaaattttctcgacgaaaacaaacgtatcctcctcacccaaaaaaaacgcgaattcgacaactcccgaaccgaaaccgcgcaactaaatcaaaaaaacgaaaaaaaaaaaaacaaaatcgcgaaaaaccaaaccctacaacttctaaacgaaacgatcgaacccgcccccgcgacaccgacaccgcccccgcctaccccgactaaaccccttcgtactactaccgccgccgccgccgacgctacgactaaaccgatatacaccccgaactccgaaactcacgaattaataaatttcctcaaaactaacgtccgctcgccaaactctcccgccccccgccgcccctaccttccccctcccgaacccaaactccgcgaaaaaacgcaaaaaacgaacgacgacaacgcgaaaaaaaaaaaaaaaaaaacaaaaaaaaaaaaaccgtccccgaaaaaaaacccgctccaactacaaccgctaaccccctccctctttcccgcc

SEQ ID NO: 13353 - DNA, 634 bp, Artificial Sequence
  chemically treated genomic DNA (Homo sapiens) CpG-island No: 13353
tcgtcgtcgttcggtttcgtcggtcgtgcgtttcgcggcgttcgtcgttcgttacgtcgtcgtttacggtgcggtttcgttcggcgcgtggggggttcgacgtttacgcggtcgtcgcgcgtagtagtattcgcggtacgttttttgatcggtcgtcgtaatcgtcgcgtacgttgtttagcgtcgcgtcggtatatcgcggagcgtttttatcgcgtaggcgcgtcggttcgtcgattatcgcgtcgttatcgcgtcggagcgcgtcgtgtacggcgagcggcgcgtatcgagacggtcgcgtcggtgcggcgcgtcgcgcgatcgcgtcgtcgtaggcgcgttcgttcgcgtttttttcgttattcgtcggtcgttcgttggcgggtcgtatagttcgtttttgcgttcgatagcgcgtcgttttcgtcgtttacgtcgtatcgtagcgtttagtcgttatatcgttcgtcgtttcgtatttattcgatacgtttttaacgttttcgttacgtcggtttcgtcggtcgtttcgttgtacggcgtacgttcgcgcgtagcgatagttatggagattttttgttttttagaaaaatattttatgttttggtatgaaattgttaaggaaaataat

SEQ ID NO: 13354 - DNA, 634 bp, Artificial Sequence
  chemically treated genomic DNA (Homo sapiens) CpG-island No: 13354
attattttccttaacaatttcataccaaaacataaaatatttttctaaaaaacaaaaaatctccataactatcgctacgcgcgaacgtacgccgtacaacgaaacgaccgacgaaaccgacgtaacgaaaacgttaaaaacgtatcgaataaatacgaaacgacgaacgatataacgactaaacgctacgatacgacgtaaacgacgaaaacgacgcgctatcgaacgcaaaaacgaactatacgacccgccaacgaacgaccgacgaataacgaaaaaaacgcgaacgaacgcgcctacgacgacgcgatcgcgcgacgcgccgcaccgacgcgaccgtctcgatacgcgccgctcgccgtacacgacgcgctccgacgcgataacgacgcgataatcgacgaaccgacgcgcctacgcgataaaaacgctccgcgatataccgacgcgacgctaaacaacgtacgcgacgattacgacgaccgatcaaaaaacgtaccgcgaatactactacgcgcgacgaccgcgtaaacgtcgaaccccccacgcgccgaacgaaaccgcaccgtaaacgacgacgtaacgaacgacgaacgccgcgaaacgcacgaccgacgaaaccgaacgacgacga

SEQ ID NO: 13355 - DNA, 634 bp, Artificial Sequence
  chemically treated genomic DNA (Homo sapiens) CpG-island No: 13355
gttgttttttttggtaattttatgttaaaatatagaatgtttttttgggggataagagatttttataattatcgttgcgcgcgggcgtgcgtcgtgtagcgggacggtcggcggggtcggcgtggcgggggcgttgagggcgtgtcgggtgggtgcggggcggcgggcggtgtggcggttgggcgttgcggtgcggcgtgggcggcgggggcggcgcgttgtcggacgtaggggcgggttgtgcggttcgttagcgggcggtcggcgggtagcggggggggcgcgggcgggcgcgtttgcggcggcgcggtcgcgcggcgcgtcgtatcggcgcggtcgtttcggtgcgcgtcgttcgtcgtgtacggcgcgtttcgacgcggtggcggcgcggtggtcggcgggtcggcgcgtttgcgcggtgggggcgtttcgcggtgtgtcggcgcggcgttggataacgtgcgcggcggttgcggcggtcggttagagggcgtgtcgcgagtgttgttgcgcgcggcggtcgcgtgggcgtcgggttttttacgcgtcgggcggggtcgtatcgtgggcggcggcgtggcgggcggcgggcgtcgcggagcgtacggtcggcgggatcgggcggcggcgg

SEQ ID NO: 13356 - DNA, 634 bp, Artificial Sequence
  chemically treated genomic DNA (Homo sapiens) CpG-island No: 13356
ccgccgccgcccgatcccgccgaccgtacgctccgcgacgcccgccgcccgccacgccgccgcccacgatacgaccccgcccgacgcgtaaaaaacccgacgcccacgcgaccgccgcgcgcaacaacactcgcgacacgccctctaaccgaccgccgcaaccgccgcgcacgttatccaacgccgcgccgacacaccgcgaaacgcccccaccgcgcaaacgcgccgacccgccgaccaccgcgccgccaccgcgtcgaaacgcgccgtacacgacgaacgacgcgcaccgaaacgaccgcgccgatacgacgcgccgcgcgaccgcgccgccgcaaacgcgcccgcccgcgccccccccgctacccgccgaccgcccgctaacgaaccgcacaacccgcccctacgtccgacaacgcgccgcccccgccgcccacgccgcaccgcaacgcccaaccgccacaccgcccgccgccccgcacccacccgacacgccctcaacgcccccgccacgccgaccccgccgaccgtcccgctacacgacgcacgcccgcgcgcaacgataattataaaaatctcttatcccccaaaaaaacattctatattttaacataaaattaccaaaaaaaacaac

SEQ ID NO: 13357 - DNA, 677 bp, Artificial Sequence
  chemically treated genomic DNA (Homo sapiens) CpG-island No: 13357
tggcggtcgtttttgtttcgttttacgggcggggtcgattttcgtttttgcgttgtgtttgtttgtcgggcgtagtgtgttatggttttcgtttcgatttcggtagtcgttagatttttttcggtggagacgttttcgttttgatttgcgtcggtcgttttgttaggttttgtattttgattgtaagacgttgtttgtggtttttacggtatcgttttattagcgtattgtgttcgtttattacgtttaacggtgtacgtgttttgtcgtttacgttttagttagcgattgcgagcgcgtttgtgcgtttttcggttagcgatcggtgagtgtgcgtttcgttttggttttcgatcgagcgatcggtttgggcgttgttgtcgagttagttggtattcgcgtttttgtattttgttgttggtggtacggttatgcggcgttgtagtttcgatgatgtgtttgttgtgtattttttttcgttgtcgttagcgtttcgcgcgtgggtttgttttgtgggttcgttttgttgttagtcgttacgttgcgaggtattatgttgcggtgttaggttgttttgtgttgcgagttgttgatgtgattggtgtgtatcgtatacgttatgagatattggtggttgtattttaagttcgttgagtagtgagatgtgtgtgatttgt

SEQ ID NO: 13358 - DNA, 677 bp, Artificial Sequence
  chemically treated genomic DNA (Homo sapiens) CpG-island No: 13358
acaaatcacacacatctcactactcaacgaacttaaaatacaaccaccaatatctcataacgtatacgatacacaccaatcacatcaacaactcgcaacacaaaacaacctaacaccgcaacataatacctcgcaacgtaacgactaacaacaaaacgaacccacaaaacaaacccacgcgcgaaacgctaacgacaacgaaaaaaaatacacaacaaacacatcatcgaaactacaacgccgcataaccgtaccaccaacaacaaaatacaaaaacgcgaataccaactaactcgacaacaacgcccaaaccgatcgctcgatcgaaaaccaaaacgaaacgcacactcaccgatcgctaaccgaaaaacgcacaaacgcgctcgcaatcgctaactaaaacgtaaacgacaaaacacgtacaccgttaaacgtaataaacgaacacaatacgctaataaaacgataccgtaaaaaccacaaacaacgtcttacaatcaaaatacaaaacctaacaaaacgaccgacgcaaatcaaaacgaaaacgtctccaccgaaaaaaatctaacgactaccgaaatcgaaacgaaaaccataacacactacgcccgacaaacaaacacaacgcaaaaacgaaaatcgaccccgcccgtaaaacgaaacaaaaacgaccgcca

SEQ ID NO: 13359 - DNA, 677 bp, Artificial Sequence
  chemically treated genomic DNA (Homo sapiens) CpG-island No: 13359
atagattatatatattttattgtttagcgagtttagagtatagttattaatgttttatggcgtatgcgatgtatattaattatattagtagttcgtaatataagataatttagtatcgtagtatgatatttcgtaacgtggcgattagtagtagagcgagtttataaaataagtttacgcgcgaaacgttgacgatagcgaagaggaatgtatagtagatatattatcgaggttgtagcgtcgtatggtcgtattattagtagtaagatgtaaaggcgcgagtgttagttagttcgatagtagcgtttagatcgatcgttcgatcgagagttaaagcgaagcgtatatttatcggtcgttgatcgagagacgtatagacgcgttcgtagtcgttgattaggacgtgggcgatagggtacgtatatcgttagacgtagtgaacgagtatagtgcgttgatagagcgatgtcgtgaaagttatagatagcgttttgtaattaagatgtaagatttgataggacggtcggcgtaggttaggacgagagcgtttttatcggggagaatttagcggttgtcgagatcgggacgaaaattatgatatattgcgttcgataagtaagtataacgtagagacgggagtcgatttcgttcgtggagcgaggtagagacgatcgtta

SEQ ID NO: 13360 - DNA, 677 bp, Artificial Sequence
  chemically treated genomic DNA (Homo sapiens) CpG-island No: 13360
taacgatcgtctctacctcgctccacgaacgaaatcgactcccgtctctacgttatacttacttatcgaacgcaatatatcataattttcgtcccgatctcgacaaccgctaaattctccccgataaaaacgctctcgtcctaacctacgccgaccgtcctatcaaatcttacatcttaattacaaaacgctatctataactttcacgacatcgctctatcaacgcactatactcgttcactacgtctaacgatatacgtaccctatcgcccacgtcctaatcaacgactacgaacgcgtctatacgtctctcgatcaacgaccgataaatatacgcttcgctttaactctcgatcgaacgatcgatctaaacgctactatcgaactaactaacactcgcgcctttacatcttactactaataatacgaccatacgacgctacaacctcgataatatatctactatacattcctcttcgctatcgtcaacgtttcgcgcgtaaacttattttataaactcgctctactactaatcgccacgttacgaaatatcatactacgatactaaattatcttatattacgaactactaatataattaatatacatcgcatacgccataaaacattaataactatactctaaactcgctaaacaataaaatatatataatctat

SEQ ID NO: 13361 - DNA, 522 bp, Artificial Sequence
  chemically treated genomic DNA (Homo sapiens) CpG-island No: 13361
tcgtatcgtcgtgtttttcggtttaagttttaatattcgggcgaattggcgtgttttattagttcggtagtatgaattattattcgttagttattttattggagacgacggaagatcgttgtcgaagcggcgttttatcgtttttagtatgacgttttgtattgtaatattgttgaagtcgtcggtagtgatcggttagtgtaggggtttagcgattataggagtttagggcgaacgtgaaacggagttttttttcgggattacggagaattcgaattcgtcgagtaattttttgaatgtattagtacggttattttgcggatgtgtcgaataatggggacgtaggttcggttagaaagcgtatcgggtatagcggtattcgtgggagatcgggattataagacgatatcgaagagttacgcgcggttaaaatatgaatattaagggtaagaattatataaggaaggggattatacgggtaaagtagggacgaaagtaattacgaggttttttataagtgaa

SEQ ID NO: 13362 - DNA, 522 bp, Artificial Sequence
  chemically treated genomic DNA (Homo sapiens) CpG-island No: 13362
ttcacttataaaaaacctcgtaattactttcgtccctactttacccgtataatccccttccttatataattcttacccttaatattcatattttaaccgcgcgtaactcttcgatatcgtcttataatcccgatctcccacgaataccgctatacccgatacgctttctaaccgaacctacgtccccattattcgacacatccgcaaaataaccgtactaatacattcaaaaaattactcgacgaattcgaattctccgtaatcccgaaaaaaaactccgtttcacgttcgccctaaactcctataatcgctaaacccctacactaaccgatcactaccgacgacttcaacaatattacaatacaaaacgtcatactaaaaacgataaaacgccgcttcgacaacgatcttccgtcgtctccaataaaataactaacgaataataattcatactaccgaactaataaaacacgccaattcgcccgaatattaaaacttaaaccgaaaaacacgacgatacga

SEQ ID NO: 13363 - DNA, 522 bp, Artificial Sequence
  chemically treated genomic DNA (Homo sapiens) CpG-island No: 13363
tttatttgtgaggagtttcgtggttattttcgtttttgttttgttcgtgtggtttttttttttatgtggtttttatttttggtgtttatattttagtcgcgcgtggtttttcgatgtcgttttgtgatttcggttttttacgggtatcgttatgttcgatgcgttttttggtcggatttgcgtttttattgttcggtatattcgtagggtggtcgtattggtgtatttagggagttgttcgacgggttcgagtttttcgtgatttcggagagagatttcgttttacgttcgttttggatttttgtgatcgttgagtttttgtattggtcggttattatcggcggttttaatagtgttatagtataggacgttatgttgggagcggtggaacgtcgtttcggtaacgatttttcgtcgtttttagtggagtggttgacggataatggtttatgttatcgggttaatgaaatacgttagttcgttcggatgttgggatttgaatcgaagaatacggcggtgcgg

SEQ ID NO: 13364 - DNA, 522 bp, Artificial Sequence
  chemically treated genomic DNA (Homo sapiens) CpG-island No: 13364
ccgcaccgccgtattcttcgattcaaatcccaacatccgaacgaactaacgtatttcattaacccgataacataaaccattatccgtcaaccactccactaaaaacgacgaaaaatcgttaccgaaacgacgttccaccgctcccaacataacgtcctatactataacactattaaaaccgccgataataaccgaccaatacaaaaactcaacgatcacaaaaatccaaaacgaacgtaaaacgaaatctctctccgaaatcacgaaaaactcgaacccgtcgaacaactccctaaatacaccaatacgaccaccctacgaatataccgaacaataaaaacgcaaatccgaccaaaaaacgcatcgaacataacgatacccgtaaaaaaccgaaatcacaaaacgacatcgaaaaaccacgcgcgactaaaatataaacaccaaaaataaaaaccacataaaaaaaaaaaccacacgaacaaaacaaaaacgaaaataaccacgaaactcctcacaaataaa

SEQ ID NO: 13365 - DNA, 526 bp, Artificial Sequence
  chemically treated genomic DNA (Homo sapiens) CpG-island No: 13365
ttgtttcgtgttaaggtttgtgttgtgttagtggtgggtttcgtggcggtggtcggtggttggtcgggttatgtggtgggtggttaggggggtatgtttgtgtgcgtatgttgttttttttgtatgttttgtaattgttcgtggatttgggttcggtttggggtcgatttttgtgcggtttttcgtttggtggtgttttgggcggtcgtttgtggcgtgtttatttgtttgtggtgtgttttgtgtgtggtagtgttgtgtcgtttgtgtgtttcgtgttgtcgttttcgtatgcgcggtgggttgttttatgtgtggtgtatggtgtttgcgtgtgtcggattcggttggtttttgtcgtttgttgttttgtgggagtgtggggagtcgtgggggtgcggggtgcgggtgttgtttgttcgtgtggcgttgtcgtgtgcgatgtttttgttgtgggtcgttggatgtgtggtgagttgtgtgtgttgtttgtggtttggtgtggtttggttttggtgttttgttt

SEQ ID NO: 13366 - DNA, 526 bp, Artificial Sequence
  chemically treated genomic DNA (Homo sapiens) CpG-island No: 13366
aaacaaaacaccaaaaccaaaccacaccaaaccacaaacaacacacacaactcaccacacatccaacgacccacaacaaaaacatcgcacacgacaacgccacacgaacaaacaacacccgcaccccgcacccccacgactccccacactcccacaaaacaacaaacgacaaaaaccaaccgaatccgacacacgcaaacaccatacaccacacataaaacaacccaccgcgcatacgaaaacgacaacacgaaacacacaaacgacacaacactaccacacacaaaacacaccacaaacaaataaacacgccacaaacgaccgcccaaaacaccaccaaacgaaaaaccgcacaaaaatcgaccccaaaccgaacccaaatccacgaacaattacaaaacatacaaaaaaaacaacatacgcacacaaacatacccccctaaccacccaccacataacccgaccaaccaccgaccaccgccacgaaacccaccactaacacaacacaaaccttaacacgaaacaa

SEQ ID NO: 13367 - DNA, 526 bp, Artificial Sequence
  chemically treated genomic DNA (Homo sapiens) CpG-island No: 13367
agatagagtattaaaattagattatattagattataaatagtatatatagtttattatatatttaacgatttataatagagatatcgtatacggtaacgttatacgaataaataatattcgtatttcgtatttttacggttttttatatttttatagaataataagcgatagaaattagtcgaattcgatatacgtaaatattatatattatatatgagataatttatcgcgtatgcggaaacgatagtacggaatatataagcggtataatattgttatatatagaatatattataagtaaatagatacgttataggcgatcgtttagagtattattaggcgagagatcgtataaggatcgattttaagtcgaatttagatttacgaataattataggatatataaaaggaataatatacgtatataaatatatttttttggttatttattatatgattcggttaattatcggttatcgttacgggatttattattgatataatataaattttgatacgaaataa

SEQ ID NO: 13368 - DNA, 526 bp, Artificial Sequence
  chemically treated genomic DNA (Homo sapiens) CpG-island No: 13368
ttatttcgtatcaaaatttatattatatcaataataaatcccgtaacgataaccgataattaaccgaatcatataataaataaccaaaaaaatatatttatatacgtatattattccttttatatatcctataattattcgtaaatctaaattcgacttaaaatcgatccttatacgatctctcgcctaataatactctaaacgatcgcctataacgtatctatttacttataatatattctatatataacaatattataccgcttatatattccgtactatcgtttccgcatacgcgataaattatctcatatataatatataatatttacgtatatcgaattcgactaatttctatcgcttattattctataaaaatataaaaaaccgtaaaaatacgaaatacgaatattatttattcgtataacgttaccgtatacgatatctctattataaatcgttaaatatataataaactatatatactatttataatctaatataatctaattttaatactctatct

SEQ ID NO: 13369 - DNA, 621 bp, Artificial Sequence
  chemically treated genomic DNA (Homo sapiens) CpG-island No: 13369
agaggacgggttattggttcgtgggtacgcgtagggaatagtggagatttgttggggagataattttgggaagtatgtgcgtcgagggatgcggatgtagtcggtcgaatcggaagggtaaatttggattggaaatttcgagttattaacgggggatcggagtaatcggtttttttttttaatttttcgttgttttttacggggggttttaaagaagcgaaaatattattttttacgttgtttttatacggcgaatgtatttttatgcggaaaatttttttttttatttgggttaagaagattttggggtcgtattagcggcggcgcgtaaataattattgtggtggttaggtgaaaaagacgtattacgagtgaattcgcgtttgaaatttaatcgggcgaaaagtttttatacgaagcgtagatatttaattatatgggttatttttaaaatcgggggggatattatgtgacgaggtttcggtaatagtattaatcgtagttaatataggatagagacgacgatagaagttttattggggacgtacgtaatgaagtgaggggaggtataattaatagggaggcgttttgacggagagtaatttattttatagcgcgttt

SEQ ID NO: 13370 - DNA, 621 bp, Artificial Sequence
  chemically treated genomic DNA (Homo sapiens) CpG-island No: 13370
aaacgcgctataaaataaattactctccgtcaaaacgcctccctattaattatacctcccctcacttcattacgtacgtccccaataaaacttctatcgtcgtctctatcctatattaactacgattaatactattaccgaaacctcgtcacataatatcccccccgattttaaaaataacccatataattaaatatctacgcttcgtataaaaacttttcgcccgattaaatttcaaacgcgaattcactcgtaatacgtctttttcacctaaccaccacaataattatttacgcgccgccgctaatacgaccccaaaatcttcttaacccaaataaaaaaaaaaattttccgcataaaaatacattcgccgtataaaaacaacgtaaaaaataatattttcgcttctttaaaaccccccgtaaaaaacaacgaaaaattaaaaaaaaaaaccgattactccgatcccccgttaataactcgaaatttccaatccaaatttacccttccgattcgaccgactacatccgcatccctcgacgcacatacttcccaaaattatctccccaacaaatctccactattccctacgcgtacccacgaaccaataacccgtcctct

SEQ ID NO: 13371 - DNA, 621 bp, Artificial Sequence
  chemically treated genomic DNA (Homo sapiens) CpG-island No: 13371
gggcgcgttgtgaggtgagttgtttttcgttagggcgtttttttgttggttgtgtttttttttattttattgcgtgcgtttttagtggggtttttgtcgtcgtttttgttttgtgttggttacggttggtgttgttgtcggggtttcgttatatagtgtttttttcggttttggggatggtttatatgattggatgtttgcgtttcgtatggggatttttcgttcgattaaattttaagcgcgggtttattcgtggtgcgttttttttatttggttattatagtggttgtttacgcgtcgtcgttgatacggttttagagtttttttggtttaagtgggggagaaaatttttcgtatggaggtgtattcgtcgtgtagaggtaacgtaggaggtaatgttttcgtttttttggggtttttcgtggaagatagcgaggggttaaaaaaggggatcgattatttcggtttttcgttggtaattcggggtttttaatttaagtttgttttttcgattcggtcgattatattcgtatttttcggcgtatatattttttaaagttatttttttaataagtttttattgttttttacgcgtgtttacgaattagtggttcgtttttt

SEQ ID NO: 13372 - DNA, 621 bp, Artificial Sequence
  chemically treated genomic DNA (Homo sapiens) CpG-island No: 13372
aaaaaacgaaccactaattcgtaaacacgcgtaaaaaacaataaaaacttattaaaaaaataactttaaaaaatatatacgccgaaaaatacgaatataatcgaccgaatcgaaaaaacaaacttaaattaaaaaccccgaattaccaacgaaaaaccgaaataatcgatccccttttttaacccctcgctatcttccacgaaaaaccccaaaaaaacgaaaacattacctcctacgttacctctacacgacgaatacacctccatacgaaaaattttctcccccacttaaaccaaaaaaactctaaaaccgtatcaacgacgacgcgtaaacaaccactataataaccaaataaaaaaaacgcaccacgaataaacccgcgcttaaaatttaatcgaacgaaaaatccccatacgaaacgcaaacatccaatcatataaaccatccccaaaaccgaaaaaaacactatataacgaaaccccgacaacaacaccaaccgtaaccaacacaaaacaaaaacgacgacaaaaaccccactaaaaacgcacgcaataaaataaaaaaaaacacaaccaacaaaaaaacgccctaacgaaaaacaactcacctcacaacgcgccc

SEQ ID NO: 13373 - DNA, 913 bp, Artificial Sequence
  chemically treated genomic DNA (Homo sapiens) CpG-island No: 13373
ggcggcgcggaataaacgatataatttaggaaattagagaagttagtatacggaatatgttttttatcgaagaaggcgtaaatttcgttagatggcggtagttacggaagtcgagttttagaatatttagtagattttttagcggtttatttttcgggtagttgttttgttagagcgtttatgtattcgtacgggtaaacgtatattgtataaaatcgatatgttgttgggtggtgagcggtattaattttagtttaattttattatttattacgcgcgttatttgggtcgggaagacgtatttttgttgatcgcgtttaagtaatagatttattttttgtttttttagaatttgcgtttgatcgttgattttgatttttaaattatcgtcggagaaattttgaacggtatacgagaagaggtgattattttcgcgggtaattgtcgcgggtatcgttatttttacgcggtgcgatcggcgtatttgtttgttttttatcgatatcgtaattgcgtcgttaagaataattaggttgtagaatatttatattatattgacgattacggtgagtatttcggttggcgggttatagaagtagcgttagatgtttatcgtaacgtttattaggttgagtaggataaggaagatgtagggtcgcgagattatttagtcgacgtattttttttttattagtttatttttggcggtgacgttaaatttgtttttgtgcgggttaattagcgttattagcgtcggtggtgcgatatattacgttagtatcgtttcgtagattttattttagaaagagtggcgatatttgttttggattttggagttggttaggttggtatggattatatgcggtagtacgaatagggcgattattaacgttggcgtatagatgatgtatgt

SEQ ID NO: 13374 - DNA, 913 bp, Artificial Sequence
  chemically treated genomic DNA (Homo sapiens) CpG-island No: 13374
acatacatcatctatacgccaacgttaataatcgccctattcgtactaccgcatataatccataccaacctaaccaactccaaaatccaaaacaaatatcgccactctttctaaaataaaatctacgaaacgatactaacgtaatatatcgcaccaccgacgctaataacgctaattaacccgcacaaaaacaaatttaacgtcaccgccaaaaataaactaataaaaaaaaaatacgtcgactaaataatctcgcgaccctacatcttccttatcctactcaacctaataaacgttacgataaacatctaacgctacttctataacccgccaaccgaaatactcaccgtaatcgtcaatataatataaatattctacaacctaattattcttaacgacgcaattacgatatcgataaaaaacaaacaaatacgccgatcgcaccgcgtaaaaataacgatacccgcgacaattacccgcgaaaataatcacctcttctcgtataccgttcaaaatttctccgacgataatttaaaaatcaaaatcaacgatcaaacgcaaattctaaaaaaacaaaaaataaatctattacttaaacgcgatcaacaaaaatacgtcttcccgacccaaataacgcgcgtaataaataataaaattaaactaaaattaataccgctcaccacccaacaacatatcgattttatacaatatacgtttacccgtacgaatacataaacgctctaacaaaacaactacccgaaaaataaaccgctaaaaaatctactaaatattctaaaactcgacttccgtaactaccgccatctaacgaaatttacgccttcttcgataaaaaacatattccgtatactaacttctctaatttcctaaattatatcgtttattccgcgccgcc

SEQ ID NO: 13375 - DNA, 913 bp, Artificial Sequence
  chemically treated genomic DNA (Homo sapiens) CpG-island No: 13375
gtatatattatttatgcgttagcgttgatgatcgttttattcgtgttgtcgtatatgatttatgttagtttgattaattttaagatttagggtaaatatcgttattttttttggagtgaaatttacgaaacggtgttggcgtggtatatcgtattatcgacgttggtggcgttgattaattcgtataaaggtaaatttaacgttatcgttaaaggtggattggtggaagaagagtacgtcgattgggtgatttcgcggttttatattttttttgttttgtttaatttggtgggcgttgcggtaggtatttggcgttatttttatggttcgttaatcgagatgtttatcgtggtcgttagtatggtgtgggtgttttataatttgattgtttttggcggcgtagttgcggtatcggtagaaagtaaataggtacgtcgatcgtatcgcgtggagatgacgatgttcgcggtaattgttcgcgaagatggttattttttttcgtgtatcgtttaggattttttcgacggtggtttggggattaagattaacggttaggcgtagattttggaagggtagaaagtgaatttgttgtttaaacgcggttagtaggaatacgttttttcgatttaggtggcgcgcgtgatgggtaatgaagttgggttgaaattaatgtcgtttattatttagtaatatatcgattttgtgtagtgtacgtttgttcgtgcggatatatgggcgttttggtaggatagttattcggaagataagtcgttggaaagtttgttggatattttgaagttcggttttcgtggttatcgttatttggcggagtttgcgtttttttcggtgaagggtatatttcgtgtgttgatttttttggttttttgggttgtatcgtttatttcgcgtcgtt

SEQ ID NO: 13376 - DNA, 913 bp, Artificial Sequence
  chemically treated genomic DNA (Homo sapiens) CpG-island No: 13376
aacgacgcgaaataaacgatacaacccaaaaaaccaaaaaaatcaacacacgaaatatacccttcaccgaaaaaaacgcaaactccgccaaataacgataaccacgaaaaccgaacttcaaaatatccaacaaactttccaacgacttatcttccgaataactatcctaccaaaacgcccatatatccgcacgaacaaacgtacactacacaaaatcgatatattactaaataataaacgacattaatttcaacccaacttcattacccatcacgcgcgccacctaaatcgaaaaaacgtattcctactaaccgcgtttaaacaacaaattcactttctacccttccaaaatctacgcctaaccgttaatcttaatccccaaaccaccgtcgaaaaaatcctaaacgatacacgaaaaaaaataaccatcttcgcgaacaattaccgcgaacatcgtcatctccacgcgatacgatcgacgtacctatttactttctaccgataccgcaactacgccgccaaaaacaatcaaattataaaacacccacaccatactaacgaccacgataaacatctcgattaacgaaccataaaaataacgccaaatacctaccgcaacgcccaccaaattaaacaaaacaaaaaaaatataaaaccgcgaaatcacccaatcgacgtactcttcttccaccaatccacctttaacgataacgttaaatttacctttatacgaattaatcaacgccaccaacgtcgataatacgatataccacgccaacaccgtttcgtaaatttcactccaaaaaaaataacgatatttaccctaaatcttaaaattaatcaaactaacataaatcatatacgacaacacgaataaaacgatcatcaacgctaacgcataaataatatatac

SEQ ID NO: 13377 - DNA, 1034 bp, Artificial Sequence
  chemically treated genomic DNA (Homo sapiens) CpG-island No: 13377
atcgaattgatcggttattggatttgggaataggcgtaatagtggcgcgatgtaggtattgggtaggtggtttattatcgtagtcgtgacgcgtaggtcgtaggcgtggcgtggggcgaagcggatattatcgcgattaaacgttttttcgatatgggttttaaagttatcgttatcggaggtttggcgttggaagatttgtcgttgtttaagggtatttcgatttacgtttttatcgcgggtcgtagtattcgtgatgtcgttttttcggtggaagtcgtacgttagtttaaacgttttatcgttgaattgtggggttaaggagcggatatgttgtttaaataaatttcgtttggtatttatgaaaaagcgtttttcgtcggggagtgttggttggaacgtttgtaattggtaaaaacgttaggtttcgattttgtcgaaatgtcggtagatgaaattgacgatcgtttgtcgcgttttaattggagtcgcgagtagcgtttggcgttggttaatgcgattgttgaaatcggcgtgcgcgtgtcgtttatgtgtttttttgtttatcgtcgtttttcgttgggtagtgaagatgacgcggtgcgggcgtaggggttggagattatgcgtaaagttatttagttcgtttaggatgtcggtattcgcgtgatttagttggcgggttatgacgtttattattaggaagttaataacgaaacgcgtcgtcgttttcgtgacggtttgaaagagagcgttgagatggtaagtcgcgcgtaggtgacgttggcgatggagattatggattattcgttgatgagttttattagtaaggcgttgggatacgcgtattattttaataattcgtggttttagttttattcggatatcggtaatttgtcggcgtgggataacgatgtgtagatggagttgtaggtcggaatcgggtatatcgtcgcggtatatgtgaaagatattaaatttggcgtttttaaaaacgtgtcgtttggcgaaggtgtagtggatttcgaacgttg

SEQ ID NO: 13378 - DNA, 1034 bp, Artificial Sequence
  chemically treated genomic DNA (Homo sapiens) CpG-island No: 13378
caacgttcgaaatccactacaccttcgccaaacgacacgtttttaaaaacgccaaatttaatatctttcacatataccgcgacgatatacccgattccgacctacaactccatctacacatcgttatcccacgccgacaaattaccgatatccgaataaaactaaaaccacgaattattaaaataatacgcgtatcccaacgccttactaataaaactcatcaacgaataatccataatctccatcgccaacgtcacctacgcgcgacttaccatctcaacgctctctttcaaaccgtcacgaaaacgacgacgcgtttcgttattaacttcctaataataaacgtcataacccgccaactaaatcacgcgaataccgacatcctaaacgaactaaataactttacgcataatctccaacccctacgcccgcaccgcgtcatcttcactacccaacgaaaaacgacgataaacaaaaaaacacataaacgacacgcgcacgccgatttcaacaatcgcattaaccaacgccaaacgctactcgcgactccaattaaaacgcgacaaacgatcgtcaatttcatctaccgacatttcgacaaaatcgaaacctaacgtttttaccaattacaaacgttccaaccaacactccccgacgaaaaacgctttttcataaataccaaacgaaatttatttaaacaacatatccgctccttaaccccacaattcaacgataaaacgtttaaactaacgtacgacttccaccgaaaaaacgacatcacgaatactacgacccgcgataaaaacgtaaatcgaaatacccttaaacaacgacaaatcttccaacgccaaacctccgataacgataactttaaaacccatatcgaaaaaacgtttaatcgcgataatatccgcttcgccccacgccacgcctacgacctacgcgtcacgactacgataataaaccacctacccaatacctacatcgcgccactattacgcctattcccaaatccaataaccgatcaattcgat

SEQ ID NO: 13379 - DNA, 1034 bp, Artificial Sequence
  chemically treated genomic DNA (Homo sapiens) CpG-island No: 13379
taacgttcgaaatttattatattttcgttaaacggtacgtttttgaagacgttaggtttggtgttttttatatgtatcgcgacgatatgttcgatttcggtttgtaattttatttgtatatcgttgttttacgtcgataggttgtcgatattcgggtagagttggaattacggattgttgagatagtgcgcgtattttagcgttttgttgatggagtttattaacggataatttatgatttttatcgttagcgttatttgcgcgcggtttgttattttaacgtttttttttaggtcgttacggaaacgacgacgcgtttcgttattggttttttgatagtaaacgttatagttcgttagttggattacgcgaatatcgatattttgggcgaattggatagttttacgtataatttttagtttttgcgttcgtatcgcgttatttttattgtttagcgggaaacgacgatgagtagaaaggtatatggacggtacgcgtacgtcggttttaataatcgtattgattagcgttagacgttgttcgcggttttagttgaggcgcgataggcgatcgttagttttatttatcgatatttcgataaaatcgaagtttaacgtttttgttagttgtaggcgttttagttagtatttttcggcggggagcgtttttttatagatgttaagcgggatttgtttggataatatattcgttttttagttttatagtttagcgatggaacgtttgaattgacgtgcggtttttatcggagaagcggtattacggatattacggttcgcgataaagacgtgaatcggaatatttttgaatagcggtagattttttagcgttaggttttcggtgacggtgattttgaagtttatatcggaaagacgtttgatcgcggtgatgttcgtttcgttttacgttacgtttgcggtttgcgcgttacggttgcggtgataaattatttgtttaatgtttgtatcgcgttattgttgcgtttgtttttaggtttagtaatcggttagttcgat

SEQ ID NO: 13380 - DNA, 1034 bp, Artificial Sequence
  chemically treated genomic DNA (Homo sapiens) CpG-island No: 13380
atcgaactaaccgattactaaacctaaaaacaaacgcaacaataacgcgatacaaacattaaacaaataatttatcaccgcaaccgtaacgcgcaaaccgcaaacgtaacgtaaaacgaaacgaacatcaccgcgatcaaacgtctttccgatataaacttcaaaatcaccgtcaccgaaaacctaacgctaaaaaatctaccgctattcaaaaatattccgattcacgtctttatcgcgaaccgtaatatccgtaataccgcttctccgataaaaaccgcacgtcaattcaaacgttccatcgctaaactataaaactaaaaaacgaatatattatccaaacaaatcccgcttaacatctataaaaaaacgctccccgccgaaaaatactaactaaaacgcctacaactaacaaaaacgttaaacttcgattttatcgaaatatcgataaataaaactaacgatcgcctatcgcgcctcaactaaaaccgcgaacaacgtctaacgctaatcaatacgattattaaaaccgacgtacgcgtaccgtccatatacctttctactcatcgtcgtttcccgctaaacaataaaaataacgcgatacgaacgcaaaaactaaaaattatacgtaaaactatccaattcgcccaaaatatcgatattcgcgtaatccaactaacgaactataacgtttactatcaaaaaaccaataacgaaacgcgtcgtcgtttccgtaacgacctaaaaaaaaacgttaaaataacaaaccgcgcgcaaataacgctaacgataaaaatcataaattatccgttaataaactccatcaacaaaacgctaaaatacgcgcactatctcaacaatccgtaattccaactctacccgaatatcgacaacctatcgacgtaaaacaacgatatacaaataaaattacaaaccgaaatcgaacatatcgtcgcgatacatataaaaaacaccaaacctaacgtcttcaaaaacgtaccgtttaacgaaaatataataaatttcgaacgtta

SEQ ID NO: 13381 - DNA, 879 bp, Artificial Sequence
  chemically treated genomic DNA (Homo sapiens) CpG-island No: 13381
  unsure (64, 115, 156, 280, 307, 316, 389, 391, 585, 599..600, 716)
  unsure (734)
gttgtacgcggcgttttcgttagttttgtgggagatagtttttgggttttcgtttggttttagntttggttatttatattgaatatttcgcgtcgttagattgtcggttgggtgnacgagcgtcgcgttgtcgtcgttagtttagtgggttggttnttattttcgattgtgtttgttgatatttatttgtatttttcgttttcgcgatttttaggtgcggtattagagtcgttattgggatagacgatagcgttgtttaaggttataaattgcgatatangcgtagggtaagagttattcgcgtatnatttcgtanttaaggaagtgtttcgggggtgaagtaaatcggttatgtggatatacgtatatttaatttgtttgatcggttntntatacgcgtcgtaacggtaaagatatgtcgtttaagagaaattttcgtgagaattataagggttcgacgatttgttttggggtagttatttttatttatttaagcggtttttttggacgtttttttcgaaacgtagttaattttattattagaattcggtttcgttttcgatgtttagttattgtcgtggtganatcgattcgatcgnnggggttattattagcgaatattttttggttcggtttttttttttttttggcgatatgcgtcgtattttcggttgcggcgtttttttttgatttttcggattttttttgtttcggtntttgattttgcgaattanttttcggtgttcggtacgtgttttcgtttttttcgtatttcgcggagggaaaaatcgtttcggcggtatggcgagatatcgggagattcggtattttttttttttatatttttaaaattttaatgggtttttttttaatacgggt

SEQ ID NO: 13382 - DNA, 879 bp, Artificial Sequence
  chemically treated genomic DNA (Homo sapiens) CpG-island No: 13382
  unsure (146, 164, 280..281, 295, 489, 491, 564, 573, 600, 724, 765)
  unsure (816)
acccgtattaaaaaaaaacccattaaaattttaaaaatataaaaaaaaaaaataccgaatctcccgatatctcgccataccgccgaaacgatttttccctccgcgaaatacgaaaaaaacgaaaacacgtaccgaacaccgaaaantaattcgcaaaatcaaanaccgaaacaaaaaaaatccgaaaaatcaaaaaaaaacgccgcaaccgaaaatacgacgcatatcgccaaaaaaaaaaaaaaaccgaaccaaaaaatattcgctaataataaccccnncgatcgaatcgatntcaccacgacaataactaaacatcgaaaacgaaaccgaattctaataataaaattaactacgtttcgaaaaaaacgtccaaaaaaaccgcttaaataaataaaaataactaccccaaaacaaatcgtcgaacccttataattctcacgaaaatttctcttaaacgacatatctttaccgttacgacgcgtatananaaccgatcaaacaaattaaatatacgtatatccacataaccgatttacttcacccccgaaacacttccttaantacgaaatnatacgcgaataactcttaccctacgcntatatcgcaatttataaccttaaacaacgctatcgtctatcccaataacgactctaataccgcacctaaaaatcgcgaaaacgaaaaatacaaataaatatcaacaaacacaatcgaaaataanaaccaacccactaaactaacgacgacaacgcgacgctcgtncacccaaccgacaatctaacgacgcgaaatattcaatataaataaccaaanctaaaaccaaacgaaaacccaaaaactatctcccacaaaactaacgaaaacgccgcgtacaac

SEQ ID NO: 13383 - DNA, 879 bp, Artificial Sequence
  chemically treated genomic DNA (Homo sapiens) CpG-island No: 13383
  unsure (146, 164, 280..281, 295, 489, 491, 564, 573, 600, 724, 765)
  unsure (816)
gttcgtgttgggaaggggtttattaaaattttgggagtatggggaaaaaaaatatcgggtttttcggtgtttcgttatatcgtcgggacggttttttttttcgcgaaatacggggggaacgaaaatacgtatcgggtatcgagggntaattcgtaggattaaanatcgaggtagggggaattcgggaaattaggagaggacgtcgtaatcggaggtgcgacgtatatcgttaaaggagaggagaaatcggattaggggatattcgttggtaatagttttnncgatcgggtcggtnttattacgatagtagttgaatatcggaagcggagtcgaattttagtggtggaattgattgcgtttcgaggagggcgtttagagaagtcgtttaagtgggtggaaataattgttttaagataaatcgtcggatttttgtagtttttacggggattttttttgggcgatatgtttttgtcgttgcgacgcgtgtgngnggtcggttaaataaattggatgtgcgtatatttatatggtcggtttgttttattttcggggtatttttttggntgcgaagtnatacgcgggtgatttttattttgcgtntgtgtcgtagtttgtagttttgaataacgttgtcgtttgttttagtgacggttttgatatcgtatttggaagtcgcgaaggcggaagatataagtgaatgttagtaggtatagtcgggaatagnagttagtttattaaattgacggcgataacgcgacgttcgtntatttagtcggtagtttggcgacgcggaatgtttaatgtgaatggttaagnttagagttaagcggaaatttaagggttgttttttatagaattggcgaaaacgtcgcgtgtagt

SEQ ID NO: 13384 - DNA, 879 bp, Artificial Sequence
  chemically treated genomic DNA (Homo sapiens) CpG-island No: 13384
  unsure (64, 115, 156, 280, 307, 316, 389, 391, 585, 599..600, 716)
  unsure (734)
actacacgcgacgttttcgccaattctataaaaaacaacccttaaatttccgcttaactctaancttaaccattcacattaaacattccgcgtcgccaaactaccgactaaatanacgaacgtcgcgttatcgccgtcaatttaataaactaactnctattcccgactatacctactaacattcacttatatcttccgccttcgcgacttccaaatacgatatcaaaaccgtcactaaaacaaacgacaacgttattcaaaactacaaactacgacacanacgcaaaataaaaatcacccgcgtatnacttcgcanccaaaaaaataccccgaaaataaaacaaaccgaccatataaatatacgcacatccaatttatttaaccgaccncncacacgcgtcgcaacgacaaaaacatatcgcccaaaaaaaatccccgtaaaaactacaaaaatccgacgatttatcttaaaacaattatttccacccacttaaacgacttctctaaacgccctcctcgaaacgcaatcaattccaccactaaaattcgactccgcttccgatattcaactactatcgtaataanaccgacccgatcgnnaaaactattaccaacgaatatcccctaatccgatttctcctctcctttaacgatatacgtcgcacctccgattacgacgtcctctcctaatttcccgaattccccctacctcgatntttaatcctacgaattanccctcgatacccgatacgtattttcgttccccccgtatttcgcgaaaaaaaaaaccgtcccgacgatataacgaaacaccgaaaaacccgatattttttttccccatactcccaaaattttaataaaccccttcccaacacgaac

SEQ ID NO: 13385 - DNA, 800 bp, Artificial Sequence
  chemically treated genomic DNA (Homo sapiens) CpG-island No: 13385
ttaaatagcggttatagagtgttaatgtcgtttagcggatcgattacgttttgatggaggaagtagttttacgttagtacgtatagcgttgttgttagtaggttagtaggtagtgaatcggttcgttttaggttaggagatattacgtttagtagattttgtaatataaagcgcgtagtacgcgtatttgtatttatcgtcgttagaataaatagtgttttaaataaaatggcgaagtgatattagaacgttatatttattatgtcgtttagcgcgtcgtgtagaatgtaggttatttttatcgttagcgtcggcgtatcgttcgtacgggaaatgatcgattgtttatttatttcgttggtaatttggtttagcgtatttggtgtaatgttaaagttttagttatttattatttgcgcggtagaagcgattatattcgtcgtttttgtcggagttagtatcgttatcgggttgtttatggtaaaatatacgttcggatcgatgatataggcggaaattagcgttataatcgttacgaaggattttattaatattttatcgtagtcgataaagtacgtttgtttttcgttcgttagtattttcggcgtggttttagaagagattagcgtatggaagttagaatacgcgttataggcgatggtgattaatcgggacgggaataggttatcggtttatacgggttaggtgtatcgattaaattgggtcgcgttaggtattgttaaggtcgagggatttattaaaagtggtatcgttaaatacgaaaaaattatttaattaat

SEQ ID NO: 13386 - DNA, 800 bp, Artificial Sequence
  chemically treated genomic DNA (Homo sapiens) CpG-island No: 13386
attaattaaataattttttcgtatttaacgataccacttttaataaatccctcgaccttaacaatacctaacgcgacccaatttaatcgatacacctaacccgtataaaccgataacctattcccgtcccgattaatcaccatcgcctataacgcgtattctaacttccatacgctaatctcttctaaaaccacgccgaaaatactaacgaacgaaaaacaaacgtactttatcgactacgataaaatattaataaaatccttcgtaacgattataacgctaatttccgcctatatcatcgatccgaacgtatattttaccataaacaacccgataacgatactaactccgacaaaaacgacgaatataatcgcttctaccgcgcaaataataaataactaaaactttaacattacaccaaatacgctaaaccaaattaccaacgaaataaataaacaatcgatcatttcccgtacgaacgatacgccgacgctaacgataaaaataacctacattctacacgacgcgctaaacgacataataaatataacgttctaatatcacttcgccattttatttaaaacactatttattctaacgacgataaatacaaatacgcgtactacgcgctttatattacaaaatctactaaacgtaatatctcctaacctaaaacgaaccgattcactacctactaacctactaacaacaacgctatacgtactaacgtaaaactacttcctccatcaaaacgtaatcgatccgctaaacgacattaacactctataaccgctatttaa

SEQ ID NO: 13387 - DNA, 800 bp, Artificial Sequence
  chemically treated genomic DNA (Homo sapiens) CpG-island No: 13387
gttaattgggtgattttttcgtgtttggcggtattatttttgataagtttttcggttttgataatgtttggcgcggtttaatttggtcgatgtatttgattcgtatggatcggtaatttgttttcgtttcggttagttattatcgtttgtggcgcgtgttttggtttttatgcgttgattttttttgggattacgtcgaagatgttggcgaacgaagggtaggcgtgttttatcggttacggtgggatgttaatggaatttttcgtggcgattatggcgttggttttcgtttgtattatcgattcgggcgtgtattttgttatgaatagttcgatggcggtgttggtttcggtagggacggcggatgtggtcgtttttgtcgcgtaggtggtgagtagttggggttttagtattatattagatacgttaaattagattgttagcgaagtgggtgaatagtcgattatttttcgtgcgggcggtgcgtcgacgttggcggtggggatggtttatattttgtacggcgcgttgggcggtatgatggatgtggcgttttggtattatttcgttattttgtttgaagtattgtttattttgacggcggtggatgtaggtacgcgtgttgcgcgttttatgttgtaggatttgttgggcgtggtgttttttggtttgaagcggatcgatttattgtttgttaatttgttggtaatagcgttgtgcgtattggcgtggggttattttttttattagggcgtggtcgattcgttgggcggtattaatattttgtggtcgttgtttgg

SEQ ID NO: 13388 - DNA, 800 bp, Artificial Sequence
  chemically treated genomic DNA (Homo sapiens) CpG-island No: 13388
ccaaacaacgaccacaaaatattaataccgcccaacgaatcgaccacgccctaataaaaaaaataaccccacgccaatacgcacaacgctattaccaacaaattaacaaacaataaatcgatccgcttcaaaccaaaaaacaccacgcccaacaaatcctacaacataaaacgcgcaacacgcgtacctacatccaccgccgtcaaaataaacaatacttcaaacaaaataacgaaataataccaaaacgccacatccatcataccgcccaacgcgccgtacaaaatataaaccatccccaccgccaacgtcgacgcaccgcccgcacgaaaaataatcgactattcacccacttcgctaacaatctaatttaacgtatctaatataatactaaaaccccaactactcaccacctacgcgacaaaaacgaccacatccgccgtccctaccgaaaccaacaccgccatcgaactattcataacaaaatacacgcccgaatcgataatacaaacgaaaaccaacgccataatcgccacgaaaaattccattaacatcccaccgtaaccgataaaacacgcctacccttcgttcgccaacatcttcgacgtaatcccaaaaaaaatcaacgcataaaaaccaaaacacgcgccacaaacgataataactaaccgaaacgaaaacaaattaccgatccatacgaatcaaatacatcgaccaaattaaaccgcgccaaacattatcaaaaccgaaaaacttatcaaaaataataccgccaaacacgaaaaaatcacccaattaac

SEQ ID NO: 13389 - DNA, 642 bp, Artificial Sequence
  chemically treated genomic DNA (Homo sapiens) CpG-island No: 13389
ttcggtggtgagcgtcgaaggttgcgagttgattttgtttgacggtagacgtttggttgacggtatgtcgttttggtgggcggcgatttacggttataattattcgtagtttaatgcggcgatgaagtcgtaaattgatgttatgtcgtatgtgatgtttggcggtattatttatgcgttagttattgagttgtgtcgtaaattggtggcgatgacgtcgtaatcgttggagtgcgtttttttcgcggatttcggtttcgtagcggtggaagtggcgatgaaaatggcgttgtagtattggtaagttaaaggcgaagcgcgttagcgttttttgatttttcgtaatggttattatggcgatatttttggcgcgatgtcggtgtgcgattcggataatttaatgtatagtttgtggaaaggttattggtaaaaatcggttggttcggttcgaaagcgtatgattggaagggattacgtaatgggggttgatcgttaatggggtatgaagaaatcgggggaatagagttaggtcgggtagggaagttgttcggagggaaatattaaatgtcgtaaaatttgagtataaatcggttggttatagtgggtaaacgaatgtgagaaaggaaagtttattaggattag

SEQ ID NO: 13390 - DNA, 642 bp, Artificial Sequence
  chemically treated genomic DNA (Homo sapiens) CpG-island No: 13390
ctaatcctaataaactttcctttctcacattcgtttacccactataaccaaccgatttatactcaaattttacgacatttaatatttccctccgaacaacttccctacccgacctaactctattcccccgatttcttcataccccattaacgatcaacccccattacgtaatcccttccaatcatacgctttcgaaccgaaccaaccgatttttaccaataacctttccacaaactatacattaaattatccgaatcgcacaccgacatcgcgccaaaaatatcgccataataaccattacgaaaaatcaaaaaacgctaacgcgcttcgcctttaacttaccaatactacaacgccattttcatcgccacttccaccgctacgaaaccgaaatccgcgaaaaaaacgcactccaacgattacgacgtcatcgccaccaatttacgacacaactcaataactaacgcataaataataccgccaaacatcacatacgacataacatcaatttacgacttcatcgccgcattaaactacgaataattataaccgtaaatcgccgcccaccaaaacgacataccgtcaaccaaacgtctaccgtcaaacaaaatcaactcgcaaccttcgacgctcaccaccgaa

SEQ ID NO: 13391 - DNA, 642 bp, Artificial Sequence
  chemically treated genomic DNA (Homo sapiens) CpG-island No: 13391
ttggttttggtggattttttttttttatattcgtttatttattgtggttaatcggtttgtgtttaaattttgcgatatttggtgttttttttcggatagtttttttgttcggtttggttttgttttttcggtttttttatgttttattagcggttagtttttattgcgtaattttttttaattatgcgttttcgggtcggattaatcggtttttgttagtagtttttttatagattgtgtattgaattattcggatcgtatatcgatatcgcgttaaaggtatcgttatgataattattgcggaaggttagaaaacgttggcgcgtttcgtttttggtttgttagtattgtaacgttatttttatcgttatttttatcgttacggaatcggagttcgcgagaaaaacgtattttagcggttgcggcgttatcgttattagtttgcggtatagtttaatggttggcgtatgggtgatatcgttaaatattatatgcgatatggtattaatttgcgattttatcgtcgtattaagttgcgggtgattgtagtcgtggatcgtcgtttattaggacgatatatcgttaattaggcgtttgtcgttagataaaattagttcgtaattttcggcgtttattatcgga

SEQ ID NO: 13392 - DNA, 642 bp, Artificial Sequence
  chemically treated genomic DNA (Homo sapiens) CpG-island No: 13392
tccgataataaacgccgaaaattacgaactaattttatctaacgacaaacgcctaattaacgatatatcgtcctaataaacgacgatccacgactacaatcacccgcaacttaatacgacgataaaatcgcaaattaataccatatcgcatataatatttaacgatatcacccatacgccaaccattaaactataccgcaaactaataacgataacgccgcaaccgctaaaatacgtttttctcgcgaactccgattccgtaacgataaaaataacgataaaaataacgttacaatactaacaaaccaaaaacgaaacgcgccaacgttttctaaccttccgcaataattatcataacgatacctttaacgcgatatcgatatacgatccgaataattcaatacacaatctataaaaaaactactaacaaaaaccgattaatccgacccgaaaacgcataattaaaaaaaattacgcaataaaaactaaccgctaataaaacataaaaaaaccgaaaaaacaaaaccaaaccgaacaaaaaaactatccgaaaaaaaacaccaaatatcgcaaaatttaaacacaaaccgattaaccacaataaataaacgaatataaaaaaaaaaaatccaccaaaaccaa

SEQ ID NO: 13393 - DNA, 551 bp, Artificial Sequence
  chemically treated genomic DNA (Homo sapiens) CpG-island No: 13393
tacggattggcgtatttggaaaaagcgagtgtacgcgggtaatatagtttgttattgttggggatggttttattttgcgtattgattttgattttttggcgcgtggtttatcgtttagttacgcgtttatttgtcgaataaacgtaggcgttgtaacggttgttggacggtgatattgatttttttttttcggaaatcgttggcgtacgggagttggatattatcgggcggttgatggatgcgtttcgtagtaatgtttatgtattgaatcgttatcgcgaatagttggcggcgtaggttaaagcgcgtatagttgaattgtaggaattggtgatagaatatcgataggtacgggcggaagtagaaaaagttagttaggtaaaatcggcgtttttggcggcgatgagttatgagattcgtatatcgttgtacggtattttcggtattgtttaattgttggtagataatttcgtatttaacgtttagcgtgatgatttgcgggtaattattgattttggtgaatcgttgttgattatttttaacgatatttt

SEQ ID NO: 13394 - DNA, 551 bp, Artificial Sequence
  chemically treated genomic DNA (Homo sapiens) CpG-island No: 13394
aaaatatcgttaaaaataatcaacaacgattcaccaaaatcaataattacccgcaaatcatcacgctaaacgttaaatacgaaattatctaccaacaattaaacaataccgaaaataccgtacaacgatatacgaatctcataactcatcgccgccaaaaacgccgattttacctaactaactttttctacttccgcccgtacctatcgatattctatcaccaattcctacaattcaactatacgcgctttaacctacgccgccaactattcgcgataacgattcaatacataaacattactacgaaacgcatccatcaaccgcccgataatatccaactcccgtacgccaacgatttccgaaaaaaaaaaatcaatatcaccgtccaacaaccgttacaacgcctacgtttattcgacaaataaacgcgtaactaaacgataaaccacgcgccaaaaaatcaaaatcaatacgcaaaataaaaccatccccaacaataacaaactatattacccgcgtacactcgctttttccaaatacgccaatccgta

SEQ ID NO: 13395 - DNA, 551 bp, Artificial Sequence
  chemically treated genomic DNA (Homo sapiens) CpG-island No: 13395
agaatatcgttgaggatggttagtaacgatttattagagttagtaattgttcgtaaattattacgttgggcgttaagtgcggggttatttgttagtagttgagtagtgtcgagaatatcgtatagcggtgtgcggattttatggtttatcgtcgttagaaacgtcgattttgtttggttggttttttttgttttcgttcgtgtttgtcggtgttttattattagtttttgtaatttagttgtacgcgttttgatttgcgtcgttagttgttcgcggtggcgatttagtgtatgaatattgttgcgaaacgtatttattagtcgttcgatggtatttagttttcgtacgttagcggttttcgggaaaggggagttaatattatcgtttagtagtcgttgtagcgtttgcgtttgttcggtaagtggacgcgtgattgagcgataaattacgcgttagaggattagaattagtgcgtaaagtgaaattatttttagtaataataggttgtattgttcgcgtgtattcgttttttttagatgcgttagttcgtg

SEQ ID NO: 13396 - DNA, 551 bp, Artificial Sequence
  chemically treated genomic DNA (Homo sapiens) CpG-island No: 13396
cacgaactaacgcatctaaaaaaaacgaatacacgcgaacaatacaacctattattactaaaaataatttcactttacgcactaattctaatcctctaacgcgtaatttatcgctcaatcacgcgtccacttaccgaacaaacgcaaacgctacaacgactactaaacgataatattaactcccctttcccgaaaaccgctaacgtacgaaaactaaataccatcgaacgactaataaatacgtttcgcaacaatattcatacactaaatcgccaccgcgaacaactaacgacgcaaatcaaaacgcgtacaactaaattacaaaaactaataataaaacaccgacaaacacgaacgaaaacaaaaaaaaccaaccaaacaaaatcgacgtttctaacgacgataaaccataaaatccgcacaccgctatacgatattctcgacactactcaactactaacaaataaccccgcacttaacgcccaacgtaataatttacgaacaattactaactctaataaatcgttactaaccatcctcaacgatattct

SEQ ID NO: 13397 - DNA, 779 bp, Artificial Sequence
  chemically treated genomic DNA (Homo sapiens) CpG-island No: 13397
agcgttaagatttttgtttgattaaatagtatcgtaagcggcgtgcgtaaattatgcgaaagcgtcgttagtagggcgttgcggatttgtttacgttcgtttgttattcgcgtttgtttttcgttggcggttagcgttagtcgtttaagggtattggcgattaatagcgtaaacgtttttagtaggcgttgttgtttcgggattattaattggcgtagatttttcggttttattattattagttcgtaagttttttcgtcgttttttagcggtaaaatttggtacggtatatcgggtaacgtgtcggtgttcgcgttcgtaggtaggtttttattaaaattttattgcgcgatggtatcgttttacggcgttattttttgcggatgtgttaacggttgtaatttatcgttgttatcgggtaataatatttgattgcgggtatgaaacgtggaggtaataaattgttcgttggtggtagcgatattttgcggattgcggtttatcgttagagttttcgatattttatataagtgtcgagtgcgttgttcgcggtaacgggttattcgagtttgataacgtacgtttagtagtaaggtttcgtattattagttcgattgttaatattatcgggaaggttagtagatatggttttcgataacgtaacgtgttcgtgggcgtataacgaaattaaattatattttatatcgggtattacgaaagtaggttataagtaggtatatatagttagaattggtttaggtgggttaggtttcgtcgtt

SEQ ID NO: 13398 - DNA, 779 bp, Artificial Sequence
  chemically treated genomic DNA (Homo sapiens) CpG-island No: 13398
aacgacgaaacctaacccacctaaaccaattctaactatatatacctacttataacctactttcgtaatacccgatataaaatataatttaatttcgttatacgcccacgaacacgttacgttatcgaaaaccatatctactaaccttcccgataatattaacaatcgaactaataatacgaaaccttactactaaacgtacgttatcaaactcgaataacccgttaccgcgaacaacgcactcgacacttatataaaatatcgaaaactctaacgataaaccgcaatccgcaaaatatcgctaccaccaacgaacaatttattacctccacgtttcatacccgcaatcaaatattattacccgataacaacgataaattacaaccgttaacacatccgcaaaaaataacgccgtaaaacgataccatcgcgcaataaaattttaataaaaacctacctacgaacgcgaacaccgacacgttacccgatataccgtaccaaattttaccgctaaaaaacgacgaaaaaacttacgaactaataataataaaaccgaaaaatctacgccaattaataatcccgaaacaacaacgcctactaaaaacgtttacgctattaatcgccaatacccttaaacgactaacgctaaccgccaacgaaaaacaaacgcgaataacaaacgaacgtaaacaaatccgcaacgccctactaacgacgctttcgcataatttacgcacgccgcttacgatactatttaatcaaacaaaaatcttaacgct

SEQ ID NO: 13399 - DNA, 779 bp, Artificial Sequence
  chemically treated genomic DNA (Homo sapiens) CpG-island No: 13399
agcggcggggtttagtttatttgggttaattttggttgtgtgtgtttatttatgatttgttttcgtggtgttcggtataagatgtgatttgatttcgttatgcgtttacgggtacgttgcgttgtcgaaggttatatttgttaattttttcggtgatgttaatagtcgggttggtgatgcggaattttattgttgggcgtgcgttattaggttcgggtagttcgttatcgcgagtaacgtattcggtatttatatgaaatgtcgaaagttttggcggtgggtcgtagttcgtaggatatcgttgttattagcgaataatttattgtttttacgttttatgttcgtagttaggtgttgttgttcgatgataacggtaaattgtagtcgttaatatattcgtaaggaatgacgtcgtgggacgatgttatcgcgtagtggagttttgataaaggtttgtttgcgggcgcgggtatcgatacgttattcggtgtatcgtattagattttgtcgttaaaaagcggcgagaaaatttacgggttggtggtggtggagtcggggaatttgcgttagttgatgatttcggaatagtagcgtttgttggagacgtttacgttgttagtcgttaatgtttttgagcggttgacgttaatcgttagcgaagaataggcgcggatggtaagcgaacgtgaatagattcgtaacgttttgttggcggcgttttcgtatgatttacgtacgtcgtttacggtgttgtttggttaggtagaaattttaacgtt

SEQ ID NO: 13400 - DNA, 779 bp, Artificial Sequence
  chemically treated genomic DNA (Homo sapiens) CpG-island No: 13400
aacgttaaaatttctacctaaccaaacaacaccgtaaacgacgtacgtaaatcatacgaaaacgccgccaacaaaacgttacgaatctattcacgttcgcttaccatccgcgcctattcttcgctaacgattaacgtcaaccgctcaaaaacattaacgactaacaacgtaaacgtctccaacaaacgctactattccgaaatcatcaactaacgcaaattccccgactccaccaccaccaacccgtaaattttctcgccgctttttaacgacaaaatctaatacgatacaccgaataacgtatcgatacccgcgcccgcaaacaaacctttatcaaaactccactacgcgataacatcgtcccacgacgtcattccttacgaatatattaacgactacaatttaccgttatcatcgaacaacaacacctaactacgaacataaaacgtaaaaacaataaattattcgctaataacaacgatatcctacgaactacgacccaccgccaaaactttcgacatttcatataaataccgaatacgttactcgcgataacgaactacccgaacctaataacgcacgcccaacaataaaattccgcatcaccaacccgactattaacatcaccgaaaaaattaacaaatataaccttcgacaacgcaacgtacccgtaaacgcataacgaaatcaaatcacatcttataccgaacaccacgaaaacaaatcataaataaacacacacaaccaaaattaacccaaataaactaaaccccgccgct

SEQ ID NO: 13401 - DNA, 628 bp, Artificial Sequence
  chemically treated genomic DNA (Homo sapiens) CpG-island No: 13401
  unsure (135)
tagcgtcgcgcgatatgaatttagttacgtatggaaggattaggggcgtgcgttaacgaatttattggatattagttttcggggaatattttttatttcggcggtaataaatacgaagtttcggtagcggggatntttttttttttcgcggattaatgattcgcggtaatgtttcggttagttcgtagatatattttgtattagcggggttggttttgattaaaggttcgaaaatacggtaatggttggaatagtaattgcgtgcgttgcgtaaagtgtttacgtcggatatacgtattattgtcggtgttaaggttcgtgatatttatatttttacgttggaattgttcgaaaaagtgttcggtttaattattattacgttggtatggaaaaaagcgcgtttgattaattgtatttttaatgaatcgtagttggtcgatgcgtcgtagatcgttagttggaagttggaaggtattgattggattatttataattatgcgaatgttttttttcgtatcgggtttgatatcggcgcgcgtttttttatgtaatatttgttagagaatttcgaaggggagattgtcgatttcggttgcggtaatggcgttattggtttgacgttgtttga

SEQ ID NO: 13402 - DNA, 628 bp, Artificial Sequence
  chemically treated genomic DNA (Homo sapiens) CpG-island No: 13402
  unsure (494)
tcaaacaacgtcaaaccaataacgccattaccgcaaccgaaatcgacaatctccccttcgaaattctctaacaaatattacataaaaaaacgcgcgccgatatcaaacccgatacgaaaaaaaacattcgcataattataaataatccaatcaataccttccaacttccaactaacgatctacgacgcatcgaccaactacgattcattaaaaatacaattaatcaaacgcgcttttttccataccaacgtaataataattaaaccgaacactttttcgaacaattccaacgtaaaaatataaatatcacgaaccttaacaccgacaataatacgtatatccgacgtaaacactttacgcaacgcacgcaattactattccaaccattaccgtattttcgaacctttaatcaaaaccaaccccgctaatacaaaatatatctacgaactaaccgaaacattaccgcgaatcattaatccgcgaaaaaaaaaaanatccccgctaccgaaacttcgtatttattaccgccgaaataaaaaatattccccgaaaactaatatccaataaattcgttaacgcacgcccctaatccttccatacgtaactaaattcatatcgcgcgacgcta

SEQ ID NO: 13403 - DNA, 628 bp, Artificial Sequence
  chemically treated genomic DNA (Homo sapiens) CpG-island No: 13403
  unsure (494)
ttaagtagcgttagattaataacgttattatcgtaatcgagatcgataatttttttttcgagattttttggtagatgttgtataaagaagcgcgcgtcgatattaagttcggtgcgggagaagatattcgtatggttgtggatagtttagttagtattttttagtttttagttaacggtttgcggcgtatcggttagttgcggtttattgaaagtgtaattaattaggcgcgtttttttttatgttagcgtggtggtggttgggtcgagtattttttcgaatagttttagcgtggaagtgtgaatgttacgggttttggtatcggtaataatacgtgtattcgacgtgagtattttgcgtagcgtacgtagttgttgttttagttattgtcgtgttttcgggtttttggttaggattaatttcgttggtgtagggtatgtttgcgggttggtcgaaatattatcgcgagttattaattcgcggaggggggaaanattttcgttgtcgggatttcgtgtttgttgtcgtcgggatggggagtatttttcgggggttaatgtttagtgagttcgttagcgtacgtttttgatttttttatgcgtgattgagtttatgtcgcgcggcgttg

SEQ ID NO: 13404 - DNA, 628 bp, Artificial Sequence
  chemically treated genomic DNA (Homo sapiens) CpG-island No: 13404
  unsure (135)
caacgccgcgcgacataaactcaatcacgcataaaaaaatcaaaaacgtacgctaacgaactcactaaacattaacccccgaaaaatactccccatcccgacgacaacaaacacgaaatcccgacaacgaaaatntttcccccctccgcgaattaataactcgcgataatatttcgaccaacccgcaaacataccctacaccaacgaaattaatcctaaccaaaaacccgaaaacacgacaataactaaaacaacaactacgtacgctacgcaaaatactcacgtcgaatacacgtattattaccgataccaaaacccgtaacattcacacttccacgctaaaactattcgaaaaaatactcgacccaaccaccaccacgctaacataaaaaaaaacgcgcctaattaattacactttcaataaaccgcaactaaccgatacgccgcaaaccgttaactaaaaactaaaaaatactaactaaactatccacaaccatacgaatatcttctcccgcaccgaacttaatatcgacgcgcgcttctttatacaacatctaccaaaaaatctcgaaaaaaaaattatcgatctcgattacgataataacgttattaatctaacgctacttaa

SEQ ID NO: 13405 - DNA, 561 bp, Artificial Sequence
  chemically treated genomic DNA (Homo sapiens) CpG-island No: 13405
cgcgttttcggttagttttttttttttttattcgcgttttttcgcgagattcggggttgggtcgtgtcggtcgtcgcgtagtaggaagggagcggttgttacggaaaacgtttggtcggacggtgtggttggcggttttgtttgggcgcggagggcggcggtggcgggtttcgcggtttttttttaggtattttagtgttcgttgatcgttttgagcggtttagttgttttttcgattcgtatcgcggggtcgtggcgtaggggttttgttgcgttttagtttgggggtcgcggtggggcggggtagtgatttcgggtcggtcgttgtgtttttattttttttatttttttttcgtatagttttttttttttttacgacggtttttatagttcggagttcggcggagttcggatttggcggggagagttgtttttacggtcgggtatttagattttatcgtcgtagtcgttattattttagtttatttttggtatcggtaatgggtttcgtattttttagtgtatttgtaattgatttggatacggaatattaagaattta

SEQ ID NO: 13406 - DNA, 561 bp, Artificial Sequence
  chemically treated genomic DNA (Homo sapiens) CpG-island No: 13406
taaattcttaatattccgtatccaaatcaattacaaatacactaaaaaatacgaaacccattaccgataccaaaaataaactaaaataataacgactacgacgataaaatctaaatacccgaccgtaaaaacaactctccccgccaaatccgaactccgccgaactccgaactataaaaaccgtcgtaaaaaaaaaaaaaactatacgaaaaaaaaataaaaaaaataaaaacacaacgaccgacccgaaatcactaccccgccccaccgcgacccccaaactaaaacgcaacaaaacccctacgccacgaccccgcgatacgaatcgaaaaaacaactaaaccgctcaaaacgatcaacgaacactaaaatacctaaaaaaaaaccgcgaaacccgccaccgccgccctccgcgcccaaacaaaaccgccaaccacaccgtccgaccaaacgttttccgtaacaaccgctcccttcctactacgcgacgaccgacacgacccaaccccgaatctcgcgaaaaaacgcgaataaaaaaaaaaaaaactaaccgaaaacgcg

SEQ ID NO: 13407 - DNA, 561 bp, Artificial Sequence
  chemically treated genomic DNA (Homo sapiens) CpG-island No: 13407
tgagtttttagtatttcgtgtttaagttagttataagtgtattggaggatacgaagtttattgtcggtattaaggatggattgaggtggtggcgattgcgacggtggggtttgggtgttcggtcgtggaggtagtttttttcgttaggttcgggtttcgtcgggtttcggattgtggaggtcgtcgtgaggagaaaggaagttatacgaaggaagggtgggagggatgagggtataacggtcggttcggggttattgtttcgttttatcgcgatttttaagttggaacgtaataaggtttttacgttacggtttcgcggtgcggatcggggaagtagttgggtcgtttagggcggttagcgggtattggggtatttgagagaaggtcgcggggttcgttatcgtcgtttttcgcgtttaggtagggtcgttagttatatcgttcggttaggcgtttttcgtggtagtcgttttttttttgttgcgcggcgatcggtacggtttagtttcgggtttcgcgaggaggcgcgggtgaaagggagagaagttgatcgaaggcgcg

SEQ ID NO: 13408 - DNA, 561 bp, Artificial Sequence
  chemically treated genomic DNA (Homo sapiens) CpG-island No: 13408
cgcgccttcgatcaacttctctccctttcacccgcgcctcctcgcgaaacccgaaactaaaccgtaccgatcgccgcgcaacaaaaaaaaaacgactaccacgaaaaacgcctaaccgaacgatataactaacgaccctacctaaacgcgaaaaacgacgataacgaaccccgcgaccttctctcaaataccccaatacccgctaaccgccctaaacgacccaactacttccccgatccgcaccgcgaaaccgtaacgtaaaaaccttattacgttccaacttaaaaatcgcgataaaacgaaacaataaccccgaaccgaccgttataccctcatccctcccacccttccttcgtataacttcctttctcctcacgacgacctccacaatccgaaacccgacgaaacccgaacctaacgaaaaaaactacctccacgaccgaacacccaaaccccaccgtcgcaatcgccaccacctcaatccatccttaataccgacaataaacttcgtatcctccaatacacttataactaacttaaacacgaaatactaaaaactca

SEQ ID NO: 13409 - DNA, 502 bp, Artificial Sequence
  chemically treated genomic DNA (Homo sapiens) CpG-island No: 13409
cggaatcgtttatttcgcgaattgttgtattaatcggcgtatttttttaaaaaattgttcgtcggtatcggtattttttcgttggttagtttgtttaatatttgggtcggcgttttcggaaaaaattttttggtgaacggacgtattatttcggtgatgtttcgacggaattcgttttgattattgggtagttattttatcggcgggattgtcgggaattatcggatttaaatgataatcggggcgtgattgcgatttttatttttatattaagtttttggcggaggtgttattcggtcgggtttattcgaaaaatttttaaagatttacggttgggttatcggaattttcggcgggttatggtgtgaatcgttattttgaatttcggtaatttttgagggttattttcgcgttaagaggttagatcgtttttaaaatcgggattttaaagaatttcgagaacgttcgattcgggttaaaagagtttttgagggaaatattt

SEQ ID NO: 13410 - DNA, 502 bp, Artificial Sequence
  chemically treated genomic DNA (Homo sapiens) CpG-island No: 13410
aaatatttccctcaaaaactcttttaacccgaatcgaacgttctcgaaattctttaaaatcccgattttaaaaacgatctaacctcttaacgcgaaaataaccctcaaaaattaccgaaattcaaaataacgattcacaccataacccgccgaaaattccgataacccaaccgtaaatctttaaaaatttttcgaataaacccgaccgaataacacctccgccaaaaacttaatataaaaataaaaatcgcaatcacgccccgattatcatttaaatccgataattcccgacaatcccgccgataaaataactacccaataatcaaaacgaattccgtcgaaacatcaccgaaataatacgtccgttcaccaaaaaattttttccgaaaacgccgacccaaatattaaacaaactaaccaacgaaaaaataccgataccgacgaacaattttttaaaaaaatacgccgattaatacaacaattcgcgaaataaacgattccg

SEQ ID NO: 13411 - DNA, 502 bp, Artificial Sequence
  chemically treated genomic DNA (Homo sapiens) CpG-island No: 13411
aagtgttttttttaggagtttttttaattcggatcgaacgttttcgaggttttttgggatttcgattttaagaacggtttggttttttaacgcggaggtggtttttagaaattatcgagatttagggtaacggtttatattatagttcgtcggagatttcggtggtttaatcgtgggtttttgaggatttttcgggtggattcggtcggatagtattttcgttagaagtttggtgtaaaagtagggatcgtagttacgtttcggttattatttaaattcggtgattttcggtaatttcgtcgataaggtggttatttagtggttaaaacggatttcgtcggaatattatcgggataatacgttcgtttattagggagtttttttcgggaacgtcggtttaggtgttgaataggttgattagcgagaaaatgtcggtatcggcgagtaattttttgggggagtgcgtcgattggtgtaatagttcgcgaaataggcggtttcg

SEQ ID NO: 13412 - DNA, 502 bp, Artificial Sequence
  chemically treated genomic DNA (Homo sapiens) CpG-island No: 13412
cgaaaccgcctatttcgcgaactattacaccaatcgacgcactcccccaaaaaattactcgccgataccgacattttctcgctaatcaacctattcaacacctaaaccgacgttcccgaaaaaaactccctaataaacgaacgtattatcccgataatattccgacgaaatccgttttaaccactaaataaccaccttatcgacgaaattaccgaaaatcaccgaatttaaataataaccgaaacgtaactacgatccctacttttacaccaaacttctaacgaaaatactatccgaccgaatccacccgaaaaatcctcaaaaacccacgattaaaccaccgaaatctccgacgaactataatataaaccgttaccctaaatctcgataatttctaaaaaccacctccgcgttaaaaaaccaaaccgttcttaaaatcgaaatcccaaaaaacctcgaaaacgttcgatccgaattaaaaaaactcctaaaaaaaacactt

SEQ ID NO: 13413 - DNA, 1145 bp, Artificial Sequence
  chemically treated genomic DNA (Homo sapiens) CpG-island No: 13413
gcggttattattagatcggaattacggacgatatcgtcgttagtaaagattttcgggttgttggtttggaaggcgttgtcgttgtttttcggggcgatgatgcggttttgtgaatttagttcgacgttgtgttttgttagttattttatgttgtgtggacggaaattaaacgttatgattatcgtatttgtcggaacgatatgttcggaatttgtaacgattttcgcgcggcgacggtttttggcgttcggttcgtttatttcggtacgtattatttttacgtcgttgattttgtcgttatcgtttattttaatatttagcggttggacgttgaatttgaattttacgtttttttttcgcgcgttttttatttcgcggcgggaattcggtatgttttttttattacgacgattgggatagggtacgtgtttcggtttttggggtacggaggttgcggatgagcgcgtaaggggtgataggggttaattggtttcgatgtcgttttttttttttattttaattttttttttagaggggcgaggggatcgatcgcgtttaatgttgcgatcggtttgttttattttttgcgtaataattttaacgtattcgttgttattagtatcgtcgttttcgtatttgttagtattgttagttataattcggttatttttaatagcgtggtgacgaggaagattttttttagttttagcgtaatagtgatgttttggcggatattggcgtgagtggcgcgtgttagtttaattatttgtattaggtcgcgtaggtggttatgggttaatgttgcgtcggcggtttttagcgttacgtttgtgtcgttatttattgtaatttcgatggcggtagtttttatcgttggcgcgtcgttaatatcgttatcgattatcgttagcggcgtatgttgatttagttcggttatcgttttgattttatttttcggttttggtttgaaagggatggagcgttacggttatcgtgatgatgttttgaagttggcggatacgttttttcggtacgttaaagggttaatcgtcgatggattaatttaggaaaattataattcgttgataggcgtatagtaaggcgtattaaattttttttggagtgtcgcgtatttgtatatgttg

SEQ ID NO: 13414 - DNA, 1145 bp, Artificial Sequence
  chemically treated genomic DNA (Homo sapiens) CpG-island No: 13414
caacatatacaaatacgcgacactccaaaaaaaatttaatacgccttactatacgcctatcaacgaattataattttcctaaattaatccatcgacgattaaccctttaacgtaccgaaaaaacgtatccgccaacttcaaaacatcatcacgataaccgtaacgctccatccctttcaaaccaaaaccgaaaaataaaatcaaaacgataaccgaactaaatcaacatacgccgctaacgataatcgataacgatattaacgacgcgccaacgataaaaactaccgccatcgaaattacaataaataacgacacaaacgtaacgctaaaaaccgccgacgcaacattaacccataaccacctacgcgacctaatacaaataattaaactaacacgcgccactcacgccaatatccgccaaaacatcactattacgctaaaactaaaaaaaatcttcctcgtcaccacgctattaaaaataaccgaattataactaacaatactaacaaatacgaaaacgacgatactaataacaacgaatacgttaaaattattacgcaaaaaataaaacaaaccgatcgcaacattaaacgcgatcgatcccctcgcccctctaaaaaaaaaattaaaataaaaaaaaaaaacgacatcgaaaccaattaacccctatcaccccttacgcgctcatccgcaacctccgtaccccaaaaaccgaaacacgtaccctatcccaatcgtcgtaataaaaaaaacataccgaattcccgccgcgaaataaaaaacgcgcgaaaaaaaaacgtaaaattcaaattcaacgtccaaccgctaaatattaaaataaacgataacgacaaaatcaacgacgtaaaaataatacgtaccgaaataaacgaaccgaacgccaaaaaccgtcgccgcgcgaaaatcgttacaaattccgaacatatcgttccgacaaatacgataatcataacgtttaatttccgtccacacaacataaaataactaacaaaacacaacgtcgaactaaattcacaaaaccgcatcatcgccccgaaaaacaacgacaacgccttccaaaccaacaacccgaaaatctttactaacgacgatatcgtccgtaattccgatctaataataaccgc

SEQ ID NO: 13415 - DNA, 1145 bp, Artificial Sequence
  chemically treated genomic DNA (Homo sapiens) CpG-island No: 13415
taatatatataaatgcgcggtattttaggagaaatttggtgcgttttgttgtgcgtttgttagcgggttgtaatttttttgaattggtttatcggcggttaattttttggcgtgtcggaagaacgtattcgttagttttagggtattattacgataatcgtaacgttttattttttttagattaaagtcggaagataaagttaaagcggtgatcgagttgaattaatatgcgtcgttggcgatggtcggtgacggtattaacgacgcgttagcgatgaaagttgtcgttatcgggattgtaatgggtagcggtatagacgtggcgttggaaatcgtcgacgtagtattaatttataattatttgcgcggtttggtgtaaatgattgaattggtacgcgttatttacgttaatattcgttagaatattattattgcgttggggttgaaagggatttttttcgttattacgttgttagggatgatcgggttgtggttggtagtgttggtagatacgggggcgacggtgttggtgatagcgaatgcgttaagattgttgcgtaggagataaggtaaatcgatcgtaatattgagcgcgatcggttttttcgtttttttggggagagggttagggtgaggggaaaaggcggtatcgaagttaattagtttttattattttttacgcgtttattcgtaattttcgtgttttagggatcgaagtacgtattttgttttaatcgtcgtgatgaagagaatatgtcgggttttcgtcgcgaagtgaaaaacgcgcgggaagaaggcgtagagtttaaatttaacgtttagtcgttgggtattgaagtgaacggtaacggtaaagttagcggcgtaaaaatggtgcgtatcgaaatgggcgaatcggacgttaaaggtcgtcgtcgcgcggagatcgttgtaggtttcgaatatatcgtttcggtagatgcggtgattatggcgtttggttttcgtttatataatatggaatggttggtaaaatatagcgtcgagttggatttataaggtcgtattatcgtttcggaaggtagcgataacgttttttagattagtaattcgaaaatttttgttggcggcgatatcgttcgtggtttcgatttggtggtgatcgt

SEQ ID NO: 13416 - DNA, 1145 bp, Artificial Sequence
  chemically treated genomic DNA (Homo sapiens) CpG-island No: 13416
acgatcaccaccaaatcgaaaccacgaacgatatcgccgccaacaaaaattttcgaattactaatctaaaaaacgttatcgctaccttccgaaacgataatacgaccttataaatccaactcgacgctatattttaccaaccattccatattatataaacgaaaaccaaacgccataatcaccgcatctaccgaaacgatatattcgaaacctacaacgatctccgcgcgacgacgacctttaacgtccgattcgcccatttcgatacgcaccatttttacgccgctaactttaccgttaccgttcacttcaatacccaacgactaaacgttaaatttaaactctacgccttcttcccgcgcgtttttcacttcgcgacgaaaacccgacatattctcttcatcacgacgattaaaacaaaatacgtacttcgatccctaaaacacgaaaattacgaataaacgcgtaaaaaataataaaaactaattaacttcgataccgccttttcccctcaccctaaccctctccccaaaaaaacgaaaaaaccgatcgcgctcaatattacgatcgatttaccttatctcctacgcaacaatcttaacgcattcgctatcaccaacaccgtcgcccccgtatctaccaacactaccaaccacaacccgatcatccctaacaacgtaataacgaaaaaaatccctttcaaccccaacgcaataataatattctaacgaatattaacgtaaataacgcgtaccaattcaatcatttacaccaaaccgcgcaaataattataaattaatactacgtcgacgatttccaacgccacgtctataccgctacccattacaatcccgataacgacaactttcatcgctaacgcgtcgttaataccgtcaccgaccatcgccaacgacgcatattaattcaactcgatcaccgctttaactttatcttccgactttaatctaaaaaaaataaaacgttacgattatcgtaataataccctaaaactaacgaatacgttcttccgacacgccaaaaaattaaccgccgataaaccaattcaaaaaaattacaacccgctaacaaacgcacaacaaaacgcaccaaatttctcctaaaataccgcgcatttatatatatta

SEQ ID NO: 13417 - DNA, 890 bp, Artificial Sequence
  chemically treated genomic DNA (Homo sapiens) CpG-island No: 13417
gttttgttcgttataatttcgataatttgtcgattcgtttgttgtatcgaatggtttgttaacgtatataggttggtaatcgattgtttaatattatgcgttataatttttttattgtcggttacggcggtattatttagcgttattaatatcgttttttacgtagtcgaagtattggtcgaaatttttatcgcgtagttgttcgacgtattatcgtaaattatgtcgttgatatcgtcgattatattgttgatcgttatcgagatggttttataacgtttatttattagttatgttatttcggcggcggtttttattgttgcggtcgttgcggtatatagcgtagataaacgcggtaattggttatggatgtaaattgcgtttaaatgcgaaagtattagcgtacgcgttagtcgtttattattcgtttcgaagtgttttgttattattattataggtattgttgcggtaattttttggttattcgagtcggagttatttatagtcggaagcgtagcgtcgtttatacgcgtatcggatgtcgcgttggtacgaattataatggatgaagagagatttttcgttagtaaatcgcgttcgtattgtttttttagcgtcgcgttaatatgtagtttttatttatcgtttaaatttttttgcgataacgtataatttagtttcgcggaatcgagaataaagcggatcgtcgtcgttggtcggtttgttgaggtcgatttggaagtatcgttaggataattttttggtgtgaaaggtgtttacgtcgcggaatttggagggcgtatttatttgtattagggtatcgttgacggtaattttgaacgtaaattttagttagttgagaatatttatgttcgtggtgttaatttggt

SEQ ID NO: 13418 - DNA, 890 bp, Artificial Sequence
  chemically treated genomic DNA (Homo sapiens) CpG-island No: 13418
accaaattaacaccacgaacataaatattctcaactaactaaaatttacgttcaaaattaccgtcaacgataccctaatacaaataaatacgccctccaaattccgcgacgtaaacacctttcacaccaaaaaattatcctaacgatacttccaaatcgacctcaacaaaccgaccaacgacgacgatccgctttattctcgattccgcgaaactaaattatacgttatcgcaaaaaaatttaaacgataaataaaaactacatattaacgcgacgctaaaaaaacaatacgaacgcgatttactaacgaaaaatctctcttcatccattataattcgtaccaacgcgacatccgatacgcgtataaacgacgctacgcttccgactataaataactccgactcgaataaccaaaaaattaccgcaacaatacctataataataataacaaaacacttcgaaacgaataataaacgactaacgcgtacgctaatactttcgcatttaaacgcaatttacatccataaccaattaccgcgtttatctacgctatataccgcaacgaccgcaacaataaaaaccgccgccgaaataacataactaataaataaacgttataaaaccatctcgataacgatcaacaatataatcgacgatatcaacgacataatttacgataatacgtcgaacaactacgcgataaaaatttcgaccaatacttcgactacgtaaaaaacgatattaataacgctaaataataccgccgtaaccgacaataaaaaaattataacgcataatattaaacaatcgattaccaacctatatacgttaacaaaccattcgatacaacaaacgaatcgacaaattatcgaaattataacgaacaaaac

SEQ ID NO: 13419 - DNA, 890 bp, Artificial Sequence
  chemically treated genomic DNA (Homo sapiens) CpG-island No: 13419
attaggttagtattacgaatatgaatgtttttagttaattggaatttgcgtttaaagttgtcgttagcgatgttttggtatagataggtgcgttttttaagtttcgcggcgtgagtattttttatattaggagattattttggcggtatttttagatcgattttagtaaatcggttagcgacggcgattcgttttattttcgatttcgcgaagttaaattgtgcgttatcgtaggaaggtttgagcggtaagtgggggttgtatattggcgcgacgttggaaaaatagtgcgagcgcggtttgttggcgaaagatttttttttatttattgtgattcgtattagcgcggtattcgatgcgcgtatgggcggcgttacgttttcggttatgagtaatttcggttcgggtaattaggggattatcgtaataatgtttgtggtggtggtagtagaatatttcggagcggatgatgaacggttggcgcgtgcgttgatgttttcgtatttgagcgtaatttatatttataattagttatcgcgtttgtttgcgttgtgtgtcgtaacgatcgtagtaatgggggtcgtcgtcgggatggtatggttggtggatgggcgttatgaaattatttcgatggcgattagtagtatgatcggcgatgttagcggtatgatttgcgatggtgcgtcgaatagttgcgcgatgaaggtttcgattagtgtttcggttgcgtggaaagcggtgttaatggcgttggatgatatcgtcgtgatcggtaatgaagggattgtggcgtatgatgttgagtagtcgattgttaatttgtgtgcgttagtaagttattcgatgtagtaaacggatcggtagattatcgagattatggcgagtaaggt

SEQ ID NO: 13420 - DNA, 890 bp, Artificial Sequence
  chemically treated genomic DNA (Homo sapiens) CpG-island No: 13420
accttactcgccataatctcgataatctaccgatccgtttactacatcgaataacttactaacgcacacaaattaacaatcgactactcaacatcatacgccacaatcccttcattaccgatcacgacgatatcatccaacgccattaacaccgctttccacgcaaccgaaacactaatcgaaaccttcatcgcgcaactattcgacgcaccatcgcaaatcataccgctaacatcgccgatcatactactaatcgccatcgaaataatttcataacgcccatccaccaaccataccatcccgacgacgacccccattactacgatcgttacgacacacaacgcaaacaaacgcgataactaattataaatataaattacgctcaaatacgaaaacatcaacgcacgcgccaaccgttcatcatccgctccgaaatattctactaccaccaccacaaacattattacgataatcccctaattacccgaaccgaaattactcataaccgaaaacgtaacgccgcccatacgcgcatcgaataccgcgctaatacgaatcacaataaataaaaaaaaatctttcgccaacaaaccgcgctcgcactatttttccaacgtcgcgccaatatacaacccccacttaccgctcaaaccttcctacgataacgcacaatttaacttcgcgaaatcgaaaataaaacgaatcgccgtcgctaaccgatttactaaaatcgatctaaaaataccgccaaaataatctcctaatataaaaaatactcacgccgcgaaacttaaaaaacgcacctatctataccaaaacatcgctaacgacaactttaaacgcaaattccaattaactaaaaacattcatattcgtaatactaacctaat

SEQ ID NO: 13421 - DNA, 784 bp, Artificial Sequence
  chemically treated genomic DNA (Homo sapiens) CpG-island No: 13421
gcgtagcgtggttataagttattttttcggatatgttggtgaaagagggcgatatgcgtttttttcgcgtttagtaagtttttatttttcgcggtatgattattgatcgttttggtcgttcgttagcggtgagcgtgtcggtaaaagcgatttgggttgattcgaaagaagtgtatgacgttggcggtattagcgtcggtgatcgttggaaggcgttggttcgttcgtaataaatgtatcgagcgttatcgatagttttagcgtatttataaataatgcggaatttaatattagtagtagcgtcgcggcggtgaatatttttcgtacgttagaagttgtaataaagcggaatatcggacgtagtaaatagcgtttattaattagtatgtcgataaacgttagtatttttatgtcgatttttatttagtcgaaatgttcgtttgtcgatttcgttaataacggtattaacgttagtgttgggattattgttagattttgaaatagtagaatcgaaaattcgagttggtcggattcgttgcgatttattttttttttacgtattaattgtaacgttattgtagttgaagatatcgtaaggttaatgttatcgattatcgtcgtttgttaggcgaaattcgttagtattaataatttcgttagtaacgtcgcgtttaatagtatttgtgtcgcgtttacgttaaaaatcgaacgtcgtagttgttaaagtttggagggatttaatttaaggtcgatgataaatattaggaatattacgtcgagtttt

SEQ ID NO: 13422 - DNA, 784 bp, Artificial Sequence
  chemically treated genomic DNA (Homo sapiens) CpG-island No: 13422
aaaactcgacgtaatattcctaatatttatcatcgaccttaaattaaatccctccaaactttaacaactacgacgttcgatttttaacgtaaacgcgacacaaatactattaaacgcgacgttactaacgaaattattaatactaacgaatttcgcctaacaaacgacgataatcgataacattaaccttacgatatcttcaactacaataacgttacaattaatacgtaaaaaaaaaataaatcgcaacgaatccgaccaactcgaattttcgattctactatttcaaaatctaacaataatcccaacactaacgttaataccgttattaacgaaatcgacaaacgaacatttcgactaaataaaaatcgacataaaaatactaacgtttatcgacatactaattaataaacgctatttactacgtccgatattccgctttattacaacttctaacgtacgaaaaatattcaccgccgcgacgctactactaatattaaattccgcattatttataaatacgctaaaactatcgataacgctcgatacatttattacgaacgaaccaacgccttccaacgatcaccgacgctaataccgccaacgtcatacacttctttcgaatcaacccaaatcgcttttaccgacacgctcaccgctaacgaacgaccaaaacgatcaataatcataccgcgaaaaataaaaacttactaaacgcgaaaaaaacgcatatcgccctctttcaccaacatatccgaaaaaataacttataaccacgctacgc

SEQ ID NO: 13423 - DNA, 784 bp, Artificial Sequence
  chemically treated genomic DNA (Homo sapiens) CpG-island No: 13423
ggaattcggcgtggtatttttgatgtttattatcggttttgagttgaatttttttaaattttggtaattacggcgttcgatttttggcgtaggcgcggtataggtgttgttaagcgcggcgttgttggcgggattattgatgttgacggatttcgtttggtaggcggcggtggtcggtggtattggttttgcgatgtttttaattgtaatggcgttgtaattgatgcgtgagaaagggatgaatcgtagcgaattcggttagttcgggttttcggttttgttgttttaggatttggtagtaattttagtattggcgttagtgtcgttgttggcggggtcggtagacgaatatttcgattggatgaaggtcggtatgaaggtgttggcgtttgtcggtatgttgattggtgggcgttatttattgcgttcggtatttcgttttattgtagtttttggcgtgcgggaagtgtttatcgtcgcgacgttgttgttggtgttgggtttcgtattgtttatggatgcgttggggttgtcgatggcgttcggtatatttattgcgggcgagttagcgttttttagcggttatcgacgttgatatcgttagcgttatgtatttttttcgggttagtttaaatcgtttttatcggtacgtttatcgttaacgggcgattagaacggttagtaattatgtcgcgggaggtggaaatttgttgaacgcgaagagaacgtatgtcgtttttttttattagtatattcggggagataatttgtaattacgttacgt

SEQ ID NO: 13424 - DNA, 784 bp, Artificial Sequence
  chemically treated genomic DNA (Homo sapiens) CpG-island No: 13424
acgtaacgtaattacaaattatctccccgaatatactaataaaaaaaaacgacatacgttctcttcgcgttcaacaaatttccacctcccgcgacataattactaaccgttctaatcgcccgttaacgataaacgtaccgataaaaacgatttaaactaacccgaaaaaaatacataacgctaacgatatcaacgtcgataaccgctaaaaaacgctaactcgcccgcaataaatataccgaacgccatcgacaaccccaacgcatccataaacaatacgaaacccaacaccaacaacaacgtcgcgacgataaacacttcccgcacgccaaaaactacaataaaacgaaataccgaacgcaataaataacgcccaccaatcaacataccgacaaacgccaacaccttcataccgaccttcatccaatcgaaatattcgtctaccgaccccgccaacaacgacactaacgccaatactaaaattactaccaaatcctaaaacaacaaaaccgaaaacccgaactaaccgaattcgctacgattcatccctttctcacgcatcaattacaacgccattacaattaaaaacatcgcaaaaccaataccaccgaccaccgccgcctaccaaacgaaatccgtcaacatcaataatcccgccaacaacgccgcgcttaacaacacctataccgcgcctacgccaaaaatcgaacgccgtaattaccaaaatttaaaaaaattcaactcaaaaccgataataaacatcaaaaataccacgccgaattcc

SEQ ID NO: 13425 - DNA, 540 bp, Artificial Sequence
  chemically treated genomic DNA (Homo sapiens) CpG-island No: 13425
gggcggtggtgtattacggtttatgacggttgtcgttagtttaattattgttattttatatttgcgttgcgtggcgttggtagttagttttagattaatagtttcggtatcgattattacgattggtcggttcggttgtcgaattttttcgcgttcggggggatatcgggatgggtagggtaagcgcggtttttcgggttttagttcgcgcgggttattgtcgttcgggggttataagcggttttcggttcgttgtcggggtgaattattttcgtttggtttcggttgtggtttcgtcgcgacgaagagttttcgttttacggggttattattttttggggcgtttagttcgtcgacgaggttaattaattgattaattttttttatcgttatacggatgttggtggatttattgttgcgcgtcgttttttttcgttttacgcggtcggttggcgtttgttcggttgttagtttaagtattggtggggtggatatttttggcgagatttttattgttttaaaggtaatttgatcggtttt

SEQ ID NO: 13426 - DNA, 540 bp, Artificial Sequence
  chemically treated genomic DNA (Homo sapiens) CpG-island No: 13426
aaaaccgatcaaattacctttaaaacaataaaaatctcgccaaaaatatccaccccaccaatacttaaactaacaaccgaacaaacgccaaccgaccgcgtaaaacgaaaaaaaacgacgcgcaacaataaatccaccaacatccgtataacgataaaaaaaattaatcaattaattaacctcgtcgacgaactaaacgccccaaaaaataataaccccgtaaaacgaaaactcttcgtcgcgacgaaaccacaaccgaaaccaaacgaaaataattcaccccgacaacgaaccgaaaaccgcttataacccccgaacgacaataacccgcgcgaactaaaacccgaaaaaccgcgcttaccctacccatcccgatatccccccgaacgcgaaaaaattcgacaaccgaaccgaccaatcgtaataatcgataccgaaactattaatctaaaactaactaccaacgccacgcaacgcaaatataaaataacaataattaaactaacgacaaccgtcataaaccgtaatacaccaccgccc

SEQ ID NO: 13427 - DNA, 540 bp, Artificial Sequence
  chemically treated genomic DNA (Homo sapiens) CpG-island No: 13427
gaagtcgattagattatttttgaaatagtagaagtttcgttaaaaatatttattttattagtgtttaaattggtagtcgaataagcgttaatcggtcgcgtggagcgggaaaaaacgacgcgtagtaatgaatttattagtattcgtgtagcggtagaaaaggttgattaattaattaatttcgtcggcgagttgggcgttttagagagtagtgatttcgtagggcgaaaatttttcgtcgcggcggaattataatcggggttaaacggaggtggtttatttcggtaacgggtcgggaatcgtttatagttttcgggcggtagtgattcgcgcgggttgaagttcggggaatcgcgtttattttatttatttcggtattttttcggacgcggagaagttcggtagtcggatcggttagtcgtgataatcggtgtcggaattattggtttggaattggttgttagcgttacgtagcgtagatgtaaggtgatagtgattgaattggcggtaatcgttatgggtcgtaatgtattatcgttt

SEQ ID NO: 13428 - DNA, 540 bp, Artificial Sequence
  chemically treated genomic DNA (Homo sapiens) CpG-island No: 13428
aaacgataatacattacgacccataacgattaccgccaattcaatcactatcaccttacatctacgctacgtaacgctaacaaccaattccaaaccaataattccgacaccgattatcacgactaaccgatccgactaccgaacttctccgcgtccgaaaaaataccgaaataaataaaataaacgcgattccccgaacttcaacccgcgcgaatcactaccgcccgaaaactataaacgattcccgacccgttaccgaaataaaccacctccgtttaaccccgattataattccgccgcgacgaaaaattttcgccctacgaaatcactactctctaaaacgcccaactcgccgacgaaattaattaattaatcaaccttttctaccgctacacgaatactaataaattcattactacgcgtcgttttttcccgctccacgcgaccgattaacgcttattcgactaccaatttaaacactaataaaataaatatttttaacgaaacttctactatttcaaaaataatctaatcgacttc

SEQ ID NO: 13429 - DNA, 671 bp, Artificial Sequence
  chemically treated genomic DNA (Homo sapiens) CpG-island No: 13429
atggtatagtttggcgtaatacgtttggtggatttgattggtcgtatcgatttgttgaaagagttggacggttttatcgttaaatagtagaagttggcgttgtcgaagttgttggagattgtcgaatcgtatttaggtaaggtattttattgtatcgaaaataattcgtcgtttgataacggtttgttgaacgcgtagttgttgtaataggcgaaatcgtttgtcgatgagcgttagagtaaaattttttggttcgatattcgtaatatcgatcgttttgtcggcgcgtcgtttttaggttatatcgtttagacgtacggcgattaggggttggtagtcgattttattaaagcgtattttaacggtatcgtaggttagagtttcggcgtgtggaacgcgggcggcgtggaattgtatttgatcggtgatgttaacgattatgtcggtaaaggtatggcgggcggtttaatcgttattcgtttttcggttggtttcgtttttcgtagttatgaagtaagtattatcggtaatatttgtttgtatgggcggatcggggtgttttttttttaaggcggttcgggagaaatataggggggagtattcgggattttaggagaagacggtgttttagggtattatttggcgtttttttttttgtttttttttttttt

SEQ ID NO: 13430 - DNA, 671 bp, Artificial Sequence
  chemically treated genomic DNA (Homo sapiens) CpG-island No: 13430
aaaaaaaaaaaaaacaaaaaaaaaaacgccaaataataccctaaaacaccgtcttctcctaaaatcccgaatactcccccctatatttctcccgaaccgccttaaaaaaaaaacaccccgatccgcccatacaaacaaatattaccgataatacttacttcataactacgaaaaacgaaaccaaccgaaaaacgaataacgattaaaccgcccgccatacctttaccgacataatcgttaacatcaccgatcaaatacaattccacgccgcccgcgttccacacgccgaaactctaacctacgataccgttaaaatacgctttaataaaatcgactaccaacccctaatcgccgtacgtctaaacgatataacctaaaaacgacgcgccgacaaaacgatcgatattacgaatatcgaaccaaaaaattttactctaacgctcatcgacaaacgatttcgcctattacaacaactacgcgttcaacaaaccgttatcaaacgacgaattattttcgatacaataaaataccttacctaaatacgattcgacaatctccaacaacttcgacaacgccaacttctactatttaacgataaaaccgtccaactctttcaacaaatcgatacgaccaatcaaatccaccaaacgtattacgccaaactataccat

SEQ ID NO: 13431 - DNA, 671 bp, Artificial Sequence
  chemically treated genomic DNA (Homo sapiens) CpG-island No: 13431
aagaagagaaaggataaagagaaaaacgttagataatattttggggtatcgtttttttttgggatttcgggtatttttttttatatttttttcgggtcgttttggaaaaaaagtatttcggttcgtttatataggtaggtgttgtcgataatgtttgttttatggttgcggaaggcggaattaatcggaggacgaatggcgattaagtcgttcgttatgtttttatcgatatagtcgttggtattatcggttaggtatagttttacgtcgttcgcgttttatacgtcgaagttttggtttgcggtgtcgttgaagtacgttttgataggatcggttgttagtttttgatcgtcgtgcgtttgggcgatatagtttgaaagcgacgcgtcgatagaacggtcggtgttgcgaatatcgaattagaaggttttgttttggcgtttatcgataaacggtttcgtttgttgtagtaattgcgcgtttagtaggtcgttattaaacggcgggttgttttcggtgtagtagagtgttttatttggatgcggttcggtagtttttagtagtttcgatagcgttagtttttgttgtttggcggtgaaatcgtttagtttttttagtaggtcggtgcgattaattagatttattagacgtgttacgttaagttgtgttat

SEQ ID NO: 13432 - DNA, 671 bp, Artificial Sequence
  chemically treated genomic DNA (Homo sapiens) CpG-island No: 13432
ataacacaacttaacgtaacacgtctaataaatctaattaatcgcaccgacctactaaaaaaactaaacgatttcaccgccaaacaacaaaaactaacgctatcgaaactactaaaaactaccgaaccgcatccaaataaaacactctactacaccgaaaacaacccgccgtttaataacgacctactaaacgcgcaattactacaacaaacgaaaccgtttatcgataaacgccaaaacaaaaccttctaattcgatattcgcaacaccgaccgttctatcgacgcgtcgctttcaaactatatcgcccaaacgcacgacgatcaaaaactaacaaccgatcctatcaaaacgtacttcaacgacaccgcaaaccaaaacttcgacgtataaaacgcgaacgacgtaaaactatacctaaccgataataccaacgactatatcgataaaaacataacgaacgacttaatcgccattcgtcctccgattaattccgccttccgcaaccataaaacaaacattatcgacaacacctacctatataaacgaaccgaaatactttttttccaaaacgacccgaaaaaaatataaaaaaaaatacccgaaatcccaaaaaaaaacgataccccaaaatattatctaacgtttttctctttatcctttctcttctt

SEQ ID NO: 13433 - DNA, 578 bp, Artificial Sequence
  chemically treated genomic DNA (Homo sapiens) CpG-island No: 13433
cgcggtagagtatagttcgttgtatatttcggtagattcgttgtaaagtatgagtcgtgaagagaagttggatattttgcgtcgcgtcgataaggttgttcgcgaagcggataagcgcgtataggaagtgattgttagttttagtggtgtttatgaattaattttggttgcggttatcgacggtacgttagcggcggatgttcgttcgttggtgcgttttttcgtgagcgttttcgtcgaagaagatggtaaacgcgaacgcggtgttagtggcggcggcggtcgttttggttatgaatttttttttgtcgatttcgacggcgaagttcgtgcggatgtatgggtaaaagaagtagtgcgtatggcgttggttaatttttttgtcgttgttgtattagcgggtattatgtcggtagtatttggcgtaggttggtcgggcgtgttgttgtatgaagcggttggttacggtttggaaggcgattttaatcgtcgtggtattttagtatttagtggatagtcggggagttggtggttttagaattgtgtatcgtagtgatgatggattagttgattatttt

SEQ ID NO: 13434 - DNA, 578 bp, Artificial Sequence
  chemically treated genomic DNA (Homo sapiens) CpG-island No: 13434
aaaataatcaactaatccatcatcactacgatacacaattctaaaaccaccaactccccgactatccactaaatactaaaataccacgacgattaaaatcgccttccaaaccgtaaccaaccgcttcatacaacaacacgcccgaccaacctacgccaaatactaccgacataatacccgctaatacaacaacgacaaaaaaattaaccaacgccatacgcactacttcttttacccatacatccgcacgaacttcgccgtcgaaatcgacaaaaaaaaattcataaccaaaacgaccgccgccgccactaacaccgcgttcgcgtttaccatcttcttcgacgaaaacgctcacgaaaaaacgcaccaacgaacgaacatccgccgctaacgtaccgtcgataaccgcaaccaaaattaattcataaacaccactaaaactaacaatcacttcctatacgcgcttatccgcttcgcgaacaaccttatcgacgcgacgcaaaatatccaacttctcttcacgactcatactttacaacgaatctaccgaaatatacaacgaactatactctaccgcg

SEQ ID NO: 13435 - DNA, 578 bp, Artificial Sequence
  chemically treated genomic DNA (Homo sapiens) CpG-island No: 13435
gggataattagttggtttattattattacggtatatagttttgaagttattagtttttcgattgtttattaaatattgaagtgttacggcggttgaagtcgttttttagatcgtgattaatcgttttatgtaatagtacgttcggttaatttgcgttaagtattatcggtatggtgttcgttggtgtagtaacggtagaaagattgattagcgttatacgtattgttttttttgtttatgtattcgtacggatttcgtcgtcgagatcggtaaggaagaatttataattaaaacgatcgtcgtcgttattggtatcgcgttcgcgtttgttatttttttcgacgagaacgtttacggaaagacgtattagcggacggatattcgtcgttagcgtgtcgtcggtggtcgtaattaaaattaatttatagatattattgaggttggtagttattttttgtacgcgtttgttcgtttcgcgggtaattttatcgacgcgacgtaggatatttagtttttttttacggtttatgttttgtagcggatttatcgaggtatataacgggttatgttttatcgcg

SEQ ID NO: 13436 - DNA, 578 bp, Artificial Sequence
  chemically treated genomic DNA (Homo sapiens) CpG-island No: 13436
cgcgataaaacataacccgttatatacctcgataaatccgctacaaaacataaaccgtaaaaaaaaactaaatatcctacgtcgcgtcgataaaattacccgcgaaacgaacaaacgcgtacaaaaaataactaccaacctcaataatatctataaattaattttaattacgaccaccgacgacacgctaacgacgaatatccgtccgctaatacgtctttccgtaaacgttctcgtcgaaaaaaataacaaacgcgaacgcgataccaataacgacgacgatcgttttaattataaattcttccttaccgatctcgacgacgaaatccgtacgaatacataaacaaaaaaaacaatacgtataacgctaatcaatctttctaccgttactacaccaacgaacaccataccgataatacttaacgcaaattaaccgaacgtactattacataaaacgattaatcacgatctaaaaaacgacttcaaccgccgtaacacttcaatatttaataaacaatcgaaaaactaataacttcaaaactatataccgtaataataataaaccaactaattatccc

SEQ ID NO: 13437 - DNA, 509 bp, Artificial Sequence
  chemically treated genomic DNA (Homo sapiens) CpG-island No: 13437
atcgcggtcgagtataatttgtaggtgttggattttattattgttaacgtggcgatttttattatcgtcgggaatttgggtttatcgtttagttaggaacgtgggtaattatttttttcggggtggcgaatgttatttcgatttcgtttatcggttggttggtaaagcgcgtcggggaagtgaaattgtttttttggtttattatcgtttttgttattgcgtcgtgggcgtgtggtgtttttagtagtttgaatatgttgattttttttcgcgtgatttaggggattgtcgtcgggtcgttgatttcgttttcgtaaagtttattgttgaataattattcgttagttaaacgttcgatcgcgttggcgttgtggtcgatgacggtgattgtcgcgttaatttgcggttcgattttcggcggttatattagcgataattattattggggttggatattttttattaacgtgtcgattggcgtggcggtggtgttgatgatattgtaaatt

SEQ ID NO: 13438 - DNA, 509 bp, Artificial Sequence
  chemically treated genomic DNA (Homo sapiens) CpG-island No: 13438
aatttacaatatcatcaacaccaccgccacgccaatcgacacgttaataaaaaatatccaaccccaataataattatcgctaatataaccgccgaaaatcgaaccgcaaattaacgcgacaatcaccgtcatcgaccacaacgccaacgcgatcgaacgtttaactaacgaataattattcaacaataaactttacgaaaacgaaatcaacgacccgacgacaatcccctaaatcacgcgaaaaaaaatcaacatattcaaactactaaaaacaccacacgcccacgacgcaataacaaaaacgataataaaccaaaaaaacaatttcacttccccgacgcgctttaccaaccaaccgataaacgaaatcgaaataacattcgccaccccgaaaaaaataattacccacgttcctaactaaacgataaacccaaattcccgacgataataaaaatcgccacgttaacaataataaaatccaacacctacaaattatactcgaccgcgat

SEQ ID NO: 13439 - DNA, 509 bp, Artificial Sequence
  chemically treated genomic DNA (Homo sapiens) CpG-island No: 13439
gatttgtagtgttattaatattatcgttacgttaatcggtacgttgatgaagaatatttagttttagtggtaattatcgttgatataatcgtcgaggatcgggtcgtaaattggcgcgataattatcgttatcgattataacgttagcgcgatcgagcgtttggttggcgggtagttatttagtaatagattttgcgaaagcgggattaacggttcggcgataattttttgaattacgcggaagaagattagtatatttaggttgttggagatattatacgtttacgacgtaatagtaaaggcgatggtggattaaaggaatagttttattttttcgacgcgttttgttagttagtcggtaagcgggatcgagatggtattcgttatttcgaaagaagtgattatttacgtttttggttgagcgatgagtttagattttcggcgatagtggggatcgttacgttagtaatggtggagtttagtatttgtagattatgttcgatcgcggt

SEQ ID NO: 13440 - DNA, 509 bp, Artificial Sequence
  chemically treated genomic DNA (Homo sapiens) CpG-island No: 13440
accgcgatcgaacataatctacaaatactaaactccaccattactaacgtaacgatccccactatcgccgaaaatctaaactcatcgctcaaccaaaaacgtaaataatcacttctttcgaaataacgaataccatctcgatcccgcttaccgactaactaacaaaacgcgtcgaaaaaataaaactattcctttaatccaccatcgcctttactattacgtcgtaaacgtataatatctccaacaacctaaatatactaatcttcttccgcgtaattcaaaaaattatcgccgaaccgttaatcccgctttcgcaaaatctattactaaataactacccgccaaccaaacgctcgatcgcgctaacgttataatcgataacgataattatcgcgccaatttacgacccgatcctcgacgattatatcaacgataattaccactaaaactaaatattcttcatcaacgtaccgattaacgtaacgataatattaataacactacaaatc

SEQ ID NO: 13441 - DNA, 548 bp, Artificial Sequence
  chemically treated genomic DNA (Homo sapiens) CpG-island No: 13441
tcgttttcggtcgcgtgagcgatatggtgtttttcgatgattttaattcgttaatcggttttatgttaatcgatatcgttatttggggtgaagacggtaattttatcgatgtcgtcgtttatatgattttgtttgttattgtgttgggtattatttcgttggcggttattgtgcgtatgatacgtttttcgatgttggaagtgttgggcgaggattatattcgtatcgcgcgcgttaaagggttaattcgtatgcgggtgattatcgtttatgcgttgcgtaacgcgatgttgtcggtggtgatcgttatcggtttgtaggtgggaatattgttggcgggggcgattttgatcgaaattattttttcgtggttcggtttgggacgttggttgattgacgtattgtaacgtcgcgattattcggtagtgtagggcggcgtattgttggtggcgacgatgattattttcgttaatttgttggtcgatttgttgtacggcgtggtgaattcgcgtattcgttataagaagtaaggggatattatgttatag

SEQ ID NO: 13442 - DNA, 548 bp, Artificial Sequence
  chemically treated genomic DNA (Homo sapiens) CpG-island No: 13442
ctataacataatatccccttacttcttataacgaatacgcgaattcaccacgccgtacaacaaatcgaccaacaaattaacgaaaataatcatcgtcgccaccaacaatacgccgccctacactaccgaataatcgcgacgttacaatacgtcaatcaaccaacgtcccaaaccgaaccacgaaaaaataatttcgatcaaaatcgcccccgccaacaatattcccacctacaaaccgataacgatcaccaccgacaacatcgcgttacgcaacgcataaacgataatcacccgcatacgaattaaccctttaacgcgcgcgatacgaatataatcctcgcccaacacttccaacatcgaaaaacgtatcatacgcacaataaccgccaacgaaataatacccaacacaataacaaacaaaatcatataaacgacgacatcgataaaattaccgtcttcaccccaaataacgatatcgattaacataaaaccgattaacgaattaaaatcatcgaaaaacaccatatcgctcacgcgaccgaaaacga

SEQ ID NO: 13443 - DNA, 548 bp, Artificial Sequence
  chemically treated genomic DNA (Homo sapiens) CpG-island No: 13443
ttgtgatatgatgtttttttattttttatgacgaatacgcgggtttattacgtcgtatagtagatcgattagtaagttgacgaggataattatcgtcgttattagtaatacgtcgttttgtattatcggatagtcgcggcgttgtagtgcgttaattaattagcgttttagatcgggttacgagaagatggtttcggttagaatcgttttcgttagtaatgtttttatttgtaggtcgataacggttattatcggtagtatcgcgttacgtagcgtatggacgataattattcgtatgcgggttagttttttggcgcgcgcggtgcggatgtaattttcgtttagtatttttagtatcgaggagcgtgttatacgtataatgatcgttagcggaatagtatttagtataatggtaggtaagattatatgggcgacggtatcgataaagttgtcgtttttattttagatggcggtgtcgattagtataaaatcggttaacggattggagttatcgaggaatattatatcgtttacgcgatcggagacgg

SEQ ID NO: 13444 - DNA, 548 bp, Artificial Sequence
  chemically treated genomic DNA (Homo sapiens) CpG-island No: 13444
ccgtctccgatcgcgtaaacgatataatattcctcgataactccaatccgttaaccgattttatactaatcgacaccgccatctaaaataaaaacgacaactttatcgataccgtcgcccatataatcttacctaccattatactaaatactattccgctaacgatcattatacgtataacacgctcctcgatactaaaaatactaaacgaaaattacatccgcaccgcgcgcgccaaaaaactaacccgcatacgaataattatcgtccatacgctacgtaacgcgatactaccgataataaccgttatcgacctacaaataaaaacattactaacgaaaacgattctaaccgaaaccatcttctcgtaacccgatctaaaacgctaattaattaacgcactacaacgccgcgactatccgataatacaaaacgacgtattactaataacgacgataattatcctcgtcaacttactaatcgatctactatacgacgtaataaacccgcgtattcgtcataaaaaataaaaaaacatcatatcacaa

SEQ ID NO: 13445 - DNA, 570 bp, Artificial Sequence
  chemically treated genomic DNA (Homo sapiens) CpG-island No: 13445
  unsure (567)
gtcgggttggtttacgtcgttatcgtgttaaatacggacggtttcgtcgttaggtttaggatagtttcggtaaagaagtataagaacgttatattttgatttacgaaattcgtaatttttagtaatttaacgcgtaaatggtttaggaagcgattaatttgacgcgcgcgttgaaaggcgataataaaatttagggtaattggggcgaggtagtattgacgcgggtgttggaggttttcggtttgcgtgaagggtatgaatatgaaatttaggttagtatcgaaaatgacgttcgttcgcggatgtagtcggatgttatcgtgcgtttgtcgtagggaaaagatgtggtgatcgacgttaaaatgacgttggtcgtttatgaacgttattttaacgtcgaagacgattatataagtagttcggatcgtagtttaaggcgtcgtattgtatcggatagtcgattaatgttatcggcggttaggtgatgttttgattaatagcggagatttattaaggattttcgtgagattatagaatgtttgatgcgttacgtttattaggtatatnagg

SEQ ID NO: 13446 - DNA, 570 bp, Artificial Sequence
  chemically treated genomic DNA (Homo sapiens) CpG-island No: 13446
  unsure (4)
cctnatatacctaataaacgtaacgcatcaaacattctataatctcacgaaaatccttaataaatctccgctattaatcaaaacatcacctaaccgccgataacattaatcgactatccgatacaatacgacgccttaaactacgatccgaactacttatataatcgtcttcgacgttaaaataacgttcataaacgaccaacgtcattttaacgtcgatcaccacatcttttccctacgacaaacgcacgataacatccgactacatccgcgaacgaacgtcattttcgatactaacctaaatttcatattcatacccttcacgcaaaccgaaaacctccaacacccgcgtcaatactacctcgccccaattaccctaaattttattatcgcctttcaacgcgcgcgtcaaattaatcgcttcctaaaccatttacgcgttaaattactaaaaattacgaatttcgtaaatcaaaatataacgttcttatacttctttaccgaaactatcctaaacctaacgacgaaaccgtccgtatttaacacgataacgacgtaaaccaacccgac

SEQ ID NO: 13447 - DNA, 570 bp, Artificial Sequence
  chemically treated genomic DNA (Homo sapiens) CpG-island No: 13447
  unsure (4)
tttngtatgtttgatgagcgtagcgtattaggtattttatagttttacggagatttttaatggattttcgttgttgattagaatattatttgatcgtcggtgatattgatcgattgttcggtgtagtacgacgttttagattgcggttcgagttatttatgtagtcgttttcggcgttaaaatagcgtttataggcgattagcgttattttggcgtcgattattatattttttttttgcggtaggcgtacgatgatattcggttgtattcgcgagcgggcgttattttcgatgttgatttgggttttatatttatattttttacgtagatcggaagtttttagtattcgcgttaatattatttcgttttagttgttttgggttttattgtcgttttttagcgcgcgcgttaggttgatcgttttttgggttatttgcgcgttgagttgttggagattgcgaatttcgtgggttagggtatggcgtttttgtgtttttttatcgaagttgttttgaatttgacggcggaatcgttcgtgtttagtacgatgacgacgtaaattagttcgat

SEQ ID NO: 13448 - DNA, 570 bp, Artificial Sequence
  chemically treated genomic DNA (Homo sapiens) CpG-island No: 13448
  unsure (567)
atcgaactaatttacgtcgtcatcgtactaaacacgaacgattccgccgtcaaattcaaaacaacttcgataaaaaaacacaaaaacgccataccctaacccacgaaattcgcaatctccaacaactcaacgcgcaaataacccaaaaaacgatcaacctaacgcgcgcgctaaaaaacgacaataaaacccaaaacaactaaaacgaaataatattaacgcgaatactaaaaacttccgatctacgtaaaaaatataaatataaaacccaaatcaacatcgaaaataacgcccgctcgcgaatacaaccgaatatcatcgtacgcctaccgcaaaaaaaaaatataataatcgacgccaaaataacgctaatcgcctataaacgctattttaacgccgaaaacgactacataaataactcgaaccgcaatctaaaacgtcgtactacaccgaacaatcgatcaatatcaccgacgatcaaataatattctaatcaacaacgaaaatccattaaaaatctccgtaaaactataaaatacctaatacgctacgctcatcaaacatacnaaa

SEQ ID NO: 13449 - DNA, 743 bp, Artificial Sequence
  chemically treated genomic DNA (Homo sapiens) CpG-island No: 13449
tttgcgttagcgtattatgaaacgtttacgcgcgttgattaatcggtgtttgttagtttagttattgttgttagaaagtggcgagatttagttgattgtttattcgcggtattgttatcggatgcgttatttcgtggtatgaggttgcgagcgtttttagagtataagtcgttttatttttataatttaacgtggttggcgtatagtttagtgtcgtcgttattgtatcgaaaaaacgtttatacgatgacgttagcggcgcgttaattttacgtttaatggttcgcgttagtacgttttagttttgttgttgtatatttgttgttttagagtaattttgttatttcggtataaagcgtaggtattgcgttagtaggtttcgttacggttgtttcgttgttaaatcgttattcggaagcgttattgtaggtaagtcgtttaggtgtttatattcgcgatagtttattcgtaggtattcgtcgttttattaagcgtcgtttttttttatatcgatatcgtcgagcgttaaagtaatgatattatcgttatttagcggttattgatgttttgttagatacgtcgttgtatgggtatgatgatgtagtatcgtttgcgtcggtagatttattttacgtttttattggttggagatatagttcggatgcgcgttatgtataacgtattgcggggtaaaatcgtagatgttttgtattagtgtttgaagtgattttagaggatttttt

SEQ ID NO: 13450 - DNA, 743 bp, Artificial Sequence
  chemically treated genomic DNA (Homo sapiens) CpG-island No: 13450
aaaaaatcctctaaaatcacttcaaacactaatacaaaacatctacgattttaccccgcaatacgttatacataacgcgcatccgaactatatctccaaccaataaaaacgtaaaataaatctaccgacgcaaacgatactacatcatcatacccatacaacgacgtatctaacaaaacatcaataaccgctaaataacgataatatcattactttaacgctcgacgatatcgatataaaaaaaaacgacgcttaataaaacgacgaatacctacgaataaactatcgcgaatataaacacctaaacgacttacctacaataacgcttccgaataacgatttaacaacgaaacaaccgtaacgaaacctactaacgcaatacctacgctttataccgaaataacaaaattactctaaaacaacaaatatacaacaacaaaactaaaacgtactaacgcgaaccattaaacgtaaaattaacgcgccgctaacgtcatcgtataaacgttttttcgatacaataacgacgacactaaactatacgccaaccacgttaaattataaaaataaaacgacttatactctaaaaacgctcgcaacctcataccacgaaataacgcatccgataacaataccgcgaataaacaatcaactaaatctcgccactttctaacaacaataactaaactaacaaacaccgattaatcaacgcgcgtaaacgtttcataatacgctaacgcaaa

SEQ ID NO: 13451 - DNA, 743 bp, Artificial Sequence
  chemically treated genomic DNA (Homo sapiens) CpG-island No: 13451
gggggattttttagagttattttaagtattgatgtaaaatatttacgattttatttcgtaatacgttgtgtatgacgcgtattcgggttatgtttttagttagtgggggcgtgaaatgaatttgtcgacgtaaacggtattgtattattatgtttatgtagcggcgtgtttggtagagtattagtggtcgttggatggcggtgatgttattgttttgacgttcgacggtatcggtatgggggagaacggcgtttggtggggcggcgagtgtttgcgggtgaattatcgcgaatgtgagtatttgggcggtttgtttgtagtggcgttttcgggtggcgatttggtagcgaagtagtcgtggcgaaatttgttggcgtagtgtttgcgttttgtgtcggagtggtagaattattttgaaatagtaagtgtgtaatagtaaaattggagcgtgttggcgcgggttattgagcgtggaattaacgcgtcgttggcgttatcgtgtgggcgttttttcgatgtagtggcggcggtattgggttgtgcgttagttacgttaagttatgaaggtgaagcggtttgtgttttggaggcgttcgtagttttatgttacggagtgacgtattcggtgataatgtcgcgggtggataattaattggatttcgttattttttggtagtagtggttgaattggtaggtatcggttaattaacgcgcgtgggcgttttatgatgcgttggcgtagg

SEQ ID NO: 13452 - DNA, 743 bp, Artificial Sequence
  chemically treated genomic DNA (Homo sapiens) CpG-island No: 13452
cctacgccaacgcatcataaaacgcccacgcgcgttaattaaccgatacctaccaattcaaccactactaccaaaaaataacgaaatccaattaattatccacccgcgacattatcaccgaatacgtcactccgtaacataaaactacgaacgcctccaaaacacaaaccgcttcaccttcataacttaacgtaactaacgcacaacccaataccgccgccactacatcgaaaaaacgcccacacgataacgccaacgacgcgttaattccacgctcaataacccgcgccaacacgctccaattttactattacacacttactatttcaaaataattctaccactccgacacaaaacgcaaacactacgccaacaaatttcgccacgactacttcgctaccaaatcgccacccgaaaacgccactacaaacaaaccgcccaaatactcacattcgcgataattcacccgcaaacactcgccgccccaccaaacgccgttctcccccataccgataccgtcgaacgtcaaaacaataacatcaccgccatccaacgaccactaatactctaccaaacacgccgctacataaacataataatacaataccgtttacgtcgacaaattcatttcacgcccccactaactaaaaacataacccgaatacgcgtcatacacaacgtattacgaaataaaatcgtaaatattttacatcaatacttaaaataactctaaaaaatccccc

SEQ ID NO: 13453 - DNA, 583 bp, Artificial Sequence
  chemically treated genomic DNA (Homo sapiens) CpG-island No: 13453
  unsure (327..328, 347, 360)
tcgtatcgtcgtgtttttcggtttaagttttaatattcgggcgaattggcgtgttttattagttcggtagtatgaattattattcgttagttattttattggagacgacggaagatcgttgtcgaagcggcgttttatcgtttttagtatgacgttttgtattgttttattgttgaagtcgtcggtagtgatcgtttagtgtagtgttttacgattatagtagtttagcgcgaacgtgatacgtagttttttttcgttattatagtagaattcgaattcgttagagtattatcgttgattgtttttttttacggtttattttggttnntgtatcgtgttcgtttcgntatggcggtatangtacggtttttcgtttaacgtaatagcgtattttggcgtatgattcggtaaatacgtttggtattgatcgtaggtatattattaagttttgtttgtttgcgaagtagcgtttatattcgacgataattatacgttggtagtttttcgataatatggtgtatacggagaagtatattcgtattattagtgtgacgattgcggcggttatttatttagttatcga

SEQ ID NO: 13454 - DNA, 583 bp, Artificial Sequence
  chemically treated genomic DNA (Homo sapiens) CpG-island No: 13454
  unsure (224, 237, 256..)
tcgataactaaataaataaccgccgcaatcgtcacactaataatacgaatatacttctccgtatacaccatattatcgaaaaactaccaacgtataattatcgtcgaatataaacgctacttcgcaaacaaacaaaacttaataatatacctacgatcaataccaaacgtatttaccgaatcatacgccaaaatacgctattacgttaaacgaaaaaccgtacntataccgccatancgaaacgaacacgatacannaaccaaaataaaccgtaaaaaaaaacaatcaacgataatactctaacgaattcgaattctactataataacgaaaaaaaactacgtatcacgttcgcgctaaactactataatcgtaaaacactacactaaacgatcactaccgacgacttcaacaataaaacaatacaaaacgtcatactaaaaacgataaaacgccgcttcgacaacgatcttccgtcgtctccaataaaataactaacgaataataattcatactaccgaactaataaaacacgccaattcgcccgaatattaaaacttaaaccgaaaaacacgacgatacga

SEQ ID NO: 13455 - DNA, 583 bp, Artificial Sequence
  chemically treated genomic DNA (Homo sapiens) CpG-island No: 13455
  unsure (224, 237, 256..)
tcgatgattggatggatggtcgtcgtagtcgttatattgatgatacggatgtgttttttcgtatatattatgttatcggagagttgttaacgtatggttatcgtcgggtatgggcgttgtttcgtagataggtagaatttgatggtatgtttgcgattaatgttaaacgtgtttatcggattatgcgttagaatgcgttgttgcgttgagcggaaaatcgtgtntgtatcgttatgncgaaacgggtacgatatannggttagagtggatcgtgaaagaaagtaattagcgatggtgttttgacgggttcgagttttgttgtgataacggagagagattgcgtgttacgttcgcgttggattgttgtgatcgtgaggtattgtattgggcggttattatcggcggttttaatagtgaaatagtataggacgttatgttgggagcggtggaacgtcgtttcggtaacgatttttcgtcgtttttagtggagtggttgacggataatggtttatgttatcgggttaatgaaatacgttagttcgttcggatgttgggatttgaatcgaagaatacggcggtgcgg

SEQ ID NO: 13456 - DNA, 583 bp, Artificial Sequence
  chemically treated genomic DNA (Homo sapiens) CpG-island No: 13456
  unsure (327..328, 347, 360)
ccgcaccgccgtattcttcgattcaaatcccaacatccgaacgaactaacgtatttcattaacccgataacataaaccattatccgtcaaccactccactaaaaacgacgaaaaatcgttaccgaaacgacgttccaccgctcccaacataacgtcctatactatttcactattaaaaccgccgataataaccgcccaatacaatacctcacgatcacaacaatccaacgcgaacgtaacacgcaatctctctccgttatcacaacaaaactcgaacccgtcaaaacaccatcgctaattactttctttcacgatccactctaaccnntatatcgtacccgtttcgncataacgatacanacacgattttccgctcaacgcaacaacgcattctaacgcataatccgataaacacgtttaacattaatcgcaaacataccatcaaattctacctatctacgaaacaacgcccatacccgacgataaccatacgttaacaactctccgataacataatatatacgaaaaaacacatccgtatcatcaatataacgactacgacgaccatccatccaatcatcga

SEQ ID NO: 13457 - DNA, 594 bp, Artificial Sequence
  chemically treated genomic DNA (Homo sapiens) CpG-island No: 13457
  unsure (18, 20, 30, 36)
ttttattaggtcgttagngnttataggttntttatnggggagatagggtcgtagggcgtaggggtttcggcgcggttggtagcggtcggcgcgttgcgtttttaggttagtttagcggtcggcgttttttgcggtttttttttttagataggatgttcgtcggtagttttcgtttcgttcgcgttcgcgttcgttttttagagtcgttttcggaatagattcgagtacgtttcgttttttgggtcgtagttcgttgtttcgtggtgtcgtatacgtttcgtcgcgttttgtcgttcgttcgtttttcgcggcgtttttatttgggtttggaggattttttttttcgttcgtacgcgttcgttttcgcgttcgcgcggtttgttttagttcggatttaggaggtgtgcggttttgtttgtatttcgttagcgatggggttttattatcgtattttttagtcggttttatgtcggaatgcggagattgttggagcgcgtttttattttagggaattaaaatttttttttttgtagtcgttatttattttttggttttgggtttgttttttttattcgtcgcgggttttttttgagt

SEQ ID NO: 13458 - DNA, 594 bp, Artificial Sequence
  chemically treated genomic DNA (Homo sapiens) CpG-island No: 13458
  unsure (559, 565, 575, 577)
actcaaaaaaaacccgcgacgaataaaaaaaacaaacccaaaaccaaaaaataaataacgactacaaaaaaaaaaattttaattccctaaaataaaaacgcgctccaacaatctccgcattccgacataaaaccgactaaaaaatacgataataaaaccccatcgctaacgaaatacaaacaaaaccgcacacctcctaaatccgaactaaaacaaaccgcgcgaacgcgaaaacgaacgcgtacgaacgaaaaaaaaaatcctccaaacccaaataaaaacgccgcgaaaaacgaacgaacgacaaaacgcgacgaaacgtatacgacaccacgaaacaacgaactacgacccaaaaaacgaaacgtactcgaatctattccgaaaacgactctaaaaaacgaacgcgaacgcgaacgaaacgaaaactaccgacgaacatcctatctaaaaaaaaaaaccgcaaaaaacgccgaccgctaaactaacctaaaaacgcaacgcgccgaccgctaccaaccgcgccgaaacccctacgccctacgaccctatctccccnataaanaacctataancnctaacgacctaataaaa

SEQ ID NO: 13459 - DNA, 594 bp, Artificial Sequence
  chemically treated genomic DNA (Homo sapiens) CpG-island No: 13459
  unsure (559, 565, 575, 577)
gtttaagaaagattcgcggcgaatggagaagataagtttaaagttaggaaatgggtggcggttgtagggaagggggttttgattttttaggataaaaacgcgttttaatagttttcgtatttcggtatggagtcggttgaggggtgcggtggtaagattttatcgttagcggagtgtaagtaaagtcgtatattttttgggttcgggttggggtaggtcgcgcgggcgcgggaacgaacgcgtgcggacggggaaaagggttttttaagtttaagtgggagcgtcgcggagggcgagcgagcggtagggcgcggcggggcgtgtgcggtattacgggatagcgggttgcggtttagggggcgaggcgtgttcgggtttatttcgggagcggttttgaggggcgggcgcgggcgcgggcggggcgggggttgtcggcgagtattttgtttgggggaggggatcgtagagagcgtcggtcgttgggttggtttgagagcgtagcgcgtcggtcgttattagtcgcgtcggagtttttgcgttttgcggttttgtttttttngtgggnaatttgtggntnttggcggtttaatggaa

SEQ ID NO: 13460 - DNA, 594 bp, Artificial Sequence
  chemically treated genomic DNA (Homo sapiens) CpG-island No: 13460
  unsure (18, 20, 30, 36)
ttccattaaaccgccaananccacaaattncccacnaaaaaaacaaaaccgcaaaacgcaaaaactccgacgcgactaataacgaccgacgcgctacgctctcaaaccaacccaacgaccgacgctctctacgatcccctcccccaaacaaaatactcgccgacaacccccgccccgcccgcgcccgcgcccgcccctcaaaaccgctcccgaaataaacccgaacacgcctcgccccctaaaccgcaacccgctatcccgtaataccgcacacgccccgccgcgccctaccgctcgctcgccctccgcgacgctcccacttaaacttaaaaaacccttttccccgtccgcacgcgttcgttcccgcgcccgcgcgacctaccccaacccgaacccaaaaaatatacgactttacttacactccgctaacgataaaatcttaccaccgcacccctcaaccgactccataccgaaatacgaaaactattaaaacgcgtttttatcctaaaaaatcaaaacccccttccctacaaccgccacccatttcctaactttaaacttatcttctccattcgccgcgaatctttcttaaac

SEQ ID NO: 13461 - DNA, 541 bp, Artificial Sequence
  chemically treated genomic DNA (Homo sapiens) CpG-island No: 13461
  unsure (17, 233, 272)
ttattgcgcggtttgtntatattggttttaggagtgtttgtcggtcggatggtagtcgttttgttcggatcgattgcgttttttcgttttcgtgtaatcggacgtaggtgtgttcgttcgtgtggtttatttattggaattttaattttttacgttgaatttgttcgttcgggattatcgttgtagcgttttgaatgtgggtcggaatatggtttcggttttttttagtggtnttaatcggcgaatttttttttgatttcggcgttttattntaagattgttcgatttttttcggggggatgaatcggtagcggtgaatatttcgatgatttcgttttcgtacggtttgtgtttttttttttttttttatgttttttttagggtatagcggtttttcgttttcgagttttcgtttttttttttgatttgcgtatttttattgattgattcgtagcgtatattacgggttgattaaaaatttaacgttttttaaaaaataatttatagaagagacgcgtaaattattttttaaatcgcgaaa

SEQ ID NO: 13462 - DNA, 541 bp, Artificial Sequence
  chemically treated genomic DNA (Homo sapiens) CpG-island No: 13462
  unsure (270, 309, 525)
tttcgcgatttaaaaaataatttacgcgtctcttctataaattattttttaaaaaacgttaaatttttaatcaacccgtaatatacgctacgaatcaatcaataaaaatacgcaaatcaaaaaaaaaaacgaaaactcgaaaacgaaaaaccgctataccctaaaaaaaacataaaaaaaaaaaaaaaaacacaaaccgtacgaaaacgaaatcatcgaaatattcaccgctaccgattcatccccccgaaaaaaatcgaacaatcttanaataaaacgccgaaatcaaaaaaaaattcgccgattaanaccactaaaaaaaaccgaaaccatattccgacccacattcaaaacgctacaacgataatcccgaacgaacaaattcaacgtaaaaaattaaaattccaataaataaaccacacgaacgaacacacctacgtccgattacacgaaaacgaaaaaacgcaatcgatccgaacaaaacgactaccatccgaccgacaaacactcctaaaaccaatatanacaaaccgcgcaataa

SEQ ID NO: 13463 - DNA, 541 bp, Artificial Sequence
  chemically treated genomic DNA (Homo sapiens) CpG-island No: 13463
  unsure (270, 309, 525)
tttcgcgatttggggggtggtttgcgcgttttttttatgggttgttttttggggggcgttgggtttttagttagttcgtaatatgcgttacgaattagttagtgggggtacgtaaattaaggggggaaacgggggttcgaaggcggggaatcgttgtgttttagagggagtataaggggggggaagaaggtataaatcgtgcggaagcggggttatcgaagtgtttatcgttatcggtttattttttcgaggagggtcgggtaattttgnaatggaacgtcgggattaagaggaggttcgtcgattganattattggaagaggtcggggttatgtttcggtttatatttaaaacgttgtagcggtgatttcggacggataaatttagcgtgaaaaattggagttttagtaggtggattatacgaacgggtatatttgcgttcggttgtacgaaggcgaaaaaacgtaatcggttcgagtagaacgattattattcggtcgataggtatttttggaattagtgtgngtaggtcgcgtaataa

SEQ ID NO: 13464 - DNA, 541 bp, Artificial Sequence
  chemically treated genomic DNA (Homo sapiens) CpG-island No: 13464
  unsure (17, 233, 272)
ttattacgcgacctacncacactaattccaaaaatacctatcgaccgaataataatcgttctactcgaaccgattacgttttttcgccttcgtacaaccgaacgcaaatatacccgttcgtataatccacctactaaaactccaatttttcacgctaaatttatccgtccgaaatcaccgctacaacgttttaaatataaaccgaaacataaccccgacctcttccaataatntcaatcgacgaacctcctcttaatcccgacgttccattncaaaattacccgaccctcctcgaaaaaataaaccgataacgataaacacttcgataaccccgcttccgcacgatttataccttcttccccccccttatactccctctaaaacacaacgattccccgccttcgaacccccgtttccccccttaatttacgtacccccactaactaattcgtaacgcatattacgaactaactaaaaacccaacgccccccaaaaaacaacccataaaaaaaacgcgcaaaccaccccccaaatcgcgaaa

SEQ ID NO: 13465 - DNA, 718 bp, Artificial Sequence
  chemically treated genomic DNA (Homo sapiens) CpG-island No: 13465
gtcgtcgtttttttttttcggttttttttcgtattttttttcgtttggttcgtttagcgcggaaagtagcgttttttgcgggcgtcgtcgtacgttttttagggttcgattatcgttagatttttttttcgggagtcgcgtcgttcgttcgttcgcgtcgttttgttagttcggggtcgcgagacgtcgggttcgtcgttttcgtcgttttcgttttcgttttcgtcgcgcgttttcgttttcgttcgcggttcgggaacgcgcgcgtaatggatcgttggttagtttgtcgcgttcgttttcgttacgtcgttttttcgtttcgcgcgcgcgcgcgtttgtcggtattagcggtagttttgtagtttttcgggttttcgcgatcgtttttcgttttttttttattttagttgttttcgttttttttttttgtcggatgttatcggaaagttaaaataattggggtcgcgtaggcgcgaaagaggaaacggaaagagtaggaagggcgggggcggcgcgaggtgacgggaagcgtaattgaagggggttttcgggaaaggttatgggagagtttttgaggggcgcgtgcgcggtagaggggtatttcgagtagtcgcggcggtcgaggttttgggtttagacgggcggatggagaggttcgataagtttattgttaggaaatttagagagtaaaatattaattgttatgttgaaggag

SEQ ID NO: 13466 - DNA, 718 bp, Artificial Sequence
  chemically treated genomic DNA (Homo sapiens) CpG-island No: 13466
ctccttcaacataacaattaatattttactctctaaatttcctaacaataaacttatcgaacctctccatccgcccgtctaaacccaaaacctcgaccgccgcgactactcgaaatacccctctaccgcgcacgcgcccctcaaaaactctcccataacctttcccgaaaacccccttcaattacgcttcccgtcacctcgcgccgcccccgcccttcctactctttccgtttcctctttcgcgcctacgcgaccccaattattttaactttccgataacatccgacaaaaaaaaaaaacgaaaacaactaaaataaaaaaaaaacgaaaaacgatcgcgaaaacccgaaaaactacaaaactaccgctaataccgacaaacgcgcgcgcgcgcgaaacgaaaaaacgacgtaacgaaaacgaacgcgacaaactaaccaacgatccattacgcgcgcgttcccgaaccgcgaacgaaaacgaaaacgcgcgacgaaaacgaaaacgaaaacgacgaaaacgacgaacccgacgtctcgcgaccccgaactaacaaaacgacgcgaacgaacgaacgacgcgactcccgaaaaaaaaatctaacgataatcgaaccctaaaaaacgtacgacgacgcccgcaaaaaacgctactttccgcgctaaacgaaccaaacgaaaaaaaatacgaaaaaaaaccgaaaaaaaaaaacgacgac

SEQ ID NO: 13467 - DNA, 718 bp, Artificial Sequence
  chemically treated genomic DNA (Homo sapiens) CpG-island No: 13467
tttttttagtataataattggtgttttgttttttagattttttagtaatgaatttgtcgggtttttttattcgttcgtttaggtttaaggtttcggtcgtcgcggttattcggagtgtttttttgtcgcgtacgcgttttttaagggtttttttatgatttttttcgggaattttttttaattacgtttttcgttatttcgcgtcgttttcgttttttttgtttttttcgttttttttttcgcgtttgcgcggttttaattgttttggtttttcggtggtattcggtagaggaaaagggcgggggtagttagagtaagggaggggcgggggacggtcgcgaggattcgggaaattgtaaaattgtcgttggtgtcgataggcgcgcgcgcgcgcgaggcgggagggcggcgtggcgagggcgggcgcggtaggttggttagcggtttattgcgcgcgcgttttcgggtcgcgggcgggggcgagagcgcgcggcgggggcgggggcgggggcggcgggggcggcgggttcggcgtttcgcggtttcggattgataaggcggcgcgggcgggcgggcggcgcggttttcgggggaggagtttggcggtggtcgggttttgaggagcgtgcggcggcgttcgtagaggacgttgtttttcgcgttggacggattaagcgagggagggtgcgaggggaaatcggaaggaagaggcggcggt

SEQ ID NO: 13468 - DNA, 718 bp, Artificial Sequence
  chemically treated genomic DNA (Homo sapiens) CpG-island No: 13468
accgccgcctcttccttccgatttcccctcgcaccctccctcgcttaatccgtccaacgcgaaaaacaacgtcctctacgaacgccgccgcacgctcctcaaaacccgaccaccgccaaactcctcccccgaaaaccgcgccgcccgcccgcccgcgccgccttatcaatccgaaaccgcgaaacgccgaacccgccgcccccgccgcccccgcccccgcccccgccgcgcgctctcgcccccgcccgcgacccgaaaacgcgcgcgcaataaaccgctaaccaacctaccgcgcccgccctcgccacgccgccctcccgcctcgcgcgcgcgcgcgcctatcgacaccaacgacaattttacaatttcccgaatcctcgcgaccgtcccccgcccctcccttactctaactacccccgcccttttcctctaccgaataccaccgaaaaaccaaaacaattaaaaccgcgcaaacgcgaaaaaaaaaacgaaaaaaacaaaaaaaacgaaaacgacgcgaaataacgaaaaacgtaattaaaaaaaattcccgaaaaaaatcataaaaaaacccttaaaaaacgcgtacgcgacaaaaaaacactccgaataaccgcgacgaccgaaaccttaaacctaaacgaacgaataaaaaaacccgacaaattcattactaaaaaatctaaaaaacaaaacaccaattattatactaaaaaaa

SEQ ID NO: 13469 - DNA, 511 bp, Artificial Sequence
  chemically treated genomic DNA (Homo sapiens) CpG-island No: 13469
  unsure (462, 464, 468)
gattggggcgttaaagttttcgttttttttgatgtttgtcgtcgcgtggtatttgaaaatattgaagatgtagttcgttacggtttgtattatgtcgagttgcgttttttattaggttatatggtaatggtatattagttgtttgtagcgggtgttgtcgaagcggtgatcgatggcgtacgtgaaggttgtcgtatttttggtgtgtaggcgaagttatcggtattatgaatcgacgttcggtacgattggggcgttttggtatcgggttttattacggattagcggggttaagttgaatggtggcgacggttatgaaaattattgggttgcgcgtgtacggttttcgaagagtgtttttgttaaattcggttggtttgttgcgtatgtttagtttaatttttgttgtcgcgtttttttgtttttttttgtttttttttatttttttattttttcgttgtngngagngaaaaaagaaaatattgggcgttttaacgtagtgttttagcgt

SEQ ID NO: 13470 - DNA, 511 bp, Artificial Sequence
  chemically treated genomic DNA (Homo sapiens) CpG-island No: 13470
  unsure (44, 48, 50)
acgctaaaacactacgttaaaacgcccaatattttcttttttcnctcncnacaacgaaaaaataaaaaaataaaaaaaaacaaaaaaaaacaaaaaaacgcgacaacaaaaattaaactaaacatacgcaacaaaccaaccgaatttaacaaaaacactcttcgaaaaccgtacacgcgcaacccaataattttcataaccgtcgccaccattcaacttaaccccgctaatccgtaataaaacccgataccaaaacgccccaatcgtaccgaacgtcgattcataataccgataacttcgcctacacaccaaaaatacgacaaccttcacgtacgccatcgatcaccgcttcgacaacacccgctacaaacaactaatataccattaccatataacctaataaaaaacgcaactcgacataatacaaaccgtaacgaactacatcttcaatattttcaaataccacgcgacgacaaacatcaaaaaaaacgaaaactttaacgccccaatc

SEQ ID NO: 13471 - DNA, 511 bp, Artificial Sequence
  chemically treated genomic DNA (Homo sapiens) CpG-island No: 13471
  unsure (44, 48, 50)
acgttggggtattgcgttagggcgtttaatattttttttttttntttntngtagcggaggagtggggagataggagaaggtagagaagaatagagaggcgcgatagtaaaaattaggttgggtatgcgtaataaattaatcgggtttggtaaaggtatttttcgaagatcgtatacgcgtaatttaatagtttttatgatcgtcgttattatttagtttgatttcgttaattcgtggtggaattcggtattagggcgttttagtcgtatcgaacgtcggtttataatgtcgatagtttcgtttgtatattaaaggtgcggtaatttttacgtacgttatcgattatcgtttcgataatattcgttataggtagttgatgtgttattgttatgtagtttggtgaaaaacgtagttcgatatagtgtaggtcgtgacgggttgtatttttaatgtttttaaatgttacgcggcgataggtattaagagaggcgagaattttaacgttttagtt

SEQ ID NO: 13472 - DNA, 511 bp, Artificial Sequence
  chemically treated genomic DNA (Homo sapiens) CpG-island No: 13472
  unsure (462, 464, 468)
aactaaaacgttaaaattctcgcctctcttaatacctatcgccgcgtaacatttaaaaacattaaaaatacaacccgtcacgacctacactatatcgaactacgtttttcaccaaactacataacaataacacatcaactacctataacgaatattatcgaaacgataatcgataacgtacgtaaaaattaccgcacctttaatatacaaacgaaactatcgacattataaaccgacgttcgatacgactaaaacgccctaataccgaattccaccacgaattaacgaaatcaaactaaataataacgacgatcataaaaactattaaattacgcgtatacgatcttcgaaaaatacctttaccaaacccgattaatttattacgcatacccaacctaatttttactatcgcgcctctctattcttctctaccttctcctatctccccactcctccgctacnanaaanaaaaaaaaaaaatattaaacgccctaacgcaataccccaacgt

SEQ ID NO: 13473 - DNA, 770 bp, Artificial Sequence
  chemically treated genomic DNA (Homo sapiens) CpG-island No: 13473
aaggcggaggaggttgtcgggagttcggttttcgagtaatttttcgtttcgttgggtttttatgtttgttaaagggtcgagatgaacgggtaagggagagagagggcgaggaaaaataaaaaagagattgtcgagtgggacgaggggttcgggagtagtcgcggtcgcgttattttagagtttagaggtttgggggaggggttttcggcgttgtcgcggatttcggggttttcggcgggtaggttttgtagggtcgcggagcgagaaggttgatgtttcgggtgtttcggggagttttttcgacgtcgtttgttgtttgttagtcgttagttgtgatacggtagcgggtcgggttacgttgttttcggtcgttaggcgggttgcgggaggggtcgcggtgtcgtttttttaggttcggtttggtttatattattggggtcgggggtttattgtttcggagagttataggtacggtcggtttggattcgtcgggtagtgtttcgttttgttcgtttcggtttggggttaagttaatagttgtaaggtacgtcgattggcggtagatcggtggttcgtgtgtgtttttttaagggggtcgggtttgcgaagttgaggggcgggtggggtgtgcgtcgttttcggtgtgagggtgagagggagagagcggttggcgggcgttcgagggagggagggagcgacgagcgaggtagcgacgcgggtcgtttttgtcgtcgtcgtcgtcgtcgtcgcggtcggatttgcggtttttt

SEQ ID NO: 13474 - DNA, 770 bp, Artificial Sequence
  chemically treated genomic DNA (Homo sapiens) CpG-island No: 13474
aaaaaaccgcaaatccgaccgcgacgacgacgacgacgacgacaaaaacgacccgcgtcgctacctcgctcgtcgctccctccctccctcgaacgcccgccaaccgctctctccctctcaccctcacaccgaaaacgacgcacaccccacccgcccctcaacttcgcaaacccgacccccttaaaaaaacacacacgaaccaccgatctaccgccaatcgacgtaccttacaactattaacttaaccccaaaccgaaacgaacaaaacgaaacactacccgacgaatccaaaccgaccgtacctataactctccgaaacaataaacccccgaccccaataatataaaccaaaccgaacctaaaaaaacgacaccgcgacccctcccgcaacccgcctaacgaccgaaaacaacgtaacccgacccgctaccgtatcacaactaacgactaacaaacaacaaacgacgtcgaaaaaactccccgaaacacccgaaacatcaaccttctcgctccgcgaccctacaaaacctacccgccgaaaaccccgaaatccgcgacaacgccgaaaacccctcccccaaacctctaaactctaaaataacgcgaccgcgactactcccgaacccctcgtcccactcgacaatctcttttttatttttcctcgccctctctctcccttacccgttcatctcgaccctttaacaaacataaaaacccaacgaaacgaaaaattactcgaaaaccgaactcccgacaacctcctccgcctt

SEQ ID NO: 13475 - DNA, 770 bp, Artificial Sequence
  chemically treated genomic DNA (Homo sapiens) CpG-island No: 13475
aggaggtcgtaggttcgatcgcggcggcggcggcggcggcggtaggggcggttcgcgtcgttatttcgttcgtcgttttttttttttttcggacgttcgttagtcgtttttttttttttatttttatatcgggagcgacgtatattttattcgttttttagtttcgtaggttcggtttttttaaagagatatatacgggttatcgatttgtcgttagtcggcgtgttttgtagttgttggtttgattttaggtcgggacgggtagagcggaatattgttcggcgggtttaggtcgatcgtgtttgtggtttttcggaataataaattttcggttttagtgatgtgggttagatcggatttggagaggcggtatcgcgatttttttcgtaattcgtttggcggtcgggggtagcgtgattcggttcgttatcgtgttatagttggcgattgataaatagtaggcgacgtcgggagaatttttcgagatattcgagatattagttttttcgtttcgcggttttgtaggatttgttcgtcgggagtttcggagttcgcggtagcgtcgagggttttttttttaggtttttgggttttgaggtaacgcggtcgcggttgttttcgggtttttcgttttattcgataattttttttttattttttttcgtttttttttttttttgttcgtttatttcgattttttagtaagtatggaagtttagcgaggcgggggattgttcggaggtcgagttttcggtagtttttttcgtttt

SEQ ID NO: 13476 - DNA, 770 bp, Artificial Sequence
  chemically treated genomic DNA (Homo sapiens) CpG-island No: 13476
aaaacgaaaaaaactaccgaaaactcgacctccgaacaatcccccgcctcgctaaacttccatacttactaaaaaatcgaaataaacgaacaaaaaaaaaaaaaaacgaaaaaaaataaaaaaaaaattatcgaataaaacgaaaaacccgaaaacaaccgcgaccgcgttacctcaaaacccaaaaacctaaaaaaaaaaccctcgacgctaccgcgaactccgaaactcccgacgaacaaatcctacaaaaccgcgaaacgaaaaaactaatatctcgaatatctcgaaaaattctcccgacgtcgcctactatttatcaatcgccaactataacacgataacgaaccgaatcacgctacccccgaccgccaaacgaattacgaaaaaaatcgcgataccgcctctccaaatccgatctaacccacatcactaaaaccgaaaatttattattccgaaaaaccacaaacacgatcgacctaaacccgccgaacaatattccgctctacccgtcccgacctaaaatcaaaccaacaactacaaaacacgccgactaacgacaaatcgataacccgtatatatctctttaaaaaaaccgaacctacgaaactaaaaaacgaataaaatatacgtcgctcccgatataaaaataaaaaaaaaaaaacgactaacgaacgtccgaaaaaaaaaaaaaacgacgaacgaaataacgacgcgaaccgcccctaccgccgccgccgccgccgccgcgatcgaacctacgacctcct

SEQ ID NO: 13477 - DNA, 638 bp, Artificial Sequence
  chemically treated genomic DNA (Homo sapiens) CpG-island No: 13477
  unsure (547, 586)
acggttcgggggttaggtaattcgcgttaggttttttcggttcgaggcgtcgttatcgcggggaggtcgggcgacgggtcgagtttttattcgagttcggggatttaaggattattttatcggcgtttttttgtcgggttcggtatcggtagttttttcgattttgttttttggttagtagcggggttcggacgagttacgaggagttcgagaggatcgtcgagtttcgggatggtcgggtcggtgcggatacggcggtaatcgtagggatcgtggtcgttttttttttatcggttcggtttattcgtcgtcgcgatacgagtagcggcgttaacgtcgggtttaatcgcgggtttgttgcggtttcggttaagcggttcgaagtggcggttttttttttttttttttttttttttttttttttttttcgttttttttcgttttttttttttttttttttcggcgtttttttttttttttttttttttttcgttttttcgcgtttttttttttttttgttttttttttttttttttttttcggtgtntttttttttttcgtttttgtcgtgttttttttatttttnttttttttttttttttgtttttttttttttgttgtttatttttcgcgcggcg

SEQ ID NO: 13478 - DNA, 638 bp, Artificial Sequence
  chemically treated genomic DNA (Homo sapiens) CpG-island No: 13478
  unsure (53, 92)
cgccgcgcgaaaaataaacaacaaaaaaaaaaaaacaaaaaaaaaaaaaaaanaaaaataaaaaaaacacgacaaaaacgaaaaaaaaaaanacaccgaaaaaaaaaaaaaaaaaaaaaacaaaaaaaaaaaaaaacgcgaaaaaacgaaaaaaaaaaaaaaaaaaaaaaaaacgccgaaaaaaaaaaaaaaaaaaaacgaaaaaaaacgaaaaaaaaaaaaaaaaaaaaaaaaaaaaaaaaaaaaaaccgccacttcgaaccgcttaaccgaaaccgcaacaaacccgcgattaaacccgacgttaacgccgctactcgtatcgcgacgacgaataaaccgaaccgataaaaaaaaaacgaccacgatccctacgattaccgccgtatccgcaccgacccgaccatcccgaaactcgacgatcctctcgaactcctcgtaactcgtccgaaccccgctactaaccaaaaaacaaaatcgaaaaaactaccgataccgaacccgacaaaaaaacgccgataaaataatccttaaatccccgaactcgaataaaaactcgacccgtcgcccgacctccccgcgataacgacgcctcgaaccgaaaaaacctaacgcgaattacctaacccccgaaccgt

SEQ ID NO: 13479 - DNA, 638 bp, Artificial Sequence
  chemically treated genomic DNA (Homo sapiens) CpG-island No: 13479
  unsure (53, 92)
cgtcgcgcggaaagtgagtagtagagagagaagaatagggaaggggggagganagagatagaaggagtacgataagggcgggaggagagaanatatcgagaaggggagaagagagggagataagggggagggggggcgcgggggaacgggaaaaaagaaggaaaaggagagagcgtcgaaggaaggagaagagaaggacggagaggagcggagaaggggaagaagaaggaaaggggagaggaggagagtcgttatttcgagtcgtttggtcgggatcgtagtaggttcgcggttgggttcggcgttggcgtcgttgttcgtgtcgcggcggcggatgggtcgggtcggtgggggaggggcggttacggtttttacggttatcgtcgtgttcgtatcgattcggttatttcggggttcggcggttttttcgggtttttcgtggttcgttcgggtttcgttgttagttaaagggtagagtcggaggagttgtcggtgtcgggttcggtaagagggcgtcgatggggtagtttttgaattttcgggttcgggtggaagttcgattcgtcgttcgattttttcgcgatggcggcgtttcggatcggaagggtttagcgcgggttgtttggttttcgggtcgt

SEQ ID NO: 13480 - DNA, 638 bp, Artificial Sequence
  chemically treated genomic DNA (Homo sapiens) CpG-island No: 13480
  unsure (547, 586)
acgacccgaaaaccaaacaacccgcgctaaacccttccgatccgaaacgccgccatcgcgaaaaaatcgaacgacgaatcgaacttccacccgaacccgaaaattcaaaaactaccccatcgacgccctcttaccgaacccgacaccgacaactcctccgactctaccctttaactaacaacgaaacccgaacgaaccacgaaaaacccgaaaaaaccgccgaaccccgaaataaccgaatcgatacgaacacgacgataaccgtaaaaaccgtaaccgcccctcccccaccgacccgacccatccgccgccgcgacacgaacaacgacgccaacgccgaacccaaccgcgaacctactacgatcccgaccaaacgactcgaaataacgactctcctcctctcccctttccttcttcttccccttctccgctcctctccgtccttctcttctccttccttcgacgctctctccttttccttcttttttcccgttcccccgcgccccccctcccccttatctccctctcttctccccttctcgatatnttctctcctcccgcccttatcgtactccttctatctctntcctccccccttccctattcttctctctctactactcactttccgcgcgacg

SEQ ID NO: 13481 - DNA, 602 bp, Artificial Sequence
  chemically treated genomic DNA (Homo sapiens) CpG-island No: 13481
gttagaggcgcggtcggaggaaacgttatggaaataaataagggcggttataagtatatggggttcgggaagcggcgggcgttaattaggggtaggaggagtttaggatttgtttagcgtcggtcgcgttcgtttttcgagtttttttgtgttaggttcggtgttcggtatttaatatgcgttcgtatttcgttttttagatagttttggtaggacgcgtttttttagttgatattttatattcgtgaagacgaaggtttagggatatttagtgttttgtatcgggttttagggtgggtggtttcggtttcgattgggaaaatcgtcgttcgcgaacgtgtggggaggaggttgggtcgagaacggggatttcgggcgggatcggggtggggtttagattcgggtaggggagtcgagtttaaggtaagtaggcgggcgggtattatttgttgcggggggcgttttttcgtcgttatcgggcgcgtcggagtttcgggtttcgcggtgtcggaagtggtagtagggtcgtcggtagggtttttcgggcgttttagattaataggggtagttaatggttcggaagaagttagtggagcgtagta

SEQ ID NO: 13482 - DNA, 602 bp, Artificial Sequence
  chemically treated genomic DNA (Homo sapiens) CpG-island No: 13482
tactacgctccactaacttcttccgaaccattaactacccctattaatctaaaacgcccgaaaaaccctaccgacgaccctactaccacttccgacaccgcgaaacccgaaactccgacgcgcccgataacgacgaaaaaacgccccccgcaacaaataatacccgcccgcctacttaccttaaactcgactcccctacccgaatctaaaccccaccccgatcccgcccgaaatccccgttctcgacccaacctcctccccacacgttcgcgaacgacgattttcccaatcgaaaccgaaaccacccaccctaaaacccgatacaaaacactaaatatccctaaaccttcgtcttcacgaatataaaatatcaactaaaaaaacgcgtcctaccaaaactatctaaaaaacgaaatacgaacgcatattaaataccgaacaccgaacctaacacaaaaaaactcgaaaaacgaacgcgaccgacgctaaacaaatcctaaactcctcctacccctaattaacgcccgccgcttcccgaaccccatatacttataaccgcccttatttatttccataacgtttcctccgaccgcgcctctaac

SEQ ID NO: 13483 - DNA, 602 bp, Artificial Sequence
  chemically treated genomic DNA (Homo sapiens) CpG-island No: 13483
tgttacgttttattggtttttttcgggttattgattgtttttattggtttggggcgttcggggggttttgtcggcggttttattgttattttcggtatcgcggggttcggggtttcggcgcgttcggtgacggcggagaggcgtttttcgtagtaggtaatgttcgttcgtttgtttgttttgggttcggtttttttgttcgggtttggattttatttcggtttcgttcggggttttcgttttcggtttagttttttttttatacgttcgcgggcgacggtttttttagtcgggatcggaattatttattttgggattcggtgtaaagtattagatgtttttaagttttcgtttttacgagtgtgaaatgttaattaggaggacgcgttttgttagggttgtttagagggcggagtgcgagcgtatgttgagtatcgggtatcgggtttgatataagggggttcgggagacgggcgcggtcggcgttaggtaggttttggattttttttgtttttgattggcgttcgtcgtttttcggattttatgtgtttgtggtcgtttttgtttatttttatgacgtttttttcggtcgcgtttttggt

SEQ ID NO: 13484 - DNA, 602 bp, Artificial Sequence
  chemically treated genomic DNA (Homo sapiens) CpG-island No: 13484
accaaaaacgcgaccgaaaaaaacgtcataaaaataaacaaaaacgaccacaaacacataaaatccgaaaaacgacgaacgccaatcaaaaacaaaaaaaatccaaaacctacctaacgccgaccgcgcccgtctcccgaacccccttatatcaaacccgatacccgatactcaacatacgctcgcactccgccctctaaacaaccctaacaaaacgcgtcctcctaattaacatttcacactcgtaaaaacgaaaacttaaaaacatctaatactttacaccgaatcccaaaataaataattccgatcccgactaaaaaaaccgtcgcccgcgaacgtataaaaaaaaaactaaaccgaaaacgaaaaccccgaacgaaaccgaaataaaatccaaacccgaacaaaaaaaccgaacccaaaacaaacaaacgaacgaacattacctactacgaaaaacgcctctccgccgtcaccgaacgcgccgaaaccccgaaccccgcgataccgaaaataacaataaaaccgccgacaaaaccccccgaacgccccaaaccaataaaaacaatcaataacccgaaaaaaaccaataaaacgtaaca

SEQ ID NO: 13485 - DNA, 509 bp, Artificial Sequence
  chemically treated genomic DNA (Homo sapiens) CpG-island No: 13485
ttcgtttcgcggcggggtttcggttcggagtcgttcgggttttagggtttttttattggcgtcgcggtcgtcgtcgttcgcgttttacggatttcgtcgtcgttattttgtttcgaggttttcggaggttttcgggacgtcgtcgtaagggatttcgggaggggttgttcgtagcgcgtttgtttagaaacgtttgtttttgcgcgattaaggttggtgacggatttttgggtcgggatagacggtcgcgggaggaagtaaggagggtaggggttgttttgtttgcggttttcgggagtttcgttagcgtcgtcgttcgattttcggcggttgtagcggcgttattttgagttttaggtttttgcggcgttagggttgtttacggcgcgtttgattaaaaaagtttcgcggggttcgttattatttatttgtatattattttttttcgttagtatattattttaaggcgttttttgttggacgaggagagttttgcggggaggtggttt

SEQ ID NO: 13486 - DNA, 509 bp, Artificial Sequence
  chemically treated genomic DNA (Homo sapiens) CpG-island No: 13486
aaaccacctccccgcaaaactctcctcgtccaacaaaaaacgccttaaaataatatactaacgaaaaaaaataatatacaaataaataataacgaaccccgcgaaacttttttaatcaaacgcgccgtaaacaaccctaacgccgcaaaaacctaaaactcaaaataacgccgctacaaccgccgaaaatcgaacgacgacgctaacgaaactcccgaaaaccgcaaacaaaacaacccctaccctccttacttcctcccgcgaccgtctatcccgacccaaaaatccgtcaccaaccttaatcgcgcaaaaacaaacgtttctaaacaaacgcgctacgaacaacccctcccgaaatcccttacgacgacgtcccgaaaacctccgaaaacctcgaaacaaaataacgacgacgaaatccgtaaaacgcgaacgacgacgaccgcgacgccaataaaaaaaccctaaaacccgaacgactccgaaccgaaaccccgccgcgaaacgaa

SEQ ID NO: 13487 - DNA, 509 bp, Artificial Sequence
  chemically treated genomic DNA (Homo sapiens) CpG-island No: 13487
aggttattttttcgtagaatttttttcgtttagtagagggcgttttaaggtgatatgttaacgaaaggaaataatatgtaaatgagtaatagcgggtttcgcggggtttttttggttaggcgcgtcgtggatagttttggcgtcgtaggggtttggggtttaagatggcgtcgttatagtcgtcgaaggtcgggcggcggcgttggcgaggttttcggagatcgtaggtagggtagtttttgttttttttattttttttcgcggtcgtttgtttcggtttaggggttcgttattagttttggtcgcgtaggagtaggcgtttttgagtaggcgcgttgcgggtagtttttttcggggttttttgcggcggcgtttcgagggttttcgggggtttcggagtaagatggcggcggcggggttcgtgaggcgcgggcggcggcgatcgcggcgttagtgagggggttttggggttcgggcggtttcgggtcggggtttcgtcgcgggacgga

SEQ ID NO: 13488 - DNA, 509 bp, Artificial Sequence
  chemically treated genomic DNA (Homo sapiens) CpG-island No: 13488
tccgtcccgcgacgaaaccccgacccgaaaccgcccgaaccccaaaaccccctcactaacgccgcgatcgccgccgcccgcgcctcacgaaccccgccgccgccatcttactccgaaacccccgaaaaccctcgaaacgccgccgcaaaaaaccccgaaaaaaactacccgcaacgcgcctactcaaaaacgcctactcctacgcgaccaaaactaataacgaacccctaaaccgaaacaaacgaccgcgaaaaaaaataaaaaaaacaaaaactaccctacctacgatctccgaaaacctcgccaacgccgccgcccgaccttcgacgactataacgacgccatcttaaaccccaaacccctacgacgccaaaactatccacgacgcgcctaaccaaaaaaaccccgcgaaacccgctattactcatttacatattatttcctttcgttaacatatcaccttaaaacgccctctactaaacgaaaaaaattctacgaaaaaataacct

SEQ ID NO: 13489 - DNA, 1521 bp, Artificial Sequence
  chemically treated genomic DNA (Homo sapiens) CpG-island No: 13489
ggttattcgttcgtcgttcgatcgcgtggtcgttacgtttttcgcgcgcgttttatttatcgaggtttcgttttgtcggtcggcgcggcggcggttcgggcgcgttttttttttcgttttttacgcgttacgtagtttcggggttttggcgggggaggggttttaggcggtcgttttcgtaagggtcgggatcgcggttgtatttatttgtgtgcgttcgtaggtgcgattttaggtgcgaggatttgtagtaggttttggcgtagttcgggaagggatagcggtggtttttggcggcggcggagggcgcggcgtcgggggcgcggttcgaggacggggacgaggcggttgaggaggaggaggcgggcgaggcgtttttcggggcggtttcgggttcgtcgcgtaggtcggttaggatgttggcggttagtaggtggggcgtcgcggcggcgtcggggttcgggttagaagcggcggggggcggcgggggtggtttcggggtttcgggtgaggcggtttcgcggcgcgtcgcgcgtatatttaggtcggcggcggggttcgcgttttcggggtcgggtcgttcgcggtgtattacggcgttcgaagagatggttatgagtacgtcggcggcgaagtaatttacgtacgttacggtcgtcgatatgtcgagtaagggcgcgcggcgcggcgggcggagcggaggcggcgggagcggcgttcgttcggtcggcggcggttgttcgagtgcgggaggcggaggaggaggaggaggaggttcggcgcgcgtcgtcgtcgtcgttcgcgttcggtttgtttcgtttcgtttgacgcgttttgacgtatcggagttcgcgggggcggttatagttcgtttcgttcggaggacgttttttcggggcgtcgtagttacgtttttcgttcggcgcgttttttattatttttcgagtcgcgcgcggtcgtcgggggcggggttcgggtcggaggaattcgtttttcggcgcgtttatttcggttttcgttagcgtttagcgttttaggttcggagcgcgtttttttcgcgttagggtgtaaggtcgggagtttcgttttttttcggcgcgttttattttagcgcgcgttttcgtattttttttcggagtattatttttttaagtcggggcgggaggtcgaggatttcgtttttttttcggtacgttttttttttcgagagcgcgtttcgttttatttcggtacgttttttttttttagagcgcgtttcgttttttcgttggcgcgtttattttacgtcggggcgcgcggtcggcgggagttcgtttttttttcggatgttttttttttggtttcgggcgcgttttcgttcgcgatggaggagggtttcgatttttacgtggtcggggttggaggggtgcggaagcggtcggtttcgtttttaggttacgtgcgcgatttttttttttttttttttcggtttggggttttgttttgatttcgtatttaggtatttgttcgtttttttttttg

SEQ ID NO: 13490 - DNA, 1521 bp, Artificial Sequence
  chemically treated genomic DNA (Homo sapiens) CpG-island No: 13490
caaaaaaaaaaacgaacaaatacctaaatacgaaatcaaaacaaaaccccaaaccgaaaaaaaaaaaaaaaaaaatcgcgcacgtaacctaaaaacgaaaccgaccgcttccgcacccctccaaccccgaccacgtaaaaatcgaaaccctcctccatcgcgaacgaaaacgcgcccgaaaccaaaaaaaaaacatccgaaaaaaaaacgaactcccgccgaccgcgcgccccgacgtaaaataaacgcgccaacgaaaaaacgaaacgcgctctaaaaaaaaaaaacgtaccgaaataaaacgaaacgcgctctcgaaaaaaaaaacgtaccgaaaaaaaaacgaaatcctcgacctcccgccccgacttaaaaaaataatactccgaaaaaaaatacgaaaacgcgcgctaaaataaaacgcgccgaaaaaaaacgaaactcccgaccttacaccctaacgcgaaaaaaacgcgctccgaacctaaaacgctaaacgctaacgaaaaccgaaataaacgcgccgaaaaacgaattcctccgacccgaaccccgcccccgacgaccgcgcgcgactcgaaaaataataaaaaacgcgccgaacgaaaaacgtaactacgacgccccgaaaaaacgtcctccgaacgaaacgaactataaccgcccccgcgaactccgatacgtcaaaacgcgtcaaacgaaacgaaacaaaccgaacgcgaacgacgacgacgacgcgcgccgaacctcctcctcctcctcctccgcctcccgcactcgaacaaccgccgccgaccgaacgaacgccgctcccgccgcctccgctccgcccgccgcgccgcgcgcccttactcgacatatcgacgaccgtaacgtacgtaaattacttcgccgccgacgtactcataaccatctcttcgaacgccgtaatacaccgcgaacgacccgaccccgaaaacgcgaaccccgccgccgacctaaatatacgcgcgacgcgccgcgaaaccgcctcacccgaaaccccgaaaccacccccgccgccccccgccgcttctaacccgaaccccgacgccgccgcgacgccccacctactaaccgccaacatcctaaccgacctacgcgacgaacccgaaaccgccccgaaaaacgcctcgcccgcctcctcctcctcaaccgcctcgtccccgtcctcgaaccgcgcccccgacgccgcgccctccgccgccgccaaaaaccaccgctatcccttcccgaactacgccaaaacctactacaaatcctcgcacctaaaatcgcacctacgaacgcacacaaataaatacaaccgcgatcccgacccttacgaaaacgaccgcctaaaacccctcccccgccaaaaccccgaaactacgtaacgcgtaaaaaacgaaaaaaaaaacgcgcccgaaccgccgccgcgccgaccgacaaaacgaaacctcgataaataaaacgcgcgcgaaaaacgtaacgaccacgcgatcgaacgacgaacgaataacc

SEQ ID NO: 13491 - DNA, 1521 bp, Artificial Sequence
  chemically treated genomic DNA (Homo sapiens) CpG-island No: 13491
tagagaagaggacgagtagatgtttgagtgcggggttaaagtagggttttaggtcgggagaagaggggggaagggtcgcgtacgtggtttgggggcggggtcggtcgttttcgtatttttttaatttcggttacgtggggatcggagtttttttttatcgcgaacgggggcgcgttcggggttaggagggaagtattcggggagggggcgggttttcgtcggtcgcgcgtttcggcgtggggtgggcgcgttagcgaggaggcggggcgcgttttgggagggaggggcgtgtcgggatggggcggggcgcgttttcggaaggaggggcgtgtcggagagggggcggggttttcggtttttcgtttcggtttgagggggtggtgtttcgggaaagggtacgggggcgcgcgttggagtggggcgcgtcgggagggggcggggttttcggttttgtattttagcgcggagaaggcgcgtttcgggtttaagacgttaggcgttggcggaggtcggagtgggcgcgtcggggggcgggttttttcggttcgagtttcgttttcggcggtcgcgcgcggttcggagagtggtggagggcgcgtcgggcggggggcgtggttgcggcgtttcgagggggcgtttttcgggcggggcgggttgtggtcgttttcgcgggtttcggtgcgttaggacgcgttaggcggggcggggtaggtcgagcgcgggcggcggcggcggcgcgcgtcgggtttttttttttttttttttcgtttttcgtattcgagtagtcgtcgtcggtcggacggacgtcgttttcgtcgttttcgtttcgttcgtcgcgtcgcgcgtttttgttcggtatgtcggcggtcgtggcgtgcgtggattatttcgtcgtcgacgtgtttatggttattttttcgggcgtcgtggtgtatcgcgggcggttcggtttcgagggcgcgggtttcgtcgtcggtttggatgtgcgcgcggcgcgtcgcgaggtcgttttattcgggatttcggggttattttcgtcgtttttcgtcgtttttggttcgggtttcggcgtcgtcgcggcgttttatttgttggtcgttagtattttggtcgatttgcgcggcggattcggagtcgtttcggggggcgtttcgttcgtttttttttttttagtcgtttcgttttcgttttcgggtcgcgttttcggcgtcgcgtttttcgtcgtcgttaagagttatcgttgttttttttcggattgcgttaaagtttattataagttttcgtatttaaagtcgtatttgcggacgtatataggtgagtgtagtcgcgatttcggtttttgcgggggcggtcgtttgagatttttttttcgttaggatttcgaaattgcgtggcgcgtggggggcggggaggggggcgcgttcgggtcgtcgtcgcgtcggtcggtagggcggggtttcggtgggtggggcgcgcgcggggggcgtggcggttacgcggtcgggcggcgagcggatggtt

SEQ ID NO: 13492 - DNA, 1521 bp, Artificial Sequence
  chemically treated genomic DNA (Homo sapiens) CpG-island No: 13492
aaccatccgctcgccgcccgaccgcgtaaccgccacgccccccgcgcgcgccccacccaccgaaaccccgccctaccgaccgacgcgacgacgacccgaacgcgcccccctccccgccccccacgcgccacgcaatttcgaaatcctaacgaaaaaaaaatctcaaacgaccgcccccgcaaaaaccgaaatcgcgactacactcacctatatacgtccgcaaatacgactttaaatacgaaaacttataataaactttaacgcaatccgaaaaaaaacaacgataactcttaacgacgacgaaaaacgcgacgccgaaaacgcgacccgaaaacgaaaacgaaacgactaaaaaaaaaaaaacgaacgaaacgccccccgaaacgactccgaatccgccgcgcaaatcgaccaaaatactaacgaccaacaaataaaacgccgcgacgacgccgaaacccgaaccaaaaacgacgaaaaacgacgaaaataaccccgaaatcccgaataaaacgacctcgcgacgcgccgcgcgcacatccaaaccgacgacgaaacccgcgccctcgaaaccgaaccgcccgcgatacaccacgacgcccgaaaaaataaccataaacacgtcgacgacgaaataatccacgcacgccacgaccgccgacataccgaacaaaaacgcgcgacgcgacgaacgaaacgaaaacgacgaaaacgacgtccgtccgaccgacgacgactactcgaatacgaaaaacgaaaaaaaaaaaaaaaaaaacccgacgcgcgccgccgccgccgcccgcgctcgacctaccccgccccgcctaacgcgtcctaacgcaccgaaacccgcgaaaacgaccacaacccgccccgcccgaaaaacgccccctcgaaacgccgcaaccacgccccccgcccgacgcgccctccaccactctccgaaccgcgcgcgaccgccgaaaacgaaactcgaaccgaaaaaacccgccccccgacgcgcccactccgacctccgccaacgcctaacgtcttaaacccgaaacgcgccttctccgcgctaaaatacaaaaccgaaaaccccgccccctcccgacgcgccccactccaacgcgcgcccccgtaccctttcccgaaacaccaccccctcaaaccgaaacgaaaaaccgaaaaccccgccccctctccgacacgcccctccttccgaaaacgcgccccgccccatcccgacacgcccctccctcccaaaacgcgccccgcctcctcgctaacgcgcccaccccacgccgaaacgcgcgaccgacgaaaacccgccccctccccgaatacttccctcctaaccccgaacgcgcccccgttcgcgataaaaaaaaactccgatccccacgtaaccgaaattaaaaaaatacgaaaacgaccgaccccgcccccaaaccacgtacgcgacccttcccccctcttctcccgacctaaaaccctactttaaccccgcactcaaacatctactcgtcctcttctcta

SEQ ID NO: 13493 - DNA, 1092 bp, Artificial Sequence
  chemically treated genomic DNA (Homo sapiens) CpG-island No: 13493
gagcgcgggttagggcggtgggggacgttggggtttcgagtgtagggttaacggggtgttgcggcggtggggttttgagtgtgggggttagtttgcggggcggttagacgggttggggggcgttggggttcggagtacggggtcggtagggcgtaggagggtagtggatatcgagtgtgggggcgggggcgtcgggggttattgggggcgtttagggttagggtgtagggggcgaaggggtcggggcgggcgcgcgcgtcgttattttggtttcgtcgtggtcgggttcgcgggtagcgtttgggcggtcggttcggttttagtagcgtagcggtattttcgtttcgggtttcgcgttttttcgcgtttcggtttcggtgttcgtttgggttttcgtttcggttttcgcgtcgtttgggtcggttttcgtatgttcgggacgggaggcgtcgggttcgtcgcgtttcgtcgcgttcgtttcggggttcgcgcgttttacgtcgttagcgtttgttagcggggggcggtagttatacgcgttttattgcgtagtcgcggttacggcgtcgggggcgcgcgtcgtcgacgttatagcgcggggcggggttaatattcggttgggcgtttttcgcgtcgttttgcgataacggatggcgtcgcgcgacggttacggcgttttgcggtcgttacgaggtcgtcgggtcgttgttcgcgggggatatcgaaagcgcgtggtcgcgagggcgcgcgcgggtaggaaagggggtttaacggtttttatatttttttaggggcgggtttttcgtcgttcgttttttttcgttcgttgttgttatggcgacgcgtggttggtcgttttggtatcgttttgtcgtcgtgtgttacgttatagtttcgttatttgacgttacggacgggcggcgtcgcgggatgtttcgtgcgtggggcggtggcgggcgcggcgcggggaggcggcgggttgcgcgcgttaggtcgcgaggttttcgggataggcgttggaaggggcgattggttagaaaatgagttggtttagggtaagagggtttttttatttggtttttttgggcgagg

SEQ ID NO: 13494 - DNA, 1092 bp, Artificial Sequence
  chemically treated genomic DNA (Homo sapiens) CpG-island No: 13494
cctcgcccaaaaaaaccaaataaaaaaaccctcttaccctaaaccaactcattttctaaccaatcgccccttccaacgcctatcccgaaaacctcgcgacctaacgcgcgcaacccgccgcctccccgcgccgcgcccgccaccgccccacgcacgaaacatcccgcgacgccgcccgtccgtaacgtcaaataacgaaactataacgtaacacacgacgacaaaacgataccaaaacgaccaaccacgcgtcgccataacaacaacgaacgaaaaaaaacgaacgacgaaaaacccgcccctaaaaaaatataaaaaccgttaaaccccctttcctacccgcgcgcgccctcgcgaccacgcgctttcgatatcccccgcgaacaacgacccgacgacctcgtaacgaccgcaaaacgccgtaaccgtcgcgcgacgccatccgttatcgcaaaacgacgcgaaaaacgcccaaccgaatattaaccccgccccgcgctataacgtcgacgacgcgcgcccccgacgccgtaaccgcgactacgcaataaaacgcgtataactaccgccccccgctaacaaacgctaacgacgtaaaacgcgcgaaccccgaaacgaacgcgacgaaacgcgacgaacccgacgcctcccgtcccgaacatacgaaaaccgacccaaacgacgcgaaaaccgaaacgaaaacccaaacgaacaccgaaaccgaaacgcgaaaaaacgcgaaacccgaaacgaaaataccgctacgctactaaaaccgaaccgaccgcccaaacgctacccgcgaacccgaccacgacgaaaccaaaataacgacgcgcgcgcccgccccgaccccttcgccccctacaccctaaccctaaacgcccccaataacccccgacgcccccgcccccacactcgatatccactaccctcctacgccctaccgaccccgtactccgaaccccaacgccccccaacccgtctaaccgccccgcaaactaacccccacactcaaaaccccaccgccgcaacaccccgttaaccctacactcgaaaccccaacgtcccccaccgccctaacccgcgctc

SEQ ID NO: 13495 - DNA, 1092 bp, Artificial Sequence
  chemically treated genomic DNA (Homo sapiens) CpG-island No: 13495
tttcgtttaggaaagttagatggaaaaatttttttgttttgaattagtttattttttggttagtcgttttttttagcgtttgtttcggaaatttcgcggtttagcgcgcgtagttcgtcgttttttcgcgtcgcgttcgttatcgttttacgtacggaatatttcgcggcgtcgttcgttcgtgacgttaggtggcgagattgtgacgtaatatacggcggtagggcggtgttaggacgattagttacgcgtcgttatggtaatagcgggcggggaggggcgggcggcggaaggttcgtttttagaagggtgtggaaatcgttagatttttttttttgttcgcgcgcgttttcgcggttacgcgttttcggtgtttttcgcgggtagcggttcggcggtttcgtagcggtcgtaaaacgtcgtggtcgtcgcgcggcgttattcgttgtcgtaaagcggcgcgagaaacgtttagtcgggtgttggtttcgtttcgcgttgtgacgtcggcggcgcgcgttttcggcgtcgtggtcgcggttgcgtagtggggcgcgtatggttgtcgtttttcgttggtagacgttggcggcgtaaggcgcgcgggtttcggagcgggcgcggcggagcgcggcgagttcggcgtttttcgtttcgaatatgcggaggtcggtttaggcggcgcgggagtcggagcgggggtttaagcgggtatcggagtcggagcgcgagggggcgcggggttcggagcgggggtgtcgttgcgttgttgaggtcgggtcggtcgtttagacgttgttcgcgggttcggttacggcggagttaaggtaacgacgcgcgcgttcgtttcggttttttcgttttttgtattttggttttgggcgtttttagtgattttcggcgttttcgtttttatattcggtgtttattgtttttttgcgttttgtcgatttcgtgtttcggattttagcgttttttaattcgtttaatcgtttcgtaagttgatttttatatttagggttttatcgtcgtaatatttcgttgattttgtattcgggattttagcgttttttatcgttttaattcgcgttt

SEQ ID NO: 13496 - DNA, 1092 bp, Artificial Sequence
  chemically treated genomic DNA (Homo sapiens) CpG-island No: 13496
aaacgcgaattaaaacgataaaaaacgctaaaatcccgaatacaaaatcaacgaaatattacgacgataaaaccctaaatataaaaatcaacttacgaaacgattaaacgaattaaaaaacgctaaaatccgaaacacgaaatcgacaaaacgcaaaaaaacaataaacaccgaatataaaaacgaaaacgccgaaaatcactaaaaacgcccaaaaccaaaatacaaaaaacgaaaaaaccgaaacgaacgcgcgcgtcgttaccttaactccgccgtaaccgaacccgcgaacaacgtctaaacgaccgacccgacctcaacaacgcaacgacacccccgctccgaaccccgcgccccctcgcgctccgactccgatacccgcttaaacccccgctccgactcccgcgccgcctaaaccgacctccgcatattcgaaacgaaaaacgccgaactcgccgcgctccgccgcgcccgctccgaaacccgcgcgccttacgccgccaacgtctaccaacgaaaaacgacaaccatacgcgccccactacgcaaccgcgaccacgacgccgaaaacgcgcgccgccgacgtcacaacgcgaaacgaaaccaacacccgactaaacgtttctcgcgccgctttacgacaacgaataacgccgcgcgacgaccacgacgttttacgaccgctacgaaaccgccgaaccgctacccgcgaaaaacaccgaaaacgcgtaaccgcgaaaacgcgcgcgaacaaaaaaaaaaatctaacgatttccacacccttctaaaaacgaaccttccgccgcccgcccctccccgcccgctattaccataacgacgcgtaactaatcgtcctaacaccgccctaccgccgtatattacgtcacaatctcgccacctaacgtcacgaacgaacgacgccgcgaaatattccgtacgtaaaacgataacgaacgcgacgcgaaaaaacgacgaactacgcgcgctaaaccgcgaaatttccgaaacaaacgctaaaaaaaacgactaaccaaaaaataaactaattcaaaacaaaaaaatttttccatctaactttcctaaacgaaa

SEQ ID NO: 13497 - DNA, 867 bp, Artificial Sequence
  chemically treated genomic DNA (Homo sapiens) CpG-island No: 13497
agggcggtcgtagaagggtatcgttggtacggggtggttttaatgatcgagtttaggaaagttcgattcgtacggaaggtagtattcgtgtttttcgttggaggcggtatgtgtttttgaaatttacggttaggtttgtgcggaagaaatcgaggttcggaagtttaggaggggcgttttacggtcgggagcgggaagggttcggaggtaggagggcggcgtttacgtgtcggggtttagttagcggtattgtttttttagtatttcgcggaatatttggaagcggtggttgaggtcgggtcgtgcgtggatgcggaagcgggtgtttagggcgtcgtcgggcgagggcgtatcgtagaagacgcgtaggatgcgtgcgtgtattagggttatggcgtatatggcgtagggttcgcgggttacgtataggtcgtagttagtgtataggtaggggaggtcgttttcgtttgcgtttagtttacgtacggcgtttgcgcggacggtttggggggtagcggtcggggcgaaggagtaggcggggaagggtttgaagtcgtaggtgtcgcggttttggtcgcgcgttacgaggtttacgtatattatgacggcgtgtaggagggggttgttcgcgtagttgtagtcgtggtcggtggttagtacgcggttcgaggtcgggtttattattacggtttttacggttcgtaagtttcgcgttgttgttcgtcgggtcgtttatatcgttcgttttatgtggttttgtatggcggcgcgtttttgcgtggagaagagtcgtttagttagggcgttggttatttgtttgttttcgtggaaggacgtgggttagtgggttcgggttttttcgaattg

SEQ ID NO: 13498 - DNA, 867 bp, Artificial Sequence
  chemically treated genomic DNA (Homo sapiens) CpG-island No: 13498
caattcgaaaaaacccgaacccactaacccacgtccttccacgaaaacaaacaaataaccaacgccctaactaaacgactcttctccacgcaaaaacgcgccgccatacaaaaccacataaaacgaacgatataaacgacccgacgaacaacaacgcgaaacttacgaaccgtaaaaaccgtaataataaacccgacctcgaaccgcgtactaaccaccgaccacgactacaactacgcgaacaaccccctcctacacgccgtcataatatacgtaaacctcgtaacgcgcgaccaaaaccgcgacacctacgacttcaaacccttccccgcctactccttcgccccgaccgctaccccccaaaccgtccgcgcaaacgccgtacgtaaactaaacgcaaacgaaaacgacctcccctacctatacactaactacgacctatacgtaacccgcgaaccctacgccatatacgccataaccctaatacacgcacgcatcctacgcgtcttctacgatacgccctcgcccgacgacgccctaaacacccgcttccgcatccacgcacgacccgacctcaaccaccgcttccaaatattccgcgaaatactaaaaaaacaataccgctaactaaaccccgacacgtaaacgccgccctcctacctccgaacccttcccgctcccgaccgtaaaacgcccctcctaaacttccgaacctcgatttcttccgcacaaacctaaccgtaaatttcaaaaacacataccgcctccaacgaaaaacacgaatactaccttccgtacgaatcgaactttcctaaactcgatcattaaaaccaccccgtaccaacgatacccttctacgaccgccct

SEQ ID NO: 13499 - DNA, 867 bp, Artificial Sequence
  chemically treated genomic DNA (Homo sapiens) CpG-island No: 13499
tagttcgaggaggttcgggtttattggtttacgtttttttacgaggataagtaggtgattagcgttttggttgggcggtttttttttacgtaggagcgcgtcgttatgtagagttatatggagcgggcggtgtgggcggttcggcgggtagtagcgcggggtttgcgggtcgtgggggtcgtggtagtggattcggtttcggatcgcgtgttggttatcggttacgattgtagttgcgcggataatttttttttgtacgtcgttatggtgtgcgtggatttcgtggcgcgcggttagggtcgcggtatttacgattttagattttttttcgtttgttttttcgtttcggtcgttgttttttaggtcgttcgcgtaggcgtcgtgcgtaaattggacgtagacgaggacggttttttttatttgtgtattggttacgatttgtacgtgattcgcgagttttgcgttatgtgcgttatggttttggtgtacgtacgtattttgcgcgttttttacggtgcgttttcgttcgacggcgttttgggtattcgttttcgtatttacgtacggttcgattttaattatcgtttttaggtgtttcgcggggtgttggaggagtagtgtcgttggttggatttcgatacgtaggcgtcgtttttttgttttcggatttttttcgttttcggtcgtggggcgttttttttggattttcgggtttcgatttttttcgtataagtttgatcgtggattttagggatatatatcgtttttagcggggagtacgggtgttgtttttcgtgcggatcgagtttttttggattcggttattggggttatttcgtgttagcggtgtttttttgcggtcgtttt

SEQ ID NO: 13500 - DNA, 867 bp, Artificial Sequence
  chemically treated genomic DNA (Homo sapiens) CpG-island No: 13500
aaaacgaccgcaaaaaaacaccgctaacacgaaataaccccaataaccgaatccaaaaaaactcgatccgcacgaaaaacaacacccgtactccccgctaaaaacgatatatatccctaaaatccacgatcaaacttatacgaaaaaaatcgaaacccgaaaatccaaaaaaaacgccccacgaccgaaaacgaaaaaaatccgaaaacaaaaaaacgacgcctacgtatcgaaatccaaccaacgacactactcctccaacaccccgcgaaacacctaaaaacgataattaaaatcgaaccgtacgtaaatacgaaaacgaatacccaaaacgccgtcgaacgaaaacgcaccgtaaaaaacgcgcaaaatacgtacgtacaccaaaaccataacgcacataacgcaaaactcgcgaatcacgtacaaatcgtaaccaatacacaaataaaaaaaaccgtcctcgtctacgtccaatttacgcacgacgcctacgcgaacgacctaaaaaacaacgaccgaaacgaaaaaacaaacgaaaaaaaatctaaaatcgtaaataccgcgaccctaaccgcgcgccacgaaatccacgcacaccataacgacgtacaaaaaaaaattatccgcgcaactacaatcgtaaccgataaccaacacgcgatccgaaaccgaatccactaccacgacccccacgacccgcaaaccccgcgctactacccgccgaaccgcccacaccgcccgctccatataactctacataacgacgcgctcctacgtaaaaaaaaaccgcccaaccaaaacgctaatcacctacttatcctcgtaaaaaaacgtaaaccaataaacccgaacctcctcgaacta

SEQ ID NO: 13501 - DNA, 629 bp, Artificial Sequence
  chemically treated genomic DNA (Homo sapiens) CpG-island No: 13501
ttaggacgttagtcgcgcggtcgttttgtgtttgtagattttcgtttcgcgcgtttttcgcgttattttcggggcggtggtgagaacgaggtttattttcgttcgtggggggagttgcggcggtggcggtgtaggaggtcgggtaggggtgcggagggatcgacggacgtacgggcgggcggtcgggagttatggagcgcggttttggggttcgggggcgcgggtcggggtggtgagtgtcgggtaggggcgggggcgggcgcggtcgcgcggggtttcgggtcgggtttcgagggtttgatagttcggttggacgttttcgagatttttgtagttttagggttttcgcgggttttgttcgaggagtttagagtaggggcgcggatcgcggatgagcgtttgtgattgggaaagttttgtttttatttatttagtttttcggcgtgggttgcgtttttatttttttgcggacgcggtttttgttttcggggagtattcgttcgagtcgcggatttcgtttttttgtttcgaaattgtttttagttcgataaacgtttcggtttttcgttttttaaggtagtttttaggggttttttcgagttttgttttttaattagtttttagtcgtt

SEQ ID NO: 13502 - DNA, 629 bp, Artificial Sequence
  chemically treated genomic DNA (Homo sapiens) CpG-island No: 13502
aacgactaaaaactaattaaaaaacaaaactcgaaaaaacccctaaaaactaccttaaaaaacgaaaaaccgaaacgtttatcgaactaaaaacaatttcgaaacaaaaaaacgaaatccgcgactcgaacgaatactccccgaaaacaaaaaccgcgtccgcaaaaaaataaaaacgcaacccacgccgaaaaactaaataaataaaaacaaaactttcccaatcacaaacgctcatccgcgatccgcgcccctactctaaactcctcgaacaaaacccgcgaaaaccctaaaactacaaaaatctcgaaaacgtccaaccgaactatcaaaccctcgaaacccgacccgaaaccccgcgcgaccgcgcccgcccccgcccctacccgacactcaccaccccgacccgcgcccccgaaccccaaaaccgcgctccataactcccgaccgcccgcccgtacgtccgtcgatccctccgcacccctacccgacctcctacaccgccaccgccgcaactccccccacgaacgaaaataaacctcgttctcaccaccgccccgaaaataacgcgaaaaacgcgcgaaacgaaaatctacaaacacaaaacgaccgcgcgactaacgtcctaa

SEQ ID NO: 13503 - DNA, 629 bp, Artificial Sequence
  chemically treated genomic DNA (Homo sapiens) CpG-island No: 13503
agcgattgggagttggttgggaagtagggttcgggagggtttttgggagttgttttggggggcgagaggtcgaagcgtttgtcggattgggggtagtttcggggtaaaagagcggaattcgcggttcggacgggtgtttttcgaaggtaagggtcgcgttcgtaggagggtgggagcgtaatttacgtcggagggttgaatggatggggatagggtttttttaattatagacgtttattcgcggttcgcgtttttgttttgggtttttcgggtaggattcgcggaagttttgggattgtaggggtttcggggacgtttaatcgggttgttaggttttcgaggttcggttcgggatttcgcgcggtcgcgttcgttttcgtttttgttcggtatttattatttcggttcgcgttttcgggttttagggtcgcgttttatggttttcggtcgttcgttcgtgcgttcgtcggttttttcgtatttttgttcggttttttgtatcgttatcgtcgtagttttttttacggacggaagtgagtttcgtttttattatcgtttcggaagtgacgcgaggagcgcgcggggcgggggtttgtaggtatagagcgatcgcgcgattagcgttttgg

SEQ ID NO: 13504 - DNA, 629 bp, Artificial Sequence
  chemically treated genomic DNA (Homo sapiens) CpG-island No: 13504
ccaaaacgctaatcgcgcgatcgctctatacctacaaacccccgccccgcgcgctcctcgcgtcacttccgaaacgataataaaaacgaaactcacttccgtccgtaaaaaaaactacgacgataacgatacaaaaaaccgaacaaaaatacgaaaaaaccgacgaacgcacgaacgaacgaccgaaaaccataaaacgcgaccctaaaacccgaaaacgcgaaccgaaataataaataccgaacaaaaacgaaaacgaacgcgaccgcgcgaaatcccgaaccgaacctcgaaaacctaacaacccgattaaacgtccccgaaacccctacaatcccaaaacttccgcgaatcctacccgaaaaacccaaaacaaaaacgcgaaccgcgaataaacgtctataattaaaaaaaccctatccccatccattcaaccctccgacgtaaattacgctcccaccctcctacgaacgcgacccttaccttcgaaaaacacccgtccgaaccgcgaattccgctcttttaccccgaaactacccccaatccgacaaacgcttcgacctctcgccccccaaaacaactcccaaaaaccctcccgaaccctacttcccaaccaactcccaatcgct

SEQ ID NO: 13505 - DNA, 651 bp, Artificial Sequence
  chemically treated genomic DNA (Homo sapiens) CpG-island No: 13505
cgcgcgcgtcggaggtcgcggttgattttgtttcggcgtcgttaggtacggtattagttcggatagtattattttgtacgggtagagtatcggtacggtgtttatcgtggatttggtttcgcgttacgagtgtgtcgcggtggtgttgtattcgtcgtttatttcgggtatgcgcgtcgtttttttcgatattaagaagatttattgtttcgacgttttttttaagtgagcggttcgggcggggacgggggcggggcggggttcgggtcgggcgcgaagttttatcggttttacgattttttcgtagtatcgagaaggtgtttaagattacgtttttcgtgtttattatttacggtacggaggacgaggtgatcgatttttcgtacgggttggcgttttacgagcgttgttttaaggcggtggagtcgttgtgggtggagggcgtcgggtataacgatatcgagttttatagttagtatttggagcgtttgcgtcgttttattttttaggagttgtttagttagcgcgtttagcggcggttttaatcggtcggattttagtaataaggcggttttcggattttatttcgcgtcggtttttatttaggggttgtatgtggatttttcgggcggtttaggggatttcgtttcg

SEQ ID NO: 13506 - DNA, 651 bp, Artificial Sequence
  chemically treated genomic DNA (Homo sapiens) CpG-island No: 13506
cgaaacgaaatcccctaaaccgcccgaaaaatccacatacaacccctaaataaaaaccgacgcgaaataaaatccgaaaaccgccttattactaaaatccgaccgattaaaaccgccgctaaacgcgctaactaaacaactcctaaaaaataaaacgacgcaaacgctccaaatactaactataaaactcgatatcgttatacccgacgccctccacccacaacgactccaccgccttaaaacaacgctcgtaaaacgccaacccgtacgaaaaatcgatcacctcgtcctccgtaccgtaaataataaacacgaaaaacgtaatcttaaacaccttctcgatactacgaaaaaatcgtaaaaccgataaaacttcgcgcccgacccgaaccccgccccgcccccgtccccgcccgaaccgctcacttaaaaaaaacgtcgaaacaataaatcttcttaatatcgaaaaaaacgacgcgcatacccgaaataaacgacgaatacaacaccaccgcgacacactcgtaacgcgaaaccaaatccacgataaacaccgtaccgatactctacccgtacaaaataatactatccgaactaataccgtacctaacgacgccgaaacaaaatcaaccgcgacctccgacgcgcgcg

SEQ ID NO: 13507 - DNA, 651 bp, Artificial Sequence
  chemically treated genomic DNA (Homo sapiens) CpG-island No: 13507
cggggcggggttttttgggtcgttcggggggtttatatgtagtttttgggtgggggtcggcgcggggtgaggttcgggggtcgttttattgttgaggttcggtcggttggggtcgtcgttaggcgcgttggttgggtagtttttgggagatgaagcgacgtaggcgttttaggtattggttgtagagttcgatgtcgttgtgttcggcgttttttatttatagcggttttatcgttttggggtagcgttcgtagagcgttagttcgtgcgagaagtcgattatttcgtttttcgtgtcgtggatgatgagtacgggagacgtgattttggatattttttcgatgttgcgggagggtcgtggagtcggtgagatttcgcgttcggttcgggtttcgtttcgttttcgttttcgttcgggtcgtttatttagggaaggcgtcgaagtagtaggtttttttggtgtcggggaaggcgacgcgtatgttcgaggtgagcggcgagtgtagtattatcgcggtatattcgtagcgcgaggttaggtttacggtgggtatcgtgtcgatgttttgttcgtataggatgatgttgttcgggttgatgtcgtatttggcggcgtcggagtagggttagtcgcggttttcgacgcgcgcg

SEQ ID NO: 13508 - DNA, 651 bp, Artificial Sequence
  chemically treated genomic DNA (Homo sapiens) CpG-island No: 13508
cgcgcgcgtcgaaaaccgcgactaaccctactccgacgccgccaaatacgacatcaacccgaacaacatcatcctatacgaacaaaacatcgacacgatacccaccgtaaacctaacctcgcgctacgaatataccgcgataatactacactcgccgctcacctcgaacatacgcgtcgccttccccgacaccaaaaaaacctactacttcgacgccttccctaaataaacgacccgaacgaaaacgaaaacgaaacgaaacccgaaccgaacgcgaaatctcaccgactccacgaccctcccgcaacatcgaaaaaatatccaaaatcacgtctcccgtactcatcatccacgacacgaaaaacgaaataatcgacttctcgcacgaactaacgctctacgaacgctaccccaaaacgataaaaccgctataaataaaaaacgccgaacacaacgacatcgaactctacaaccaatacctaaaacgcctacgtcgcttcatctcccaaaaactacccaaccaacgcgcctaacgacgaccccaaccgaccgaacctcaacaataaaacgacccccgaacctcaccccgcgccgacccccacccaaaaactacatataaaccccccgaacgacccaaaaaaccccgccccg

SEQ ID NO: 13509 - DNA, 758 bp, Artificial Sequence
  chemically treated genomic DNA (Homo sapiens) CpG-island No: 13509
gtcgcgcgattaggcggtggcgaggtcgggattttaagttgtatttagttagttttagttcgcggtttttttaagggggggcggtgttttagtttgggcgcgagaaggcgttgcgttacgtgcggggtcgtagtacggacggaagcggaagtggcggcgtgcgtgcggtagtggagacggcggcggcggtggttggcgttaggttgtggacgaagaggcggtttcggtggtaagtggcggtcgttgggatttagttaggtatcggttcggttcggttttgttttttttcggtcgtttttattttttttttcggtttcgagtttttcgtaggttcgtgggggtcgtcgcggggtcggggttgcgaggtagcgttcgtcgttttatggtaagcggtgttacgggacgttcggaaggaaatttcgttagagtaggggacgtttgggtttttggttgattacggggtttttgtacggttagggttttgcgatcgtagtgttttttttttgttttcggtcgtgcgtcgtgttttttagcgcggtttacgtttcggaatacgtttgttttttatgtttttcgaagagttttttcgtatttcgtgttttttgttcgttgttgtcgttgatttttgggcgttgcgttggtttagagcgtgttgttttttgacgtcgttagaatttgagttttttgcgagttgggatttcgtcgtgtttttattgtttttagtgtaaagtaattgtttgtaagagaataaaagtgtg

SEQ ID NO: 13510 - DNA, 758 bp, Artificial Sequence
  chemically treated genomic DNA (Homo sapiens) CpG-island No: 13510
cacacttttattctcttacaaacaattactttacactaaaaacaataaaaacacgacgaaatcccaactcgcaaaaaactcaaattctaacgacgtcaaaaaacaacacgctctaaaccaacgcaacgcccaaaaatcaacgacaacaacgaacaaaaaacacgaaatacgaaaaaactcttcgaaaaacataaaaaacaaacgtattccgaaacgtaaaccgcgctaaaaaacacgacgcacgaccgaaaacaaaaaaaaaacactacgatcgcaaaaccctaaccgtacaaaaaccccgtaatcaaccaaaaacccaaacgtcccctactctaacgaaatttccttccgaacgtcccgtaacaccgcttaccataaaacgacgaacgctacctcgcaaccccgaccccgcgacgacccccacgaacctacgaaaaactcgaaaccgaaaaaaaaaataaaaacgaccgaaaaaaaacaaaaccgaaccgaaccgatacctaactaaatcccaacgaccgccacttaccaccgaaaccgcctcttcgtccacaacctaacgccaaccaccgccgccgccgtctccactaccgcacgcacgccgccacttccgcttccgtccgtactacgaccccgcacgtaacgcaacgccttctcgcgcccaaactaaaacaccgcccccccttaaaaaaaccgcgaactaaaactaactaaatacaacttaaaatcccgacctcgccaccgcctaatcgcgcgac

SEQ ID NO: 13511 - DNA, 758 bp, Artificial Sequence
  chemically treated genomic DNA (Homo sapiens) CpG-island No: 13511
tatatttttgtttttttgtaagtagttgttttgtattggaggtaatgaagatacggcggagttttagttcgtagggagtttaggttttgacggcgttagaggataatacgttttggattagcgtagcgtttaagggttagcggtagtagcgagtagggggtacgggatgcggggaggtttttcgggaggtatgaaaggtagacgtgtttcgaaacgtgagtcgcgttgaggggtacggcgtacgatcggggatagaaggaagatattgcggtcgtaaagttttggtcgtgtaaaggtttcgtggttagttaggagtttaggcgttttttgttttagcgaggttttttttcgaacgtttcgtagtatcgtttattatggaacggcgggcgttgtttcgtagtttcgatttcgcggcggtttttacgggtttacgaggaattcgaggtcgagggaaggagtgagagcggtcggaaaggggtagggtcgagtcggatcggtatttggttgggttttagcggtcgttatttattatcgaggtcgttttttcgtttatagtttgacgttagttatcgtcgtcgtcgtttttattgtcgtacgtacgtcgttattttcgttttcgttcgtgttgcggtttcgtacgtgacgtagcgttttttcgcgtttagattgaagtatcgtttttttttaaaggggtcgcggattagagttagttggatgtagtttgggatttcggtttcgttatcgtttggtcgcgcgat

SEQ ID NO: 13512 - DNA, 758 bp, Artificial Sequence
  chemically treated genomic DNA (Homo sapiens) CpG-island No: 13512
atcgcgcgaccaaacgataacgaaaccgaaatcccaaactacatccaactaactctaatccgcgacccctttaaaaaaaaacgatacttcaatctaaacgcgaaaaaacgctacgtcacgtacgaaaccgcaacacgaacgaaaacgaaaataacgacgtacgtacgacaataaaaacgacgacgacgataactaacgtcaaactataaacgaaaaaacgacctcgataataaataacgaccgctaaaacccaaccaaataccgatccgactcgaccctacccctttccgaccgctctcactccttccctcgacctcgaattcctcgtaaacccgtaaaaaccgccgcgaaatcgaaactacgaaacaacgcccgccgttccataataaacgatactacgaaacgttcgaaaaaaaacctcgctaaaacaaaaaacgcctaaactcctaactaaccacgaaacctttacacgaccaaaactttacgaccgcaatatcttccttctatccccgatcgtacgccgtacccctcaacgcgactcacgtttcgaaacacgtctacctttcatacctcccgaaaaacctccccgcatcccgtaccccctactcgctactaccgctaacccttaaacgctacgctaatccaaaacgtattatcctctaacgccgtcaaaacctaaactccctacgaactaaaactccgccgtatcttcattacctccaatacaaaacaactacttacaaaaaaacaaaaatata

SEQ ID NO: 13513 - DNA, 528 bp, Artificial Sequence
  chemically treated genomic DNA (Homo sapiens) CpG-island No: 13513
  unsure (392, 436, 470)
ttttgtttgtatttttcgatttaagcggtggcgcgggaataagtttagtgtttggttcgtagggtgatattttttcggttagtaattcgacgttaaaaagcgaagattcgatcggcgcgtcggtaattagtagcggttttttcggcgtattaacgattttagcgtttggtgtattggaaggtagcgaatcgacgtttgcgttatagttcgttgttatagtttcgtcgataacgtttgtaatttcgtttgtaatggtgatatcgtaagtcgtttcgtaaagcgttagcggtaattttatggtgtaagtcggggtcgtaagcgattaggttcgtgcgtaatagtattaatagtaattgggatagaagttcggcgttttcggtcgcgtaatttanaatggcgcggtttggcggatttagtttggtttattcgttagtanagtcgaagttagtattttgtagttacgtttgtanatcgaagtttaattatagttatttattattatcgcgtagtagcgtaaagtaggtattt
